United States Patent Application Publication US 2007/0214517 A1 - sequence listing, part 62

SEQ ID NO: 81742 - protein, 312 aa, Arabidopsis thaliana
  peptide (1)..(312): Ceres Seq. ID no. 12661141
  misc_feature (1)..(312): Homolog of NCBI NO: 15238331 NR Description: glycosyl hydrolase family 1; protein id:
  misc_feature (1)..(312): Homolog of NCBI NO: 15241543 NR Description: glycosyl hydrolase family 1; protein id:
  misc_feature (1)..(312): Homolog of NCBI NO: 15224879 NR Description: glycosyl hydrolase family 1; protein id:
  misc_feature (1)..(180): Homolog of NCBI NO: 30682835 NR Description: glycosyl hydrolase family 1 [Arabidopsis thaliana]
  misc_feature (198)..(312): Homolog of NCBI NO: 30682835 NR Description: glycosyl hydrolase family 1 [Arabidopsis thaliana]
  misc_feature (1)..(306): Homolog of NCBI NO: 15232261 NR Description: glycosyl hydrolase family 1; protein id: supported by cDNA: gi_15028300, supported by cDNA: gi_21281078
  misc_feature (1)..(190): Homolog of NCBI NO: 25289508 NR Description: probable beta-glucosidase [imported] -
  misc_feature (1)..(312): Homolog of NCBI NO: 16757966 NR Description: amygdalin hydrolase isoform AH I precursor
  misc_feature (1)..(312): Homolog of NCBI NO: 7435445 NR Description: beta-glucosidase (EC 3.2.1.21) precursor isoform
  misc_feature (1)..(312): Homolog of NCBI NO: 15778634 NR Description: amygdalin hydrolase isoform AH I precursor
MTLNEPLTVVQQGYVAGVMAPGRCSKFTNPNCTAGNGATEPYIVGHNLILAHGEAVKVYREKYKASQKGQVGIALNAGWNLPYSESAEDRLAAARAMAFTFDYFMEPLVTGKYPIDMVNYVKGGRLPTFTAKQSKMLKGSYDFIGRNYYSSSYAKDVPCSSENVTLFSDPCASVTGEREGVPIGPKAASDWLLIYPKGIRDLLLYAKYKFKDPVMYITENGRDEASTGKIDLKDSERIDYYAQHLKMVQDAISIGANVKGFFAWSLLDNFEWATGYAVRFGLVYVDFNGGRKRYPKKSAKWFKKLLNEKKKN

SEQ ID NO: 81743 - DNA, 342 bp, Arabidopsis thaliana
  misc_feature (1)..(342): Ceres Seq. ID no. 12661169
  misc_feature: MA Experiment ID: 20000227 Result: Up-regulated in Transcription
  misc_feature: MA Experiment 20000227 PARAMETER Experiment Name: At_Root-Tips-vs-Tops_P Parameter: Tissue Value: Root Tips vs. Root Tops
  misc_feature: MA Experiment ID: 20000234 Result: Up-regulated in Transcription
  misc_feature: MA Experiment 20000234 PARAMETER Experiment Name: At_Siliques_P Parameter: Age (day) Value: 21
  misc_feature: MA Experiment 20000234 PARAMETER Experiment Name: At_Siliques_P Parameter: Organism Value: A. thaliana
  misc_feature: MA Experiment 20000234 PARAMETER Experiment Name: At_Siliques_P Parameter: Plant Line Value: WS
  misc_feature: MA Experiment 20000234 PARAMETER Experiment Name: At_Siliques_P Parameter: Tissue Value: Less Than 5mm Siliques vs. Whole Plant
  misc_feature: MA Experiment ID: 20000264 Result: Up-regulated in Transcription
  misc_feature: MA Experiment 20000264 PARAMETER Experiment Name: At_Open_Flower_P Parameter: Age (day) Value: 21
  misc_feature: MA Experiment 20000264 PARAMETER Experiment Name: At_Open_Flower_P Parameter: Plant Line Value: WS
  misc_feature: MA Experiment 20000264 PARAMETER Experiment Name: At_Open_Flower_P Parameter: Tissue Value: Open Flower vs. Whole Plant
  misc_feature: MA Experiment ID: 20000286 Result: Up-regulated in Transcription
  misc_feature: MA Experiment 20000286 PARAMETER Experiment Name: At_Open_Flower_P Parameter: Age (day) Value: 21
  misc_feature: MA Experiment 20000286 PARAMETER Experiment Name: At_Open_Flower_P Parameter: Plant Line Value: WS
  misc_feature: MA Experiment 20000286 PARAMETER Experiment Name: At_Open_Flower_P Parameter: Tissue Value: Half Open vs. Whole Plant
  misc_feature: MA Experiment ID: 20000451 Result: Down-regulated in Transcription
  misc_feature: MA Experiment 20000451 PARAMETER Experiment Name: At_CS6879_Shoots-Roots_P Parameter: Age (day) Value: 14
  misc_feature: MA Experiment 20000451 PARAMETER Experiment Name: At_CS6879_Shoots-Roots_P Parameter: Organism Value: A. thaliana
  misc_feature: MA Experiment 20000451 PARAMETER Experiment Name: At_CS6879_Shoots-Roots_P Parameter: Plant Line Value: CS6879 vs. WS
  misc_feature: MA Experiment 20000451 PARAMETER Experiment Name: At_CS6879_Shoots-Roots_P Parameter: Tissue Value: Roots
  misc_feature: MA Experiment ID: 20000573 Result: Up-regulated in Transcription
  misc_feature: MA Experiment 20000573 PARAMETER Experiment Name: At_100uM_ABA_Mutants__P Parameter: Organism Value: A. thaliana
  misc_feature: MA Experiment 20000573 PARAMETER Experiment Name: At_100uM_ABA_Mutants__P Parameter: Plant Line Value: CS22 vs. Ler wt
  misc_feature: MA Experiment 20000573 PARAMETER Experiment Name: At_100uM_ABA_Mutants__P Parameter: Timepoint (hr) Value: N/A
  misc_feature: MA Experiment 20000573 PARAMETER Experiment Name: At_100uM_ABA_Mutants__P Parameter: Tissue Value: Whole Plant
  misc_feature: MA Experiment 20000573 PARAMETER Experiment Name: At_100uM_ABA_Mutants__P Parameter: Treatment Value: None
  misc_feature: MA Experiment ID: 20000574 Result: Up-regulated in Transcription
  misc_feature: MA Experiment 20000574 PARAMETER Experiment Name: At_100uM_ABA_Mutants__P Parameter: Organism Value: A. thaliana
  misc_feature: MA Experiment 20000574 PARAMETER Experiment Name: At_100uM_ABA_Mutants__P Parameter: Plant Line Value: CS23 vs. Ler wt
  misc_feature: MA Experiment 20000574 PARAMETER Experiment Name: At_100uM_ABA_Mutants__P Parameter: Timepoint (hr) Value: N/A
  misc_feature: MA Experiment 20000574 PARAMETER Experiment Name: At_100uM_ABA_Mutants__P Parameter: Tissue Value: Whole Plant
  misc_feature: MA Experiment 20000574 PARAMETER Experiment Name: At_100uM_ABA_Mutants__P Parameter: Treatment Value: None
  misc_feature: MA Experiment ID: 20001557 Result: Up-regulated in Transcription
  misc_feature: MA Experiment 20001557 PARAMETER Experiment Name: At_Drought_Soil_Dry_P Parameter: Age (day) Value: 27
  misc_feature: MA Experiment 20001557 PARAMETER Experiment Name: At_Drought_Soil_Dry_P Parameter: Organism Value: A. thaliana
  misc_feature: MA Experiment 20001557 PARAMETER Experiment Name: At_Drought_Soil_Dry_P Parameter: Plant Line Value: WS
  misc_feature: MA Experiment 20001557 PARAMETER Experiment Name: At_Drought_Soil_Dry_P Parameter: Post Timepoint (hr) Value: 3
  misc_feature: MA Experiment 20001557 PARAMETER Experiment Name: At_Drought_Soil_Dry_P Parameter: Post-Treatment Value: Re-Water vs. No Drought
  misc_feature: MA Experiment 20001557 PARAMETER Experiment Name: At_Drought_Soil_Dry_P Parameter: Timepoint (day) Value: 13
  misc_feature: MA Experiment 20001557 PARAMETER Experiment Name: At_Drought_Soil_Dry_P Parameter: Treatment Value: Drought vs. No Drought
  misc_feature: MA Experiment ID: 20001558 Result: Up-regulated in Transcription
  misc_feature: MA Experiment 20001558 PARAMETER Experiment Name: At_Drought_Soil_Dry_P Parameter: Age (day) Value: 27
  misc_feature: MA Experiment 20001558 PARAMETER Experiment Name: At_Drought_Soil_Dry_P Parameter: Organism Value: A. thaliana
  misc_feature: MA Experiment 20001558 PARAMETER Experiment Name: At_Drought_Soil_Dry_P Parameter: Plant Line Value: WS
  misc_feature: MA Experiment 20001558 PARAMETER Experiment Name: At_Drought_Soil_Dry_P Parameter: Post Timepoint (hr) Value: 6
  misc_feature: MA Experiment 20001558 PARAMETER Experiment Name: At_Drought_Soil_Dry_P Parameter: Post-Treatment Value: Re-Water vs. No Drought
  misc_feature: MA Experiment 20001558 PARAMETER Experiment Name: At_Drought_Soil_Dry_P Parameter: Timepoint (day) Value: 13
  misc_feature: MA Experiment 20001558 PARAMETER Experiment Name: At_Drought_Soil_Dry_P Parameter: Treatment Value: Drought vs. No Drought
  misc_feature: MA Experiment ID: 20001560 Result: Up-regulated in Transcription
  misc_feature: MA Experiment 20001560 PARAMETER Experiment Name: At_Drought_Soil_Dry_P Parameter: Age (day) Value: 28
  misc_feature: MA Experiment 20001560 PARAMETER Experiment Name: At_Drought_Soil_Dry_P Parameter: Organism Value: A. thaliana
  misc_feature: MA Experiment 20001560 PARAMETER Experiment Name: At_Drought_Soil_Dry_P Parameter: Plant Line Value: WS
  misc_feature: MA Experiment 20001560 PARAMETER Experiment Name: At_Drought_Soil_Dry_P Parameter: Post Timepoint (hr) Value: None
  misc_feature: MA Experiment 20001560 PARAMETER Experiment Name: At_Drought_Soil_Dry_P Parameter: Post-Treatment Value: None
  misc_feature: MA Experiment 20001560 PARAMETER Experiment Name: At_Drought_Soil_Dry_P Parameter: Timepoint (day) Value: 14
  misc_feature: MA Experiment 20001560 PARAMETER Experiment Name: At_Drought_Soil_Dry_P Parameter: Treatment Value: Drought vs. No Drought
atggttctcttggtttcttaccaaggaagagagctaatcgtcacagaggaaagggtatgtctttttttcaaacttaggactgagaaggaaataactccaatgggaggattcgcacattacggtatagtgaaggatgactacttgatgattaagggttgctgcatgggtccaaagaagagagttgtgactcttcgtcagtcactgctaaggcagacttctcgtcttgcgatggaggtgattaatctcaagttcgtcgatacctcatcgaaggggggacatggtcacttccagaccagcgaggaaaaggccaagtattttggtcgtgctgcaagaaaggcttaa

SEQ ID NO: 81744 - protein, 113 aa, Arabidopsis thaliana
  peptide (1)..(113): Ceres Seq. ID no. 12661170
  misc_feature (26)..(111): Homolog of NCBI NO: 81658 NR Description: ribosomal protein L3.e (clone ARP2), cytosolic -
  misc_feature (26)..(111): Homolog of NCBI NO: 15220533 NR Description: ribosomal protein; protein id: At1g61580.1 thaliana] >gi|21542436|sp|P22738|RL3B_ARATH 60S ribosomal protein
  misc_feature (20)..(108): Homolog of NCBI NO: 33526877 NR Description: ribosomal protein L3 [Triticum aestivum]
  misc_feature (20)..(108): Homolog of NCBI NO: 548770 NR Description: 60S RIBOSOMAL PROTEIN L3 >gi|481228|pir||S38359
  misc_feature (20)..(108): Homolog of NCBI NO: 33526886 NR Description: ribosomal protein L3 [Triticum aestivum]
  misc_feature (26)..(108): Homolog of NCBI NO: 34105768 NR Description: ribosomal protein L3 [Triticum aestivum] ribosomal protein L3 [Triticum aestivum]
  misc_feature (26)..(111): Homolog of NCBI NO: 15218306 NR Description: ribosomal protein; protein id: At1g43170.1, by cDNA: 14534., supported by cDNA: gi_11935190, supported by gi_13487799, supported by cDNA: gi_13605656, supported by cDNA:
  misc_feature (26)..(111): Homolog of NCBI NO: 23397228 NR Description: putative ribosomal protein [Arabidopsis thaliana]
  misc_feature (26)..(108): Homolog of NCBI NO: 38327504 NR Description: ribosomal protein L3 [Lycopersicon esculentum]
  misc_feature (26)..(111): Homolog of NCBI NO: 81657 NR Description: ribosomal protein L3.e (clone ARP1), cytosolic -
MVLLVSYQGRELIVTEERVCLFFKLRTEKEITPMGGFAHYGIVKDDYLMIKGCCMGPKKRVVTLRQSLLRQTSRLAMEVINLKFVDTSSKGGHGHFQTSEEKAKYFGRAARKA

SEQ ID NO: 81745 - protein, 80 aa, Arabidopsis thaliana; identical to SEQ ID NO: 75889
  peptide (1)..(80): Ceres Seq. ID no. 12661171
  misc_feature (1)..(78): Homolog of NCBI NO: 81658 NR Description: ribosomal protein L3.e (clone ARP2), cytosolic -
  misc_feature (1)..(78): Homolog of NCBI NO: 15220533 NR Description: ribosomal protein; protein id: At1g61580.1 thaliana] >gi|21542436|sp|P22738|RL3B_ARATH 60S ribosomal protein
  misc_feature (1)..(75): Homolog of NCBI NO: 33526877 NR Description: ribosomal protein L3 [Triticum aestivum]
  misc_feature (1)..(75): Homolog of NCBI NO: 548770 NR Description: 60S RIBOSOMAL PROTEIN L3 >gi|481228|pir||S38359
  misc_feature (1)..(75): Homolog of NCBI NO: 33526886 NR Description: ribosomal protein L3 [Triticum aestivum]
  misc_feature (1)..(75): Homolog of NCBI NO: 34105768 NR Description: ribosomal protein L3 [Triticum aestivum] ribosomal protein L3 [Triticum aestivum]
  misc_feature (1)..(78): Homolog of NCBI NO: 15218306 NR Description: ribosomal protein; protein id: At1g43170.1, by cDNA: 14534., supported by cDNA: gi_11935190, supported by gi_13487799, supported by cDNA: gi_13605656, supported by cDNA:
  misc_feature (1)..(78): Homolog of NCBI NO: 23397228 NR Description: putative ribosomal protein [Arabidopsis thaliana]
  misc_feature (1)..(75): Homolog of NCBI NO: 38327504 NR Description: ribosomal protein L3 [Lycopersicon esculentum]
  misc_feature (1)..(78): Homolog of NCBI NO: 81657 NR Description: ribosomal protein L3.e (clone ARP1), cytosolic -

SEQ ID NO: 81746 - protein, 65 aa, Arabidopsis thaliana; identical to SEQ ID NO: 75890
  peptide (1)..(65): Ceres Seq. ID no. 12661172
  misc_feature (1)..(63): Homolog of NCBI NO: 81658 NR Description: ribosomal protein L3.e (clone ARP2), cytosolic -
  misc_feature (1)..(63): Homolog of NCBI NO: 15220533 NR Description: ribosomal protein; protein id: At1g61580.1 thaliana] >gi|21542436|sp|P22738|RL3B_ARATH 60S ribosomal protein
  misc_feature (1)..(60): Homolog of NCBI NO: 33526877 NR Description: ribosomal protein L3 [Triticum aestivum]
  misc_feature (1)..(60): Homolog of NCBI NO: 548770 NR Description: 60S RIBOSOMAL PROTEIN L3 >gi|481228|pir||S38359
  misc_feature (1)..(60): Homolog of NCBI NO: 33526886 NR Description: ribosomal protein L3 [Triticum aestivum]
  misc_feature (1)..(60): Homolog of NCBI NO: 34105768 NR Description: ribosomal protein L3 [Triticum aestivum] ribosomal protein L3 [Triticum aestivum]
  misc_feature (1)..(63): Homolog of NCBI NO: 15218306 NR Description: ribosomal protein; protein id: At1g43170.1, by cDNA: 14534., supported by cDNA: gi_11935190, supported by gi_13487799, supported by cDNA: gi_13605656, supported by cDNA:
  misc_feature (1)..(63): Homolog of NCBI NO: 23397228 NR Description: putative ribosomal protein [Arabidopsis thaliana]
  misc_feature (1)..(60): Homolog of NCBI NO: 38327504 NR Description: ribosomal protein L3 [Lycopersicon esculentum]
  misc_feature (1)..(63): Homolog of NCBI NO: 81657 NR Description: ribosomal protein L3.e (clone ARP1), cytosolic -

SEQ ID NO: 81747 - DNA, 1500 bp, Arabidopsis thaliana
  misc_feature (1)..(1500): Ceres Seq. ID no. 12661185
  misc_feature: MA Experiment ID: 20000171 Result: Up-regulated in Transcription
  misc_feature: MA Experiment 20000171 PARAMETER Experiment Name: At_42deg_Heat_P Parameter: Age (day) Value: 14
  misc_feature: MA Experiment 20000171 PARAMETER Experiment Name: At_42deg_Heat_P Parameter: Organism Value: A. thaliana
  misc_feature: MA Experiment 20000171 PARAMETER Experiment Name: At_42deg_Heat_P Parameter: Plant Line Value: WS
  misc_feature: MA Experiment 20000171 PARAMETER Experiment Name: At_42deg_Heat_P Parameter: Temperature (deg C) Value: 42 vs. 22
  misc_feature: MA Experiment 20000171 PARAMETER Experiment Name: At_42deg_Heat_P Parameter: Timepoint (hr) Value: 1
  misc_feature: MA Experiment 20000171 PARAMETER Experiment Name: At_42deg_Heat_P Parameter: Tissue Value: Aerial
  misc_feature: MA Experiment ID: 20000180 Result: Up-regulated in Transcription
  misc_feature: MA Experiment 20000180 PARAMETER Experiment Name: At_Germinating_Seeds_P Parameter: Age (hr) Value: 24 vs. 0
  misc_feature: MA Experiment 20000180 PARAMETER Experiment Name: At_Germinating_Seeds_P Parameter: Tissue Value: Germinating Seeds
  misc_feature: MA Experiment ID: 20000185 Result: Up-regulated in Transcription
  misc_feature: MA Experiment 20000185 PARAMETER Experiment Name: At_Roots__P Parameter: Age (day) Value: 7 vs. 21
  misc_feature: MA Experiment 20000185 PARAMETER Experiment Name: At_Roots__P Parameter: Organism Value: A. thaliana
  misc_feature: MA Experiment 20000185 PARAMETER Experiment Name: At_Roots__P Parameter: Tissue Value: Roots vs. Whole Plant
  misc_feature: MA Experiment ID: 20000265 Result: Up-regulated in Transcription
  misc_feature: MA Experiment 20000265 PARAMETER Experiment Name: At_Open_Flower_P Parameter: Age (day) Value: 21
  misc_feature: MA Experiment 20000265 PARAMETER Experiment Name: At_Open_Flower_P Parameter: Plant Line Value: WS
  misc_feature: MA Experiment 20000265 PARAMETER Experiment Name: At_Open_Flower_P Parameter: Tissue Value: Closed Flower vs. Whole Plant
  misc_feature: MA Experiment ID: 20000439 Result: Up-regulated in Transcription
  misc_feature: MA Experiment 20000439 PARAMETER Experiment Name: At_Roots__P Parameter: Age (day) Value: 14 vs. 21
  misc_feature: MA Experiment 20000439 PARAMETER Experiment Name: At_Roots__P Parameter: Organism Value: A. thaliana
  misc_feature: MA Experiment 20000439 PARAMETER Experiment Name: At_Roots__P Parameter: Tissue Value: Roots vs. Whole Plant
  misc_feature: MA Experiment ID: 20000453 Result: Up-regulated in Transcription
  misc_feature: MA Experiment 20000453 PARAMETER Experiment Name: At_100uM_ABA_P Parameter: Age (day) Value: 15
  misc_feature: MA Experiment 20000453 PARAMETER Experiment Name: At_100uM_ABA_P Parameter: Organism Value: A. thaliana
  misc_feature: MA Experiment 20000453 PARAMETER Experiment Name: At_100uM_ABA_P Parameter: Plant Line Value: WS
  misc_feature: MA Experiment 20000453 PARAMETER Experiment Name: At_100uM_ABA_P Parameter: Timepoint (hr) Value: 24
  misc_feature: MA Experiment 20000453 PARAMETER Experiment Name: At_100uM_ABA_P Parameter: Tissue Value: Aerial
  misc_feature: MA Experiment 20000453 PARAMETER Experiment Name: At_100uM_ABA_P Parameter: Treatment Value: 100uM ABA vs. No Treatment
  misc_feature: MA Experiment ID: 20000527 Result: Down-regulated in Transcription
  misc_feature: MA Experiment 20000527 PARAMETER Experiment Name: At_10percent_PEG_P Parameter: Age (day) Value: 20
  misc_feature: MA Experiment 20000527 PARAMETER Experiment Name: At_10percent_PEG_P Parameter: Organism Value: A. thaliana
  misc_feature: MA Experiment 20000527 PARAMETER Experiment Name: At_10percent_PEG_P Parameter: Plant Line Value: WS
  misc_feature: MA Experiment 20000527 PARAMETER Experiment Name: At_10percent_PEG_P Parameter: Timepoint (day) Value: 20
  misc_feature: MA Experiment 20000527 PARAMETER Experiment Name: At_10percent_PEG_P Parameter: Tissue Value: Whole Plant
  misc_feature: MA Experiment 20000527 PARAMETER Experiment Name: At_10percent_PEG_P Parameter: Treatment Value: 10percent PEG vs. No Treatment
  misc_feature: MA Experiment ID: 20001555 Result: Up-regulated in Transcription
  misc_feature: MA Experiment 20001555 PARAMETER Experiment Name: At_Drought_Soil_Dry_P Parameter: Age (day) Value: 24
  misc_feature: MA Experiment 20001555 PARAMETER Experiment Name: At_Drought_Soil_Dry_P Parameter: Organism Value: A. thaliana
  misc_feature: MA Experiment 20001555 PARAMETER Experiment Name: At_Drought_Soil_Dry_P Parameter: Plant Line Value: WS
  misc_feature: MA Experiment 20001555 PARAMETER Experiment Name: At_Drought_Soil_Dry_P Parameter: Post Timepoint (hr) Value: None
  misc_feature: MA Experiment 20001555 PARAMETER Experiment Name: At_Drought_Soil_Dry_P Parameter: Post-Treatment Value: None
  misc_feature: MA Experiment 20001555 PARAMETER Experiment Name: At_Drought_Soil_Dry_P Parameter: Timepoint (day) Value: 10
  misc_feature: MA Experiment 20001555 PARAMETER Experiment Name: At_Drought_Soil_Dry_P Parameter: Treatment Value: Drought vs. No Drought
  misc_feature: MA Experiment ID: 20001911 Result: Up-regulated in Transcription
  misc_feature: MA Experiment 20001911 PARAMETER Experiment Name: At_Drought_Reproduction_P Parameter: Age (day) Value: 40
  misc_feature: MA Experiment 20001911 PARAMETER Experiment Name: At_Drought_Reproduction_P Parameter: Organism Value: A. thaliana
  misc_feature: MA Experiment 20001911 PARAMETER Experiment Name: At_Drought_Reproduction_P Parameter: Plant Line Value: WS
  misc_feature: MA Experiment 20001911 PARAMETER Experiment Name: At_Drought_Reproduction_P Parameter: Timepoint (day) Value: 10
  misc_feature: MA Experiment 20001911 PARAMETER Experiment Name: At_Drought_Reproduction_P Parameter: Tissue Value: Flowers
  misc_feature: MA Experiment 20001911 PARAMETER Experiment Name: At_Drought_Reproduction_P Parameter: Treatment Value: Drought vs. No Drought
atggcagaactcatcatcgttgactttcaaaacatatctatcttcatcctcttatgtctcttctcattcctttgttacgctctcttcttcaagaaaccaaaaggctttgacctgcctccgagccctccttctctaccaatcatcggtcatcttcaccatcttctctcatcatctctaccacacaagtcctttcaaaaactctccttcaagtatggacctcttctccatctccgcatctttaatttccccatggtcctcgtctcatcagcctcaatggcctacgaggtcttcaggacaaacgacgtaaacgtctcgtatcgctttgtcccagtcaacaaagactctctagtgttcggatcttcaggattcgtaaccgctccttatggagattactggaagttcatgaagaagctcatatccacgaaactactccgaccacatgcactcgagctgtcgaaaggtaaccgtgcagaggagctacgtcggttttgccttgatctgcaaggtaaggcgaggaagaaggagagcgttgagatcggtaaagtagcactaaagctcactaacaacatcatatgtaggatgagcatgggaaggagttgttcagagaagaacggtgtagcggagagagcaagggaattggttaacaaatcctttgccttatcagtgaagctcttcttttcaaacatgttcagaaaagatataatgggagtttctcgtgaattcgacgagtttcttgagaggattctagtggaacacgaggagaaccttgagggggatcaagatagggacatgattgatcatttgttggaagcttatagaaacgaagaagcagaatataagatcactagaaaacagatcaagtctttaattgtggaaatttttcttggaggcactgacagctcggcgcagacgatacaatggactatggcggagatacttaacaaccccggcgttctcgagaaattaagagcagaaatcgattccgttgtggggggaaaaaggttgattcaagaatcagatcttccaaacctcccttatttgcaagctgttgttaaagaagggctaagattgcatccctcggctcctgtcttgttaagggtatttggagaaagttgcgaggtcaaagagttctacgtaccggagaaaacaacacttgttgttaatctctatgctgtgaatagagatcctgattcttgggaagatcctgatatgtttaagccagagaggtttttagtttcttcgatatcaggagatgaagaaaagataagagagcaagccgtgaagtatgttacttttggaggtggaaggaggacatgtcccgcggtaaaactagctcatatctttatggaaactgcgattggagcgatggtgcagtgttttgactggagaattaaaggagagaaagtatacatggaagaggctgtttcaggacttagtttgaaaatggctcatccgcttaagtgcactcctgttgttcggttcgaccctttcagcttttga

SEQ ID NO: 81748 - protein, 499 aa, Arabidopsis thaliana
  peptide (1)..(499): Ceres Seq. ID no. 12661186
  misc_feature (1)..(499): Homolog of NCBI NO: 15239007 NR Description: cytochrome p450, putative; protein id: [Arabidopsis thaliana] >gi|9759016|dbj|BAB09329.1| cytochrome
  misc_feature (16)..(499): Homolog of NCBI NO: 15231047 NR Description: cytochrome P450, putative; protein id: At3g20090.1
  misc_feature (1)..(497): Homolog of NCBI NO: 9294003 NR Description: cytochrome P450-like protein [Arabidopsis
  misc_feature (1)..(499): Homolog of NCBI NO: 15231052 NR Description: cytochrome p450 family; protein id: At3g20130.1
  misc_feature (5)..(496): Homolog of NCBI NO: 15233794 NR Description: cytochrome p450 family; protein id: At4g15360.1
  misc_feature (1)..(493): Homolog of NCBI NO: 30685997 NR Description: cytochrome P450 family [Arabidopsis thaliana]
  misc_feature (16)..(493): Homolog of NCBI NO: 15225585 NR Description: cytochrome p450 family; protein id: At2g14100.1
  misc_feature (9)..(497): Homolog of NCBI NO: 15231049 NR Description: cytochrome p450 family; protein id: At3g20100.1, by cDNA: 149380., supported by cDNA: gi_15215771 [Arabidopsis
  misc_feature (9)..(497): Homolog of NCBI NO: 21553521 NR Description: cytochrome P450, putative [Arabidopsis thaliana]
  misc_feature (35)..(496): Homolog of NCBI NO: 9293969 NR Description: cytochrome P450-like protein [Arabidopsis
MAELIIVDFQNISIFILLCLFSFLCYALFFKKPKGFDLPPSPPSLPIIGHLHHLLSSSLPHKSFQKLSFKYGPLLHLRIFNFPMVLVSSASMAYEVFRTNDVNVSYRFVPVNKDSLVFGSSGFVTAPYGDYWKFMKKLISTKLLRPHALELSKGNRAEELRRFCLDLQGKARKKESVEIGKVALKLTNNIICRMSMGRSCSEKNGVAERARELVNKSFALSVKLFFSNMFRKDIMGVSREFDEFLERILVEHEENLEGDQDRDMIDHLLEAYRNEEAEYKITRKQIKSLIVEIFLGGTDSSAQTIQWTMAEILNNPGVLEKLRAEIDSVVGGKRLIQESDLPNLPYLQAVVKEGLRLHPSAPVLLRVFGESCEVKEFYVPEKTTLVVNLYAVNRDPDSWEDPDMFKPERFLVSSISGDEEKIREQAVKYVTFGGGRRTCPAVKLAHIFMETAIGAMVQCFDWRIKGEKVYMEEAVSGLSLKMAHPLKCTPVVRFDPFSF

SEQ ID NO: 81749 - protein, 416 aa, Arabidopsis thaliana
  peptide (1)..(416): Ceres Seq. ID no. 12661187
  misc_feature (1)..(416): Homolog of NCBI NO: 15239007 NR Description: cytochrome p450, putative; protein id: [Arabidopsis thaliana] >gi|9759016|dbj|BAB09329.1| cytochrome
  misc_feature (1)..(416): Homolog of NCBI NO: 15231047 NR Description: cytochrome P450, putative; protein id: At3g20090.1
  misc_feature (1)..(414): Homolog of NCBI NO: 9294003 NR Description: cytochrome P450-like protein [Arabidopsis
  misc_feature (1)..(416): Homolog of NCBI NO: 15231052 NR Description: cytochrome p450 family; protein id: At3g20130.1
  misc_feature (1)..(413): Homolog of NCBI NO: 15233794 NR Description: cytochrome p450 family; protein id: At4g15360.1
  misc_feature (1)..(410): Homolog of NCBI NO: 30685997 NR Description: cytochrome P450 family [Arabidopsis thaliana]
  misc_feature (1)..(410): Homolog of NCBI NO: 15225585 NR Description: cytochrome p450 family; protein id: At2g14100.1
  misc_feature (1)..(414): Homolog of NCBI NO: 15231049 NR Description: cytochrome p450 family; protein id: At3g20100.1, by cDNA: 149380., supported by cDNA: gi_15215771 [Arabidopsis
  misc_feature (1)..(414): Homolog of NCBI NO: 21553521 NR Description: cytochrome P450, putative [Arabidopsis thaliana]
  misc_feature (1)..(413): Homolog of NCBI NO: 9293969 NR Description: cytochrome P450-like protein [Arabidopsis
MVLVSSASMAYEVFRTNDVNVSYRFVPVNKDSLVFGSSGFVTAPYGDYWKFMKKLISTKLLRPHALELSKGNRAEELRRFCLDLQGKARKKESVEIGKVALKLTNNIICRMSMGRSCSEKNGVAERARELVNKSFALSVKLFFSNMFRKDIMGVSREFDEFLERILVEHEENLEGDQDRDMIDHLLEAYRNEEAEYKITRKQIKSLIVEIFLGGTDSSAQTIQWTMAEILNNPGVLEKLRAEIDSVVGGKRLIQESDLPNLPYLQAVVKEGLRLHPSAPVLLRVFGESCEVKEFYVPEKTTLVVNLYAVNRDPDSWEDPDMFKPERFLVSSISGDEEKIREQAVKYVTFGGGRRTCPAVKLAHIFMETAIGAMVQCFDWRIKGEKVYMEEAVSGLSLKMAHPLKCTPVVRFDPFSF

SEQ ID NO: 81750 - protein, 408 aa, Arabidopsis thaliana
  peptide (1)..(408): Ceres Seq. ID no. 12661188
  misc_feature (1)..(408): Homolog of NCBI NO: 15239007 NR Description: cytochrome p450, putative; protein id: [Arabidopsis thaliana] >gi|9759016|dbj|BAB09329.1| cytochrome
  misc_feature (1)..(408): Homolog of NCBI NO: 15231047 NR Description: cytochrome P450, putative; protein id: At3g20090.1
  misc_feature (1)..(406): Homolog of NCBI NO: 9294003 NR Description: cytochrome P450-like protein [Arabidopsis
  misc_feature (1)..(408): Homolog of NCBI NO: 15231052 NR Description: cytochrome p450 family; protein id: At3g20130.1
  misc_feature (1)..(405): Homolog of NCBI NO: 15233794 NR Description: cytochrome p450 family; protein id: At4g15360.1
  misc_feature (1)..(402): Homolog of NCBI NO: 30685997 NR Description: cytochrome P450 family [Arabidopsis thaliana]
  misc_feature (1)..(402): Homolog of NCBI NO: 15225585 NR Description: cytochrome p450 family; protein id: At2g14100.1
  misc_feature (1)..(406): Homolog of NCBI NO: 15231049 NR Description: cytochrome p450 family; protein id: At3g20100.1, by cDNA: 149380., supported by cDNA: gi_15215771 [Arabidopsis
  misc_feature (1)..(406): Homolog of NCBI NO: 21553521 NR Description: cytochrome P450, putative [Arabidopsis thaliana]
  misc_feature (1)..(405): Homolog of NCBI NO: 9293969 NR Description: cytochrome P450-like protein [Arabidopsis
MAYEVFRTNDVNVSYRFVPVNKDSLVFGSSGFVTAPYGDYWKFMKKLISTKLLRPHALELSKGNRAEELRRFCLDLQGKARKKESVEIGKVALKLTNNIICRMSMGRSCSEKNGVAERARELVNKSFALSVKLFFSNMFRKDIMGVSREFDEFLERILVEHEENLEGDQDRDMIDHLLEAYRNEEAEYKITRKQIKSLIVEIFLGGTDSSAQTIQWTMAEILNNPGVLEKLRAEIDSVVGGKRLIQESDLPNLPYLQAVVKEGLRLHPSAPVLLRVFGESCEVKEFYVPEKTTLVVNLYAVNRDPDSWEDPDMFKPERFLVSSISGDEEKIREQAVKYVTFGGGRRTCPAVKLAHIFMETAIGAMVQCFDWRIKGEKVYMEEAVSGLSLKMAHPLKCTPVVRFDPFSF

SEQ ID NO: 81751 - DNA, 1494 bp, Arabidopsis thaliana
  misc_feature (1)..(1494): Ceres Seq. ID no. 12661189
  misc_feature: MA Experiment ID: 20000185 Result: Up-regulated in Transcription
  misc_feature: MA Experiment 20000185 PARAMETER Experiment Name: At_Roots__P Parameter: Age (day) Value: 7 vs. 21
  misc_feature: MA Experiment 20000185 PARAMETER Experiment Name: At_Roots__P Parameter: Organism Value: A. thaliana
  misc_feature: MA Experiment 20000185 PARAMETER Experiment Name: At_Roots__P Parameter: Tissue Value: Roots vs. Whole Plant
  misc_feature: MA Experiment ID: 20000269 Result: Down-regulated in Transcription
  misc_feature: MA Experiment 20000269 PARAMETER Experiment Name: At_1mM_KNO3_L-vs-H_Roots_P Parameter: Age (day) Value: 7,10,12
  misc_feature: MA Experiment 20000269 PARAMETER Experiment Name: At_1mM_KNO3_L-vs-H_Roots_P Parameter: Organism Value: A. thaliana
  misc_feature: MA Experiment 20000269 PARAMETER Experiment Name: At_1mM_KNO3_L-vs-H_Roots_P Parameter: Plant Line Value: WS
  misc_feature: MA Experiment 20000269 PARAMETER Experiment Name: At_1mM_KNO3_L-vs-H_Roots_P Parameter: Timepoint (day) Value: 7,10,12
  misc_feature: MA Experiment 20000269 PARAMETER Experiment Name: At_1mM_KNO3_L-vs-H_Roots_P Parameter: Tissue Value: Roots
  misc_feature: MA Experiment 20000269 PARAMETER Experiment Name: At_1mM_KNO3_L-vs-H_Roots_P Parameter: Treatment Value: 1mM KNO3 vs. 50mM KNO3
  misc_feature: MA Experiment ID: 20000437 Result: Down-regulated in Transcription
  misc_feature: MA Experiment 20000437 PARAMETER Experiment Name: At_Drought_P Parameter: Age (day) Value: 8
  misc_feature: MA Experiment 20000437 PARAMETER Experiment Name: At_Drought_P Parameter: Organism Value: A. thaliana
  misc_feature: MA Experiment 20000437 PARAMETER Experiment Name: At_Drought_P Parameter: Plant Line Value: WS
  misc_feature: MA Experiment 20000437 PARAMETER Experiment Name: At_Drought_P Parameter: Timepoint (hr) Value: 24
  misc_feature: MA Experiment 20000437 PARAMETER Experiment Name: At_Drought_P Parameter: Tissue Value: Whole Plant
  misc_feature: MA Experiment 20000437 PARAMETER Experiment Name: At_Drought_P Parameter: Treatment Value: Drought vs. No Drought
  misc_feature: MA Experiment ID: 20000439 Result: Up-regulated in Transcription
  misc_feature: MA Experiment 20000439 PARAMETER Experiment Name: At_Roots__P Parameter: Age (day) Value: 14 vs. 21
  misc_feature: MA Experiment 20000439 PARAMETER Experiment Name: At_Roots__P Parameter: Organism Value: A. thaliana
  misc_feature: MA Experiment 20000439 PARAMETER Experiment Name: At_Roots__P Parameter: Tissue Value: Roots vs. Whole Plant
  misc_feature: MA Experiment ID: 20000451 Result: Down-regulated in Transcription
  misc_feature: MA Experiment 20000451 PARAMETER Experiment Name: At_CS6879_Shoots-Roots_P Parameter: Age (day) Value: 14
  misc_feature: MA Experiment 20000451 PARAMETER Experiment Name: At_CS6879_Shoots-Roots_P Parameter: Organism Value: A. thaliana
  misc_feature: MA Experiment 20000451 PARAMETER Experiment Name: At_CS6879_Shoots-Roots_P Parameter: Plant Line Value: CS6879 vs. WS
  misc_feature: MA Experiment 20000451 PARAMETER Experiment Name: At_CS6879_Shoots-Roots_P Parameter: Tissue Value: Roots
  misc_feature: MA Experiment ID: 20000527 Result: Down-regulated in Transcription
  misc_feature: MA Experiment 20000527 PARAMETER Experiment Name: At_10percent_PEG_P Parameter: Age (day) Value: 20
  misc_feature: MA Experiment 20000527 PARAMETER Experiment Name: At_10percent_PEG_P Parameter: Organism Value: A. thaliana
  misc_feature: MA Experiment 20000527 PARAMETER Experiment Name: At_10percent_PEG_P Parameter: Plant Line Value: WS
  misc_feature: MA Experiment 20000527 PARAMETER Experiment Name: At_10percent_PEG_P Parameter: Timepoint (day) Value: 20
  misc_feature: MA Experiment 20000527 PARAMETER Experiment Name: At_10percent_PEG_P Parameter: Tissue Value: Whole Plant
  misc_feature: MA Experiment 20000527 PARAMETER Experiment Name: At_10percent_PEG_P Parameter: Treatment Value: 10percent PEG vs. No Treatment
  misc_feature: MA Experiment ID: 20000573 Result: Down-regulated in Transcription
  misc_feature: MA Experiment 20000573 PARAMETER Experiment Name: At_100uM_ABA_Mutants__P Parameter: Organism Value: A. thaliana
  misc_feature: MA Experiment 20000573 PARAMETER Experiment Name: At_100uM_ABA_Mutants__P Parameter: Plant Line Value: CS22 vs. Ler wt
  misc_feature: MA Experiment 20000573 PARAMETER Experiment Name: At_100uM_ABA_Mutants__P Parameter: Timepoint (hr) Value: N/A
  misc_feature: MA Experiment 20000573 PARAMETER Experiment Name: At_100uM_ABA_Mutants__P Parameter: Tissue Value: Whole Plant
  misc_feature: MA Experiment 20000573 PARAMETER Experiment Name: At_100uM_ABA_Mutants__P Parameter: Treatment Value: None
  misc_feature: MA Experiment ID: 20001451 Result: Up-regulated in Transcription
  misc_feature: MA Experiment 20001451 PARAMETER Experiment Name: At_Far-red-induction_P Parameter: Age (day) Value: 7
  misc_feature: MA Experiment 20001451 PARAMETER Experiment Name: At_Far-red-induction_P Parameter: Light Value: Far-red vs. White
  misc_feature: MA Experiment 20001451 PARAMETER Experiment Name: At_Far-red-induction_P Parameter: Organism Value: A. thaliana
  misc_feature: MA Experiment 20001451 PARAMETER Experiment Name: At_Far-red-induction_P Parameter: Plant Line Value: Columbia
  misc_feature: MA Experiment 20001451 PARAMETER Experiment Name: At_Far-red-induction_P Parameter: Timepoint (hr) Value: 24
  misc_feature: MA Experiment 20001451 PARAMETER Experiment Name: At_Far-red-induction_P Parameter: Tissue Value: Whole Plant
atggaaatgatgatattaatctcactgtgcttaaccactttcctaactattctactcttcttcaaatcactcctcaaacgacccaactctaacttacctccgtctccatggcgtcttccggtcattggaaacctccatcagctcagtctccacccgcaccgtgctctctcttccctcagcgcgcgccacgggccactcatgctccttcgtttcggccgtgtccctgttctcattgtctcttctgctgacgtagctcatgatgtcatgaagacacatgatcttaagtttgccaaccgtccgatcacgaaatctgcccataaaatctcgaatggcgggcgagatttggtattcgccccctatggcgaatactggaggaacgttaagagtctatgcacgatacatctcctcagcaacaaaatggttcaatcctctgagaaaagaagagaagaagagataactctattgatggagacgctggaagaagcaagtttatcttcttcatcggtgaatctaagcaaactcattactaatatggtaagcgacataatgggtaaagttgtattggggaaaaaatacagcggcgaggaaggcacaatcgatgtcaagaccataacaaagagtttcttggatgccgtggggctttccccggtcggggaatacattccgagtttggcatggataggtaagattacgggttcagatggtaagctagagaaaataaccaagcagtttggtgattttatagaaaaagtgttgcaagaacatgaggatacaactgccgacaaagaaacaccagattttgttgatatgttgctaacaattcaaagagatgagactgcacaatgccaattggataaaagcgacttaaaagtcatcatatttgaaatgtttttagggagcacgacaacaacttccgcggtaatagagtgggcgatgacacgcctaatgagaaatccagaatgtttgaagaaacttcaagatgagattcgttcagtttcgaagatgaattcatatgtatcaggaaaagaagttgaaaatatgaactacttaaaagctgtgatcaaggaggtacttcggctgcatcccccactcccgctattagttccgcgactattaagcgaagatgtaaaattaaaaggatacgacattactgcgggcacacaggtgatcattaatgcttgggcgatccaacgagacactgcgacatggggatcggatgcacaagaatttaggccagaaagacattttgattcaacttgggattttgttggacgaaatttcaaatacattccatttggagcagggagaaggttatgtcccggcattggacttgggtcggtgatggcaagtgtgactttggccaatcttgtgaaacggtttgactggagagttgaggatggaccttcaggatatgataaaccagatctagtagagggagctggaatcgatgtttgccgaaaatttcctcttgttgtctttccatcttctgcttag

SEQ ID NO: 81752 - protein, 497 aa, Arabidopsis thaliana
  peptide (1)..(497): Ceres Seq. ID no. 12661190
  misc_feature (1)..(497): Homolog of NCBI NO: 15239008 NR Description: cytochrome p450, putative; protein id: [Arabidopsis thaliana] >gi|13878374|sp|Q9FH66|C71G_ARATH P450 71A16 >gi|9759017|dbj|BAB09330.1| cytochrome P450
  misc_feature (1)..(497): Homolog of NCBI NO: 15238664 NR Description: cytochrome P450-like protein; protein id: [Arabidopsis thaliana] >gi|13878366|sp|P58045|C71E_ARATH
  misc_feature (1)..(496): Homolog of NCBI NO: 15224570 NR Description: cytochrome p450 family; protein id: At2g30770.1
  misc_feature (4)..(497): Homolog of NCBI NO: 13878406 NR Description: Cytochrome P450 71A20 >gi|7430641|pir||T06288
  misc_feature (1)..(496): Homolog of NCBI NO: 13878362 NR Description: Cytochrome P450 71A12 >gi|25282591|pir||C84712
  misc_feature (1)..(496): Homolog of NCBI NO: 30684709 NR Description: cytochrome p450 71A12 [Arabidopsis thaliana] At2g30750/T11J7.14 [Arabidopsis thaliana]
  misc_feature (1)..(496): Homolog of NCBI NO: 22329490 NR Description: cytochrome P450, putative; protein id: [Arabidopsis thaliana] >gi|13878394|sp|Q9SAB6|C71I_ARATH
  misc_feature (1)..(497): Homolog of NCBI NO: 15238652 NR Description: cytochrome p450 family; protein id: At5g24950.1
  misc_feature (1)..(497): Homolog of NCBI NO: 15235661 NR Description: cytochrome p450 family; protein id: At4g13290.1
  misc_feature (1)..(497): Homolog of NCBI NO: 21542394 NR Description: Cytochrome P450 71A27
MEMMILISLCLTTFLTILLFFKSLLKRPNSNLPPSPWRLPVIGNLHQLSLHPHRALSSLSARHGPLMLLRFGRVPVLIVSSADVAHDVMKTHDLKFANRPITKSAHKISNGGRDLVFAPYGEYWRNVKSLCTIHLLSNKMVQSSEKRREEEITLLMETLEEASLSSSSVNLSKLITNMVSDIMGKVVLGKKYSGEEGTIDVKTITKSFLDAVGLSPVGEYIPSLAWIGKITGSDGKLEKITKQFGDFIEKVLQEHEDTTADKETPDFVDMLLTIQRDETAQCQLDKSDLKVIIFEMFLGSTTTTSAVIEWAMTRLMRNPECLKKLQDEIRSVSKMNSYVSGKEVENMNYLKAVIKEVLRLHPPLPLLVPRLLSEDVKLKGYDITAGTQVIINAWAIQRDTATWGSDAQEFRPERHFDSTWDFVGRNFKYIPFGAGRRLCPGIGLGSVMASVTLANLVKRFDWRVEDGPSGYDKPDLVEGAGIDVCRKFPLVVFPSSA

SEQ ID NO: 81753 - protein, 495 aa, Arabidopsis thaliana
  peptide (1)..(495): Ceres Seq. ID no. 12661191
  misc_feature (1)..(495): Homolog of NCBI NO: 15239008 NR Description: cytochrome p450, putative; protein id: [Arabidopsis thaliana] >gi|13878374|sp|Q9FH66|C71G_ARATH P450 71A16 >gi|9759017|dbj|BAB09330.1| cytochrome P450
  misc_feature (1)..(495): Homolog of NCBI NO: 15238664 NR Description: cytochrome P450-like protein; protein id: [Arabidopsis thaliana] >gi|13878366|sp|P58045|C71E_ARATH
  misc_feature (1)..(494): Homolog of NCBI NO: 15224570 NR Description: cytochrome p450 family; protein id: At2g30770.1
  misc_feature (2)..(495): Homolog of NCBI NO: 13878406 NR Description: Cytochrome P450 71A20 >gi|7430641|pir||T06288
  misc_feature (1)..(494): Homolog of NCBI NO: 13878362 NR Description: Cytochrome P450 71A12 >gi|25282591|pir||C84712
  misc_feature (1)..(494): Homolog of NCBI NO: 30684709 NR Description: cytochrome p450 71A12 [Arabidopsis thaliana] At2g30750/T11J7.14 [Arabidopsis thaliana]
  misc_feature (1)..(494): Homolog of NCBI NO: 22329490 NR Description: cytochrome P450, putative; protein id: [Arabidopsis thaliana] >gi|13878394|sp|Q9SAB6|C71I_ARATH
  misc_feature (1)..(495): Homolog of NCBI NO: 15238652 NR Description: cytochrome p450 family; protein id: At5g24950.1
  misc_feature (1)..(495): Homolog of NCBI NO: 15235661 NR Description: cytochrome p450 family; protein id: At4g13290.1
  misc_feature (1)..(495): Homolog of NCBI NO: 21542394 NR Description: Cytochrome P450 71A27
MMILISLCLTTFLTILLFFKSLLKRPNSNLPPSPWRLPVIGNLHQLSLHPHRALSSLSARHGPLMLLRFGRVPVLIVSSADVAHDVMKTHDLKFANRPITKSAHKISNGGRDLVFAPYGEYWRNVKSLCTIHLLSNKMVQSSEKRREEEITLLMETLEEASLSSSSVNLSKLITNMVSDIMGKVVLGKKYSGEEGTIDVKTITKSFLDAVGLSPVGEYIPSLAWIGKITGSDGKLEKITKQFGDFIEKVLQEHEDTTADKETPDFVDMLLTIQRDETAQCQLDKSDLKVIIFEMFLGSTTTTSAVIEWAMTRLMRNPECLKKLQDEIRSVSKMNSYVSGKEVENMNYLKAVIKEVLRLHPPLPLLVPRLLSEDVKLKGYDITAGTQVIINAWAIQRDTATWGSDAQEFRPERHFDSTWDFVGRNFKYIPFGAGRRLCPGIGLGSVMASVTLANLVKRFDWRVEDGPSGYDKPDLVEGAGIDVCRKFPLVVFPSSA

SEQ ID NO: 81754 - protein, 494 aa, Arabidopsis thaliana
  peptide (1)..(494): Ceres Seq. ID no. 12661192
  misc_feature (1)..(494): Homolog of NCBI NO: 15239008 NR Description: cytochrome p450, putative; protein id: [Arabidopsis thaliana] >gi|13878374|sp|Q9FH66|C71G_ARATH P450 71A16 >gi|9759017|dbj|BAB09330.1| cytochrome P450
  misc_feature (1)..(494): Homolog of NCBI NO: 15238664 NR Description: cytochrome P450-like protein; protein id: [Arabidopsis thaliana] >gi|13878366|sp|P58045|C71E_ARATH
  misc_feature (1)..(493): Homolog of NCBI NO: 15224570 NR Description: cytochrome p450 family; protein id: At2g30770.1
  misc_feature (1)..(494): Homolog of NCBI NO: 13878406 NR Description: Cytochrome P450 71A20 >gi|7430641|pir||T06288
  misc_feature (1)..(493): Homolog of NCBI NO: 13878362 NR Description: Cytochrome P450 71A12 >gi|25282591|pir||C84712
  misc_feature (1)..(493): Homolog of NCBI NO: 30684709 NR Description: cytochrome p450 71A12 [Arabidopsis thaliana] At2g30750/T11J7.14 [Arabidopsis thaliana]
  misc_feature (1)..(493): Homolog of NCBI NO: 22329490 NR Description: cytochrome P450, putative; protein id: [Arabidopsis thaliana] >gi|13878394|sp|Q9SAB6|C71I_ARATH
  misc_feature (1)..(494): Homolog of NCBI NO: 15238652 NR Description: cytochrome p450 family; protein id: At5g24950.1
  misc_feature (1)..(494): Homolog of NCBI NO: 15235661 NR Description: cytochrome p450 family; protein id: At4g13290.1
  misc_feature (1)..(494): Homolog of NCBI NO: 21542394 NR Description: Cytochrome P450 71A27
MILISLCLTTFLTILLFFKSLLKRPNSNLPPSPWRLPVIGNLHQLSLHPHRALSSLSARHGPLMLLRFGRVPVLIVSSADVAHDVMKTHDLKFANRPITKSAHKISNGGRDLVFAPYGEYWRNVKSLCTIHLLSNKMVQSSEKRREEEITLLMETLEEASLSSSSVNLSKLITNMVSDIMGKVVLGKKYSGEEGTIDVKTITKSFLDAVGLSPVGEYIPSLAWIGKITGSDGKLEKITKQFGDFIEKVLQEHEDTTADKETPDFVDMLLTIQRDETAQCQLDKSDLKVIIFEMFLGSTTTTSAVIEWAMTRLMRNPECLKKLQDEIRSVSKMNSYVSGKEVENMNYLKAVIKEVLRLHPPLPLLVPRLLSEDVKLKGYDITAGTQVIINAWAIQRDTATWGSDAQEFRPERHFDSTWDFVGRNFKYIPFGAGRRLCPGIGLGSVMASVTLANLVKRFDWRVEDGPSGYDKPDLVEGAGIDVCRKFPLVVFPSSA

SEQ ID NO: 81755 - DNA, 1149 bp, Arabidopsis thaliana
  misc_feature (1)..(1149): Ceres Seq. ID no. 12661213
  misc_feature: MA Experiment ID: 20000169 Result: Up-regulated in Transcription
  misc_feature: MA Experiment 20000169 PARAMETER Experiment Name: At_100uM_ABA_P Parameter: Age (day) Value: 14
  misc_feature: MA Experiment 20000169 PARAMETER Experiment Name: At_100uM_ABA_P Parameter: Organism Value: A. thaliana
  misc_feature: MA Experiment 20000169 PARAMETER Experiment Name: At_100uM_ABA_P Parameter: Plant Line Value: WS
  misc_feature: MA Experiment 20000169 PARAMETER Experiment Name: At_100uM_ABA_P Parameter: Timepoint (hr) Value: 6
  misc_feature: MA Experiment 20000169 PARAMETER Experiment Name: At_100uM_ABA_P Parameter: Tissue Value: Aerial
  misc_feature: MA Experiment 20000169 PARAMETER Experiment Name: At_100uM_ABA_P Parameter: Treatment Value: 100uM ABA vs. No Treatment
  misc_feature: MA Experiment ID: 20000213 Result: Up-regulated in Transcription
  misc_feature: MA Experiment 20000213 PARAMETER Experiment Name: At_4deg_Cold_P Parameter: Timepoint (hr) Value: 2
  misc_feature: MA Experiment ID: 20000234 Result: Up-regulated in Transcription
  misc_feature: MA Experiment 20000234 PARAMETER Experiment Name: At_Siliques_P Parameter: Age (day) Value: 21
  misc_feature: MA Experiment 20000234 PARAMETER Experiment Name: At_Siliques_P Parameter: Organism Value: A. thaliana
  misc_feature: MA Experiment 20000234 PARAMETER Experiment Name: At_Siliques_P Parameter: Plant Line Value: WS
  misc_feature: MA Experiment 20000234 PARAMETER Experiment Name: At_Siliques_P Parameter: Tissue Value: Less Than 5mm Siliques vs. Whole Plant
  misc_feature: MA Experiment ID: 20000267 Result: Up-regulated in Transcription
  misc_feature: MA Experiment 20000267 PARAMETER Experiment Name: At_Drought_P Parameter: Age (day) Value: 7
  misc_feature: MA Experiment 20000267 PARAMETER Experiment Name: At_Drought_P Parameter: Organism Value: A. thaliana
  misc_feature: MA Experiment 20000267 PARAMETER Experiment Name: At_Drought_P Parameter: Plant Line Value: WS
  misc_feature: MA Experiment 20000267 PARAMETER Experiment Name: At_Drought_P Parameter: Timepoint (hr) Value: 6
  misc_feature: MA Experiment 20000267 PARAMETER Experiment Name: At_Drought_P Parameter: Tissue Value: Whole Plant
  misc_feature: MA Experiment 20000267 PARAMETER Experiment Name: At_Drought_P Parameter: Treatment Value: Drought vs. No Drought
  misc_feature: MA Experiment ID: 20000268 Result: Up-regulated in Transcription
  misc_feature: MA Experiment 20000268 PARAMETER Experiment Name: At_100mM_NaCl__P Parameter: Age (day) Value: 14
  misc_feature: MA Experiment 20000268 PARAMETER Experiment Name: At_100mM_NaCl__P Parameter: Organism Value: A. thaliana
  misc_feature: MA Experiment 20000268 PARAMETER Experiment Name: At_100mM_NaCl__P Parameter: Plant Line Value: WS
  misc_feature: MA Experiment 20000268 PARAMETER Experiment Name: At_100mM_NaCl__P Parameter: Timepoint (hr) Value: 6
  misc_feature: MA Experiment 20000268 PARAMETER Experiment Name: At_100mM_NaCl__P Parameter: Tissue Value: Whole Plant
  misc_feature: MA Experiment 20000268 PARAMETER Experiment Name: At_100mM_NaCl__P Parameter: Treatment Value: 100mM NaCl vs. No Treatment
  misc_feature: MA Experiment ID: 20000308 Result: Up-regulated in Transcription
  misc_feature: MA Experiment 20000308 PARAMETER Experiment Name: At_100mM_NaCl__P Parameter: Age (day) Value: 17
  misc_feature: MA Experiment 20000308 PARAMETER Experiment Name: At_100mM_NaCl__P Parameter: Organism Value: A. thaliana
  misc_feature: MA Experiment 20000308 PARAMETER Experiment Name: At_100mM_NaCl__P Parameter: Plant Line Value: WS
  misc_feature: MA Experiment 20000308 PARAMETER Experiment Name: At_100mM_NaCl__P Parameter: Timepoint (hr) Value: 72
  misc_feature: MA Experiment 20000308 PARAMETER Experiment Name: At_100mM_NaCl__P Parameter: Tissue Value: Whole Plant
  misc_feature: MA Experiment 20000308 PARAMETER Experiment Name: At_100mM_NaCl__P Parameter: Treatment Value: 100mM NaCl vs. No Treatment
  misc_feature: MA Experiment ID: 20000456 Result: Up-regulated in Transcription
  misc_feature: MA Experiment 20000456 PARAMETER Experiment Name: At_100uM_BA_P Parameter: Age (day) Value: 14
  misc_feature: MA Experiment 20000456 PARAMETER Experiment Name: At_100uM_BA_P Parameter: Organism Value: A. thaliana
  misc_feature: MA Experiment 20000456 PARAMETER Experiment Name: At_100uM_BA_P Parameter: Plant Line Value: WS
  misc_feature: MA Experiment 20000456 PARAMETER Experiment Name: At_100uM_BA_P Parameter: Timepoint (hr) Value: 6
  misc_feature: MA Experiment 20000456 PARAMETER Experiment Name: At_100uM_BA_P Parameter: Tissue Value: Aerial
  misc_feature: MA Experiment 20000456 PARAMETER Experiment Name: At_100uM_BA_P Parameter: Treatment Value: 100uM BA vs. No Treatment
  misc_feature: MA Experiment ID: 20000460 Result: Up-regulated in Transcription
  misc_feature: MA Experiment 20000460 PARAMETER Experiment Name: At_10percent_PEG_P Parameter: Age (day) Value: 12
  misc_feature: MA Experiment 20000460 PARAMETER Experiment Name: At_10percent_PEG_P Parameter: Organism Value: A. thaliana
  misc_feature: MA Experiment 20000460 PARAMETER Experiment Name: At_10percent_PEG_P Parameter: Plant Line Value: WS
  misc_feature: MA Experiment 20000460 PARAMETER Experiment Name: At_10percent_PEG_P Parameter: Timepoint (day) Value: 12
  misc_feature: MA Experiment 20000460 PARAMETER Experiment Name: At_10percent_PEG_P Parameter: Tissue Value: Whole Plant
  misc_feature: MA Experiment 20000460 PARAMETER Experiment Name: At_10percent_PEG_P Parameter: Treatment Value: 10percent PEG vs. No Treatment
  misc_feature: MA Experiment ID: 20000506 Result: Up-regulated in Transcription
  misc_feature: MA Experiment 20000506 PARAMETER Experiment Name: At_Wounding_P Parameter: Organism Value: A. thaliana
  misc_feature: MA Experiment 20000506 PARAMETER Experiment Name: At_Wounding_P Parameter: Plant Line Value: WS
  misc_feature: MA Experiment 20000506 PARAMETER Experiment Name: At_Wounding_P Parameter: Timepoint (hr) Value: 6
  misc_feature: MA Experiment 20000506 PARAMETER Experiment Name: At_Wounding_P Parameter: Tissue Value: Aerial
  misc_feature: MA Experiment 20000506 PARAMETER Experiment Name: At_Wounding_P Parameter: Treatment Value: Wounding vs. No Wounding
  misc_feature: MA Experiment ID: 20000709 Result: Down-regulated in Transcription
  misc_feature: MA Experiment 20000709 PARAMETER Experiment Name: At_15mM_NH4NO3_L-to-H_P Parameter: Age (hr) Value: 14
  misc_feature: MA Experiment 20000709 PARAMETER Experiment Name: At_15mM_NH4NO3_L-to-H_P Parameter: Organism Value: A. thaliana
  misc_feature: MA Experiment 20000709 PARAMETER Experiment Name: At_15mM_NH4NO3_L-to-H_P Parameter: Plant Line Value: WS
  misc_feature: MA Experiment 20000709 PARAMETER Experiment Name: At_15mM_NH4NO3_L-to-H_P Parameter: Timepoint (hr) Value: 4
  misc_feature: MA Experiment 20000709 PARAMETER Experiment Name: At_15mM_NH4NO3_L-to-H_P Parameter: Tissue Value: Aerial
  misc_feature: MA Experiment 20000709 PARAMETER Experiment Name: At_15mM_NH4NO3_L-to-H_P Parameter: Treatment Value: 15mM NH4NO3 vs. 30mM Mannitol
  misc_feature: MA Experiment ID: 20001247 Result: Up-regulated in Transcription
  misc_feature: MA Experiment 20001247 PARAMETER Experiment Name: At_Far-red-induction_P Parameter: Age (day) Value: 7
  misc_feature: MA Experiment 20001247 PARAMETER Experiment Name: At_Far-red-induction_P Parameter: Light Value: Far-red vs. White
  misc_feature: MA Experiment 20001247 PARAMETER Experiment Name: At_Far-red-induction_P Parameter: Organism Value: A. thaliana
  misc_feature: MA Experiment 20001247 PARAMETER Experiment Name: At_Far-red-induction_P Parameter: Plant Line Value: Columbia
  misc_feature: MA Experiment 20001247 PARAMETER Experiment Name: At_Far-red-induction_P Parameter: Timepoint (hr) Value: 1
  misc_feature: MA Experiment 20001247 PARAMETER Experiment Name: At_Far-red-induction_P Parameter: Tissue Value: Whole Plant
  misc_feature: MA Experiment ID: 20001248 Result: Down-regulated in Transcription
  misc_feature: MA Experiment 20001248 PARAMETER Experiment Name: At_Far-red-induction_P Parameter: Age (day) Value: 7
  misc_feature: MA Experiment 20001248 PARAMETER Experiment Name: At_Far-red-induction_P Parameter: Light Value: Far-red vs. White
  misc_feature: MA Experiment 20001248 PARAMETER Experiment Name: At_Far-red-induction_P Parameter: Organism Value: A. thaliana
  misc_feature: MA Experiment 20001248 PARAMETER Experiment Name: At_Far-red-induction_P Parameter: Plant Line Value: Columbia
  misc_feature: MA Experiment 20001248 PARAMETER Experiment Name: At_Far-red-induction_P Parameter: Timepoint (hr) Value: 4
  misc_feature: MA Experiment 20001248 PARAMETER Experiment Name: At_Far-red-induction_P Parameter: Tissue Value: Whole Plant
  misc_feature: MA Experiment ID: 20001554 Result: Up-regulated in Transcription
  misc_feature: MA Experiment 20001554 PARAMETER Experiment Name: At_Drought_Soil_Dry_P Parameter: Age (day) Value: 21
  misc_feature: MA Experiment 20001554 PARAMETER Experiment Name: At_Drought_Soil_Dry_P Parameter: Organism Value: A. thaliana
  misc_feature: MA Experiment 20001554 PARAMETER Experiment Name: At_Drought_Soil_Dry_P Parameter: Plant Line Value: WS
  misc_feature: MA Experiment 20001554 PARAMETER Experiment Name: At_Drought_Soil_Dry_P Parameter: Post Timepoint (hr) Value: None
  misc_feature: MA Experiment 20001554 PARAMETER Experiment Name: At_Drought_Soil_Dry_P Parameter: Post-Treatment Value: None
  misc_feature: MA Experiment 20001554 PARAMETER Experiment Name: At_Drought_Soil_Dry_P Parameter: Timepoint (day) Value: 7
  misc_feature: MA Experiment 20001554 PARAMETER Experiment Name: At_Drought_Soil_Dry_P Parameter: Treatment Value: Drought vs. No Drought
  misc_feature: MA Experiment ID: 20001555 Result: Up-regulated in Transcription
  misc_feature: MA Experiment 20001555 PARAMETER Experiment Name: At_Drought_Soil_Dry_P Parameter: Age (day) Value: 24
  misc_feature: MA Experiment 20001555 PARAMETER Experiment Name: At_Drought_Soil_Dry_P Parameter: Organism Value: A. thaliana
  misc_feature: MA Experiment 20001555 PARAMETER Experiment Name: At_Drought_Soil_Dry_P Parameter: Plant Line Value: WS
  misc_feature: MA Experiment 20001555 PARAMETER Experiment Name: At_Drought_Soil_Dry_P Parameter: Post Timepoint (hr) Value: None
  misc_feature: MA Experiment 20001555 PARAMETER Experiment Name: At_Drought_Soil_Dry_P Parameter: Post-Treatment Value: None
  misc_feature: MA Experiment 20001555 PARAMETER Experiment Name: At_Drought_Soil_Dry_P Parameter: Timepoint (day) Value: 10
  misc_feature: MA Experiment 20001555 PARAMETER Experiment Name: At_Drought_Soil_Dry_P Parameter: Treatment Value: Drought vs. No Drought
  misc_feature: MA Experiment ID: 20001556 Result: Up-regulated in Transcription
  misc_feature: MA Experiment 20001556 PARAMETER Experiment Name: At_Drought_Soil_Dry_P Parameter: Age (day) Value: 26
  misc_feature: MA Experiment 20001556 PARAMETER Experiment Name: At_Drought_Soil_Dry_P Parameter: Organism Value: A. thaliana
  misc_feature: MA Experiment 20001556 PARAMETER Experiment Name: At_Drought_Soil_Dry_P Parameter: Plant Line Value: WS
  misc_feature: MA Experiment 20001556 PARAMETER Experiment Name: At_Drought_Soil_Dry_P Parameter: Post Timepoint (hr) Value: None
  misc_feature: MA Experiment 20001556 PARAMETER Experiment Name: At_Drought_Soil_Dry_P Parameter: Post-Treatment Value: None
  misc_feature: MA Experiment 20001556 PARAMETER Experiment Name: At_Drought_Soil_Dry_P Parameter: Timepoint (day) Value: 12
  misc_feature: MA Experiment 20001556 PARAMETER Experiment Name: At_Drought_Soil_Dry_P Parameter: Treatment Value: Drought vs. No Drought
  misc_feature: MA Experiment ID: 20001557 Result: Up-regulated in Transcription
  misc_feature: MA Experiment 20001557 PARAMETER Experiment Name: At_Drought_Soil_Dry_P Parameter: Age (day) Value: 27
  misc_feature: MA Experiment 20001557 PARAMETER Experiment Name: At_Drought_Soil_Dry_P Parameter: Organism Value: A. thaliana
  misc_feature: MA Experiment 20001557 PARAMETER Experiment Name: At_Drought_Soil_Dry_P Parameter: Plant Line Value: WS
  misc_feature: MA Experiment 20001557 PARAMETER Experiment Name: At_Drought_Soil_Dry_P Parameter: Post Timepoint (hr) Value: 3
  misc_feature: MA Experiment 20001557 PARAMETER Experiment Name: At_Drought_Soil_Dry_P Parameter: Post-Treatment Value: Re-Water vs. No Drought
  misc_feature: MA Experiment 20001557 PARAMETER Experiment Name: At_Drought_Soil_Dry_P Parameter: Timepoint (day) Value: 13
  misc_feature: MA Experiment 20001557 PARAMETER Experiment Name: At_Drought_Soil_Dry_P Parameter: Treatment Value: Drought vs. No Drought
  misc_feature: MA Experiment ID: 20001757 Result: Down-regulated in Transcription
  misc_feature: MA Experiment 20001757 PARAMETER Experiment Name: At_50mM_NH4NO3_L-to-H_P Parameter: Timepoint (hr) Value: 6
  misc_feature: MA Experiment 20001757 PARAMETER Experiment Name: At_50mM_NH4NO3_L-to-H_P Parameter: Tissue Value: Leaf
  misc_feature: MA Experiment 20001757 PARAMETER Experiment Name: At_50mM_NH4NO3_L-to-H_P Parameter: Treatment Value: 50mM NH4NO3 vs 100mM Mannitol
  misc_feature: MA Experiment ID: 20001760 Result: Up-regulated in Transcription
  misc_feature: MA Experiment 20001760 PARAMETER Experiment Name: At_50mM_NH4NO3_L-to-H_P Parameter: Timepoint (hr) Value: 2
  misc_feature: MA Experiment 20001760 PARAMETER Experiment Name: At_50mM_NH4NO3_L-to-H_P Parameter: Tissue Value: Siliques
  misc_feature: MA Experiment 20001760 PARAMETER Experiment Name: At_50mM_NH4NO3_L-to-H_P Parameter: Treatment Value: 50mM NH4NO3 vs 100mM Mannitol
  misc_feature: MA Experiment ID: 20001904 Result: Up-regulated in Transcription
  misc_feature: MA Experiment 20001904 PARAMETER Experiment Name: At_Drought_Reproduction_P Parameter: Age (day) Value: 37
  misc_feature: MA Experiment 20001904 PARAMETER Experiment Name: At_Drought_Reproduction_P Parameter: Organism Value: A. thaliana
  misc_feature: MA Experiment 20001904 PARAMETER Experiment Name: At_Drought_Reproduction_P Parameter: Plant Line Value: WS
  misc_feature: MA Experiment 20001904 PARAMETER Experiment Name: At_Drought_Reproduction_P Parameter: Timepoint (day) Value: 7
  misc_feature: MA Experiment 20001904 PARAMETER Experiment Name: At_Drought_Reproduction_P Parameter: Tissue Value: Rosettes
  misc_feature: MA Experiment 20001904 PARAMETER Experiment Name: At_Drought_Reproduction_P Parameter: Treatment Value: Drought vs. No Drought
atggttagtcagaaagagaccgtgtgtgtaaccggcgcttcgggtttcatcggttcatggctagtgatgcgattactagaacgtggttactttgttcgtgccaccgttcgagatcccggtaatttgaagaaagtacaacatcttcttgatttgccaaacgccaagacgctactcactttatggaaggctgatttatctgaggaaggaagctacgatgatgccataaacggatgtgacggtgttttccacgtggcaacacccatggattttgaatcaaaagatcctgagaacgaagtgataaagccgacagtgaatggaatgttggggataatgaaagcatgtgttaaggcaaagaccgtacgaagattcgtatttacttcatctgccggaaccgttaatgtagaagaacatcagaagaatgtctatgatgaaaatgattggagtgatcttgagtttatcatgtccaaaaagatgacaggatggatgtatttcgtgtcaaaaacgttagcggagaaagcagcgtgggatttcgccgaagagaaaggattagatttcattagtattattccaacattggtggtcggtccattcatcacaacgtctatgccgcctagccttatcaccgcgctctctcctatcactcggaacgaggcgcattactcgatcataagacaaggacagtatgtgcatttggacgacttatgcaacgctcatatcttcttatacgaacaagcagccgccaagggacgttatatttgttcctctcatgatgcaaccattcttactatctccaaatttctcaggccaaaataccccgaatataacgtaccttcaacgtttgaaggtgttgatgagaatctaaagagcattgaattcagttccaagaagctgacggacatggggtttaacttcaagtatagtctcgaggaaatgtttattgaatctattgagacatgtcgtcaaaagggttttctcccggtttcattatcgtaccaatccatatcggagatcaagactaagaatgaaaacattgacgtcaaaaccggagatggtttaaccgatggtatgaagccatgtaacaagacagaaacggggataaccggcgagagaaccgatgctcccatgctagcacaacagatgtgtgcctag

SEQ ID NO: 81756 - protein, 382 aa, Arabidopsis thaliana
  peptide (1)..(382): Ceres Seq. ID no. 12661214
  misc_feature (5)..(195): Pfam Name: 3-beta hydroxysteroid dehydrogenase/isomerase family Pfam Description: 3-beta hydroxysteroid dehydrogenase/isomerase
  misc_feature (1)..(382): Homolog of NCBI NO: 15239063 NR Description: dihydroflavonol 4-reductase; protein id:
  misc_feature (1)..(382): Homolog of NCBI NO: 320557 NR Description: dihydrokaempferol 4-reductase (EC 1.1.1.219) -
  misc_feature (1)..(382): Homolog of NCBI NO: 29423733 NR Description: dihydroflavonol 4-reductase [Brassica oleracea]
  misc_feature (1)..(328): Homolog of NCBI NO: 1888485 NR Description: dihydroflavonol 4-reductase [Vitis vinifera]
  misc_feature (1)..(325): Homolog of NCBI NO: 1706377 NR Description: DIHYDROFLAVONOL-4-REDUCTASE (DFR)
  misc_feature (1)..(349): Homolog of NCBI NO: 4588781 NR Description: dihydroflavonol reductase [Malus x domestica]
  misc_feature (1)..(349): Homolog of NCBI NO: 28629480 NR Description: dihydroflavonol 4-reductase [Malus x domestica]
  misc_feature (7)..(335): Homolog of NCBI NO: 6009511 NR Description: dihydroflavonol 4-reductase [Camellia sinensis]
  misc_feature (1)..(349): Homolog of NCBI NO: 28629484 NR Description: dihydroflavonol 4-reductase [Pyrus communis]
  misc_feature (1)..(349): Homolog of NCBI NO: 28629488 NR Description: putative dihydroflavonol 4-reductase [Pyrus
MVSQKETVCVTGASGFIGSWLVMRLLERGYFVRATVRDPGNLKKVQHLLDLPNAKTLLTLWKADLSEEGSYDDAINGCDGVFHVATPMDFESKDPENEVIKPTVNGMLGIMKACVKAKTVRRFVFTSSAGTVNVEEHQKNVYDENDWSDLEFIMSKKMTGWMYFVSKTLAEKAAWDFAEEKGLDFISIIPTLVVGPFITTSMPPSLITALSPITRNEAHYSIIRQGQYVHLDDLCNAHIFLYEQAAAKGRYICSSHDATILTISKFLRPKYPEYNVPSTFEGVDENLKSIEFSSKKLTDMGFNFKYSLEEMFIESIETCRQKGFLPVSLSYQSISEIKTKNENIDVKTGDGLTDGMKPCNKTETGITGERTDAPMLAQQMCA

SEQ ID NO: 81757 - protein, 360 aa, Arabidopsis thaliana
  peptide (1)..(360): Ceres Seq. ID no. 12661215
  misc_feature (1)..(173): Pfam Name: 3-beta hydroxysteroid dehydrogenase/isomerase family Pfam Description: 3-beta hydroxysteroid dehydrogenase/isomerase
  misc_feature (1)..(360): Homolog of NCBI NO: 15239063 NR Description: dihydroflavonol 4-reductase; protein id:
  misc_feature (1)..(360): Homolog of NCBI NO: 320557 NR Description: dihydrokaempferol 4-reductase (EC 1.1.1.219) -
  misc_feature (1)..(360): Homolog of NCBI NO: 29423733 NR Description: dihydroflavonol 4-reductase [Brassica oleracea]
  misc_feature (1)..(306): Homolog of NCBI NO: 1888485 NR Description: dihydroflavonol 4-reductase [Vitis vinifera]
  misc_feature (1)..(303): Homolog of NCBI NO: 1706377 NR Description: DIHYDROFLAVONOL-4-REDUCTASE (DFR)
  misc_feature (1)..(327): Homolog of NCBI NO: 4588781 NR Description: dihydroflavonol reductase [Malus x domestica]
  misc_feature (1)..(327): Homolog of NCBI NO: 28629480 NR Description: dihydroflavonol 4-reductase [Malus x domestica]
  misc_feature (1)..(313): Homolog of NCBI NO: 6009511 NR Description: dihydroflavonol 4-reductase [Camellia sinensis]
  misc_feature (1)..(327): Homolog of NCBI NO: 28629484 NR Description: dihydroflavonol 4-reductase [Pyrus communis]
  misc_feature (1)..(327): Homolog of NCBI NO: 28629488 NR Description: putative dihydroflavonol 4-reductase [Pyrus
MRLLERGYFVRATVRDPGNLKKVQHLLDLPNAKTLLTLWKADLSEEGSYDDAINGCDGVFHVATPMDFESKDPENEVIKPTVNGMLGIMKACVKAKTVRRFVFTSSAGTVNVEEHQKNVYDENDWSDLEFIMSKKMTGWMYFVSKTLAEKAAWDFAEEKGLDFISIIPTLVVGPFITTSMPPSLITALSPITRNEAHYSIIRQGQYVHLDDLCNAHIFLYEQAAAKGRYICSSHDATILTISKFLRPKYPEYNVPSTFEGVDENLKSIEFSSKKLTDMGFNFKYSLEEMFIESIETCRQKGFLPVSLSYQSISEIKTKNENIDVKTGDGLTDGMKPCNKTETGITGERTDAPMLAQQMCA

SEQ ID NO: 81758 - protein, 295 aa, Arabidopsis thaliana
  peptide (1)..(295): Ceres Seq. ID no. 12661216
  misc_feature (1)..(108): Pfam Name: 3-beta hydroxysteroid dehydrogenase/isomerase family Pfam Description: 3-beta hydroxysteroid dehydrogenase/isomerase
  misc_feature (1)..(295): Homolog of NCBI NO: 15239063 NR Description: dihydroflavonol 4-reductase; protein id:
  misc_feature (1)..(295): Homolog of NCBI NO: 320557 NR Description: dihydrokaempferol 4-reductase (EC 1.1.1.219) -
  misc_feature (1)..(295): Homolog of NCBI NO: 29423733 NR Description: dihydroflavonol 4-reductase [Brassica oleracea]
  misc_feature (1)..(241): Homolog of NCBI NO: 1888485 NR Description: dihydroflavonol 4-reductase [Vitis vinifera]
  misc_feature (1)..(238): Homolog of NCBI NO: 1706377 NR Description: DIHYDROFLAVONOL-4-REDUCTASE (DFR)
  misc_feature (1)..(262): Homolog of NCBI NO: 4588781 NR Description: dihydroflavonol reductase [Malus x domestica]
  misc_feature (1)..(262): Homolog of NCBI NO: 28629480 NR Description: dihydroflavonol 4-reductase [Malus x domestica]
  misc_feature (1)..(248): Homolog of NCBI NO: 6009511 NR Description: dihydroflavonol 4-reductase [Camellia sinensis]
  misc_feature (1)..(262): Homolog of NCBI NO: 28629484 NR Description: dihydroflavonol 4-reductase [Pyrus communis]
  misc_feature (1)..(262): Homolog of NCBI NO: 28629488 NR Description: putative dihydroflavonol 4-reductase [Pyrus
MDFESKDPENEVIKPTVNGMLGIMKACVKAKTVRRFVFTSSAGTVNVEEHQKNVYDENDWSDLEFIMSKKMTGWMYFVSKTLAEKAAWDFAEEKGLDFISIIPTLVVGPFITTSMPPSLITALSPITRNEAHYSIIRQGQYVHLDDLCNAHIFLYEQAAAKGRYICSSHDATILTISKFLRPKYPEYNVPSTFEGVDENLKSIEFSSKKLTDMGFNFKYSLEEMFIESIETCRQKGFLPVSLSYQSISEIKTKNENIDVKTGDGLTDGMKPCNKTETGITGERTDAPMLAQQMCA

SEQ ID NO: 81759 - DNA, 5145 bp, Arabidopsis thaliana
  misc_feature (1)..(5145): Ceres Seq. ID no. 12661231
  misc_feature: MA Experiment ID: 20001451 Result: Up-regulated in Transcription
  misc_feature: MA Experiment 20001451 PARAMETER Experiment Name: At_Far-red-induction_P Parameter: Age (day) Value: 7
  misc_feature: MA Experiment 20001451 PARAMETER Experiment Name: At_Far-red-induction_P Parameter: Light Value: Far-red vs. White
  misc_feature: MA Experiment 20001451 PARAMETER Experiment Name: At_Far-red-induction_P Parameter: Organism Value: A. thaliana
  misc_feature: MA Experiment 20001451 PARAMETER Experiment Name: At_Far-red-induction_P Parameter: Plant Line Value: Columbia
  misc_feature: MA Experiment 20001451 PARAMETER Experiment Name: At_Far-red-induction_P Parameter: Timepoint (hr) Value: 24
  misc_feature: MA Experiment 20001451 PARAMETER Experiment Name: At_Far-red-induction_P Parameter: Tissue Value: Whole Plant
  misc_feature: MA Experiment ID: 20001905 Result: Up-regulated in Transcription
  misc_feature: MA Experiment 20001905 PARAMETER Experiment Name: At_Drought_Reproduction_P Parameter: Age (day) Value: 40
  misc_feature: MA Experiment 20001905 PARAMETER Experiment Name: At_Drought_Reproduction_P Parameter: Organism Value: A. thaliana
  misc_feature: MA Experiment 20001905 PARAMETER Experiment Name: At_Drought_Reproduction_P Parameter: Plant Line Value: WS
  misc_feature: MA Experiment 20001905 PARAMETER Experiment Name: At_Drought_Reproduction_P Parameter: Timepoint (day) Value: 10
  misc_feature: MA Experiment 20001905 PARAMETER Experiment Name: At_Drought_Reproduction_P Parameter: Tissue Value: Rosettes
  misc_feature: MA Experiment 20001905 PARAMETER Experiment Name: At_Drought_Reproduction_P Parameter: Treatment Value: Drought vs. No Drought
  misc_feature: MA Experiment ID: 20001911 Result: Up-regulated in Transcription
  misc_feature: MA Experiment 20001911 PARAMETER Experiment Name: At_Drought_Reproduction_P Parameter: Age (day) Value: 40
  misc_feature: MA Experiment 20001911 PARAMETER Experiment Name: At_Drought_Reproduction_P Parameter: Organism Value: A. thaliana
  misc_feature: MA Experiment 20001911 PARAMETER Experiment Name: At_Drought_Reproduction_P Parameter: Plant Line Value: WS
  misc_feature: MA Experiment 20001911 PARAMETER Experiment Name: At_Drought_Reproduction_P Parameter: Timepoint (day) Value: 10
  misc_feature: MA Experiment 20001911 PARAMETER Experiment Name: At_Drought_Reproduction_P Parameter: Tissue Value: Flowers
  misc_feature: MA Experiment 20001911 PARAMETER Experiment Name: At_Drought_Reproduction_P Parameter: Treatment Value: Drought vs. No Drought
atggctaactcttccgctggctccgccgcagaccaccgcaacaaacacctctccgtcaatccaccgcaccagatcttcaaagatatccaaggttctgacaatgcgattcctctttcaccacagtggcttctctccaaaccaggggagaacaagactgggatgggaactggggatcctaatcagtatggaaaccattcggatgttgtgagaacaacagggaatggggaggagacactggataatctgaagaaaaaagatgttttccggccatccttgcttgatgcagaaagtggtcgtcgtgatcgttggcgtgatgaggaaagggacaccttgtcctcagtccgaaatgaccgctggcggaatggcgacaaagactctggtgataataagaaggttgaccggtgggataatgtggctcctaaatttggggaacaacgacgtggtccgaatgaccggtggactgattcaggaaacaaggatgctgcgccagagcagaggcgtgagagcaagtggaactctcgctggggtcctgatgacaaggaagctgagattccgcgtaataagtgggatgaacctggtaaggacggtgaaatcattcgtgagaagggtccatctcttcctactagcgatggagaccattaccggccctggagaccctctcaaggtcgaggaagaggagaagctcttcacaaccaatcaacaccaaacaaacaggttacttccttctcccacagcagggggcgtggagagaacactgctatcttttcagctggacgtggaaggatgagtcctggtggaagcatttttactagcgcaccaaaccagtctcatccccctggatctgcctctgacaagggggaaagtggtcctggagaacctccccatctgagatatagcagaatgaaactgttggatgtgtacaggatggctgacacagagtgttatgaaaagtttccggatgggtttattgaggtgccttccctaacgtctgaggagccaacggatcctctggctctttgtgctccaagttccgatgaagtgaatgttctggatgcgattgagaaaggaaaaatagtgagcagtggtgcccctcagacgtccaaggatggccctactggacgaaatccggtcgagttttcacaacctagacggatcaggcctgctggaagcagagaagatatgacattcggtgctgaggagtctaaagatgaaagtggagaaacaaggaactatccagatgataagtttaggcctgaagcttctcatgaaggttatgcaccttttaggagaggcaatgaggcacctgtcagagaactgaaagaacccagtatgcagggaaatgctcatgttcaatctgcctctccatggcgtcagtcttctgggggagaaaggtcgaataggaactcacatgattggaatgacccttcagctgatagcaggctgaaatcttctgacagtgtttggtcgcatcctaaagattcaataaatcatttaggtggcaataatatgatgttgccgcagtcgaaaggtgaatcaagatggcaaatcagtgaagatccttcacttagaaggcagccatctctggtgttcgacagggagcaggaagttagaaagcttctcccatcttcgcctgaagaactttcactctattataaagatcctcagggtctaattcaaggccctttttctggatctgatatcattggatggtttgaggctgggtattttggcatagatttgctagttcgtcttgcaagtgcaccaaatgattctcctttttcattacttggtgatgtaatgccacatttacgggctaagtcgggtccaccacctggttttactggtgccaagcaaaacgaatttgttgatgcagctggtacatcagccttccctggtgtggggaaagttcattctgggatgggtgagactgatatgttgcaaaatgatatgaggtataagcatgttgcaggaactgtagcggagaaccggtttattgaatcattgatgtctgggggtctgaccaattcagctcaaggtgttcaaggatatggagtaaatagttctggtgggttgtctttaccagttactgatggtggggctgatatgtatctcctggccaagaaattggaacttgagcggcagagatcaatacctagtccgtattcatattggcctggtcgggaatctgcaaacctgatgccaggatcagagaatgtgtcagaaaatgctcaacaacctacccgttctccaagttctgatttgttgtccatcctccaaggtgtaacggataggtcttctcctgctgttagtggtcctcttcctgcttggtctcaacccattcaaaaggaaagtgatttgcaccatgctaaaactttccaaacgcaaattccctttggggtccaacagcagagactgccagagcagaatttacctttgtcaggtttacttggtcaacctatggaaaataatccaggtggcatgttatctcctgatatgatgctcgctgctggactctctcaagagcatcaatcgctcaatctgttgcagcagcaacagctcttgttgcagttgaatgctcagacaccactttctgcccaacatcagcgtctattggtggaaaagatgctcttgcttaaacaccaacataaacaagaagagcagcagcaattgttacgacagcaacagcagctgtattctcaggtttttgctgatcaacagcgttctcagcaacggtttggagacccatcttatggtcagttgcaggcgtctcttgatgcgcttaggctgcaaccatcaaaagatatgtcacaagtcaatcagcaggtgcaggttcctgtttcccatgaggagcgaggcatcaacttagctgatttgctcccagtaacccatgccactaatcagactgttgcttctttcgaaaccccctctctgcacctgcaaaaccagctatttggtaatgttgaccctaggatggttctgcctgatcaaattgatgatacccataaaaaagagtcgaaatcagaatatgaaagaacagtttctgcagactatgtgaacagcttgtactcagaaaagcctgtcctttcccctggctatcatgctacacataatgtggaagaacctgtgagctatccaaacaatgaaagctccactgctactatgacagctcccgaaatagttgaaagtaagttgctggaggagcagtctaaggacatgtatgctggaaagggagaggtcagtattgagttatctggggagactcctgcaactgaagttaaaaacaatgacgtttctgtagcacggaagacttctgagaagaagtccaggaagcagcgggctaagcaggctgctgacctggctaagtcaacttctagagctcctctgcaggagacaaagaaacctcaaccaggaagtgctgatgattctgagataaagggtaaaactaaaaagtcggctgacactttgatagacaatgatactcacctcattaaaagctccacagccacagcttcaaacacttcccaaatgagttctgaagtagattcagtcaggggagaagagtcttcactgcaaaacacacgaacacaaccaggacgagcttggaagcctgctcctggctttaagccgaagtcattactggaaattcaaatggaagaacagagggtagcgcaagcagaagctttagctccaaagatttcttctaccgtgaattcagtgggttcggcggctccttgggctggaattgttaccaattcagattctaacatactaagggagactcatggagagtcagctattactcaaaccggtgttgtaaagcctgaaagtgttcctactcttaaggctaagaaaagccacttgcatgacttgctggctgatgatgtttttgccaaatccagtgacaaagagagggaagtaatggaaatcatctctaacaatgatgcatttatgcaagtcacgaccactaatgcagagtctttcgacgatgataactttattgacgctagggaaacaaaaaagagccgtaagaaatctgcgagggcaaaaacttctggtgcaaaaattgctgcacatgttcctgctgtagatacatccctccaaacaaactctgttgagaagggaaaaagttctcgtattctgcagcagcaggagaaggaagttttgccggctattccttctgggccttctctgggagattttgttctctggaaaggagagtctgtaaacaatcctccaccggctgctgcatggtcttctggtcccaaaaaatctacaaaacctagctcgcttagggacatcgtgaaggagcaggagaagatgacgacctcatctcatccaccccctagtccagtacctaccacccagaaagctattccacctcaggctcatcagggcggtgcttcctggtcgcgttctgcatcttcaccatcgcaggctgtttctcaatcttcctctcagtcaaaatccaaaggagatgatgaccttttctggggtccagttgagcaatcaacccaggacacaaaacagggagactttccacatcttacaagtcaaaacagttggggaaccaaaaacactcctggaaaagttaatgcaggaacttcactgaatcgacagaaatcagtttcaatgggatctgcggatcgggttttgtcttcacctgttgtcactcaggcgtcacacaaagggaaaaaagaggcagtaacaaaactcacagaggcgaatggcttcagagattggtgcaaaagcgaatgtctcagacttcttggttccgaagatacaagtgtcttggaattttgtctgaagctatcccgatcagaagctgaaactcttctgatagaaaatctggggtctcgtgaccctgaccacaagttcatcgacaaatttctcaactacaaagacctgttaccatcagaagtagttgagattgcatttcaatcaaagggctcgggagtcgggacccgaaacaacacaggtgaagactattactataacactacagctgcaaatgacgggttctcgaaagttggaggaaagaaaaaggcgaagaaagggaagaaggttagcttgagcgcatcggttctgggatttaatgtggttagtaaccggatcatgatgggagagattcagacaattgaggactga

SEQ ID NO: 81760 - protein, 1714 aa, Arabidopsis thaliana
  peptide (1)..(1714): Ceres Seq. ID no. 12661232
  misc_feature (547)..(602): Pfam Name: GYF domain Pfam Description: GYF domain
  misc_feature (800)..(1714): Homolog of NCBI NO: 34394390 NR Description: unknown protein [Oryza sativa (japonica
  misc_feature (1)..(296): Homolog of NCBI NO: 34394390 NR Description: unknown protein [Oryza sativa (japonica
  misc_feature (543)..(967): Homolog of NCBI NO: 34394390 NR Description: unknown protein [Oryza sativa (japonica
  misc_feature (27)..(367): Homolog of NCBI NO: 20161739 NR Description: B1033B05.5 [Oryza sativa (japonica
  misc_feature (524)..(644): Homolog of NCBI NO: 20161739 NR Description: B1033B05.5 [Oryza sativa (japonica
  misc_feature (1663)..(1714): Homolog of NCBI NO: 20161739 NR Description: B1033B05.5 [Oryza sativa (japonica
  misc_feature (32)..(375): Homolog of NCBI NO: 25403310 NR Description: protein F17L21.22 [imported] - Arabidopsis >gi|9802542|gb|AAF99744.1|AC004557_23 F17L21.22 [Arabidopsis
  misc_feature (544)..(607): Homolog of NCBI NO: 25403310 NR Description: protein F17L21.22 [imported] - Arabidopsis >gi|9802542|gb|AAF99744.1|AC004557_23 F17L21.22 [Arabidopsis
  misc_feature (1655)..(1714): Homolog of NCBI NO: 25403310 NR Description: protein F17L21.22 [imported] - Arabidopsis >gi|9802542|gb|AAF99744.1|AC004557_23 F17L21.22 [Arabidopsis
  misc_feature (524)..(919): Homolog of NCBI NO: 15221723 NR Description: unknown protein; protein id: At1g24300.1
MANSSAGSAADHRNKHLSVNPPHQIFKDIQGSDNAIPLSPQWLLSKPGENKTGMGTGDPNQYGNHSDVVRTTGNGEETLDNLKKKDVFRPSLLDAESGRRDRWRDEERDTLSSVRNDRWRNGDKDSGDNKKVDRWDNVAPKFGEQRRGPNDRWTDSGNKDAAPEQRRESKWNSRWGPDDKEAEIPRNKWDEPGKDGEIIREKGPSLPTSDGDHYRPWRPSQGRGRGEALHNQSTPNKQVTSFSHSRGRGENTAIFSAGRGRMSPGGSIFTSAPNQSHPPGSASDKGESGPGEPPHLRYSRMKLLDVYRMADTECYEKFPDGFIEVPSLTSEEPTDPLALCAPSSDEVNVLDAIEKGKIVSSGAPQTSKDGPTGRNPVEFSQPRRIRPAGSREDMTFGAEESKDESGETRNYPDDKFRPEASHEGYAPFRRGNEAPVRELKEPSMQGNAHVQSASPWRQSSGGERSNRNSHDWNDPSADSRLKSSDSVWSHPKDSINHLGGNNMMLPQSKGESRWQISEDPSLRRQPSLVFDREQEVRKLLPSSPEELSLYYKDPQGLIQGPFSGSDIIGWFEAGYFGIDLLVRLASAPNDSPFSLLGDVMPHLRAKSGPPPGFTGAKQNEFVDAAGTSAFPGVGKVHSGMGETDMLQNDMRYKHVAGTVAENRFIESLMSGGLTNSAQGVQGYGVNSSGGLSLPVTDGGADMYLLAKKLELERQRSIPSPYSYWPGRESANLMPGSENVSENAQQPTRSPSSDLLSILQGVTDRSSPAVSGPLPAWSQPIQKESDLHHAKTFQTQIPFGVQQQRLPEQNLPLSGLLGQPMENNPGGMLSPDMMLAAGLSQEHQSLNLLQQQQLLLQLNAQTPLSAQHQRLLVEKMLLLKHQHKQEEQQQLLRQQQQLYSQVFADQQRSQQRFGDPSYGQLQASLDALRLQPSKDMSQVNQQVQVPVSHEERGINLADLLPVTHATNQTVASFETPSLHLQNQLFGNVDPRMVLPDQIDDTHKKESKSEYERTVSADYVNSLYSEKPVLSPGYHATHNVEEPVSYPNNESSTATMTAPEIVESKLLEEQSKDMYAGKGEVSIELSGETPATEVKNNDVSVARKTSEKKSRKQRAKQAADLAKSTSRAPLQETKKPQPGSADDSEIKGKTKKSADTLIDNDTHLIKSSTATASNTSQMSSEVDSVRGEESSLQNTRTQPGRAWKPAPGFKPKSLLEIQMEEQRVAQAEALAPKISSTVNSVGSAAPWAGIVTNSDSNILRETHGESAITQTGVVKPESVPTLKAKKSHLHDLLADDVFAKSSDKEREVMEIISNNDAFMQVTTTNAESFDDDNFIDARETKKSRKKSARAKTSGAKIAAHVPAVDTSLQTNSVEKGKSSRILQQQEKEVLPAIPSGPSLGDFVLWKGESVNNPPPAAAWSSGPKKSTKPSSLRDIVKEQEKMTTSSHPPPSPVPTTQKAIPPQAHQGGASWSRSASSPSQAVSQSSSQSKSKGDDDLFWGPVEQSTQDTKQGDFPHLTSQNSWGTKNTPGKVNAGTSLNRQKSVSMGSADRVLSSPVVTQASHKGKKEAVTKLTEANGFRDWCKSECLRLLGSEDTSVLEFCLKLSRSEAETLLIENLGSRDPDHKFIDKFLNYKDLLPSEVVEIAFQSKGSGVGTRNNTGEDYYYNTTAANDGFSKVGGKKKAKKGKKVSLSASVLGFNVVSNRIMMGEIQTIED

SEQ ID NO: 81761 - protein, 1661 aa, Arabidopsis thaliana
  peptide (1)..(1661): Ceres Seq. ID no. 12661233
  misc_feature (494)..(549): Pfam Name: GYF domain Pfam Description: GYF domain
  misc_feature (747)..(1661): Homolog of NCBI NO: 34394390 NR Description: unknown protein [Oryza sativa (japonica
  misc_feature (1)..(243): Homolog of NCBI NO: 34394390 NR Description: unknown protein [Oryza sativa (japonica
  misc_feature (490)..(914): Homolog of NCBI NO: 34394390 NR Description: unknown protein [Oryza sativa (japonica
  misc_feature (1)..(314): Homolog of NCBI NO: 20161739 NR Description: B1033B05.5 [Oryza sativa (japonica
  misc_feature (471)..(591): Homolog of NCBI NO: 20161739 NR Description: B1033B05.5 [Oryza sativa (japonica
  misc_feature (1610)..(1661): Homolog of NCBI NO: 20161739 NR Description: B1033B05.5 [Oryza sativa (japonica
  misc_feature (1)..(322): Homolog of NCBI NO: 25403310 NR Description: protein F17L21.22 [imported] - Arabidopsis >gi|9802542|gb|AAF99744.1|AC004557_23 F17L21.22 [Arabidopsis
  misc_feature (491)..(554): Homolog of NCBI NO: 25403310 NR Description: protein F17L21.22 [imported] - Arabidopsis >gi|9802542|gb|AAF99744.1|AC004557_23 F17L21.22 [Arabidopsis
  misc_feature (1602)..(1661): Homolog of NCBI NO: 25403310 NR Description: protein F17L21.22 [imported] - Arabidopsis >gi|9802542|gb|AAF99744.1|AC004557_23 F17L21.22 [Arabidopsis
  misc_feature (471)..(866): Homolog of NCBI NO: 15221723 NR Description: unknown protein; protein id: At1g24300.1
MGTGDPNQYGNHSDVVRTTGNGEETLDNLKKKDVFRPSLLDAESGRRDRWRDEERDTLSSVRNDRWRNGDKDSGDNKKVDRWDNVAPKFGEQRRGPNDRWTDSGNKDAAPEQRRESKWNSRWGPDDKEAEIPRNKWDEPGKDGEIIREKGPSLPTSDGDHYRPWRPSQGRGRGEALHNQSTPNKQVTSFSHSRGRGENTAIFSAGRGRMSPGGSIFTSAPNQSHPPGSASDKGESGPGEPPHLRYSRMKLLDVYRMADTECYEKFPDGFIEVPSLTSEEPTDPLALCAPSSDEVNVLDAIEKGKIVSSGAPQTSKDGPTGRNPVEFSQPRRIRPAGSREDMTFGAEESKDESGETRNYPDDKFRPEASHEGYAPFRRGNEAPVRELKEPSMQGNAHVQSASPWRQSSGGERSNRNSHDWNDPSADSRLKSSDSVWSHPKDSINHLGGNNMMLPQSKGESRWQISEDPSLRRQPSLVFDREQEVRKLLPSSPEELSLYYKDPQGLIQGPFSGSDIIGWFEAGYFGIDLLVRLASAPNDSPFSLLGDVMPHLRAKSGPPPGFTGAKQNEFVDAAGTSAFPGVGKVHSGMGETDMLQNDMRYKHVAGTVAENRFIESLMSGGLTNSAQGVQGYGVNSSGGLSLPVTDGGADMYLLAKKLELERQRSIPSPYSYWPGRESANLMPGSENVSENAQQPTRSPSSDLLSILQGVTDRSSPAVSGPLPAWSQPIQKESDLHHAKTFQTQIPFGVQQQRLPEQNLPLSGLLGQPMENNPGGMLSPDMMLAAGLSQEHQSLNLLQQQQLLLQLNAQTPLSAQHQRLLVEKMLLLKHQHKQEEQQQLLRQQQQLYSQVFADQQRSQQRFGDPSYGQLQASLDALRLQPSKDMSQVNQQVQVPVSHEERGINLADLLPVTHATNQTVASFETPSLHLQNQLFGNVDPRMVLPDQIDDTHKKESKSEYERTVSADYVNSLYSEKPVLSPGYHATHNVEEPVSYPNNESSTATMTAPEIVESKLLEEQSKDMYAGKGEVSIELSGETPATEVKNNDVSVARKTSEKKSRKQRAKQAADLAKSTSRAPLQETKKPQPGSADDSEIKGKTKKSADTLIDNDTHLIKSSTATASNTSQMSSEVDSVRGEESSLQNTRTQPGRAWKPAPGFKPKSLLEIQMEEQRVAQAEALAPKISSTVNSVGSAAPWAGIVTNSDSNILRETHGESAITQTGVVKPESVPTLKAKKSHLHDLLADDVFAKSSDKEREVMEIISNNDAFMQVTTTNAESFDDDNFIDARETKKSRKKSARAKTSGAKIAAHVPAVDTSLQTNSVEKGKSSRILQQQEKEVLPAIPSGPSLGDFVLWKGESVNNPPPAAAWSSGPKKSTKPSSLRDIVKEQEKMTTSSHPPPSPVPTTQKAIPPQAHQGGASWSRSASSPSQAVSQSSSQSKSKGDDDLFWGPVEQSTQDTKQGDFPHLTSQNSWGTKNTPGKVNAGTSLNRQKSVSMGSADRVLSSPVVTQASHKGKKEAVTKLTEANGFRDWCKSECLRLLGSEDTSVLEFCLKLSRSEAETLLIENLGSRDPDHKFIDKFLNYKDLLPSEVVEIAFQSKGSGVGTRNNTGEDYYYNTTAANDGFSKVGGKKKAKKGKKVSLSASVLGFNVVSNRIMMGEIQTIED

SEQ ID NO: 81762 - protein, 1453 aa, Arabidopsis thaliana
  peptide (1)..(1453): Ceres Seq. ID no. 12661234
  misc_feature (286)..(341): Pfam Name: GYF domain Pfam Description: GYF domain
  misc_feature (539)..(1453): Homolog of NCBI NO: 34394390 NR Description: unknown protein [Oryza sativa (japonica
  misc_feature (1)..(35): Homolog of NCBI NO: 34394390 NR Description: unknown protein [Oryza sativa (japonica
  misc_feature (282)..(706): Homolog of NCBI NO: 34394390 NR Description: unknown protein [Oryza sativa (japonica
  misc_feature (1)..(106): Homolog of NCBI NO: 20161739 NR Description: B1033B05.5 [Oryza sativa (japonica
  misc_feature (263)..(383): Homolog of NCBI NO: 20161739 NR Description: B1033B05.5 [Oryza sativa (japonica
  misc_feature (1402)..(1453): Homolog of NCBI NO: 20161739 NR Description: B1033B05.5 [Oryza sativa (japonica
  misc_feature (1)..(114): Homolog of NCBI NO: 25403310 NR Description: protein F17L21.22 [imported] - Arabidopsis >gi|9802542|gb|AAF99744.1|AC004557_23 F17L21.22 [Arabidopsis
  misc_feature (283)..(346): Homolog of NCBI NO: 25403310 NR Description: protein F17L21.22 [imported] - Arabidopsis >gi|9802542|gb|AAF99744.1|AC004557_23 F17L21.22 [Arabidopsis
  misc_feature (1394)..(1453): Homolog of NCBI NO: 25403310 NR Description: protein F17L21.22 [imported] - Arabidopsis >gi|9802542|gb|AAF99744.1|AC004557_23 F17L21.22 [Arabidopsis
  misc_feature (263)..(658): Homolog of NCBI NO: 15221723 NR Description: unknown protein; protein id: At1g24300.1
MSPGGSIFTSAPNQSHPPGSASDKGESGPGEPPHLRYSRMKLLDVYRMADTECYEKFPDGFIEVPSLTSEEPTDPLALCAPSSDEVNVLDAIEKGKIVSSGAPQTSKDGPTGRNPVEFSQPRRIRPAGSREDMTFGAEESKDESGETRNYPDDKFRPEASHEGYAPFRRGNEAPVRELKEPSMQGNAHVQSASPWRQSSGGERSNRNSHDWNDPSADSRLKSSDSVWSHPKDSINHLGGNNMMLPQSKGESRWQISEDPSLRRQPSLVFDREQEVRKLLPSSPEELSLYYKDPQGLIQGPFSGSDIIGWFEAGYFGIDLLVRLASAPNDSPFSLLGDVMPHLRAKSGPPPGFTGAKQNEFVDAAGTSAFPGVGKVHSGMGETDMLQNDMRYKHVAGTVAENRFIESLMSGGLTNSAQGVQGYGVNSSGGLSLPVTDGGADMYLLAKKLELERQRSIPSPYSYWPGRESANLMPGSENVSENAQQPTRSPSSDLLSILQGVTDRSSPAVSGPLPAWSQPIQKESDLHHAKTFQTQIPFGVQQQRLPEQNLPLSGLLGQPMENNPGGMLSPDMMLAAGLSQEHQSLNLLQQQQLLLQLNAQTPLSAQHQRLLVEKMLLLKHQHKQEEQQQLLRQQQQLYSQVFADQQRSQQRFGDPSYGQLQASLDALRLQPSKDMSQVNQQVQVPVSHEERGINLADLLPVTHATNQTVASFETPSLHLQNQLFGNVDPRMVLPDQIDDTHKKESKSEYERTVSADYVNSLYSEKPVLSPGYHATHNVEEPVSYPNNESSTATMTAPEIVESKLLEEQSKDMYAGKGEVSIELSGETPATEVKNNDVSVARKTSEKKSRKQRAKQAADLAKSTSRAPLQETKKPQPGSADDSEIKGKTKKSADTLIDNDTHLIKSSTATASNTSQMSSEVDSVRGEESSLQNTRTQPGRAWKPAPGFKPKSLLEIQMEEQRVAQAEALAPKISSTVNSVGSAAPWAGIVTNSDSNILRETHGESAITQTGVVKPESVPTLKAKKSHLHDLLADDVFAKSSDKEREVMEIISNNDAFMQVTTTNAESFDDDNFIDARETKKSRKKSARAKTSGAKIAAHVPAVDTSLQTNSVEKGKSSRILQQQEKEVLPAIPSGPSLGDFVLWKGESVNNPPPAAAWSSGPKKSTKPSSLRDIVKEQEKMTTSSHPPPSPVPTTQKAIPPQAHQGGASWSRSASSPSQAVSQSSSQSKSKGDDDLFWGPVEQSTQDTKQGDFPHLTSQNSWGTKNTPGKVNAGTSLNRQKSVSMGSADRVLSSPVVTQASHKGKKEAVTKLTEANGFRDWCKSECLRLLGSEDTSVLEFCLKLSRSEAETLLIENLGSRDPDHKFIDKFLNYKDLLPSEVVEIAFQSKGSGVGTRNNTGEDYYYNTTAANDGFSKVGGKKKAKKGKKVSLSASVLGFNVVSNRIMMGEIQTIED

SEQ ID NO: 81763 - DNA, 897 bp, Arabidopsis thaliana
  misc_feature (1)..(897): Ceres Seq. ID no. 12661242
  misc_feature: MA Experiment ID: 20000328 Result: Down-regulated in Transcription
  misc_feature: MA Experiment 20000328 PARAMETER Experiment Name: At_42deg_Heat_Sub_P Parameter: Age (day) Value: 14
  misc_feature: MA Experiment 20000328 PARAMETER Experiment Name: At_42deg_Heat_Sub_P Parameter: Organism Value: A. thaliana
  misc_feature: MA Experiment 20000328 PARAMETER Experiment Name: At_42deg_Heat_Sub_P Parameter: Plant Line Value: WS
  misc_feature: MA Experiment 20000328 PARAMETER Experiment Name: At_42deg_Heat_Sub_P Parameter: Temperature (deg C) Value: 42 vs. 22
  misc_feature: MA Experiment 20000328 PARAMETER Experiment Name: At_42deg_Heat_Sub_P Parameter: Timepoint (hr) Value: 6
  misc_feature: MA Experiment 20000328 PARAMETER Experiment Name: At_42deg_Heat_Sub_P Parameter: Tissue Value: Aerial
  misc_feature: MA Experiment ID: 20000329 Result: Up-regulated in Transcription
  misc_feature: MA Experiment 20000329 PARAMETER Experiment Name: At_4deg_Cold_Sub_P Parameter: Age (day) Value: 14
  misc_feature: MA Experiment 20000329 PARAMETER Experiment Name: At_4deg_Cold_Sub_P Parameter: Organism Value: A. thaliana
  misc_feature: MA Experiment 20000329 PARAMETER Experiment Name: At_4deg_Cold_Sub_P Parameter: Plant Line Value: WS
  misc_feature: MA Experiment 20000329 PARAMETER Experiment Name: At_4deg_Cold_Sub_P Parameter: Temperature (deg C) Value: 4 vs. 22
  misc_feature: MA Experiment 20000329 PARAMETER Experiment Name: At_4deg_Cold_Sub_P Parameter: Timepoint (hr) Value: 6
  misc_feature: MA Experiment 20000329 PARAMETER Experiment Name: At_4deg_Cold_Sub_P Parameter: Tissue Value: Aerial
  misc_feature: MA Experiment ID: 20000355 Result: Down-regulated in Transcription
  misc_feature: MA Experiment 20000355 PARAMETER Experiment Name: At_Siliques_Sub_P Parameter: Age (day) Value: 21
  misc_feature: MA Experiment 20000355 PARAMETER Experiment Name: At_Siliques_Sub_P Parameter: Organism Value: A. thaliana
  misc_feature: MA Experiment 20000355 PARAMETER Experiment Name: At_Siliques_Sub_P Parameter: Plant Line Value: WS
  misc_feature: MA Experiment 20000355 PARAMETER Experiment Name: At_Siliques_Sub_P Parameter: Tissue Value: Less Than 5mm Siliques vs. Whole Plant
  misc_feature: MA Experiment ID: 20001807 Result: Up-regulated in Transcription
  misc_feature: MA Experiment 20001807 PARAMETER Experiment Name: At_50mM_NH4NO3_L-to-H_Sub_P Parameter: Timepoint (hr) Value: 6
  misc_feature: MA Experiment 20001807 PARAMETER Experiment Name: At_50mM_NH4NO3_L-to-H_Sub_P Parameter: Tissue Value: Leaf
  misc_feature: MA Experiment 20001807 PARAMETER Experiment Name: At_50mM_NH4NO3_L-to-H_Sub_P Parameter: Treatment Value: 50mM NH4NO3 vs 100mM Mannitol
atggcagaggcaagtttctatatcggagtcataggaaatgtaatctccgtactagttttcctctcaccagtattattaatcgatcggtccatattaatataccaaacaaaaatcatcagggagacgttttggaaaatagtgaagcggagatcaacggaggagtacaaaagcttgccgtacatttgcacgttgttaggatcatcgctatggacatattacggcatcgtcactcccggagaatatcttgtctccaccgttaatggctttggtgctcttgttgaaaccatctacgtttcactttttctcttttatgcccctcgacatctcaagctgaaaacagtggatgtggatgcgatgttgaacgtgttttttccaatcgcggcgattgtggcaacgagaagtgcgtttgaagatgagaagatgcgttctcaatcaataggtttcatatctgctggtctaaacattataatgtatggttctccactttcagcaatgctactatactgtaccacgacttggtatggtaggtccatatcttggataaagacatatatacgtaacatttcattttcaatcattcgcaacaaaataaatagaatacgttttgagtttatcacaatatctgttataatatatagactgatcatagtgtctaatttcttaatacaatatgcagaaaacagtagtgacaacaaagagcgtgaaatacatgccgttttggttgtcgtttttcctcttcttaaacggcgcgatttgggctgtctatgctttactccaacacgacgttttcttactcgtaaaaatgccaaaccggttggtttaagcaacggtttaagtgagattgctcaagatgaagaggaaggcctcacatcacgtgttgaacctctcctctcttaa

SEQ ID NO: 81764 - protein, 298 aa, Arabidopsis thaliana
  peptide (1)..(298): Ceres Seq. ID no. 12661243
  misc_feature (6)..(109): Pfam Name: MtN3/saliva family Pfam Description: MtN3/saliva family
  misc_feature (1)..(298): Homolog of NCBI NO: 7485021 NR Description: hypothetical protein - Arabidopsis thaliana cytochrome c oxidoreductase like protein [Arabidopsis thaliana]
  misc_feature (1)..(240): Homolog of NCBI NO: 30683457 NR Description: nodulin MtN3 family protein [Arabidopsis thaliana]
  misc_feature (1)..(240): Homolog of NCBI NO: 27754697 NR Description: putative cytochrome c oxidoreductase [Arabidopsis
  misc_feature (1)..(195): Homolog of NCBI NO: 30684193 NR Description: nodulin MtN3 family protein [Arabidopsis thaliana]
  misc_feature (267)..(298): Homolog of NCBI NO: 27754697 NR Description: putative cytochrome c oxidoreductase [Arabidopsis
  misc_feature (267)..(298): Homolog of NCBI NO: 30683457 NR Description: nodulin MtN3 family protein [Arabidopsis thaliana]
  misc_feature (8)..(171): Homolog of NCBI NO: 18413388 NR Description: putative protein; protein id: At4g10850.1, by cDNA: 33161. [Arabidopsis thaliana] contains similarity to Medicago truncatula MtN3 (GB:Y08726)
  misc_feature (4)..(171): Homolog of NCBI NO: 34907420 NR Description: P0018C10.36 [Oryza sativa (japonica
  misc_feature (39)..(166): Homolog of NCBI NO: 7486148 NR Description: hypothetical protein F25I24.60 - Arabidopsis >gi|4539359|emb|CAB40053.1| putative protein [Arabidopsis >gi|7267783|emb|CAB81186.1| putative protein [Arabidopsis
  misc_feature (39)..(166): Homolog of NCBI NO: 7486709 NR Description: hypothetical protein F8M12.20 - Arabidopsis >gi|3513744|gb|AAC33960.1| contains similarity to Medicago
MAEASFYIGVIGNVISVLVFLSPVLLIDRSILIYQTKIIRETFWKIVKRRSTEEYKSLPYICTLLGSSLWTYYGIVTPGEYLVSTVNGFGALVETIYVSLFLFYAPRHLKLKTVDVDAMLNVFFPIAAIVATRSAFEDEKMRSQSIGFISAGLNIIMYGSPLSAMLLYCTTTWYGRSISWIKTYIRNISFSIIRNKINRIRFEFITISVIIYRLIIVSNFLIQYAENSSDNKEREIHAVLVVVFPLLKRRDLGCLCFTPTRRFLTRKNAKPVGLSNGLSEIAQDEEEGLTSRVEPLLS

SEQ ID NO: 81765 - protein, 180 aa, Arabidopsis thaliana
  peptide (1)..(180): Ceres Seq. ID no. 12661244
  misc_feature (1)..(180): Homolog of NCBI NO: 7485021 NR Description: hypothetical protein - Arabidopsis thaliana cytochrome c oxidoreductase like protein [Arabidopsis thaliana]
  misc_feature (1)..(122): Homolog of NCBI NO: 30683457 NR Description: nodulin MtN3 family protein [Arabidopsis thaliana]
  misc_feature (1)..(122): Homolog of NCBI NO: 27754697 NR Description: putative cytochrome c oxidoreductase [Arabidopsis
  misc_feature (1)..(77): Homolog of NCBI NO: 30684193 NR Description: nodulin MtN3 family protein [Arabidopsis thaliana]
  misc_feature (149)..(180): Homolog of NCBI NO: 27754697 NR Description: putative cytochrome c oxidoreductase [Arabidopsis
  misc_feature (149)..(180): Homolog of NCBI NO: 30683457 NR Description: nodulin MtN3 family protein [Arabidopsis thaliana]
  misc_feature (1)..(53): Homolog of NCBI NO: 18413388 NR Description: putative protein; protein id: At4g10850.1, by cDNA: 33161. [Arabidopsis thaliana] contains similarity to Medicago truncatula MtN3 (GB:Y08726)
  misc_feature (1)..(53): Homolog of NCBI NO: 34907420 NR Description: P0018C10.36 [Oryza sativa (japonica
  misc_feature (1)..(48): Homolog of NCBI NO: 7486148 NR Description: hypothetical protein F25I24.60 - Arabidopsis >gi|4539359|emb|CAB40053.1| putative protein [Arabidopsis >gi|7267783|emb|CAB81186.1| putative protein [Arabidopsis
  misc_feature (1)..(48): Homolog of NCBI NO: 7486709 NR Description: hypothetical protein F8M12.20 - Arabidopsis >gi|3513744|gb|AAC33960.1| contains similarity to Medicago
MLNVFFPIAAIVATRSAFEDEKMRSQSIGFISAGLNIIMYGSPLSAMLLYCTTTWYGRSISWIKTYIRNISFSIIRNKINRIRFEFITISVIIYRLIIVSNFLIQYAENSSDNKEREIHAVLVVVFPLLKRRDLGCLCFTPTRRFLTRKNAKPVGLSNGLSEIAQDEEEGLTSRVEPLLS

SEQ ID NO: 81766 - protein, 158 aa, Arabidopsis thaliana
  peptide (1)..(158): Ceres Seq. ID no. 12661245
  misc_feature (1)..(158): Homolog of NCBI NO: 7485021 NR Description: hypothetical protein - Arabidopsis thaliana cytochrome c oxidoreductase like protein [Arabidopsis thaliana]
  misc_feature (1)..(100): Homolog of NCBI NO: 30683457 NR Description: nodulin MtN3 family protein [Arabidopsis thaliana]
  misc_feature (1)..(100): Homolog of NCBI NO: 27754697 NR Description: putative cytochrome c oxidoreductase [Arabidopsis
  misc_feature (1)..(55): Homolog of NCBI NO: 30684193 NR Description: nodulin MtN3 family protein [Arabidopsis thaliana]
  misc_feature (127)..(158): Homolog of NCBI NO: 27754697 NR Description: putative cytochrome c oxidoreductase [Arabidopsis
  misc_feature (127)..(158): Homolog of NCBI NO: 30683457 NR Description: nodulin MtN3 family protein [Arabidopsis thaliana]
  misc_feature (1)..(31): Homolog of NCBI NO: 18413388 NR Description: putative protein; protein id: At4g10850.1, by cDNA: 33161. [Arabidopsis thaliana] contains similarity to Medicago truncatula MtN3 (GB:Y08726)
  misc_feature (1)..(31): Homolog of NCBI NO: 34907420 NR Description: P0018C10.36 [Oryza sativa (japonica
  misc_feature (1)..(26): Homolog of NCBI NO: 7486148 NR Description: hypothetical protein F25I24.60 - Arabidopsis >gi|4539359|emb|CAB40053.1| putative protein [Arabidopsis >gi|7267783|emb|CAB81186.1| putative protein [Arabidopsis
  misc_feature (1)..(26): Homolog of NCBI NO: 7486709 NR Description: hypothetical protein F8M12.20 - Arabidopsis >gi|3513744|gb|AAC33960.1| contains similarity to Medicago
MRSQSIGFISAGLNIIMYGSPLSAMLLYCTTTWYGRSISWIKTYIRNISFSIIRNKINRIRFEFITISVIIYRLIIVSNFLIQYAENSSDNKEREIHAVLVVVFPLLKRRDLGCLCFTPTRRFLTRKNAKPVGLSNGLSEIAQDEEEGLTSRVEPLLS

SEQ ID NO: 81767 - DNA, 2106 bp, Arabidopsis thaliana
  misc_feature (1)..(2106): Ceres Seq. ID no. 12661250
  misc_feature: MA Experiment ID: 20000355 Result: Up-regulated in Transcription
  misc_feature: MA Experiment 20000355 PARAMETER Experiment Name: At_Siliques_Sub_P Parameter: Age (day) Value: 21
  misc_feature: MA Experiment 20000355 PARAMETER Experiment Name: At_Siliques_Sub_P Parameter: Organism Value: A. thaliana
  misc_feature: MA Experiment 20000355 PARAMETER Experiment Name: At_Siliques_Sub_P Parameter: Plant Line Value: WS
  misc_feature: MA Experiment 20000355 PARAMETER Experiment Name: At_Siliques_Sub_P Parameter: Tissue Value: Less Than 5mm Siliques vs. Whole Plant
  misc_feature: MA Experiment ID: 20000440 Result: Up-regulated in Transcription
  misc_feature: MA Experiment 20000440 PARAMETER Experiment Name: At_Closed-Flower__Sub_P Parameter: Tissue Value: Closed Flower vs. Whole Plant
atgaataaatatgtcttgttaggcgtcacggctctcattatggcaatggtcatttgtgtagaggccaacgatggcaacagcccgagtaggaaaatggaagaggttcaccgtgaaagcaagctgatgataacaaagacgacggtgagtattatatgtgcctccaccgattacaaacaagattgcaccacgagtctcgcaaccgtgaggtcgccggatccccgaaatctaataagatctgcttttgaccttgctatcatctcgattcgaagtggaatcgacagagggatgattgatctaaagagtagagcagatgccgatatgcacacaagagaagcgcttaatacttgtagagagcttatggatgatgcgattgatgatcttcgaaaaacgagggataaatttaggggatttttgttcactagattgtcagacttcgttgaggatctttgtgtgtggcttagcggatcaatcacataccaacagacgtgcattgatggatttgaagggattgatagtgaagcggccgtgatgatggagagagtcatgaggaaggggcagcatctcactagcaatggattggcgattgccgcaaatctcgataaattattgaaggctttccgtattccatttccatttcttaggtcaagaagaggcagactcggcattttaggttcgggttcttcacgagacgaatcggtgggttcttcccaagattcccctccaaatgaagattcttctgatgattctcctagcacagtggactcttcggagaatcaaccagtggattcttcatcagaaaatcagtcgtcggactcttcaaataatagaccattagattcttccaagaatcaacaaatggaatcttccgaagatactcctaaaaaatcggcattttcagggaatcaaccattagacgactcttccgataaacttcctcaaaaatcgacttcttctgagaaccaaccgttggattcctccgagaaccctcctcaaaaatcaacttctagcgagaatcgaccgttggatcctcttcgcaaattgaatccccttaataaattggattctttgaaggatcgacacttatcggaggaaggagagttcccgccatgggtaacaccgcattcgcggaggcttcttgcacgtagacctagaaataatggaatcaaagcgaatgttgtggttgcaaaggacgggagtggtaagtgcaagactatcgcacaagcattggcaatggtaccaatgaagaacacaaagaagtttgtgattcacataaaggaaggtgtttacaaggagaaagtagaggtaaccaaaaaaatgctacacgtcatgttcgttggagacggaccaacaaagacggttatcactggagacattgccttcttaccagaccaagtcggcacctaccgcaccgcctccgttgcggtgaatggggactatttcatggcaaaggatatagggttcgagaacacggcaggagctgcacgccatcaagcagtcgcactccgagtttcagccgactttgctgtgttcttcaactgtcatatgaatggttaccaagacacgctttacgtccatactcatcgtcaattctaccgtaactgccgtgtctcaggcacgatcgatttcgtcttcggtgacgccaaggccgtttttcagaactgcgaattcgttatccgccgtcccatggaacaccaacagtgcatcgtcacagcacaaggacgaaaagaccggcgtgagacaactgggattgttatccacaatagccgtataaccggtgatgcatcatatcttcccgtgaaagccaagaacagagcatttttgggacggccatggaaagagttttcgaggacaattataatgaacacagagattgatgatgtgatagacccggaaggttggttgaagtggaacgagacgtttgcgctcaacacgttgttctacactgagtaccgcaacagaggtcgtggttcgggtcagggtcgtcgggttaggtggagaggtatcaagcggatctctgatagagccgcaagggagtttgctcccgggaatttcttacgtggcaacacatggatcccacaaacgcgtattccatacaatgctaactga

SEQ ID NO: 81768 - protein, 701 aa, Arabidopsis thaliana
  peptide (1)..(701): Ceres Seq. ID no. 12661251
  misc_feature (391)..(688): Pfam Name: Pectinesterase Pfam Description: Pectinesterase
  misc_feature (361)..(701): Homolog of NCBI NO: 15239814 NR Description: pectinesterase family; protein id: At5g49180.1, by cDNA: 6699., supported by cDNA: gi_18700150 [Arabidopsis >gi|10177147|dbj|BAB10336.1| pectin methylesterase [Arabidopsis
  misc_feature (3)..(208): Homolog of NCBI NO: 15239814 NR Description: pectinesterase family; protein id: At5g49180.1, by cDNA: 6699., supported by cDNA: gi_18700150 [Arabidopsis >gi|10177147|dbj|BAB10336.1| pectin methylesterase [Arabidopsis
  misc_feature (361)..(700): Homolog of NCBI NO: 7549630 NR Description: pectin methylesterase, putative [Arabidopsis
  misc_feature (361)..(700): Homolog of NCBI NO: 22330893 NR Description: pectin methylesterase, putative; protein id: [Arabidopsis thaliana] >gi|26451728|dbj|BAC42959.1| putative
  misc_feature (3)..(203): Homolog of NCBI NO: 7549630 NR Description: pectin methylesterase, putative [Arabidopsis
  misc_feature (3)..(203): Homolog of NCBI NO: 22330893 NR Description: pectin methylesterase, putative; protein id: [Arabidopsis thaliana] >gi|26451728|dbj|BAC42959.1| putative
  misc_feature (361)..(700): Homolog of NCBI NO: 39104585 NR Description: putative pectin methylesterase [Arabidopsis
  misc_feature (3)..(203): Homolog of NCBI NO: 39104585 NR Description: putative pectin methylesterase [Arabidopsis
  misc_feature (352)..(698): Homolog of NCBI NO: 15230019 NR Description: putative pectinesterase; protein id: At3g05610.1 thaliana] >gi|6714449|gb|AAF26136.1|AC011620_12 putative
  misc_feature (3)..(217): Homolog of NCBI NO: 15230019 NR Description: putative pectinesterase; protein id: At3g05610.1 thaliana] >gi|6714449|gb|AAF26136.1|AC011620_12 putative
MNKYVLLGVTALIMAMVICVEANDGNSPSRKMEEVHRESKLMITKTTVSIICASTDYKQDCTTSLATVRSPDPRNLIRSAFDLAIISIRSGIDRGMIDLKSRADADMHTREALNTCRELMDDAIDDLRKTRDKFRGFLFTRLSDFVEDLCVWLSGSITYQQTCIDGFEGIDSEAAVMMERVMRKGQHLTSNGLAIAANLDKLLKAFRIPFPFLRSRRGRLGILGSGSSRDESVGSSQDSPPNEDSSDDSPSTVDSSENQPVDSSSENQSSDSSNNRPLDSSKNQQMESSEDTPKKSAFSGNQPLDDSSDKLPQKSTSSENQPLDSSENPPQKSTSSENRPLDPLRKLNPLNKLDSLKDRHLSEEGEFPPWVTPHSRRLLARRPRNNGIKANVVVAKDGSGKCKTIAQALAMVPMKNTKKFVIHIKEGVYKEKVEVTKKMLHVMFVGDGPTKTVITGDIAFLPDQVGTYRTASVAVNGDYFMAKDIGFENTAGAARHQAVALRVSADFAVFFNCHMNGYQDTLYVHTHRQFYRNCRVSGTIDFVFGDAKAVFQNCEFVIRRPMEHQQCIVTAQGRKDRRETTGIVIHNSRITGDASYLPVKAKNRAFLGRPWKEFSRTIIMNTEIDDVIDPEGWLKWNETFALNTLFYTEYRNRGRGSGQGRRVRWRGIKRISDRAAREFAPGNFLRGNTWIPQTRIPYNAN

SEQ ID NO: 81769 - protein, 688 aa, Arabidopsis thaliana
  peptide (1)..(688): Ceres Seq. ID no. 12661252
  misc_feature (378)..(675): Pfam Name: Pectinesterase Pfam Description: Pectinesterase
  misc_feature (348)..(688): Homolog of NCBI NO: 15239814 NR Description: pectinesterase family; protein id: At5g49180.1, by cDNA: 6699., supported by cDNA: gi_18700150 [Arabidopsis >gi|10177147|dbj|BAB10336.1| pectin methylesterase [Arabidopsis
  misc_feature (1)..(195): Homolog of NCBI NO: 15239814 NR Description: pectinesterase family; protein id: At5g49180.1, by cDNA: 6699., supported by cDNA: gi_18700150 [Arabidopsis >gi|10177147|dbj|BAB10336.1| pectin methylesterase [Arabidopsis
  misc_feature (348)..(687): Homolog of NCBI NO: 7549630 NR Description: pectin methylesterase, putative [Arabidopsis
  misc_feature (348)..(687): Homolog of NCBI NO: 22330893 NR Description: pectin methylesterase, putative; protein id: [Arabidopsis thaliana] >gi|26451728|dbj|BAC42959.1| putative
  misc_feature (1)..(190): Homolog of NCBI NO: 7549630 NR Description: pectin methylesterase, putative [Arabidopsis
  misc_feature (1)..(190): Homolog of NCBI NO: 22330893 NR Description: pectin methylesterase, putative; protein id: [Arabidopsis thaliana] >gi|26451728|dbj|BAC42959.1| putative
  misc_feature (348)..(687): Homolog of NCBI NO: 39104585 NR Description: putative pectin methylesterase [Arabidopsis
  misc_feature (1)..(190): Homolog of NCBI NO: 39104585 NR Description: putative pectin methylesterase [Arabidopsis
  misc_feature (339)..(685): Homolog of NCBI NO: 15230019 NR Description: putative pectinesterase; protein id: At3g05610.1 thaliana] >gi|6714449|gb|AAF26136.1|AC011620_12 putative
  misc_feature (1)..(204): Homolog of NCBI NO: 15230019 NR Description: putative pectinesterase; protein id: At3g05610.1 thaliana] >gi|6714449|gb|AAF26136.1|AC011620_12 putative
MAMVICVEANDGNSPSRKMEEVHRESKLMITKTTVSIICASTDYKQDCTTSLATVRSPDPRNLIRSAFDLAIISIRSGIDRGMIDLKSRADADMHTREALNTCRELMDDAIDDLRKTRDKFRGFLFTRLSDFVEDLCVWLSGSITYQQTCIDGFEGIDSEAAVMMERVMRKGQHLTSNGLAIAANLDKLLKAFRIPFPFLRSRRGRLGILGSGSSRDESVGSSQDSPPNEDSSDDSPSTVDSSENQPVDSSSENQSSDSSNNRPLDSSKNQQMESSEDTPKKSAFSGNQPLDDSSDKLPQKSTSSENQPLDSSENPPQKSTSSENRPLDPLRKLNPLNKLDSLKDRHLSEEGEFPPWVTPHSRRLLARRPRNNGIKANVVVAKDGSGKCKTIAQALAMVPMKNTKKFVIHIKEGVYKEKVEVTKKMLHVMFVGDGPTKTVITGDIAFLPDQVGTYRTASVAVNGDYFMAKDIGFENTAGAARHQAVALRVSADFAVFFNCHMNGYQDTLYVHTHRQFYRNCRVSGTIDFVFGDAKAVFQNCEFVIRRPMEHQQCIVTAQGRKDRRETTGIVIHNSRITGDASYLPVKAKNRAFLGRPWKEFSRTIIMNTEIDDVIDPEGWLKWNETFALNTLFYTEYRNRGRGSGQGRRVRWRGIKRISDRAAREFAPGNFLRGNTWIPQTRIPYNAN

SEQ ID NO: 81770 - protein, 686 aa, Arabidopsis thaliana
  peptide (1)..(686): Ceres Seq. ID no. 12661253
  misc_feature (376)..(673): Pfam Name: Pectinesterase Pfam Description: Pectinesterase
  misc_feature (346)..(686): Homolog of NCBI NO: 15239814 NR Description: pectinesterase family; protein id: At5g49180.1, by cDNA: 6699., supported by cDNA: gi_18700150 [Arabidopsis >gi|10177147|dbj|BAB10336.1| pectin methylesterase [Arabidopsis
  misc_feature (1)..(193): Homolog of NCBI NO: 15239814 NR Description: pectinesterase family; protein id: At5g49180.1, by cDNA: 6699., supported by cDNA: gi_18700150 [Arabidopsis >gi|10177147|dbj|BAB10336.1| pectin methylesterase [Arabidopsis
  misc_feature (346)..(685): Homolog of NCBI NO: 7549630 NR Description: pectin methylesterase, putative [Arabidopsis
  misc_feature (346)..(685): Homolog of NCBI NO: 22330893 NR Description: pectin methylesterase, putative; protein id: [Arabidopsis thaliana] >gi|26451728|dbj|BAC42959.1| putative
  misc_feature (1)..(188): Homolog of NCBI NO: 7549630 NR Description: pectin methylesterase, putative [Arabidopsis
  misc_feature (1)..(188): Homolog of NCBI NO: 22330893 NR Description: pectin methylesterase, putative; protein id: [Arabidopsis thaliana] >gi|26451728|dbj|BAC42959.1| putative
  misc_feature (346)..(685): Homolog of NCBI NO: 39104585 NR Description: putative pectin methylesterase [Arabidopsis
  misc_feature (1)..(188): Homolog of NCBI NO: 39104585 NR Description: putative pectin methylesterase [Arabidopsis
  misc_feature (337)..(683): Homolog of NCBI NO: 15230019 NR Description: putative pectinesterase; protein id: At3g05610.1 thaliana] >gi|6714449|gb|AAF26136.1|AC011620_12 putative
  misc_feature (1)..(202): Homolog of NCBI NO: 15230019 NR Description: putative pectinesterase; protein id: At3g05610.1 thaliana] >gi|6714449|gb|AAF26136.1|AC011620_12 putative
MVICVEANDGNSPSRKMEEVHRESKLMITKTTVSIICASTDYKQDCTTSLATVRSPDPRNLIRSAFDLAIISIRSGIDRGMIDLKSRADADMHTREALNTCRELMDDAIDDLRKTRDKFRGFLFTRLSDFVEDLCVWLSGSITYQQTCIDGFEGIDSEAAVMMERVMRKGQHLTSNGLAIAANLDKLLKAFRIPFPFLRSRRGRLGILGSGSSRDESVGSSQDSPPNEDSSDDSPSTVDSSENQPVDSSSENQSSDSSNNRPLDSSKNQQMESSEDTPKKSAFSGNQPLDDSSDKLPQKSTSSENQPLDSSENPPQKSTSSENRPLDPLRKLNPLNKLDSLKDRHLSEEGEFPPWVTPHSRRLLARRPRNNGIKANVVVAKDGSGKCKTIAQALAMVPMKNTKKFVIHIKEGVYKEKVEVTKKMLHVMFVGDGPTKTVITGDIAFLPDQVGTYRTASVAVNGDYFMAKDIGFENTAGAARHQAVALRVSADFAVFFNCHMNGYQDTLYVHTHRQFYRNCRVSGTIDFVFGDAKAVFQNCEFVIRRPMEHQQCIVTAQGRKDRRETTGIVIHNSRITGDASYLPVKAKNRAFLGRPWKEFSRTIIMNTEIDDVIDPEGWLKWNETFALNTLFYTEYRNRGRGSGQGRRVRWRGIKRISDRAAREFAPGNFLRGNTWIPQTRIPYNAN

SEQ ID NO: 81771 - DNA, 1400 bp, Arabidopsis thaliana
  misc_feature (1)..(1400): Ceres Seq. ID no. 12661273
  misc_feature: MA Experiment ID: 20000437 Result: Up-regulated in Transcription
  misc_feature: MA Experiment 20000437 PARAMETER Experiment Name: At_Drought_P Parameter: Age (day) Value: 8
  misc_feature: MA Experiment 20000437 PARAMETER Experiment Name: At_Drought_P Parameter: Organism Value: A. thaliana
  misc_feature: MA Experiment 20000437 PARAMETER Experiment Name: At_Drought_P Parameter: Plant Line Value: WS
  misc_feature: MA Experiment 20000437 PARAMETER Experiment Name: At_Drought_P Parameter: Timepoint (hr) Value: 24
  misc_feature: MA Experiment 20000437 PARAMETER Experiment Name: At_Drought_P Parameter: Tissue Value: Whole Plant
  misc_feature: MA Experiment 20000437 PARAMETER Experiment Name: At_Drought_P Parameter: Treatment Value: Drought vs. No Drought
  misc_feature: MA Experiment ID: 20000495 Result: Up-regulated in Transcription
  misc_feature: MA Experiment 20000495 PARAMETER Experiment Name: At_Guard_Cells_P Parameter: Harvest Date Value: 8/2/2002
  misc_feature: MA Experiment 20000495 PARAMETER Experiment Name: At_Guard_Cells_P Parameter: Organism Value: A. thaliana
  misc_feature: MA Experiment 20000495 PARAMETER Experiment Name: At_Guard_Cells_P Parameter: Tissue Value: Guard Cells vs. Leaves
acacacacacccaactacttttttccatcgccggcctgtacaaatgtcgactacccgtaggatccgcggcgagaatcggttttataacccacctccgatgagaaaacttcaacaagagcgtgagaagaagagacttgaagcggaggagatagagaaagagaagaagaaggcaaaggagattctcgatcgaaagattaaagtcgaggagaaggagattaagcaacctgaggagtgctcgacctccgattgctctgtgccgagtcgggtctcctccaccaccaccaccaccggaactacttcttccaatttgggccggtttctggattgcaccactccaattgtttctacgcgcacttgcctttgacaagtagtaaggggtggagaactcgtgaaccagagtaccgtccctatttcttgctgaatgatttgtgggattcatttgaggaatggagcgcctacggtgtcggggttcctcttcttttaaatgggatcgattcggttgttcagtattatgttccttatctctctggtattcagctttatgaagacccatctacgagcctgcacaactaggaggagagttggtgaagaaagtgatggtgattcgcctagagacatgagtagcgatgggagcaatgactgtagagagctttctcaaaatttatacagagcctctttggaagagaaaccttgcattggttcatcgagtgatgagagtgaggccagcagtaactctcctggtgaacttgtctttgagtatcttgagggtgctatgccatttggccgtgaaccattgaccgacaagatctcaaacctgtcatcacaattcccagcactcagaacatacagaagctgtgatctatcaccttcgagttgggtctctgttgcttggtacccaatataccgaataccattaggtcaatcgttacaaaacctcgatgcttgctttttaacattccactcgttgtcaacaccctgtcgaggtacaagcaatgaggaaggtcaaagctcaagcaaatcggttgcatcggcgaagttccattgcccactttcggtctcgcatcctacaagtttaaactgtcagaatggagcccagagagtgacgtagacgagaaccagagagtcgggacgctgctacgaacagctgaagagtggctcaggcggttgaaggtgattctaccggactttagacacttcatatcgcatagtggttcggcgtggagatgatgatatttagagtcattttctaaactctaaataaggagagtgatatatagcaaaagtgaaatatctttcagctacttttgtttgttttgttgaaggaaaatgagaatctgtatagacactgatcgtacatttgtttaattactgggaaaacttatgtaattgaaacagtttgg

SEQ ID NO: 81772 - protein, 207 aa, Arabidopsis thaliana
  peptide (1)..(207): Ceres Seq. ID no. 12661274
  misc_feature (25)..(188): Pfam Name: Protein of unknown function (DUF789) Pfam Description: Protein of unknown function (DUF789)
  misc_feature (25)..(188): Homolog of NCBI NO: 15450996 NR Description: Unknown protein [Arabidopsis thaliana]
  misc_feature (1)..(207): Homolog of NCBI NO: 18414588 NR Description: expressed protein; protein id: At4g16100.1,
  misc_feature (32)..(108): Homolog of NCBI NO: 7485075 NR Description: hypothetical protein - Arabidopsis thaliana hypothetical protein [Arabidopsis thaliana]
  misc_feature (39)..(178): Homolog of NCBI NO: 22327664 NR Description: putative protein; protein id: At5g49220.1, by cDNA: gi_17381185, supported by cDNA: gi_20465842 [Arabidopsis >gi|17381186|gb|AAL36405.1| unknown protein [Arabidopsis
  misc_feature (39)..(163): Homolog of NCBI NO: 10177151 NR Description: gb|AAF31026.1~gene_id:K21P3.10~similar to unknown
  misc_feature (13)..(189): Homolog of NCBI NO: 18379188 NR Description: predicted by genscan and genefinder; protein id: supported by cDNA: 8949. [Arabidopsis thaliana]
  misc_feature (69)..(201): Homolog of NCBI NO: 34914654 NR Description: P0504D03.18 [Oryza sativa (japonica
  misc_feature (1)..(170): Homolog of NCBI NO: 31249743 NR Description: hypothetical protein [Oryza sativa (japonica
  misc_feature (1)..(170): Homolog of NCBI NO: 34897254 NR Description: hypothetical protein [Oryza sativa (japonica group)] >gi|28372687|gb|AAO39871.1| hypothetical protein [Oryza
  misc_feature (28)..(197): Homolog of NCBI NO: 34394268 NR Description: hypothetical protein [Oryza sativa (japonica
MGSIRLFSIMFLISLVFSFMKTHLRACTTRRRVGEESDGDSPRDMSSDGSNDCRELSQNLYRASLEEKPCIGSSSDESEASSNSPGELVFEYLEGAMPFGREPLTDKISNLSSQFPALRTYRSCDLSPSSWVSVAWYPIYRIPLGQSLQNLDACFLTFHSLSTPCRGTSNEEGQSSSKSVASAKFHCPLSVSHPTSLNCQNGAQRVT

SEQ ID NO: 81773 - protein, 198 aa, Arabidopsis thaliana
  peptide (1)..(198): Ceres Seq. ID no. 12661275
  misc_feature (16)..(179): Pfam Name: Protein of unknown function (DUF789) Pfam Description: Protein of unknown function (DUF789)
  misc_feature (16)..(179): Homolog of NCBI NO: 15450996 NR Description: Unknown protein [Arabidopsis thaliana]
  misc_feature (1)..(198): Homolog of NCBI NO: 18414588 NR Description: expressed protein; protein id: At4g16100.1,
  misc_feature (23)..(99): Homolog of NCBI NO: 7485075 NR Description: hypothetical protein - Arabidopsis thaliana hypothetical protein [Arabidopsis thaliana]
  misc_feature (30)..(169): Homolog of NCBI NO: 22327664 NR Description: putative protein; protein id: At5g49220.1, by cDNA: gi_17381185, supported by cDNA: gi_20465842 [Arabidopsis >gi|17381186|gb|AAL36405.1| unknown protein [Arabidopsis
  misc_feature (30)..(154): Homolog of NCBI NO: 10177151 NR Description: gb|AAF31026.1~gene_id:K21P3.10~similar to unknown
  misc_feature (4)..(180): Homolog of NCBI NO: 18379188 NR Description: predicted by genscan and genefinder; protein id: supported by cDNA: 8949. [Arabidopsis thaliana]
  misc_feature (60)..(192): Homolog of NCBI NO: 34914654 NR Description: P0504D03.18 [Oryza sativa (japonica
  misc_feature (1)..(161): Homolog of NCBI NO: 31249743 NR Description: hypothetical protein [Oryza sativa (japonica
  misc_feature (1)..(161): Homolog of NCBI NO: 34897254 NR Description: hypothetical protein [Oryza sativa (japonica group)] >gi|28372687|gb|AAO39871.1| hypothetical protein [Oryza
  misc_feature (19)..(188): Homolog of NCBI NO: 34394268 NR Description: hypothetical protein [Oryza sativa (japonica
MFLISLVFSFMKTHLRACTTRRRVGEESDGDSPRDMSSDGSNDCRELSQNLYRASLEEKPCIGSSSDESEASSNSPGELVFEYLEGAMPFGREPLTDKISNLSSQFPALRTYRSCDLSPSSWVSVAWYPIYRIPLGQSLQNLDACFLTFHSLSTPCRGTSNEEGQSSSKSVASAKFHCPLSVSHPTSLNCQNGAQRVT

SEQ ID NO: 81774 - protein, 188 aa, Arabidopsis thaliana
  peptide (1)..(188): Ceres Seq. ID no. 12661276
  misc_feature (6)..(169): Pfam Name: Protein of unknown function (DUF789) Pfam Description: Protein of unknown function (DUF789)
  misc_feature (6)..(169): Homolog of NCBI NO: 15450996 NR Description: Unknown protein [Arabidopsis thaliana]
  misc_feature (1)..(188): Homolog of NCBI NO: 18414588 NR Description: expressed protein; protein id: At4g16100.1,
  misc_feature (13)..(89): Homolog of NCBI NO: 7485075 NR Description: hypothetical protein - Arabidopsis thaliana hypothetical protein [Arabidopsis thaliana]
  misc_feature (20)..(159): Homolog of NCBI NO: 22327664 NR Description: putative protein; protein id: At5g49220.1, by cDNA: gi_17381185, supported by cDNA: gi_20465842 [Arabidopsis >gi|17381186|gb|AAL36405.1| unknown protein [Arabidopsis
  misc_feature (20)..(144): Homolog of NCBI NO: 10177151 NR Description: gb|AAF31026.1~gene_id:K21P3.10~similar to unknown
  misc_feature (1)..(170): Homolog of NCBI NO: 18379188 NR Description: predicted by genscan and genefinder; protein id: supported by cDNA: 8949. [Arabidopsis thaliana]
  misc_feature (50)..(182): Homolog of NCBI NO: 34914654 NR Description: P0504D03.18 [Oryza sativa (japonica
  misc_feature (1)..(151): Homolog of NCBI NO: 31249743 NR Description: hypothetical protein [Oryza sativa (japonica
  misc_feature (1)..(151): Homolog of NCBI NO: 34897254 NR Description: hypothetical protein [Oryza sativa (japonica group)] >gi|28372687|gb|AAO39871.1| hypothetical protein [Oryza
  misc_feature (9)..(178): Homolog of NCBI NO: 34394268 NR Description: hypothetical protein [Oryza sativa (japonica
MKTHLRACTTRRRVGEESDGDSPRDMSSDGSNDCRELSQNLYRASLEEKPCIGSSSDESEASSNSPGELVFEYLEGAMPFGREPLTDKISNLSSQFPALRTYRSCDLSPSSWVSVAWYPIYRIPLGQSLQNLDACFLTFHSLSTPCRGTSNEEGQSSSKSVASAKFHCPLSVSHPTSLNCQNGAQRVT

SEQ ID NO: 81775 - DNA, 681 bp, Arabidopsis thaliana
  misc_feature (1)..(681): Ceres Seq. ID no. 12661281
  misc_feature: MA Experiment ID: 20000355 Result: Up-regulated in Transcription
  misc_feature: MA Experiment 20000355 PARAMETER Experiment Name: At_Siliques_Sub_P Parameter: Age (day) Value: 21
  misc_feature: MA Experiment 20000355 PARAMETER Experiment Name: At_Siliques_Sub_P Parameter: Organism Value: A. thaliana
  misc_feature: MA Experiment 20000355 PARAMETER Experiment Name: At_Siliques_Sub_P Parameter: Plant Line Value: WS
  misc_feature: MA Experiment 20000355 PARAMETER Experiment Name: At_Siliques_Sub_P Parameter: Tissue Value: Less Than 5mm Siliques vs. Whole Plant
  misc_feature: MA Experiment ID: 20000440 Result: Up-regulated in Transcription
  misc_feature: MA Experiment 20000440 PARAMETER Experiment Name: At_Closed-Flower__Sub_P Parameter: Tissue Value: Closed Flower vs. Whole Plant
  misc_feature: MA Experiment ID: 20001807 Result: Up-regulated in Transcription
  misc_feature: MA Experiment 20001807 PARAMETER Experiment Name: At_50mM_NH4NO3_L-to-H_Sub_P Parameter: Timepoint (hr) Value: 6
  misc_feature: MA Experiment 20001807 PARAMETER Experiment Name: At_50mM_NH4NO3_L-to-H_Sub_P Parameter: Tissue Value: Leaf
  misc_feature: MA Experiment 20001807 PARAMETER Experiment Name: At_50mM_NH4NO3_L-to-H_Sub_P Parameter: Treatment Value: 50mM NH4NO3 vs 100mM Mannitol
  misc_feature: Pfam Name: GATA Pfam Description: GATA zinc finger
atgtcaatgacggaagaaaccaagacgacgaagctcgaatcggcgggagattcgtccgatgtagacaacgggaactgtagtagcagtggaagtggaggtgatacgaagaagacatgcgttgattgcggaacaagcaggactcctcttttggcgtggtggacctgcttggccctaaactctgttgctagtgggttttgtctcattgatgtgatcatgtgtatacatagtctaggtatgcgagccttattactaattgatcagtcattgtgcaatgcgtgtggtatcaagagcagaaagaagagacaagcagctcttggaattagacaagatgatattaaaatcaagagcaaaagtaataacaatcttggtcttgagagccgaaatgtcaagaccggaaaaggcgaaccagttaatgttaagattgccaaatgtgaaccgggaattgtcaagattgccaaaggtgaaccaggaaatgtcaagaacaaaatcaagagagatcctgagaattccagtagcagcaataataacaagaagaacgtgaaaagggttggtagatttttggattttgggtttaaggtaccggcgatgaagagatcggctgtggagaagaagaggctatggaggaaacttggggaagaggaacgagccgcagtacttctcatggctctttcttgtggttga

SEQ ID NO: 81776 - protein, 226 aa, Arabidopsis thaliana
  peptide (1)..(226): Ceres Seq. ID no. 12661282
  misc_feature: Pfam Name: GATA Pfam Description: GATA zinc finger
  misc_feature (1)..(226): Homolog of NCBI NO: 22328703 NR Description: similar to GATA zinc finger protein; protein id:
  misc_feature (87)..(226): Homolog of NCBI NO: 26453042 NR Description: unknown protein [Arabidopsis thaliana]
  misc_feature (87)..(225): Homolog of NCBI NO: 15228899 NR Description: GATA zinc finger protein; protein id: At3g16870.1 thaliana] >gi|11994746|dbj|BAB03075.1| gene_id:MUH15.3~unknown
  misc_feature (4)..(49): Homolog of NCBI NO: 15228899 NR Description: GATA zinc finger protein; protein id: At3g16870.1 thaliana] >gi|11994746|dbj|BAB03075.1| gene_id:MUH15.3~unknown
  misc_feature (1)..(160): Homolog of NCBI NO: 26453042 NR Description: unknown protein [Arabidopsis thaliana]
  misc_feature (100)..(226): Homolog of NCBI NO: 15239847 NR Description: GATA zinc finger protein; protein id: At5g49300.1 thaliana] >gi|10177159|dbj|BAB10348.1|
MSMTEETKTTKLESAGDSSDVDNGNCSSSGSGGDTKKTCVDCGTSRTPLLAWWTCLALNSVASGFCLIDVIMCIHSLGMRALLLIDQSLCNACGIKSRKKRQAALGIRQDDIKIKSKSNNNLGLESRNVKTGKGEPVNVKIAKCEPGIVKIAKGEPGNVKNKIKRDPENSSSSNNNKKNVKRVGRFLDFGFKVPAMKRSAVEKKRLWRKLGEEERAAVLLMALSCG

SEQ ID NO: 81777 - protein, 224 aa, Arabidopsis thaliana
  peptide (1)..(224): Ceres Seq. ID no. 12661283
  misc_feature: Pfam Name: GATA Pfam Description: GATA zinc finger
  misc_feature (1)..(224): Homolog of NCBI NO: 22328703 NR Description: similar to GATA zinc finger protein; protein id:
  misc_feature (85)..(224): Homolog of NCBI NO: 26453042 NR Description: unknown protein [Arabidopsis thaliana]
  misc_feature (85)..(223): Homolog of NCBI NO: 15228899 NR Description: GATA zinc finger protein; protein id: At3g16870.1 thaliana] >gi|11994746|dbj|BAB03075.1| gene_id:MUH15.3~unknown
  misc_feature (2)..(47): Homolog of NCBI NO: 15228899 NR Description: GATA zinc finger protein; protein id: At3g16870.1 thaliana] >gi|11994746|dbj|BAB03075.1| gene_id:MUH15.3~unknown
  misc_feature (1)..(158): Homolog of NCBI NO: 26453042 NR Description: unknown protein [Arabidopsis thaliana]
  misc_feature (98)..(224): Homolog of NCBI NO: 15239847 NR Description: GATA zinc finger protein; protein id: At5g49300.1 thaliana] >gi|10177159|dbj|BAB10348.1|
MTEETKTTKLESAGDSSDVDNGNCSSSGSGGDTKKTCVDCGTSRTPLLAWWTCLALNSVASGFCLIDVIMCIHSLGMRALLLIDQSLCNACGIKSRKKRQAALGIRQDDIKIKSKSNNNLGLESRNVKTGKGEPVNVKIAKCEPGIVKIAKGEPGNVKNKIKRDPENSSSSNNNKKNVKRVGRFLDFGFKVPAMKRSAVEKKRLWRKLGEEERAAVLLMALSCG

SEQ ID NO: 81778 - protein, 155 aa, Arabidopsis thaliana
  peptide (1)..(155): Ceres Seq. ID no. 12661284
  misc_feature: Pfam Name: GATA Pfam Description: GATA zinc finger
  misc_feature (1)..(155): Homolog of NCBI NO: 22328703 NR Description: similar to GATA zinc finger protein; protein id:
  misc_feature (16)..(155): Homolog of NCBI NO: 26453042 NR Description: unknown protein [Arabidopsis thaliana]
  misc_feature (16)..(154): Homolog of NCBI NO: 15228899 NR Description: GATA zinc finger protein; protein id: At3g16870.1 thaliana] >gi|11994746|dbj|BAB03075.1| gene_id:MUH15.3~unknown
  misc_feature (1)..(89): Homolog of NCBI NO: 26453042 NR Description: unknown protein [Arabidopsis thaliana]
  misc_feature (29)..(155): Homolog of NCBI NO: 15239847 NR Description: GATA zinc finger protein; protein id: At5g49300.1 thaliana] >gi|10177159|dbj|BAB10348.1|
MCIHSLGMRALLLIDQSLCNACGIKSRKKRQAALGIRQDDIKIKSKSNNNLGLESRNVKTGKGEPVNVKIAKCEPGIVKIAKGEPGNVKNKIKRDPENSSSSNNNKKNVKRVGRFLDFGFKVPAMKRSAVEKKRLWRKLGEEERAAVLLMALSCG

SEQ ID NO: 81779 - DNA, 2721 bp, Arabidopsis thaliana
  misc_feature (1)..(2721): Ceres Seq. ID no. 12661293
  misc_feature: MA Experiment ID: 20000184 Result: Down-regulated in Transcription
  misc_feature: MA Experiment 20000184 PARAMETER Experiment Name: At_Shoots__P Parameter: Age (day) Value: 7
  misc_feature: MA Experiment 20000184 PARAMETER Experiment Name: At_Shoots__P Parameter: Tissue Value: Shoots vs. Whole Plant
  misc_feature: MA Experiment ID: 20000265 Result: Down-regulated in Transcription
  misc_feature: MA Experiment 20000265 PARAMETER Experiment Name: At_Open_Flower_P Parameter: Age (day) Value: 21
  misc_feature: MA Experiment 20000265 PARAMETER Experiment Name: At_Open_Flower_P Parameter: Plant Line Value: WS
  misc_feature: MA Experiment 20000265 PARAMETER Experiment Name: At_Open_Flower_P Parameter: Tissue Value: Closed Flower vs. Whole Plant
atggccggcgttgattccggcaagcttatcggctctgagattcatggattccatactttacaagatctagatatacaaacaatgttagatgaagcatacagtaggtggctccgtcctaatgagatccatgctcttctctgtaaccataaattcttcaccatcaacgtcaagccctgtggtacgattgtgttgtttgatcgtaagatgttgaggaactttagaaaggatggtcataactggaaaaagaaaaaggatggaaagacaattaaggaagctcatgaacatctaaaagttggtaatgaggaaaggattcatgtttattatgcccacggtgaggatacccctacatttgtgcgaaggtgttactggttattggataagtctcaggagcacatagttcttgtccactatcgcgagacacatgaggttcatgcagctccagcaacacctgggaactcgtactcaagttcgatcactgaccacttatctcctaaaattgtagctgaagataccagttctggtgtccataatacttgtaatacagtgcggagcaacagtctgggttctagaaatcatgagattaggcttcatgagatcaacacacttgattgggatgagcttctagtacctgcagatattagcaaccaatctcatccaaccgaagaagatatgctatacttcacagaacagctccaaactgcacccaggggatctgtaaagcaaggaaatcaccttgcaggctacaacggatcagtagatataccatcattcccgggtcttgaagatcctgtatatcaaaataataactcatgtggtgcaggagaattttctagtcagcattcgcactgtggagtagatccaaatctacagagaagggatttcagtgcaacagttactgatcaaccaggtgatgctttgcttaataacggttatggaagtcaggatagttttggaaggtgggtgaacaacttcattagtgactctcctggttccgtcgatgatccttcccttgaagctgtatatacacctgggcaggattcatctactcctcctactgtatttcattcccactctgacataccggagcaagtattcaacataactgatgtttcacctgcctggggcgtattcgacagagaaaacaaaggtcttatgcatctcttatggctaagtgtgagtactgagtacttccaacatttgggaagatcaaacctcatctgcatatgtggagagttgcgtgtccccgccgaatttctccagatgggggtttatcgttgcttccttcctcctcaatctcctggggtggtgaacctttatcttagtgtcgatggaaacaaaccgatcagccaattgttcagcttcgaacaccgctcagttcagtttatcgaaaaagccatccctcaagacgaccagctatacaagtgggaagaatttgagttccaagtcagacttgctcatcttctgttcacttcttcgaacaaaatcagcgttttaactagtaaaatatcacctgaaaaccttcttgaggctaagaaactcgccagcaggacttcgcatctcttaaatagttgggcttatttaatgaagtcaattcaggcaaatgaggtaccgtttgatcaagcgagggaccatctctttgagcttactctgaaaaataggctgaaagagtggcttttggagaaggtcatcgaaaaccgcaacactaaggaatatgactctaaagggcttggagtgatccacctctgtgccgtcctaggatacacttggtcaatccttctcttctcctgggcaaatatatcgttggatttccgtgataagcagggttggactgctcttcattgggcagcatactatggaaggccaaacctggtgacagaccctactaaggaattcctcggcggctgcacggcagctgatctggcacaacagaaaggttatgacggtttagcagcttttcttgctgagaaatgtcttgtagcacagttcaaggacatgcaaacggctggaaacattagtggcaaccttgaaaccatcaaggcagagaagtcgtcaaatccagggaatgcaaatgaagaggagcaaagcctgaaggacactctagcggcatacagaactgctgcagaggcagcggcgcggattcagggagcgttcagggagcacgagctgaaagttaggtcaagcgcagttaggtttgctagcaaggaagaagaagccaaaaacataatagccgcgatgaagattcagcacgcgtttcgcaatttcgaggttcgtaggaagattgcagccgctgctcggattcagtataggttccaaacatggaaaatgaggcgggaatttctgaacatgcgaaagaaggcaattaggatccaggctgcgtttagaggtttccaagtaagaagacagtaccagaaaataacatggtcagtgggagttcttgagaaggcaattctgagatggagactgaagagaaaaggattcagaggccttcaggtaagtcaacctgacgagaaggaagggagtgaggcggtggaggatttctacaagacaagccagaaacaagcggaggaacggcttgagaggtcagtggttaaagtccaggccatgttccggtccaagaaggctcagcaagattacagaaggatgaaactggctcatgaagaagctcagctggagtatgatgggatgcaagaacttgatcaaatggctacggaggagagctga

SEQ ID NO: 81780 - protein, 906 aa, Arabidopsis thaliana
  peptide (1)..(906): Ceres Seq. ID no. 12661294
  misc_feature (366)..(457): Pfam Name: IPT/TIG domain Pfam Description: IPT/TIG domain
  misc_feature (295)..(905): Homolog of NCBI NO: 15228914 NR Description: calmodulin-binding protein; protein id:
  misc_feature (1)..(253): Homolog of NCBI NO: 15228914 NR Description: calmodulin-binding protein; protein id:
  misc_feature (295)..(892): Homolog of NCBI NO: 7670023 NR Description: transcription factor-like protein [Arabidopsis
  misc_feature (1)..(253): Homolog of NCBI NO: 7670023 NR Description: transcription factor-like protein [Arabidopsis
  misc_feature (9)..(892): Homolog of NCBI NO: 33146995 NR Description: putative calmodulin-binding protein [Oryza sativa
  misc_feature (294)..(904): Homolog of NCBI NO: 37533660 NR Description: putative calmodulin binding protein similar to
  misc_feature (17)..(140): Homolog of NCBI NO: 37533660 NR Description: putative calmodulin binding protein similar to
  misc_feature (305)..(881): Homolog of NCBI NO: 30681670 NR Description: ethylene-induced calmodulin-binding protein,
  misc_feature (12)..(139): Homolog of NCBI NO: 30681670 NR Description: ethylene-induced calmodulin-binding protein,
  misc_feature (305)..(881): Homolog of NCBI NO: 25412096 NR Description: hypothetical protein At2g22300 [imported] - thaliana >gi|4567197|gb|AAD23613.1| unknown protein [Arabidopsis
MAGVDSGKLIGSEIHGFHTLQDLDIQTMLDEAYSRWLRPNEIHALLCNHKFFTINVKPCGTIVLFDRKMLRNFRKDGHNWKKKKDGKTIKEAHEHLKVGNEERIHVYYAHGEDTPTFVRRCYWLLDKSQEHIVLVHYRETHEVHAAPATPGNSYSSSITDHLSPKIVAEDTSSGVHNTCNTVRSNSLGSRNHEIRLHEINTLDWDELLVPADISNQSHPTEEDMLYFTEQLQTAPRGSVKQGNHLAGYNGSVDIPSFPGLEDPVYQNNNSCGAGEFSSQHSHCGVDPNLQRRDFSATVTDQPGDALLNNGYGSQDSFGRWVNNFISDSPGSVDDPSLEAVYTPGQDSSTPPTVFHSHSDIPEQVFNITDVSPAWGVFDRENKGLMHLLWLSVSTEYFQHLGRSNLICICGELRVPAEFLQMGVYRCFLPPQSPGVVNLYLSVDGNKPISQLFSFEHRSVQFIEKAIPQDDQLYKWEEFEFQVRLAHLLFTSSNKISVLTSKISPENLLEAKKLASRTSHLLNSWAYLMKSIQANEVPFDQARDHLFELTLKNRLKEWLLEKVIENRNTKEYDSKGLGVIHLCAVLGYTWSILLFSWANISLDFRDKQGWTALHWAAYYGRPNLVTDPTKEFLGGCTAADLAQQKGYDGLAAFLAEKCLVAQFKDMQTAGNISGNLETIKAEKSSNPGNANEEEQSLKDTLAAYRTAAEAAARIQGAFREHELKVRSSAVRFASKEEEAKNIIAAMKIQHAFRNFEVRRKIAAAARIQYRFQTWKMRREFLNMRKKAIRIQAAFRGFQVRRQYQKITWSVGVLEKAILRWRLKRKGFRGLQVSQPDEKEGSEAVEDFYKTSQKQAEERLERSVVKVQAMFRSKKAQQDYRRMKLAHEEAQLEYDGMQELDQMATEES

SEQ ID NO: 81781 - protein, 879 aa, Arabidopsis thaliana
  peptide (1)..(879): Ceres Seq. ID no. 12661295
  misc_feature (339)..(430): Pfam Name: IPT/TIG domain Pfam Description: IPT/TIG domain
  misc_feature (268)..(878): Homolog of NCBI NO: 15228914 NR Description: calmodulin-binding protein; protein id:
  misc_feature (1)..(226): Homolog of NCBI NO: 15228914 NR Description: calmodulin-binding protein; protein id:
  misc_feature (268)..(865): Homolog of NCBI NO: 7670023 NR Description: transcription factor-like protein [Arabidopsis
  misc_feature (1)..(226): Homolog of NCBI NO: 7670023 NR Description: transcription factor-like protein [Arabidopsis
  misc_feature (1)..(865): Homolog of NCBI NO: 33146995 NR Description: putative calmodulin-binding protein [Oryza sativa
  misc_feature (267)..(877): Homolog of NCBI NO: 37533660 NR Description: putative calmodulin binding protein similar to
  misc_feature (1)..(113): Homolog of NCBI NO: 37533660 NR Description: putative calmodulin binding protein similar to
  misc_feature (278)..(854): Homolog of NCBI NO: 30681670 NR Description: ethylene-induced calmodulin-binding protein,
  misc_feature (1)..(112): Homolog of NCBI NO: 30681670 NR Description: ethylene-induced calmodulin-binding protein,
  misc_feature (278)..(854): Homolog of NCBI NO: 25412096 NR Description: hypothetical protein At2g22300 [imported] - thaliana >gi|4567197|gb|AAD23613.1| unknown protein [Arabidopsis
MLDEAYSRWLRPNEIHALLCNHKFFTINVKPCGTIVLFDRKMLRNFRKDGHNWKKKKDGKTIKEAHEHLKVGNEERIHVYYAHGEDTPTFVRRCYWLLDKSQEHIVLVHYRETHEVHAAPATPGNSYSSSITDHLSPKIVAEDTSSGVHNTCNTVRSNSLGSRNHEIRLHEINTLDWDELLVPADISNQSHPTEEDMLYFTEQLQTAPRGSVKQGNHLAGYNGSVDIPSFPGLEDPVYQNNNSCGAGEFSSQHSHCGVDPNLQRRDFSATVTDQPGDALLNNGYGSQDSFGRWVNNFISDSPGSVDDPSLEAVYTPGQDSSTPPTVFHSHSDIPEQVFNITDVSPAWGVFDRENKGLMHLLWLSVSTEYFQHLGRSNLICICGELRVPAEFLQMGVYRCFLPPQSPGVVNLYLSVDGNKPISQLFSFEHRSVQFIEKAIPQDDQLYKWEEFEFQVRLAHLLFTSSNKISVLTSKISPENLLEAKKLASRTSHLLNSWAYLMKSIQANEVPFDQARDHLFELTLKNRLKEWLLEKVIENRNTKEYDSKGLGVIHLCAVLGYTWSILLFSWANISLDFRDKQGWTALHWAAYYGRPNLVTDPTKEFLGGCTAADLAQQKGYDGLAAFLAEKCLVAQFKDMQTAGNISGNLETIKAEKSSNPGNANEEEQSLKDTLAAYRTAAEAAARIQGAFREHELKVRSSAVRFASKEEEAKNIIAAMKIQHAFRNFEVRRKIAAAARIQYRFQTWKMRREFLNMRKKAIRIQAAFRGFQVRRQYQKITWSVGVLEKAILRWRLKRKGFRGLQVSQPDEKEGSEAVEDFYKTSQKQAEERLERSVVKVQAMFRSKKAQQDYRRMKLAHEEAQLEYDGMQELDQMATEES

SEQ ID NO: 81782 - protein, 838 aa, Arabidopsis thaliana
  peptide (1)..(838): Ceres Seq. ID no. 12661296
  misc_feature (298)..(389): Pfam Name: IPT/TIG domain Pfam Description: IPT/TIG domain
  misc_feature (227)..(837): Homolog of NCBI NO: 15228914 NR Description: calmodulin-binding protein; protein id:
  misc_feature (1)..(185): Homolog of NCBI NO: 15228914 NR Description: calmodulin-binding protein; protein id:
  misc_feature (227)..(824): Homolog of NCBI NO: 7670023 NR Description: transcription factor-like protein [Arabidopsis
  misc_feature (1)..(185): Homolog of NCBI NO: 7670023 NR Description: transcription factor-like protein [Arabidopsis
  misc_feature (1)..(824): Homolog of NCBI NO: 33146995 NR Description: putative calmodulin-binding protein [Oryza sativa
  misc_feature (226)..(836): Homolog of NCBI NO: 37533660 NR Description: putative calmodulin binding protein similar to
  misc_feature (1)..(72): Homolog of NCBI NO: 37533660 NR Description: putative calmodulin binding protein similar to
  misc_feature (237)..(813): Homolog of NCBI NO: 30681670 NR Description: ethylene-induced calmodulin-binding protein,
  misc_feature (1)..(71): Homolog of NCBI NO: 30681670 NR Description: ethylene-induced calmodulin-binding protein,
  misc_feature (237)..(813): Homolog of NCBI NO: 25412096 NR Description: hypothetical protein At2g22300 [imported] - thaliana >gi|4567197|gb|AAD23613.1| unknown protein [Arabidopsis
MLRNFRKDGHNWKKKKDGKTIKEAHEHLKVGNEERIHVYYAHGEDTPTFVRRCYWLLDKSQEHIVLVHYRETHEVHAAPATPGNSYSSSITDHLSPKIVAEDTSSGVHNTCNTVRSNSLGSRNHEIRLHEINTLDWDELLVPADISNQSHPTEEDMLYFTEQLQTAPRGSVKQGNHLAGYNGSVDIPSFPGLEDPVYQNNNSCGAGEFSSQHSHCGVDPNLQRRDFSATVTDQPGDALLNNGYGSQDSFGRWVNNFISDSPGSVDDPSLEAVYTPGQDSSTPPTVFHSHSDIPEQVFNITDVSPAWGVFDRENKGLMHLLWLSVSTEYFQHLGRSNLICICGELRVPAEFLQMGVYRCFLPPQSPGVVNLYLSVDGNKPISQLFSFEHRSVQFIEKAIPQDDQLYKWEEFEFQVRLAHLLFTSSNKISVLTSKISPENLLEAKKLASRTSHLLNSWAYLMKSIQANEVPFDQARDHLFELTLKNRLKEWLLEKVIENRNTKEYDSKGLGVIHLCAVLGYTWSILLFSWANISLDFRDKQGWTALHWAAYYGRPNLVTDPTKEFLGGCTAADLAQQKGYDGLAAFLAEKCLVAQFKDMQTAGNISGNLETIKAEKSSNPGNANEEEQSLKDTLAAYRTAAEAAARIQGAFREHELKVRSSAVRFASKEEEAKNIIAAMKIQHAFRNFEVRRKIAAAARIQYRFQTWKMRREFLNMRKKAIRIQAAFRGFQVRRQYQKITWSVGVLEKAILRWRLKRKGFRGLQVSQPDEKEGSEAVEDFYKTSQKQAEERLERSVVKVQAMFRSKKAQQDYRRMKLAHEEAQLEYDGMQELDQMATEES

SEQ ID NO: 81783 - DNA, 1068 bp, Arabidopsis thaliana
  misc_feature (1)..(1068): Ceres Seq. ID no. 12661315
  misc_feature: MA Experiment ID: 20000185 Result: Up-regulated in Transcription
  misc_feature: MA Experiment 20000185 PARAMETER Experiment Name: At_Roots__P Parameter: Age (day) Value: 7 vs. 21
  misc_feature: MA Experiment 20000185 PARAMETER Experiment Name: At_Roots__P Parameter: Organism Value: A. thaliana
  misc_feature: MA Experiment 20000185 PARAMETER Experiment Name: At_Roots__P Parameter: Tissue Value: Roots vs. Whole Plant
  misc_feature: MA Experiment ID: 20000227 Result: Up-regulated in Transcription
  misc_feature: MA Experiment 20000227 PARAMETER Experiment Name: At_Root-Tips-vs-Tops_P Parameter: Tissue Value: Root Tips vs. Root Tops
  misc_feature: MA Experiment ID: 20000235 Result: Down-regulated in Transcription
  misc_feature: MA Experiment 20000235 PARAMETER Experiment Name: At_Siliques_P Parameter: Age (day) Value: 21
  misc_feature: MA Experiment 20000235 PARAMETER Experiment Name: At_Siliques_P Parameter: Organism Value: A. thaliana
  misc_feature: MA Experiment 20000235 PARAMETER Experiment Name: At_Siliques_P Parameter: Plant Line Value: WS
  misc_feature: MA Experiment 20000235 PARAMETER Experiment Name: At_Siliques_P Parameter: Tissue Value: 5-10mm Siliques vs. Whole Plant
  misc_feature: MA Experiment ID: 20000264 Result: Down-regulated in Transcription
  misc_feature: MA Experiment 20000264 PARAMETER Experiment Name: At_Open_Flower_P Parameter: Age (day) Value: 21
  misc_feature: MA Experiment 20000264 PARAMETER Experiment Name: At_Open_Flower_P Parameter: Plant Line Value: WS
  misc_feature: MA Experiment 20000264 PARAMETER Experiment Name: At_Open_Flower_P Parameter: Tissue Value: Open Flower vs. Whole Plant
  misc_feature: MA Experiment ID: 20000265 Result: Up-regulated in Transcription
  misc_feature: MA Experiment 20000265 PARAMETER Experiment Name: At_Open_Flower_P Parameter: Age (day) Value: 21
  misc_feature: MA Experiment 20000265 PARAMETER Experiment Name: At_Open_Flower_P Parameter: Plant Line Value: WS
  misc_feature: MA Experiment 20000265 PARAMETER Experiment Name: At_Open_Flower_P Parameter: Tissue Value: Closed Flower vs. Whole Plant
  misc_feature: MA Experiment ID: 20000286 Result: Up-regulated in Transcription
  misc_feature: MA Experiment 20000286 PARAMETER Experiment Name: At_Open_Flower_P Parameter: Age (day) Value: 21
  misc_feature: MA Experiment 20000286 PARAMETER Experiment Name: At_Open_Flower_P Parameter: Plant Line Value: WS
  misc_feature: MA Experiment 20000286 PARAMETER Experiment Name: At_Open_Flower_P Parameter: Tissue Value: Half Open vs. Whole Plant
  misc_feature: MA Experiment ID: 20000437 Result: Down-regulated in Transcription
  misc_feature: MA Experiment 20000437 PARAMETER Experiment Name: At_Drought_P Parameter: Age (day) Value: 8
  misc_feature: MA Experiment 20000437 PARAMETER Experiment Name: At_Drought_P Parameter: Organism Value: A. thaliana
  misc_feature: MA Experiment 20000437 PARAMETER Experiment Name: At_Drought_P Parameter: Plant Line Value: WS
  misc_feature: MA Experiment 20000437 PARAMETER Experiment Name: At_Drought_P Parameter: Timepoint (hr) Value: 24
  misc_feature: MA Experiment 20000437 PARAMETER Experiment Name: At_Drought_P Parameter: Tissue Value: Whole Plant
  misc_feature: MA Experiment 20000437 PARAMETER Experiment Name: At_Drought_P Parameter: Treatment Value: Drought vs. No Drought
  misc_feature: MA Experiment ID: 20000438 Result: Down-regulated in Transcription
  misc_feature: MA Experiment 20000438 PARAMETER Experiment Name: At_Shoots__P Parameter: Age (day) Value: 14
  misc_feature: MA Experiment 20000438 PARAMETER Experiment Name: At_Shoots__P Parameter: Tissue Value: Shoots vs. Whole Plant
  misc_feature: MA Experiment ID: 20000794 Result: Down-regulated in Transcription
  misc_feature: MA Experiment 20000794 PARAMETER Experiment Name: At_Petals_P Parameter: Age (day) Value: 23-25 days
  misc_feature: MA Experiment 20000794 PARAMETER Experiment Name: At_Petals_P Parameter: Plant Line Value: WS
  misc_feature: MA Experiment 20000794 PARAMETER Experiment Name: At_Petals_P Parameter: Tissue Value: Petals vs. Whole plant
  misc_feature: MA Experiment ID: 20001771 Result: Up-regulated in Transcription
  misc_feature: MA Experiment 20001771 PARAMETER Experiment Name: At_Far-red-enriched-adult_P Parameter: Age (day) Value: 28
  misc_feature: MA Experiment 20001771 PARAMETER Experiment Name: At_Far-red-enriched-adult_P Parameter: Light Value: Far-red enriched vs. White
  misc_feature: MA Experiment 20001771 PARAMETER Experiment Name: At_Far-red-enriched-adult_P Parameter: Organism Value: A. thaliana
  misc_feature: MA Experiment 20001771 PARAMETER Experiment Name: At_Far-red-enriched-adult_P Parameter: Plant Line Value: Columbia
  misc_feature: MA Experiment 20001771 PARAMETER Experiment Name: At_Far-red-enriched-adult_P Parameter: Timepoint (hr) Value: 16
  misc_feature: MA Experiment 20001771 PARAMETER Experiment Name: At_Far-red-enriched-adult_P Parameter: Tissue Value: Aerial
  misc_feature: MA Experiment ID: 20001773 Result: Up-regulated in Transcription
  misc_feature: MA Experiment 20001773 PARAMETER Experiment Name: At_Far-red-enriched-adult_P Parameter: Age (day) Value: 30
  misc_feature: MA Experiment 20001773 PARAMETER Experiment Name: At_Far-red-enriched-adult_P Parameter: Light Value: Far-red enriched vs. White
  misc_feature: MA Experiment 20001773 PARAMETER Experiment Name: At_Far-red-enriched-adult_P Parameter: Organism Value: A. thaliana
  misc_feature: MA Experiment 20001773 PARAMETER Experiment Name: At_Far-red-enriched-adult_P Parameter: Plant Line Value: Columbia
  misc_feature: MA Experiment 20001773 PARAMETER Experiment Name: At_Far-red-enriched-adult_P Parameter: Timepoint (hr) Value: 48
  misc_feature: MA Experiment 20001773 PARAMETER Experiment Name: At_Far-red-enriched-adult_P Parameter: Tissue Value: Aerial
  misc_feature: MA Experiment ID: 20001910 Result: Down-regulated in Transcription
  misc_feature: MA Experiment 20001910 PARAMETER Experiment Name: At_Drought_Reproduction_P Parameter: Age (day) Value: 37
  misc_feature: MA Experiment 20001910 PARAMETER Experiment Name: At_Drought_Reproduction_P Parameter: Organism Value: A. thaliana
  misc_feature: MA Experiment 20001910 PARAMETER Experiment Name: At_Drought_Reproduction_P Parameter: Plant Line Value: WS
  misc_feature: MA Experiment 20001910 PARAMETER Experiment Name: At_Drought_Reproduction_P Parameter: Timepoint (day) Value: 7
  misc_feature: MA Experiment 20001910 PARAMETER Experiment Name: At_Drought_Reproduction_P Parameter: Tissue Value: Flowers
  misc_feature: MA Experiment 20001910 PARAMETER Experiment Name: At_Drought_Reproduction_P Parameter: Treatment Value: Drought vs. No Drought
atgaagaatctctttaacttgttccttatgtttttctttgcaatgccaattctttcactctccgagaatccaaccaatttcagcgagagttgcgaagacgggagtggagaaaccggttcaagctttggcatagggttcgatttggttcttgattttggtttataccggaatagctgccccgaagcagagtctatcgtctactcgtgggtggaaaccacggtgttagaggatccaagaatggctgcttctcttctccgtcttcatttccacgactgttttgtcaatgcaaggaatgagtactacgaaccagaatgtgtttttgtttttgacttgcattatgcattgcagggatgtgatgcttcggtgttgttagatgacacagaaggactggttggtgaaaaaacggcgcctcctaatctaaattctctacgagggttcgaagtgattgattcgataaagtctgatattgaatctgtatgtccagagaccgtctcatgcgcagacattcttgccatggctgctagagattcagtcgttgtgtcgggtggaccaaggtgggaggtggaagtaggaagaaaagacagtagaacagcaagcaaacaggcagcaacaaatggcttaccctcaccaaactcaaccgtatcaactctcatctctactttccagaatcttggcctttcacaaaccgacatggtcgctctttccgctcggttgcagccactgcaaactggacaaccagctaaccacggagacaaccttgagttcctcgagtcactgcaacagttatgctcgactgttgggcccagtgtaggtatcactcagcttgacttggtgactccatcaacatttgacaaccagtactatgtaaacctcctctcgggtgagggattgcttccatcagaccaggctttagcggttcaagacccagggacaagggcgattgttgagacctacgcaacagatcagtcggttttctttgaggattttaagaacgctatggttaaaatgggagggatacccggtggtagtaatagcgagattaggaagaattgtagaatgattaactaa

SEQ ID NO: 81784 - protein, 355 aa, Arabidopsis thaliana
  peptide (1)..(355): Ceres Seq. ID no. 12661316
  misc_feature (1)..(355): Homolog of NCBI NO: 15234882 NR Description: peroxidase family; protein id: At4g16270.1
  misc_feature (1)..(355): Homolog of NCBI NO: 26397553 NR Description: Peroxidase 40 precursor (Atperox P40)
  misc_feature (10)..(305): Homolog of NCBI NO: 35215022 NR Description: putative peroxidase 40 precursor [Oryza sativa
  misc_feature (115)..(355): Homolog of NCBI NO: 34903044 NR Description: unnamed protein product [Oryza sativa (japonica group)] >gi|7242902|dbj|BAA92500.1| unnamed protein product
  misc_feature (42)..(94): Homolog of NCBI NO: 34903044 NR Description: unnamed protein product [Oryza sativa (japonica group)] >gi|7242902|dbj|BAA92500.1| unnamed protein product
  misc_feature (115)..(355): Homolog of NCBI NO: 39777532 NR Description: peroxidase precursor [Quercus suber]
  misc_feature (50)..(95): Homolog of NCBI NO: 39777532 NR Description: peroxidase precursor [Quercus suber]
  misc_feature (115)..(355): Homolog of NCBI NO: 5381253 NR Description: peroxidase [Nicotiana tabacum]
  misc_feature (50)..(95): Homolog of NCBI NO: 5381253 NR Description: peroxidase [Nicotiana tabacum]
  misc_feature (115)..(355): Homolog of NCBI NO: 39777536 NR Description: peroxidase precursor [Quercus suber]
MKNLFNLFLMFFFAMPILSLSENPTNFSESCEDGSGETGSSFGIGFDLVLDFGLYRNSCPEAESIVYSWVETTVLEDPRMAASLLRLHFHDCFVNARNEYYEPECVFVFDLHYALQGCDASVLLDDTEGLVGEKTAPPNLNSLRGFEVIDSIKSDIESVCPETVSCADILAMAARDSVVVSGGPRWEVEVGRKDSRTASKQAATNGLPSPNSTVSTLISTFQNLGLSQTDMVALSARLQPLQTGQPANHGDNLEFLESLQQLCSTVGPSVGITQLDLVTPSTFDNQYYVNLLSGEGLLPSDQALAVQDPGTRAIVETYATDQSVFFEDFKNAMVKMGGIPGGSNSEIRKNCRMIN

SEQ ID NO: 81785 - protein, 346 aa, Arabidopsis thaliana
  peptide (1)..(346): Ceres Seq. ID no. 12661317
  misc_feature (1)..(346): Homolog of NCBI NO: 15234882 NR Description: peroxidase family; protein id: At4g16270.1
  misc_feature (1)..(346): Homolog of NCBI NO: 26397553 NR Description: Peroxidase 40 precursor (Atperox P40)
  misc_feature (1)..(296): Homolog of NCBI NO: 35215022 NR Description: putative peroxidase 40 precursor [Oryza sativa
  misc_feature (106)..(346): Homolog of NCBI NO: 34903044 NR Description: unnamed protein product [Oryza sativa (japonica group)] >gi|7242902|dbj|BAA92500.1| unnamed protein product
  misc_feature (33)..(85): Homolog of NCBI NO: 34903044 NR Description: unnamed protein product [Oryza sativa (japonica group)] >gi|7242902|dbj|BAA92500.1| unnamed protein product
  misc_feature (106)..(346): Homolog of NCBI NO: 39777532 NR Description: peroxidase precursor [Quercus suber]
  misc_feature (41)..(86): Homolog of NCBI NO: 39777532 NR Description: peroxidase precursor [Quercus suber]
  misc_feature (106)..(346): Homolog of NCBI NO: 5381253 NR Description: peroxidase [Nicotiana tabacum]
  misc_feature (41)..(86): Homolog of NCBI NO: 5381253 NR Description: peroxidase [Nicotiana tabacum]
  misc_feature (106)..(346): Homolog of NCBI NO: 39777536 NR Description: peroxidase precursor [Quercus suber]
MFFFAMPILSLSENPTNFSESCEDGSGETGSSFGIGFDLVLDFGLYRNSCPEAESIVYSWVETTVLEDPRMAASLLRLHFHDCFVNARNEYYEPECVFVFDLHYALQGCDASVLLDDTEGLVGEKTAPPNLNSLRGFEVIDSIKSDIESVCPETVSCADILAMAARDSVVVSGGPRWEVEVGRKDSRTASKQAATNGLPSPNSTVSTLISTFQNLGLSQTDMVALSARLQPLQTGQPANHGDNLEFLESLQQLCSTVGPSVGITQLDLVTPSTFDNQYYVNLLSGEGLLPSDQALAVQDPGTRAIVETYATDQSVFFEDFKNAMVKMGGIPGGSNSEIRKNCRMIN

SEQ ID NO: 81786 - protein, 341 aa, Arabidopsis thaliana
  peptide (1)..(341): Ceres Seq. ID no. 12661318
  misc_feature (1)..(341): Homolog of NCBI NO: 15234882 NR Description: peroxidase family; protein id: At4g16270.1
  misc_feature (1)..(341): Homolog of NCBI NO: 26397553 NR Description: Peroxidase 40 precursor (Atperox P40)
  misc_feature (1)..(291): Homolog of NCBI NO: 35215022 NR Description: putative peroxidase 40 precursor [Oryza sativa
  misc_feature (101)..(341): Homolog of NCBI NO: 34903044 NR Description: unnamed protein product [Oryza sativa (japonica group)] >gi|7242902|dbj|BAA92500.1| unnamed protein product
  misc_feature (28)..(80): Homolog of NCBI NO: 34903044 NR Description: unnamed protein product [Oryza sativa (japonica group)] >gi|7242902|dbj|BAA92500.1| unnamed protein product
  misc_feature (101)..(341): Homolog of NCBI NO: 39777532 NR Description: peroxidase precursor [Quercus suber]
  misc_feature (36)..(81): Homolog of NCBI NO: 39777532 NR Description: peroxidase precursor [Quercus suber]
  misc_feature (101)..(341): Homolog of NCBI NO: 5381253 NR Description: peroxidase [Nicotiana tabacum]
  misc_feature (36)..(81): Homolog of NCBI NO: 5381253 NR Description: peroxidase [Nicotiana tabacum]
  misc_feature (101)..(341): Homolog of NCBI NO: 39777536 NR Description: peroxidase precursor [Quercus suber]
MPILSLSENPTNFSESCEDGSGETGSSFGIGFDLVLDFGLYRNSCPEAESIVYSWVETTVLEDPRMAASLLRLHFHDCFVNARNEYYEPECVFVFDLHYALQGCDASVLLDDTEGLVGEKTAPPNLNSLRGFEVIDSIKSDIESVCPETVSCADILAMAARDSVVVSGGPRWEVEVGRKDSRTASKQAATNGLPSPNSTVSTLISTFQNLGLSQTDMVALSARLQPLQTGQPANHGDNLEFLESLQQLCSTVGPSVGITQLDLVTPSTFDNQYYVNLLSGEGLLPSDQALAVQDPGTRAIVETYATDQSVFFEDFKNAMVKMGGIPGGSNSEIRKNCRMIN

SEQ ID NO: 81787 - DNA, 681 bp, Arabidopsis thaliana
  misc_feature (1)..(681): Ceres Seq. ID no. 12661332
  misc_feature: MA Experiment ID: 20000180 Result: Up-regulated in Transcription
  misc_feature: MA Experiment 20000180 PARAMETER Experiment Name: At_Germinating_Seeds_P Parameter: Age (hr) Value: 24 vs. 0
  misc_feature: MA Experiment 20000180 PARAMETER Experiment Name: At_Germinating_Seeds_P Parameter: Tissue Value: Germinating Seeds
  misc_feature: MA Experiment ID: 20000185 Result: Up-regulated in Transcription
  misc_feature: MA Experiment 20000185 PARAMETER Experiment Name: At_Roots__P Parameter: Age (day) Value: 7 vs. 21
  misc_feature: MA Experiment 20000185 PARAMETER Experiment Name: At_Roots__P Parameter: Organism Value: A. thaliana
  misc_feature: MA Experiment 20000185 PARAMETER Experiment Name: At_Roots__P Parameter: Tissue Value: Roots vs. Whole Plant
  misc_feature: MA Experiment ID: 20000264 Result: Up-regulated in Transcription
  misc_feature: MA Experiment 20000264 PARAMETER Experiment Name: At_Open_Flower_P Parameter: Age (day) Value: 21
  misc_feature: MA Experiment 20000264 PARAMETER Experiment Name: At_Open_Flower_P Parameter: Plant Line Value: WS
  misc_feature: MA Experiment 20000264 PARAMETER Experiment Name: At_Open_Flower_P Parameter: Tissue Value: Open Flower vs. Whole Plant
  misc_feature: MA Experiment ID: 20000286 Result: Up-regulated in Transcription
  misc_feature: MA Experiment 20000286 PARAMETER Experiment Name: At_Open_Flower_P Parameter: Age (day) Value: 21
  misc_feature: MA Experiment 20000286 PARAMETER Experiment Name: At_Open_Flower_P Parameter: Plant Line Value: WS
  misc_feature: MA Experiment 20000286 PARAMETER Experiment Name: At_Open_Flower_P Parameter: Tissue Value: Half Open vs. Whole Plant
  misc_feature: MA Experiment ID: 20000437 Result: Down-regulated in Transcription
  misc_feature: MA Experiment 20000437 PARAMETER Experiment Name: At_Drought_P Parameter: Age (day) Value: 8
  misc_feature: MA Experiment 20000437 PARAMETER Experiment Name: At_Drought_P Parameter: Organism Value: A. thaliana
  misc_feature: MA Experiment 20000437 PARAMETER Experiment Name: At_Drought_P Parameter: Plant Line Value: WS
  misc_feature: MA Experiment 20000437 PARAMETER Experiment Name: At_Drought_P Parameter: Timepoint (hr) Value: 24
  misc_feature: MA Experiment 20000437 PARAMETER Experiment Name: At_Drought_P Parameter: Tissue Value: Whole Plant
  misc_feature: MA Experiment 20000437 PARAMETER Experiment Name: At_Drought_P Parameter: Treatment Value: Drought vs. No Drought
  misc_feature: MA Experiment ID: 20000439 Result: Up-regulated in Transcription
  misc_feature: MA Experiment 20000439 PARAMETER Experiment Name: At_Roots__P Parameter: Age (day) Value: 14 vs. 21
  misc_feature: MA Experiment 20000439 PARAMETER Experiment Name: At_Roots__P Parameter: Organism Value: A. thaliana
  misc_feature: MA Experiment 20000439 PARAMETER Experiment Name: At_Roots__P Parameter: Tissue Value: Roots vs. Whole Plant
  misc_feature: MA Experiment ID: 20000460 Result: Down-regulated in Transcription
  misc_feature: MA Experiment 20000460 PARAMETER Experiment Name: At_10percent_PEG_P Parameter: Age (day) Value: 12
  misc_feature: MA Experiment 20000460 PARAMETER Experiment Name: At_10percent_PEG_P Parameter: Organism Value: A. thaliana
  misc_feature: MA Experiment 20000460 PARAMETER Experiment Name: At_10percent_PEG_P Parameter: Plant Line Value: WS
  misc_feature: MA Experiment 20000460 PARAMETER Experiment Name: At_10percent_PEG_P Parameter: Timepoint (day) Value: 12
  misc_feature: MA Experiment 20000460 PARAMETER Experiment Name: At_10percent_PEG_P Parameter: Tissue Value: Whole Plant
  misc_feature: MA Experiment 20000460 PARAMETER Experiment Name: At_10percent_PEG_P Parameter: Treatment Value: 10percent PEG vs. No Treatment
  misc_feature: MA Experiment ID: 20000794 Result: Up-regulated in Transcription
  misc_feature: MA Experiment 20000794 PARAMETER Experiment Name: At_Petals_P Parameter: Age (day) Value: 23-25 days
  misc_feature: MA Experiment 20000794 PARAMETER Experiment Name: At_Petals_P Parameter: Plant Line Value: WS
  misc_feature: MA Experiment 20000794 PARAMETER Experiment Name: At_Petals_P Parameter: Tissue Value: Petals vs. Whole plant
atgatgatgcaatgtttagatggattaaagcacttagccttaattctgttgacttgttgtgatgctgatcctcccaaggttcgtcagaaccctaaggatgtggctagaggcactgtgtttacagtgaatgagattgaagctctttacgaactgttcaagagcattagcaaaaacgggcttatcgacaaggaacaatttcaattggtactattcaaaatgaacacaacgagaagcctttttgctgatagggtgtttgacttgtttgataccaagaatactgggattctagattttgaagcctttgctcgttcactttcggtctttcaccctaatgctaaatttgaggataagattgagttctctttcaagctgtatgatctgaatcagcaaggttatataaagagacaggaggtgaagcaaatggttgtgcggactctagctgaatctggcatgaacctttctgatcatgtgattgagagcatcatagacaagacatttgaagaagctgatactaaactggacgggaagattgataaggaagagtggaggagtcttgtgttgcgccacccctctctgttacagaacatgagccttcaacatctcaaagacgtaacaaagacgtttccaaattttgtatttcacactatagtgacagacactcctagtgagctggatggatga

SEQ ID NO: 81788 - protein, 226 aa, Arabidopsis thaliana
  peptide (1)..(226): Ceres Seq. ID no. 12661333
  misc_feature (161)..(189): Pfam Name: EF hand Pfam Description: EF hand
  misc_feature (1)..(226): Homolog of NCBI NO: 18414640 NR Description: expressed protein; protein id: At4g16350.1, by cDNA: gi_11065942, supported by cDNA: gi_13448026 [Arabidopsis
  misc_feature (1)..(226): Homolog of NCBI NO: 13448027 NR Description: SOS3-like calcium binding protein [Arabidopsis
  misc_feature (2)..(220): Homolog of NCBI NO: 16924116 NR Description: putative calcineurin B-like protein [Oryza sativa]
  misc_feature (2)..(220): Homolog of NCBI NO: 22137326 NR Description: calcineurin B [Pisum sativum]
  misc_feature (2)..(220): Homolog of NCBI NO: 15241101 NR Description: calcineurin B-like protein 2 (gb|AAC26009.1); id: At5g55990.2, supported by cDNA: 37280., supported by cDNA: supported by cDNA: gi_3309083 [Arabidopsis thaliana] protein 2
  misc_feature (2)..(220): Homolog of NCBI NO: 15236778 NR Description: calcineurin B-like protein 3; protein id: supported by cDNA: gi_18253012, supported by cDNA: gi_3309085
  misc_feature (2)..(220): Homolog of NCBI NO: 21593228 NR Description: calcineurin B-like protein 2 [Arabidopsis
  misc_feature (2)..(220): Homolog of NCBI NO: 30687272 NR Description: calcineurin B-like protein 3 (CBL3) [Arabidopsis
  misc_feature (30)..(214): Homolog of NCBI NO: 38493047 NR Description: Chain A, The Crystal Structure Of The Calcium
  misc_feature (29)..(219): Homolog of NCBI NO: 18414931 NR Description: calcineurin B-like protein 1; protein id: supported by cDNA: gi_3309081 [Arabidopsis thaliana]
MMMQCLDGLKHLALILLTCCDADPPKVRQNPKDVARGTVFTVNEIEALYELFKSISKNGLIDKEQFQLVLFKMNTTRSLFADRVFDLFDTKNTGILDFEAFARSLSVFHPNAKFEDKIEFSFKLYDLNQQGYIKRQEVKQMVVRTLAESGMNLSDHVIESIIDKTFEEADTKLDGKIDKEEWRSLVLRHPSLLQNMSLQHLKDVTKTFPNFVFHTIVTDTPSELDG

SEQ ID NO: 81789 - protein, 225 aa, Arabidopsis thaliana
  peptide (1)..(225): Ceres Seq. ID no. 12661334
  misc_feature (160)..(188): Pfam Name: EF hand Pfam Description: EF hand
  misc_feature (1)..(225): Homolog of NCBI NO: 18414640 NR Description: expressed protein; protein id: At4g16350.1, by cDNA: gi_11065942, supported by cDNA: gi_13448026 [Arabidopsis
  misc_feature (1)..(225): Homolog of NCBI NO: 13448027 NR Description: SOS3-like calcium binding protein [Arabidopsis
  misc_feature (1)..(219): Homolog of NCBI NO: 16924116 NR Description: putative calcineurin B-like protein [Oryza sativa]
  misc_feature (1)..(219): Homolog of NCBI NO: 22137326 NR Description: calcineurin B [Pisum sativum]
  misc_feature (1)..(219): Homolog of NCBI NO: 15241101 NR Description: calcineurin B-like protein 2 (gb|AAC26009.1); id: At5g55990.2, supported by cDNA: 37280., supported by cDNA: supported by cDNA: gi_3309083 [Arabidopsis thaliana] protein 2
  misc_feature (1)..(219): Homolog of NCBI NO: 15236778 NR Description: calcineurin B-like protein 3; protein id: supported by cDNA: gi_18253012, supported by cDNA: gi_3309085
  misc_feature (1)..(219): Homolog of NCBI NO: 21593228 NR Description: calcineurin B-like protein 2 [Arabidopsis
  misc_feature (1)..(219): Homolog of NCBI NO: 30687272 NR Description: calcineurin B-like protein 3 (CBL3) [Arabidopsis
  misc_feature (29)..(213): Homolog of NCBI NO: 38493047 NR Description: Chain A, The Crystal Structure Of The Calcium
  misc_feature (28)..(218): Homolog of NCBI NO: 18414931 NR Description: calcineurin B-like protein 1; protein id: supported by cDNA: gi_3309081 [Arabidopsis thaliana]
MMQCLDGLKHLALILLTCCDADPPKVRQNPKDVARGTVFTVNEIEALYELFKSISKNGLIDKEQFQLVLFKMNTTRSLFADRVFDLFDTKNTGILDFEAFARSLSVFHPNAKFEDKIEFSFKLYDLNQQGYIKRQEVKQMVVRTLAESGMNLSDHVIESIIDKTFEEADTKLDGKIDKEEWRSLVLRHPSLLQNMSLQHLKDVTKTFPNFVFHTIVTDTPSELDG

SEQ ID NO: 81790 - protein, 224 aa, Arabidopsis thaliana
  peptide (1)..(224): Ceres Seq. ID no. 12661335
  misc_feature (159)..(187): Pfam Name: EF hand Pfam Description: EF hand
  misc_feature (1)..(224): Homolog of NCBI NO: 18414640 NR Description: expressed protein; protein id: At4g16350.1, by cDNA: gi_11065942, supported by cDNA: gi_13448026 [Arabidopsis
  misc_feature (1)..(224): Homolog of NCBI NO: 13448027 NR Description: SOS3-like calcium binding protein [Arabidopsis
  misc_feature (1)..(218): Homolog of NCBI NO: 16924116 NR Description: putative calcineurin B-like protein [Oryza sativa]
  misc_feature (1)..(218): Homolog of NCBI NO: 22137326 NR Description: calcineurin B [Pisum sativum]
  misc_feature (1)..(218): Homolog of NCBI NO: 15241101 NR Description: calcineurin B-like protein 2 (gb|AAC26009.1); id: At5g55990.2, supported by cDNA: 37280., supported by cDNA: supported by cDNA: gi_3309083 [Arabidopsis thaliana] protein 2
  misc_feature (1)..(218): Homolog of NCBI NO: 15236778 NR Description: calcineurin B-like protein 3; protein id: supported by cDNA: gi_18253012, supported by cDNA: gi_3309085
  misc_feature (1)..(218): Homolog of NCBI NO: 21593228 NR Description: calcineurin B-like protein 2 [Arabidopsis
  misc_feature (1)..(218): Homolog of NCBI NO: 30687272 NR Description: calcineurin B-like protein 3 (CBL3) [Arabidopsis
  misc_feature (28)..(212): Homolog of NCBI NO: 38493047 NR Description: Chain A, The Crystal Structure Of The Calcium
  misc_feature (27)..(217): Homolog of NCBI NO: 18414931 NR Description: calcineurin B-like protein 1; protein id: supported by cDNA: gi_3309081 [Arabidopsis thaliana]
MQCLDGLKHLALILLTCCDADPPKVRQNPKDVARGTVFTVNEIEALYELFKSISKNGLIDKEQFQLVLFKMNTTRSLFADRVFDLFDTKNTGILDFEAFARSLSVFHPNAKFEDKIEFSFKLYDLNQQGYIKRQEVKQMVVRTLAESGMNLSDHVIESIIDKTFEEADTKLDGKIDKEEWRSLVLRHPSLLQNMSLQHLKDVTKTFPNFVFHTIVTDTPSELDG

SEQ ID NO: 81791 - DNA, 1644 bp, Arabidopsis thaliana
  misc_feature (1)..(1644): Ceres Seq. ID no. 12661387
  misc_feature: MA Experiment ID: 20000182 Result: Up-regulated in Transcription
  misc_feature: MA Experiment 20000182 PARAMETER Experiment Name: At_2mM_SA_P Parameter: Age (day) Value: 14
  misc_feature: MA Experiment 20000182 PARAMETER Experiment Name: At_2mM_SA_P Parameter: Organism Value: A. thaliana
  misc_feature: MA Experiment 20000182 PARAMETER Experiment Name: At_2mM_SA_P Parameter: Plant Line Value: WS
  misc_feature: MA Experiment 20000182 PARAMETER Experiment Name: At_2mM_SA_P Parameter: Timepoint (hr) Value: 6
  misc_feature: MA Experiment 20000182 PARAMETER Experiment Name: At_2mM_SA_P Parameter: Tissue Value: Aerial
  misc_feature: MA Experiment 20000182 PARAMETER Experiment Name: At_2mM_SA_P Parameter: Treatment Value: 2mM SA vs. No Treatment
  misc_feature: MA Experiment ID: 20000264 Result: Up-regulated in Transcription
  misc_feature: MA Experiment 20000264 PARAMETER Experiment Name: At_Open_Flower_P Parameter: Age (day) Value: 21
  misc_feature: MA Experiment 20000264 PARAMETER Experiment Name: At_Open_Flower_P Parameter: Plant Line Value: WS
  misc_feature: MA Experiment 20000264 PARAMETER Experiment Name: At_Open_Flower_P Parameter: Tissue Value: Open Flower vs. Whole Plant
  misc_feature: MA Experiment ID: 20000265 Result: Up-regulated in Transcription
  misc_feature: MA Experiment 20000265 PARAMETER Experiment Name: At_Open_Flower_P Parameter: Age (day) Value: 21
  misc_feature: MA Experiment 20000265 PARAMETER Experiment Name: At_Open_Flower_P Parameter: Plant Line Value: WS
  misc_feature: MA Experiment 20000265 PARAMETER Experiment Name: At_Open_Flower_P Parameter: Tissue Value: Closed Flower vs. Whole Plant
  misc_feature: MA Experiment ID: 20000286 Result: Up-regulated in Transcription
  misc_feature: MA Experiment 20000286 PARAMETER Experiment Name: At_Open_Flower_P Parameter: Age (day) Value: 21
  misc_feature: MA Experiment 20000286 PARAMETER Experiment Name: At_Open_Flower_P Parameter: Plant Line Value: WS
  misc_feature: MA Experiment 20000286 PARAMETER Experiment Name: At_Open_Flower_P Parameter: Tissue Value: Half Open vs. Whole Plant
  misc_feature: MA Experiment ID: 20000441 Result: Down-regulated in Transcription
  misc_feature: MA Experiment 20000441 PARAMETER Experiment Name: At_1uM_BR-BRZ__P Parameter: Tissue Value: Shoot Apices
  misc_feature: MA Experiment 20000441 PARAMETER Experiment Name: At_1uM_BR-BRZ__P Parameter: Treatment Value: 1uM BR vs. No Treatment
  misc_feature: MA Experiment ID: 20000443 Result: Down-regulated in Transcription
  misc_feature: MA Experiment 20000443 PARAMETER Experiment Name: At_1uM_BR-BRZ__P Parameter: Tissue Value: Shoot Apices
  misc_feature: MA Experiment 20000443 PARAMETER Experiment Name: At_1uM_BR-BRZ__P Parameter: Treatment Value: 1uM BRZ vs. No Treatment
  misc_feature: MA Experiment ID: 20000527 Result: Down-regulated in Transcription
  misc_feature: MA Experiment 20000527 PARAMETER Experiment Name: At_10percent_PEG_P Parameter: Age (day) Value: 20
  misc_feature: MA Experiment 20000527 PARAMETER Experiment Name: At_10percent_PEG_P Parameter: Organism Value: A. thaliana
  misc_feature: MA Experiment 20000527 PARAMETER Experiment Name: At_10percent_PEG_P Parameter: Plant Line Value: WS
  misc_feature: MA Experiment 20000527 PARAMETER Experiment Name: At_10percent_PEG_P Parameter: Timepoint (day) Value: 20
  misc_feature: MA Experiment 20000527 PARAMETER Experiment Name: At_10percent_PEG_P Parameter: Tissue Value: Whole Plant
  misc_feature: MA Experiment 20000527 PARAMETER Experiment Name: At_10percent_PEG_P Parameter: Treatment Value: 10percent PEG vs. No Treatment
  misc_feature: MA Experiment ID: 20000794 Result: Up-regulated in Transcription
  misc_feature: MA Experiment 20000794 PARAMETER Experiment Name: At_Petals_P Parameter: Age (day) Value: 23-25 days
  misc_feature: MA Experiment 20000794 PARAMETER Experiment Name: At_Petals_P Parameter: Plant Line Value: WS
  misc_feature: MA Experiment 20000794 PARAMETER Experiment Name: At_Petals_P Parameter: Tissue Value: Petals vs. Whole plant
  misc_feature: MA Experiment ID: 20001555 Result: Up-regulated in Transcription
  misc_feature: MA Experiment 20001555 PARAMETER Experiment Name: At_Drought_Soil_Dry_P Parameter: Age (day) Value: 24
  misc_feature: MA Experiment 20001555 PARAMETER Experiment Name: At_Drought_Soil_Dry_P Parameter: Organism Value: A. thaliana
  misc_feature: MA Experiment 20001555 PARAMETER Experiment Name: At_Drought_Soil_Dry_P Parameter: Plant Line Value: WS
  misc_feature: MA Experiment 20001555 PARAMETER Experiment Name: At_Drought_Soil_Dry_P Parameter: Post Timepoint (hr) Value: None
  misc_feature: MA Experiment 20001555 PARAMETER Experiment Name: At_Drought_Soil_Dry_P Parameter: Post-Treatment Value: None
  misc_feature: MA Experiment 20001555 PARAMETER Experiment Name: At_Drought_Soil_Dry_P Parameter: Timepoint (day) Value: 10
  misc_feature: MA Experiment 20001555 PARAMETER Experiment Name: At_Drought_Soil_Dry_P Parameter: Treatment Value: Drought vs. No Drought
  misc_feature: MA Experiment ID: 20001755 Result: Down-regulated in Transcription
  misc_feature: MA Experiment 20001755 PARAMETER Experiment Name: At_50mM_NH4NO3_L-to-H_P Parameter: Timepoint (hr) Value: 2
  misc_feature: MA Experiment 20001755 PARAMETER Experiment Name: At_50mM_NH4NO3_L-to-H_P Parameter: Tissue Value: Leaf
  misc_feature: MA Experiment 20001755 PARAMETER Experiment Name: At_50mM_NH4NO3_L-to-H_P Parameter: Treatment Value: 50mM NH4NO3 vs 100mM Mannitol
  misc_feature: MA Experiment ID: 20001904 Result: Up-regulated in Transcription
  misc_feature: MA Experiment 20001904 PARAMETER Experiment Name: At_Drought_Reproduction_P Parameter: Age (day) Value: 37
  misc_feature: MA Experiment 20001904 PARAMETER Experiment Name: At_Drought_Reproduction_P Parameter: Organism Value: A. thaliana
  misc_feature: MA Experiment 20001904 PARAMETER Experiment Name: At_Drought_Reproduction_P Parameter: Plant Line Value: WS
  misc_feature: MA Experiment 20001904 PARAMETER Experiment Name: At_Drought_Reproduction_P Parameter: Timepoint (day) Value: 7
  misc_feature: MA Experiment 20001904 PARAMETER Experiment Name: At_Drought_Reproduction_P Parameter: Tissue Value: Rosettes
  misc_feature: MA Experiment 20001904 PARAMETER Experiment Name: At_Drought_Reproduction_P Parameter: Treatment Value: Drought vs. No Drought
  misc_feature: MA Experiment ID: 20001905 Result: Up-regulated in Transcription
  misc_feature: MA Experiment 20001905 PARAMETER Experiment Name: At_Drought_Reproduction_P Parameter: Age (day) Value: 40
  misc_feature: MA Experiment 20001905 PARAMETER Experiment Name: At_Drought_Reproduction_P Parameter: Organism Value: A. thaliana
  misc_feature: MA Experiment 20001905 PARAMETER Experiment Name: At_Drought_Reproduction_P Parameter: Plant Line Value: WS
  misc_feature: MA Experiment 20001905 PARAMETER Experiment Name: At_Drought_Reproduction_P Parameter: Timepoint (day) Value: 10
  misc_feature: MA Experiment 20001905 PARAMETER Experiment Name: At_Drought_Reproduction_P Parameter: Tissue Value: Rosettes
  misc_feature: MA Experiment 20001905 PARAMETER Experiment Name: At_Drought_Reproduction_P Parameter: Treatment Value: Drought vs. No Drought
  misc_feature: MA Experiment ID: 20001911 Result: Down-regulated in Transcription
  misc_feature: MA Experiment 20001911 PARAMETER Experiment Name: At_Drought_Reproduction_P Parameter: Age (day) Value: 40
  misc_feature: MA Experiment 20001911 PARAMETER Experiment Name: At_Drought_Reproduction_P Parameter: Organism Value: A. thaliana
  misc_feature: MA Experiment 20001911 PARAMETER Experiment Name: At_Drought_Reproduction_P Parameter: Plant Line Value: WS
  misc_feature: MA Experiment 20001911 PARAMETER Experiment Name: At_Drought_Reproduction_P Parameter: Timepoint (day) Value: 10
  misc_feature: MA Experiment 20001911 PARAMETER Experiment Name: At_Drought_Reproduction_P Parameter: Tissue Value: Flowers
  misc_feature: MA Experiment 20001911 PARAMETER Experiment Name: At_Drought_Reproduction_P Parameter: Treatment Value: Drought vs. No Drought
atggctgctcataatctatgcttcaattcagcttttgtttgcaacgttcatcatcaaaagactcagcattttccttttgaaaccgcggagaaagctatattgtttaaagaagaggtgaggaagacattaaatgaaattgaaggttctattgagcagctagaaatgatcgattctctgcaaagactcggaatctcgtatcactataaacatgaaatccatgatattttgagaaaaattcatgaccaacacggcgaaattgagagggaaacacaagatcttcatgctacatcacttgaatttattctcttaaggcaacatggttttgatgtctcgcaagatgcttttgacgttttcataagtgagaccggagaattcagaaaaactttacacagcgatatcaaaggtttactctctctatacgaagcttcttatttttcaatggattcggagtttaaactcaaggagactagaatttatgcaaacaagcggttaagtgagtttgtcgcggaaagtagcaaaactatttgcagagaagatgaaacttatatattagagatggtgaaacgagcactagagacgccgtaccattggagcatacgaagattagaagcaagatggtacataaatgtgtacgaaaaaaagcatgaaatgaaccctctcttgctagagtttgcagcaattgatttcaacatgttacaagctaatcatcaagaagaacttaaacttatttctagttggtggaacagcacaggacttatgaaacaacttgatttcgtgagagaccgaatcacagagagttatttttggaccattggaatattttacgaaccagagtttaaatactgccgcaagatactcaccaaaatattcatgttaattgtgattatggatgatatctacgacatctatggtacattagaggagctcgagcttttcacaaatgtggtcgaaaaatgggatgtgaaccatgttgaaagacttcccaactacatgagaatgtgttttctttttctatacaatgagatcaaccaaataggatacgatgttctcagagacaaaggacttaacgttatcccttacctcaaacaagtttggacggatctatttaaaacgttcctaactgaatccaagtggtacaaaactggacacaaaccaagtttcgaagaatacatgcaaaacggtgtgatctcgagttctgtcccaacgatactgctccaccttttctccgtcctatccgaccacatctccgaccaaaccctaaccgatgattccaaaaaccactctgtcgtccggagctgtgccaccattctccgtctcgctaatgatcttgccacctcaacggaggagatggcaagaggagattccccaaagtcggtccaatgttacatgtatgagacaagagcaagtgaggaagaggcacgtagacacatgcaaagtatgatcagcgactcttgggacattataaactccgatttaaaaacggcacacacttcttctcttcctcgtggttttctggcagccgccgcaaatcttaaccgcgtggtacagtgtatctaccggcacggtgatggccacggaagcccagaaaagaccaagaccgttgattatatccaatcagtactcttcaatcccgttccgttatag

SEQ ID NO: 81792 - protein, 547 aa, Arabidopsis thaliana
  peptide (1)..(547): Ceres Seq. ID no. 12661388
  misc_feature (27)..(215): Pfam Name: Terpene synthase, N-terminal domain Pfam Description: Terpene synthase, N-terminal domain
  misc_feature (1)..(547): Homolog of NCBI NO: 22328732 NR Description: monoterpene synthase/cyclase family; protein id:
  misc_feature (35)..(547): Homolog of NCBI NO: 7448221 NR Description: probable limonene cyclase - Arabidopsis thaliana limonene cyclase like protein [Arabidopsis thaliana]
  misc_feature (27)..(547): Homolog of NCBI NO: 30349138 NR Description: E-beta-ocimene synthase [Arabidopsis thaliana]
  misc_feature (27)..(547): Homolog of NCBI NO: 22328734 NR Description: monoterpene synthase/cyclase family; protein id:
  misc_feature (27)..(538): Homolog of NCBI NO: 7488129 NR Description: probable limonene cyclase - Arabidopsis thaliana limonene cyclase like protein [Arabidopsis thaliana]
  misc_feature (34)..(547): Homolog of NCBI NO: 15230902 NR Description: myrcene/ocimene synthase, putative; protein id: [Arabidopsis thaliana] >gi|11994152|dbj|BAB01181.1| limonene
  misc_feature (34)..(547): Homolog of NCBI NO: 29468396 NR Description: monoterpene synthase [Arabidopsis thaliana]
  misc_feature (34)..(547): Homolog of NCBI NO: 30688029 NR Description: myrcene/ocimene synthase, putative [Arabidopsis >gi|7939569|dbj|BAA95770.1| limonene cyclase [Arabidopsis
  misc_feature (34)..(547): Homolog of NCBI NO: 9957293 NR Description: myrcene/ocimene synthase [Arabidopsis thaliana]
  misc_feature (34)..(547): Homolog of NCBI NO: 15224102 NR Description: myrcene/ocimene synthase; protein id: At2g24210.1
MAAHNLCFNSAFVCNVHHQKTQHFPFETAEKAILFKEEVRKTLNEIEGSIEQLEMIDSLQRLGISYHYKHEIHDILRKIHDQHGEIERETQDLHATSLEFILLRQHGFDVSQDAFDVFISETGEFRKTLHSDIKGLLSLYEASYFSMDSEFKLKETRIYANKRLSEFVAESSKTICREDETYILEMVKRALETPYHWSIRRLEARWYINVYEKKHEMNPLLLEFAAIDFNMLQANHQEELKLISSWWNSTGLMKQLDFVRDRITESYFWTIGIFYEPEFKYCRKILTKIFMLIVIMDDIYDIYGTLEELELFTNVVEKWDVNHVERLPNYMRMCFLFLYNEINQIGYDVLRDKGLNVIPYLKQVWTDLFKTFLTESKWYKTGHKPSFEEYMQNGVISSSVPTILLHLFSVLSDHISDQTLTDDSKNHSVVRSCATILRLANDLATSTEEMARGDSPKSVQCYMYETRASEEEARRHMQSMISDSWDIINSDLKTAHTSSLPRGFLAAAANLNRVVQCIYRHGDGHGSPEKTKTVDYIQSVLFNPVPL

SEQ ID NO: 81793 - protein, 493 aa, Arabidopsis thaliana
  peptide (1)..(493): Ceres Seq. ID no. 12661389
  misc_feature (1)..(161): Pfam Name: Terpene synthase, N-terminal domain Pfam Description: Terpene synthase, N-terminal domain
  misc_feature (1)..(493): Homolog of NCBI NO: 22328732 NR Description: monoterpene synthase/cyclase family; protein id:
  misc_feature (1)..(493): Homolog of NCBI NO: 7448221 NR Description: probable limonene cyclase - Arabidopsis thaliana limonene cyclase like protein [Arabidopsis thaliana]
  misc_feature (1)..(493): Homolog of NCBI NO: 30349138 NR Description: E-beta-ocimene synthase [Arabidopsis thaliana]
  misc_feature (1)..(493): Homolog of NCBI NO: 22328734 NR Description: monoterpene synthase/cyclase family; protein id:
  misc_feature (1)..(484): Homolog of NCBI NO: 7488129 NR Description: probable limonene cyclase - Arabidopsis thaliana limonene cyclase like protein [Arabidopsis thaliana]
  misc_feature (1)..(493): Homolog of NCBI NO: 15230902 NR Description: myrcene/ocimene synthase, putative; protein id: [Arabidopsis thaliana] >gi|11994152|dbj|BAB01181.1| limonene
  misc_feature (1)..(493): Homolog of NCBI NO: 29468396 NR Description: monoterpene synthase [Arabidopsis thaliana]
  misc_feature (1)..(493): Homolog of NCBI NO: 30688029 NR Description: myrcene/ocimene synthase, putative [Arabidopsis >gi|7939569|dbj|BAA95770.1| limonene cyclase [Arabidopsis
  misc_feature (1)..(493): Homolog of NCBI NO: 9957293 NR Description: myrcene/ocimene synthase [Arabidopsis thaliana]
  misc_feature (1)..(493): Homolog of NCBI NO: 15224102 NR Description: myrcene/ocimene synthase; protein id: At2g24210.1
MIDSLQRLGISYHYKHEIHDILRKIHDQHGEIERETQDLHATSLEFILLRQHGFDVSQDAFDVFISETGEFRKTLHSDIKGLLSLYEASYFSMDSEFKLKETRIYANKRLSEFVAESSKTICREDETYILEMVKRALETPYHWSIRRLEARWYINVYEKKHEMNPLLLEFAAIDFNMLQANHQEELKLISSWWNSTGLMKQLDFVRDRITESYFWTIGIFYEPEFKYCRKILTKIFMLIVIMDDIYDIYGTLEELELFTNVVEKWDVNHVERLPNYMRMCFLFLYNEINQIGYDVLRDKGLNVIPYLKQVWTDLFKTFLTESKWYKTGHKPSFEEYMQNGVISSSVPTILLHLFSVLSDHISDQTLTDDSKNHSVVRSCATILRLANDLATSTEEMARGDSPKSVQCYMYETRASEEEARRHMQSMISDSWDIINSDLKTAHTSSLPRGFLAAAANLNRVVQCIYRHGDGHGSPEKTKTVDYIQSVLFNPVPL

SEQ ID NO: 81794 - protein, 401 aa, Arabidopsis thaliana
  peptide (1)..(401): Ceres Seq. ID no. 12661390
  misc_feature (1)..(69): Pfam Name: Terpene synthase, N-terminal domain Pfam Description: Terpene synthase, N-terminal domain
  misc_feature (1)..(401): Homolog of NCBI NO: 22328732 NR Description: monoterpene synthase/cyclase family; protein id:
  misc_feature (1)..(401): Homolog of NCBI NO: 7448221 NR Description: probable limonene cyclase - Arabidopsis thaliana limonene cyclase like protein [Arabidopsis thaliana]
  misc_feature (1)..(401): Homolog of NCBI NO: 30349138 NR Description: E-beta-ocimene synthase [Arabidopsis thaliana]
  misc_feature (1)..(401): Homolog of NCBI NO: 22328734 NR Description: monoterpene synthase/cyclase family; protein id:
  misc_feature (1)..(392): Homolog of NCBI NO: 7488129 NR Description: probable limonene cyclase - Arabidopsis thaliana limonene cyclase like protein [Arabidopsis thaliana]
  misc_feature (1)..(401): Homolog of NCBI NO: 15230902 NR Description: myrcene/ocimene synthase, putative; protein id: [Arabidopsis thaliana] >gi|11994152|dbj|BAB01181.1| limonene
  misc_feature (1)..(401): Homolog of NCBI NO: 29468396 NR Description: monoterpene synthase [Arabidopsis thaliana]
  misc_feature (1)..(401): Homolog of NCBI NO: 30688029 NR Description: myrcene/ocimene synthase, putative [Arabidopsis >gi|7939569|dbj|BAA95770.1| limonene cyclase [Arabidopsis
  misc_feature (1)..(401): Homolog of NCBI NO: 9957293 NR Description: myrcene/ocimene synthase [Arabidopsis thaliana]
  misc_feature (1)..(401): Homolog of NCBI NO: 15224102 NR Description: myrcene/ocimene synthase; protein id: At2g24210.1
MDSEFKLKETRIYANKRLSEFVAESSKTICREDETYILEMVKRALETPYHWSIRRLEARWYINVYEKKHEMNPLLLEFAAIDFNMLQANHQEELKLISSWWNSTGLMKQLDFVRDRITESYFWTIGIFYEPEFKYCRKILTKIFMLIVIMDDIYDIYGTLEELELFTNVVEKWDVNHVERLPNYMRMCFLFLYNEINQIGYDVLRDKGLNVIPYLKQVWTDLFKTFLTESKWYKTGHKPSFEEYMQNGVISSSVPTILLHLFSVLSDHISDQTLTDDSKNHSVVRSCATILRLANDLATSTEEMARGDSPKSVQCYMYETRASEEEARRHMQSMISDSWDIINSDLKTAHTSSLPRGFLAAAANLNRVVQCIYRHGDGHGSPEKTKTVDYIQSVLFNPVPL

SEQ ID NO: 81795 - DNA, 1728 bp, Arabidopsis thaliana
  misc_feature (1)..(1728): Ceres Seq. ID no. 12661391
  misc_feature: MA Experiment ID: 20000169 Result: Up-regulated in Transcription
  misc_feature: MA Experiment 20000169 PARAMETER Experiment Name: At_100uM_ABA_P Parameter: Age (day) Value: 14
  misc_feature: MA Experiment 20000169 PARAMETER Experiment Name: At_100uM_ABA_P Parameter: Organism Value: A. thaliana
  misc_feature: MA Experiment 20000169 PARAMETER Experiment Name: At_100uM_ABA_P Parameter: Plant Line Value: WS
  misc_feature: MA Experiment 20000169 PARAMETER Experiment Name: At_100uM_ABA_P Parameter: Timepoint (hr) Value: 6
  misc_feature: MA Experiment 20000169 PARAMETER Experiment Name: At_100uM_ABA_P Parameter: Tissue Value: Aerial
  misc_feature: MA Experiment 20000169 PARAMETER Experiment Name: At_100uM_ABA_P Parameter: Treatment Value: 100uM ABA vs. No Treatment
  misc_feature: MA Experiment ID: 20000264 Result: Up-regulated in Transcription
  misc_feature: MA Experiment 20000264 PARAMETER Experiment Name: At_Open_Flower_P Parameter: Age (day) Value: 21
  misc_feature: MA Experiment 20000264 PARAMETER Experiment Name: At_Open_Flower_P Parameter: Plant Line Value: WS
  misc_feature: MA Experiment 20000264 PARAMETER Experiment Name: At_Open_Flower_P Parameter: Tissue Value: Open Flower vs. Whole Plant
  misc_feature: MA Experiment ID: 20000286 Result: Up-regulated in Transcription
  misc_feature: MA Experiment 20000286 PARAMETER Experiment Name: At_Open_Flower_P Parameter: Age (day) Value: 21
  misc_feature: MA Experiment 20000286 PARAMETER Experiment Name: At_Open_Flower_P Parameter: Plant Line Value: WS
  misc_feature: MA Experiment 20000286 PARAMETER Experiment Name: At_Open_Flower_P Parameter: Tissue Value: Half Open vs. Whole Plant
  misc_feature: MA Experiment ID: 20000496 Result: Up-regulated in Transcription
  misc_feature: MA Experiment 20000496 PARAMETER Experiment Name: At_Guard_Cells_P Parameter: Harvest Date Value: 7/19/2002
  misc_feature: MA Experiment 20000496 PARAMETER Experiment Name: At_Guard_Cells_P Parameter: Organism Value: Canola
  misc_feature: MA Experiment 20000496 PARAMETER Experiment Name: At_Guard_Cells_P Parameter: Tissue Value: Guard Cells vs. Leaves
  misc_feature: MA Experiment ID: 20001457 Result: Down-regulated in Transcription
  misc_feature: MA Experiment 20001457 PARAMETER Experiment Name: At_50mM_NH4NO3_L-to-H_P Parameter: Age (day) Value: Undefined
  misc_feature: MA Experiment 20001457 PARAMETER Experiment Name: At_50mM_NH4NO3_L-to-H_P Parameter: Organism Value: Undefined
  misc_feature: MA Experiment 20001457 PARAMETER Experiment Name: At_50mM_NH4NO3_L-to-H_P Parameter: Plant Line Value: Undefined
  misc_feature: MA Experiment 20001457 PARAMETER Experiment Name: At_50mM_NH4NO3_L-to-H_P Parameter: Timepoint (hr) Value: 0.5
  misc_feature: MA Experiment 20001457 PARAMETER Experiment Name: At_50mM_NH4NO3_L-to-H_P Parameter: Tissue Value: Siliques
  misc_feature: MA Experiment 20001457 PARAMETER Experiment Name: At_50mM_NH4NO3_L-to-H_P Parameter: Treatment Value: 50mM NH4NO3 vs. 100mM Manitol
  misc_feature: MA Experiment ID: 20001558 Result: Down-regulated in Transcription
  misc_feature: MA Experiment 20001558 PARAMETER Experiment Name: At_Drought_Soil_Dry_P Parameter: Age (day) Value: 27
  misc_feature: MA Experiment 20001558 PARAMETER Experiment Name: At_Drought_Soil_Dry_P Parameter: Organism Value: A. thaliana
  misc_feature: MA Experiment 20001558 PARAMETER Experiment Name: At_Drought_Soil_Dry_P Parameter: Plant Line Value: WS
  misc_feature: MA Experiment 20001558 PARAMETER Experiment Name: At_Drought_Soil_Dry_P Parameter: Post Timepoint (hr) Value: 6
  misc_feature: MA Experiment 20001558 PARAMETER Experiment Name: At_Drought_Soil_Dry_P Parameter: Post-Treatment Value: Re-Water vs. No Drought
  misc_feature: MA Experiment 20001558 PARAMETER Experiment Name: At_Drought_Soil_Dry_P Parameter: Timepoint (day) Value: 13
  misc_feature: MA Experiment 20001558 PARAMETER Experiment Name: At_Drought_Soil_Dry_P Parameter: Treatment Value: Drought vs. No Drought
  misc_feature: MA Experiment ID: 20001761 Result: Down-regulated in Transcription
  misc_feature: MA Experiment 20001761 PARAMETER Experiment Name: At_50mM_NH4NO3_L-to-H_P Parameter: Timepoint (hr) Value: 4
  misc_feature: MA Experiment 20001761 PARAMETER Experiment Name: At_50mM_NH4NO3_L-to-H_P Parameter: Tissue Value: Siliques
  misc_feature: MA Experiment 20001761 PARAMETER Experiment Name: At_50mM_NH4NO3_L-to-H_P Parameter: Treatment Value: 50mM NH4NO3 vs 100mM Mannitol
  misc_feature: MA Experiment ID: 20001770 Result: Up-regulated in Transcription
  misc_feature: MA Experiment 20001770 PARAMETER Experiment Name: At_Far-red-enriched-adult_P Parameter: Age (day) Value: 28
  misc_feature: MA Experiment 20001770 PARAMETER Experiment Name: At_Far-red-enriched-adult_P Parameter: Light Value: Far-red enriched vs. White
  misc_feature: MA Experiment 20001770 PARAMETER Experiment Name: At_Far-red-enriched-adult_P Parameter: Organism Value: A. thaliana
  misc_feature: MA Experiment 20001770 PARAMETER Experiment Name: At_Far-red-enriched-adult_P Parameter: Plant Line Value: Columbia
  misc_feature: MA Experiment 20001770 PARAMETER Experiment Name: At_Far-red-enriched-adult_P Parameter: Timepoint (hr) Value: 8
  misc_feature: MA Experiment 20001770 PARAMETER Experiment Name: At_Far-red-enriched-adult_P Parameter: Tissue Value: Aerial
  misc_feature: MA Experiment ID: 20001904 Result: Up-regulated in Transcription
  misc_feature: MA Experiment 20001904 PARAMETER Experiment Name: At_Drought_Reproduction_P Parameter: Age (day) Value: 37
  misc_feature: MA Experiment 20001904 PARAMETER Experiment Name: At_Drought_Reproduction_P Parameter: Organism Value: A. thaliana
  misc_feature: MA Experiment 20001904 PARAMETER Experiment Name: At_Drought_Reproduction_P Parameter: Plant Line Value: WS
  misc_feature: MA Experiment 20001904 PARAMETER Experiment Name: At_Drought_Reproduction_P Parameter: Timepoint (day) Value: 7
  misc_feature: MA Experiment 20001904 PARAMETER Experiment Name: At_Drought_Reproduction_P Parameter: Tissue Value: Rosettes
  misc_feature: MA Experiment 20001904 PARAMETER Experiment Name: At_Drought_Reproduction_P Parameter: Treatment Value: Drought vs. No Drought
  misc_feature: MA Experiment ID: 20001905 Result: Up-regulated in Transcription
  misc_feature: MA Experiment 20001905 PARAMETER Experiment Name: At_Drought_Reproduction_P Parameter: Age (day) Value: 40
  misc_feature: MA Experiment 20001905 PARAMETER Experiment Name: At_Drought_Reproduction_P Parameter: Organism Value: A. thaliana
  misc_feature: MA Experiment 20001905 PARAMETER Experiment Name: At_Drought_Reproduction_P Parameter: Plant Line Value: WS
  misc_feature: MA Experiment 20001905 PARAMETER Experiment Name: At_Drought_Reproduction_P Parameter: Timepoint (day) Value: 10
  misc_feature: MA Experiment 20001905 PARAMETER Experiment Name: At_Drought_Reproduction_P Parameter: Tissue Value: Rosettes
  misc_feature: MA Experiment 20001905 PARAMETER Experiment Name: At_Drought_Reproduction_P Parameter: Treatment Value: Drought vs. No Drought
  misc_feature: MA Experiment ID: 20001906 Result: Up-regulated in Transcription
  misc_feature: MA Experiment 20001906 PARAMETER Experiment Name: At_Drought_Reproduction_P Parameter: Age (day) Value: 35
  misc_feature: MA Experiment 20001906 PARAMETER Experiment Name: At_Drought_Reproduction_P Parameter: Organism Value: A. thaliana
  misc_feature: MA Experiment 20001906 PARAMETER Experiment Name: At_Drought_Reproduction_P Parameter: Plant Line Value: WS
  misc_feature: MA Experiment 20001906 PARAMETER Experiment Name: At_Drought_Reproduction_P Parameter: Timepoint (day) Value: 5
  misc_feature: MA Experiment 20001906 PARAMETER Experiment Name: At_Drought_Reproduction_P Parameter: Tissue Value: Siliques
  misc_feature: MA Experiment 20001906 PARAMETER Experiment Name: At_Drought_Reproduction_P Parameter: Treatment Value: Drought vs. No Drought
  misc_feature: MA Experiment ID: 20001911 Result: Down-regulated in Transcription
  misc_feature: MA Experiment 20001911 PARAMETER Experiment Name: At_Drought_Reproduction_P Parameter: Age (day) Value: 40
  misc_feature: MA Experiment 20001911 PARAMETER Experiment Name: At_Drought_Reproduction_P Parameter: Organism Value: A. thaliana
  misc_feature: MA Experiment 20001911 PARAMETER Experiment Name: At_Drought_Reproduction_P Parameter: Plant Line Value: WS
  misc_feature: MA Experiment 20001911 PARAMETER Experiment Name: At_Drought_Reproduction_P Parameter: Timepoint (day) Value: 10
  misc_feature: MA Experiment 20001911 PARAMETER Experiment Name: At_Drought_Reproduction_P Parameter: Tissue Value: Flowers
  misc_feature: MA Experiment 20001911 PARAMETER Experiment Name: At_Drought_Reproduction_P Parameter: Treatment Value: Drought vs. No Drought
atgcctaaacgacaggctcaacggcgtttcactcgcaagactgactcgaaaacaccatcccagcctctggtatcccgtcgctctgcaaactatcaaccgtctctttggcagcacgaatatctcctctcgctcggtaatacatatgtgaaagaggacaacgtcgagagagttacgttattgaagcaggaagtgagtaaaatgctcaatgaaacggaaggtttactcgaacagctagagctcatcgacactttacaaaggcttggagtttcttaccattttgaacaagaaatcaagaagacactaacgaatgtgcatgttaaaaatgtgcgagcacacaaaaaccggatagatcgaaaccgatggggagatttatacgcgaccgcccttgagttccgactcctaaggcaacatggtttcagtatcgcacaagatgtttttgacggaaatattggagttgatttggatgataaagacatcaagggtattctttcactatacgaagcttcatatctctcgaccagaatcgatactaaattgaaagagagcatatactatacaacaaaacgacttagaaaatttgtggaggtaaataagaatgagaccaaatcttacactcttcgaaggatggttatacatgcgttagagatgccgtaccaccggagagtgggaagactagaagcaagatggtacatagaagtgtacggagagagacacgacatgaaccctatcttgcttgaactcgcgaaacttgattttaatttcgtacaagctatccatcaagacgagctcaaatccctctctagttggtggagcaagacgggattaacaaaacacctcgatttcgttagagatcgaataacggagggttatttctcgagtgttggagtaatgtatgagcccgagtttgcatatcaccgacaaatgcttacaaaggttttcatgctcattacaactatcgacgatatatacgatatttatgggacacttgaggagctccaactattcacgaccatagttgaaaaatgggatgtgaatcgtcttgaagaacttcccaactacatgaagttatgttttctctgcctcgtcaacgaaatcaatcagattggatattttgtactcagagataaagggtttaatgtgattccttacctcaaagaatcttgggcagatatgtgtacaacgtttttgaaagaggcaaagtggtataaaagtggttacaaacctaacttcgaagaatacatgcaaaatggttggatctcaagctcagtccctacaatacttctacacttgttctgtctcttatccgaccaaaccttagacattcttggctcctacaatcactctgtagttcgaagctccgccaccatcctccgtctcgctaacgatctcgccacttcttcggtcagtcatggtttcacaacgtacaatactgaggaattagcgagaggcgacactatgaaatccgtacaatgtcacatgcatgaaactggagcttcggaggcagagtcacgcgcgtacattcaaggaattatcggtgtggcttgggatgacttaaacatggagaaaaagagttgtaggctacatcaaggtttcctagaagctgcggctaatcttggacgtgtggctcagtgcgtttatcagtacggtgatggccatggctgtcctgacaaggctaagaccgtcaatcatgtccggtccttgctcgtccaccctcttccactcaattaa

SEQ ID NO: 81796 - protein, 575 aa, Arabidopsis thaliana
  peptide (1)..(575): Ceres Seq. ID no. 12661392
  misc_feature (50)..(238): Pfam Name: Terpene synthase, N-terminal domain Pfam Description: Terpene synthase, N-terminal domain
  misc_feature (1)..(575): Homolog of NCBI NO: 22328734 NR Description: monoterpene synthase/cyclase family; protein id:
  misc_feature (26)..(575): Homolog of NCBI NO: 30349138 NR Description: E-beta-ocimene synthase [Arabidopsis thaliana]
  misc_feature (50)..(565): Homolog of NCBI NO: 7488129 NR Description: probable limonene cyclase - Arabidopsis thaliana limonene cyclase like protein [Arabidopsis thaliana]
  misc_feature (9)..(575): Homolog of NCBI NO: 15230902 NR Description: myrcene/ocimene synthase, putative; protein id: [Arabidopsis thaliana] >gi|11994152|dbj|BAB01181.1| limonene
  misc_feature (5)..(575): Homolog of NCBI NO: 29468396 NR Description: monoterpene synthase [Arabidopsis thaliana]
  misc_feature (5)..(575): Homolog of NCBI NO: 30688029 NR Description: myrcene/ocimene synthase, putative [Arabidopsis >gi|7939569|dbj|BAA95770.1| limonene cyclase [Arabidopsis
  misc_feature (52)..(574): Homolog of NCBI NO: 22328732 NR Description: monoterpene synthase/cyclase family; protein id:
  misc_feature (18)..(575): Homolog of NCBI NO: 15224102 NR Description: myrcene/ocimene synthase; protein id: At2g24210.1
  misc_feature (22)..(575): Homolog of NCBI NO: 9957293 NR Description: myrcene/ocimene synthase [Arabidopsis thaliana]
  misc_feature (76)..(574): Homolog of NCBI NO: 7448221 NR Description: probable limonene cyclase - Arabidopsis thaliana limonene cyclase like protein [Arabidopsis thaliana]
MPKRQAQRRFTRKTDSKTPSQPLVSRRSANYQPSLWQHEYLLSLGNTYVKEDNVERVTLLKQEVSKMLNETEGLLEQLELIDTLQRLGVSYHFEQEIKKTLTNVHVKNVRAHKNRIDRNRWGDLYATALEFRLLRQHGFSIAQDVFDGNIGVDLDDKDIKGILSLYEASYLSTRIDTKLKESIYYTTKRLRKFVEVNKNETKSYTLRRMVIHALEMPYHRRVGRLEARWYIEVYGERHDMNPILLELAKLDFNFVQAIHQDELKSLSSWWSKTGLTKHLDFVRDRITEGYFSSVGVMYEPEFAYHRQMLTKVFMLITTIDDIYDIYGTLEELQLFTTIVEKWDVNRLEELPNYMKLCFLCLVNEINQIGYFVLRDKGFNVIPYLKESWADMCTTFLKEAKWYKSGYKPNFEEYMQNGWISSSVPTILLHLFCLLSDQTLDILGSYNHSVVRSSATILRLANDLATSSVSHGFTTYNTEELARGDTMKSVQCHMHETGASEAESRAYIQGIIGVAWDDLNMEKKSCRLHQGFLEAAANLGRVAQCVYQYGDGHGCPDKAKTVNHVRSLLVHPLPLN

SEQ ID NO: 81797 - protein, 509 aa, Arabidopsis thaliana
  peptide (1)..(509): Ceres Seq. ID no. 12661393
  misc_feature (1)..(172): Pfam Name: Terpene synthase, N-terminal domain Pfam Description: Terpene synthase, N-terminal domain
  misc_feature (1)..(509): Homolog of NCBI NO: 22328734 NR Description: monoterpene synthase/cyclase family; protein id:
  misc_feature (1)..(509): Homolog of NCBI NO: 30349138 NR Description: E-beta-ocimene synthase [Arabidopsis thaliana]
  misc_feature (1)..(499): Homolog of NCBI NO: 7488129 NR Description: probable limonene cyclase - Arabidopsis thaliana limonene cyclase like protein [Arabidopsis thaliana]
  misc_feature (1)..(509): Homolog of NCBI NO: 15230902 NR Description: myrcene/ocimene synthase, putative; protein id: [Arabidopsis thaliana] >gi|11994152|dbj|BAB01181.1| limonene
  misc_feature (1)..(509): Homolog of NCBI NO: 29468396 NR Description: monoterpene synthase [Arabidopsis thaliana]
  misc_feature (1)..(509): Homolog of NCBI NO: 30688029 NR Description: myrcene/ocimene synthase, putative [Arabidopsis >gi|7939569|dbj|BAA95770.1| limonene cyclase [Arabidopsis
  misc_feature (1)..(508): Homolog of NCBI NO: 22328732 NR Description: monoterpene synthase/cyclase family; protein id:
  misc_feature (1)..(509): Homolog of NCBI NO: 15224102 NR Description: myrcene/ocimene synthase; protein id: At2g24210.1
  misc_feature (1)..(509): Homolog of NCBI NO: 9957293 NR Description: myrcene/ocimene synthase [Arabidopsis thaliana]
  misc_feature (10)..(508): Homolog of NCBI NO: 7448221 NR Description: probable limonene cyclase - Arabidopsis thaliana limonene cyclase like protein [Arabidopsis thaliana]
MLNETEGLLEQLELIDTLQRLGVSYHFEQEIKKTLTNVHVKNVRAHKNRIDRNRWGDLYATALEFRLLRQHGFSIAQDVFDGNIGVDLDDKDIKGILSLYEASYLSTRIDTKLKESIYYTTKRLRKFVEVNKNETKSYTLRRMVIHALEMPYHRRVGRLEARWYIEVYGERHDMNPILLELAKLDFNFVQAIHQDELKSLSSWWSKTGLTKHLDFVRDRITEGYFSSVGVMYEPEFAYHRQMLTKVFMLITTIDDIYDIYGTLEELQLFTTIVEKWDVNRLEELPNYMKLCFLCLVNEINQIGYFVLRDKGFNVIPYLKESWADMCTTFLKEAKWYKSGYKPNFEEYMQNGWISSSVPTILLHLFCLLSDQTLDILGSYNHSVVRSSATILRLANDLATSSVSHGFTTYNTEELARGDTMKSVQCHMHETGASEAESRAYIQGIIGVAWDDLNMEKKSCRLHQGFLEAAANLGRVAQCVYQYGDGHGCPDKAKTVNHVRSLLVHPLPLN

SEQ ID NO: 81798 - protein, 367 aa, Arabidopsis thaliana
  peptide (1)..(367): Ceres Seq. ID no. 12661394
  misc_feature (1)..(367): Homolog of NCBI NO: 22328734 NR Description: monoterpene synthase/cyclase family; protein id:
  misc_feature (1)..(367): Homolog of NCBI NO: 30349138 NR Description: E-beta-ocimene synthase [Arabidopsis thaliana]
  misc_feature (1)..(357): Homolog of NCBI NO: 7488129 NR Description: probable limonene cyclase - Arabidopsis thaliana limonene cyclase like protein [Arabidopsis thaliana]
  misc_feature (1)..(367): Homolog of NCBI NO: 15230902 NR Description: myrcene/ocimene synthase, putative; protein id: [Arabidopsis thaliana] >gi|11994152|dbj|BAB01181.1| limonene
  misc_feature (1)..(367): Homolog of NCBI NO: 29468396 NR Description: monoterpene synthase [Arabidopsis thaliana]
  misc_feature (1)..(367): Homolog of NCBI NO: 30688029 NR Description: myrcene/ocimene synthase, putative [Arabidopsis >gi|7939569|dbj|BAA95770.1| limonene cyclase [Arabidopsis
  misc_feature (1)..(366): Homolog of NCBI NO: 22328732 NR Description: monoterpene synthase/cyclase family; protein id:
  misc_feature (1)..(367): Homolog of NCBI NO: 15224102 NR Description: myrcene/ocimene synthase; protein id: At2g24210.1
  misc_feature (1)..(367): Homolog of NCBI NO: 9957293 NR Description: myrcene/ocimene synthase [Arabidopsis thaliana]
  misc_feature (1)..(366): Homolog of NCBI NO: 7448221 NR Description: probable limonene cyclase - Arabidopsis thaliana limonene cyclase like protein [Arabidopsis thaliana]
MVIHALEMPYHRRVGRLEARWYIEVYGERHDMNPILLELAKLDFNFVQAIHQDELKSLSSWWSKTGLTKHLDFVRDRITEGYFSSVGVMYEPEFAYHRQMLTKVFMLITTIDDIYDIYGTLEELQLFTTIVEKWDVNRLEELPNYMKLCFLCLVNEINQIGYFVLRDKGFNVIPYLKESWADMCTTFLKEAKWYKSGYKPNFEEYMQNGWISSSVPTILLHLFCLLSDQTLDILGSYNHSVVRSSATILRLANDLATSSVSHGFTTYNTEELARGDTMKSVQCHMHETGASEAESRAYIQGIIGVAWDDLNMEKKSCRLHQGFLEAAANLGRVAQCVYQYGDGHGCPDKAKTVNHVRSLLVHPLPLN

SEQ ID NO: 81799 - DNA, 783 bp, Arabidopsis thaliana
  misc_feature (1)..(783): Ceres Seq. ID no. 12661418
  misc_feature: MA Experiment ID: 20000169 Result: Up-regulated in Transcription
  misc_feature: MA Experiment 20000169 PARAMETER Experiment Name: At_100uM_ABA_P Parameter: Age (day) Value: 14
  misc_feature: MA Experiment 20000169 PARAMETER Experiment Name: At_100uM_ABA_P Parameter: Organism Value: A. thaliana
  misc_feature: MA Experiment 20000169 PARAMETER Experiment Name: At_100uM_ABA_P Parameter: Plant Line Value: WS
  misc_feature: MA Experiment 20000169 PARAMETER Experiment Name: At_100uM_ABA_P Parameter: Timepoint (hr) Value: 6
  misc_feature: MA Experiment 20000169 PARAMETER Experiment Name: At_100uM_ABA_P Parameter: Tissue Value: Aerial
  misc_feature: MA Experiment 20000169 PARAMETER Experiment Name: At_100uM_ABA_P Parameter: Treatment Value: 100uM ABA vs. No Treatment
  misc_feature: MA Experiment ID: 20000234 Result: Down-regulated in Transcription
  misc_feature: MA Experiment 20000234 PARAMETER Experiment Name: At_Siliques_P Parameter: Age (day) Value: 21
  misc_feature: MA Experiment 20000234 PARAMETER Experiment Name: At_Siliques_P Parameter: Organism Value: A. thaliana
  misc_feature: MA Experiment 20000234 PARAMETER Experiment Name: At_Siliques_P Parameter: Plant Line Value: WS
  misc_feature: MA Experiment 20000234 PARAMETER Experiment Name: At_Siliques_P Parameter: Tissue Value: Less Than 5mm Siliques vs. Whole Plant
  misc_feature: MA Experiment ID: 20000267 Result: Up-regulated in Transcription
  misc_feature: MA Experiment 20000267 PARAMETER Experiment Name: At_Drought_P Parameter: Age (day) Value: 7
  misc_feature: MA Experiment 20000267 PARAMETER Experiment Name: At_Drought_P Parameter: Organism Value: A. thaliana
  misc_feature: MA Experiment 20000267 PARAMETER Experiment Name: At_Drought_P Parameter: Plant Line Value: WS
  misc_feature: MA Experiment 20000267 PARAMETER Experiment Name: At_Drought_P Parameter: Timepoint (hr) Value: 6
  misc_feature: MA Experiment 20000267 PARAMETER Experiment Name: At_Drought_P Parameter: Tissue Value: Whole Plant
  misc_feature: MA Experiment 20000267 PARAMETER Experiment Name: At_Drought_P Parameter: Treatment Value: Drought vs. No Drought
  misc_feature: MA Experiment ID: 20000268 Result: Up-regulated in Transcription
  misc_feature: MA Experiment 20000268 PARAMETER Experiment Name: At_100mM_NaCl__P Parameter: Age (day) Value: 14
  misc_feature: MA Experiment 20000268 PARAMETER Experiment Name: At_100mM_NaCl__P Parameter: Organism Value: A. thaliana
  misc_feature: MA Experiment 20000268 PARAMETER Experiment Name: At_100mM_NaCl__P Parameter: Plant Line Value: WS
  misc_feature: MA Experiment 20000268 PARAMETER Experiment Name: At_100mM_NaCl__P Parameter: Timepoint (hr) Value: 6
  misc_feature: MA Experiment 20000268 PARAMETER Experiment Name: At_100mM_NaCl__P Parameter: Tissue Value: Whole Plant
  misc_feature: MA Experiment 20000268 PARAMETER Experiment Name: At_100mM_NaCl__P Parameter: Treatment Value: 100mM NaCl vs. No Treatment
  misc_feature: MA Experiment ID: 20000436 Result: Up-regulated in Transcription
  misc_feature: MA Experiment 20000436 PARAMETER Experiment Name: At_Drought_P Parameter: Age (day) Value: 7
  misc_feature: MA Experiment 20000436 PARAMETER Experiment Name: At_Drought_P Parameter: Organism Value: A. thaliana
  misc_feature: MA Experiment 20000436 PARAMETER Experiment Name: At_Drought_P Parameter: Plant Line Value: WS
  misc_feature: MA Experiment 20000436 PARAMETER Experiment Name: At_Drought_P Parameter: Timepoint (hr) Value: 12
  misc_feature: MA Experiment 20000436 PARAMETER Experiment Name: At_Drought_P Parameter: Tissue Value: Whole Plant
  misc_feature: MA Experiment 20000436 PARAMETER Experiment Name: At_Drought_P Parameter: Treatment Value: Drought vs. No Drought
  misc_feature: MA Experiment ID: 20000437 Result: Up-regulated in Transcription
  misc_feature: MA Experiment 20000437 PARAMETER Experiment Name: At_Drought_P Parameter: Age (day) Value: 8
  misc_feature: MA Experiment 20000437 PARAMETER Experiment Name: At_Drought_P Parameter: Organism Value: A. thaliana
  misc_feature: MA Experiment 20000437 PARAMETER Experiment Name: At_Drought_P Parameter: Plant Line Value: WS
  misc_feature: MA Experiment 20000437 PARAMETER Experiment Name: At_Drought_P Parameter: Timepoint (hr) Value: 24
  misc_feature: MA Experiment 20000437 PARAMETER Experiment Name: At_Drought_P Parameter: Tissue Value: Whole Plant
  misc_feature: MA Experiment 20000437 PARAMETER Experiment Name: At_Drought_P Parameter: Treatment Value: Drought vs. No Drought
  misc_feature: MA Experiment ID: 20000451 Result: Up-regulated in Transcription
  misc_feature: MA Experiment 20000451 PARAMETER Experiment Name: At_CS6879_Shoots-Roots_P Parameter: Age (day) Value: 14
  misc_feature: MA Experiment 20000451 PARAMETER Experiment Name: At_CS6879_Shoots-Roots_P Parameter: Organism Value: A. thaliana
  misc_feature: MA Experiment 20000451 PARAMETER Experiment Name: At_CS6879_Shoots-Roots_P Parameter: Plant Line Value: CS6879 vs. WS
  misc_feature: MA Experiment 20000451 PARAMETER Experiment Name: At_CS6879_Shoots-Roots_P Parameter: Tissue Value: Roots
  misc_feature: MA Experiment ID: 20000453 Result: Up-regulated in Transcription
  misc_feature: MA Experiment 20000453 PARAMETER Experiment Name: At_100uM_ABA_P Parameter: Age (day) Value: 15
  misc_feature: MA Experiment 20000453 PARAMETER Experiment Name: At_100uM_ABA_P Parameter: Organism Value: A. thaliana
  misc_feature: MA Experiment 20000453 PARAMETER Experiment Name: At_100uM_ABA_P Parameter: Plant Line Value: WS
  misc_feature: MA Experiment 20000453 PARAMETER Experiment Name: At_100uM_ABA_P Parameter: Timepoint (hr) Value: 24
  misc_feature: MA Experiment 20000453 PARAMETER Experiment Name: At_100uM_ABA_P Parameter: Tissue Value: Aerial
  misc_feature: MA Experiment 20000453 PARAMETER Experiment Name: At_100uM_ABA_P Parameter: Treatment Value: 100uM ABA vs. No Treatment
  misc_feature: MA Experiment ID: 20000455 Result: Up-regulated in Transcription
  misc_feature: MA Experiment 20000455 PARAMETER Experiment Name: At_100uM_ABA_P Parameter: Age (day) Value: 16
  misc_feature: MA Experiment 20000455 PARAMETER Experiment Name: At_100uM_ABA_P Parameter: Organism Value: A. thaliana
  misc_feature: MA Experiment 20000455 PARAMETER Experiment Name: At_100uM_ABA_P Parameter: Plant Line Value: WS
  misc_feature: MA Experiment 20000455 PARAMETER Experiment Name: At_100uM_ABA_P Parameter: Timepoint (hr) Value: 48
  misc_feature: MA Experiment 20000455 PARAMETER Experiment Name: At_100uM_ABA_P Parameter: Tissue Value: Aerial
  misc_feature: MA Experiment 20000455 PARAMETER Experiment Name: At_100uM_ABA_P Parameter: Treatment Value: 100uM ABA vs. No Treatment
  misc_feature: MA Experiment ID: 20000495 Result: Up-regulated in Transcription
  misc_feature: MA Experiment 20000495 PARAMETER Experiment Name: At_Guard_Cells_P Parameter: Harvest Date Value: 8/2/2002
  misc_feature: MA Experiment 20000495 PARAMETER Experiment Name: At_Guard_Cells_P Parameter: Organism Value: A. thaliana
  misc_feature: MA Experiment 20000495 PARAMETER Experiment Name: At_Guard_Cells_P Parameter: Tissue Value: Guard Cells vs. Leaves
  misc_feature: MA Experiment ID: 20000527 Result: Down-regulated in Transcription
  misc_feature: MA Experiment 20000527 PARAMETER Experiment Name: At_10percent_PEG_P Parameter: Age (day) Value: 20
  misc_feature: MA Experiment 20000527 PARAMETER Experiment Name: At_10percent_PEG_P Parameter: Organism Value: A. thaliana
  misc_feature: MA Experiment 20000527 PARAMETER Experiment Name: At_10percent_PEG_P Parameter: Plant Line Value: WS
  misc_feature: MA Experiment 20000527 PARAMETER Experiment Name: At_10percent_PEG_P Parameter: Timepoint (day) Value: 20
  misc_feature: MA Experiment 20000527 PARAMETER Experiment Name: At_10percent_PEG_P Parameter: Tissue Value: Whole Plant
  misc_feature: MA Experiment 20000527 PARAMETER Experiment Name: At_10percent_PEG_P Parameter: Treatment Value: 10percent PEG vs. No Treatment
  misc_feature: MA Experiment ID: 20000574 Result: Down-regulated in Transcription
  misc_feature: MA Experiment 20000574 PARAMETER Experiment Name: At_100uM_ABA_Mutants__P Parameter: Organism Value: A. thaliana
  misc_feature: MA Experiment 20000574 PARAMETER Experiment Name: At_100uM_ABA_Mutants__P Parameter: Plant Line Value: CS23 vs. Ler wt
  misc_feature: MA Experiment 20000574 PARAMETER Experiment Name: At_100uM_ABA_Mutants__P Parameter: Timepoint (hr) Value: N/A
  misc_feature: MA Experiment 20000574 PARAMETER Experiment Name: At_100uM_ABA_Mutants__P Parameter: Tissue Value: Whole Plant
  misc_feature: MA Experiment 20000574 PARAMETER Experiment Name: At_100uM_ABA_Mutants__P Parameter: Treatment Value: None
  misc_feature: MA Experiment ID: 20000575 Result: Up-regulated in Transcription
  misc_feature: MA Experiment 20000575 PARAMETER Experiment Name: At_100uM_ABA_Mutants__P Parameter: Organism Value: A. thaliana
  misc_feature: MA Experiment 20000575 PARAMETER Experiment Name: At_100uM_ABA_Mutants__P Parameter: Plant Line Value: CS22
  misc_feature: MA Experiment 20000575 PARAMETER Experiment Name: At_100uM_ABA_Mutants__P Parameter: Timepoint (hr) Value: 6
  misc_feature: MA Experiment 20000575 PARAMETER Experiment Name: At_100uM_ABA_Mutants__P Parameter: Tissue Value: Whole Plant
  misc_feature: MA Experiment 20000575 PARAMETER Experiment Name: At_100uM_ABA_Mutants__P Parameter: Treatment Value: 1uM ABA vs. No Treatment
  misc_feature: MA Experiment ID: 20000576 Result: Up-regulated in Transcription
  misc_feature: MA Experiment 20000576 PARAMETER Experiment Name: At_100uM_ABA_Mutants__P Parameter: Organism Value: A. thaliana
  misc_feature: MA Experiment 20000576 PARAMETER Experiment Name: At_100uM_ABA_Mutants__P Parameter: Plant Line Value: CS23
  misc_feature: MA Experiment 20000576 PARAMETER Experiment Name: At_100uM_ABA_Mutants__P Parameter: Timepoint (hr) Value: 6
  misc_feature: MA Experiment 20000576 PARAMETER Experiment Name: At_100uM_ABA_Mutants__P Parameter: Tissue Value: Whole Plant
  misc_feature: MA Experiment 20000576 PARAMETER Experiment Name: At_100uM_ABA_Mutants__P Parameter: Treatment Value: 1uM ABA vs. No Treatment
  misc_feature: MA Experiment ID: 20001248 Result: Down-regulated in Transcription
  misc_feature: MA Experiment 20001248 PARAMETER Experiment Name: At_Far-red-induction_P Parameter: Age (day) Value: 7
  misc_feature: MA Experiment 20001248 PARAMETER Experiment Name: At_Far-red-induction_P Parameter: Light Value: Far-red vs. White
  misc_feature: MA Experiment 20001248 PARAMETER Experiment Name: At_Far-red-induction_P Parameter: Organism Value: A. thaliana
  misc_feature: MA Experiment 20001248 PARAMETER Experiment Name: At_Far-red-induction_P Parameter: Plant Line Value: Columbia
  misc_feature: MA Experiment 20001248 PARAMETER Experiment Name: At_Far-red-induction_P Parameter: Timepoint (hr) Value: 4
  misc_feature: MA Experiment 20001248 PARAMETER Experiment Name: At_Far-red-induction_P Parameter: Tissue Value: Whole Plant
  misc_feature: MA Experiment ID: 20001450 Result: Down-regulated in Transcription
  misc_feature: MA Experiment 20001450 PARAMETER Experiment Name: At_Far-red-induction_P Parameter: Age (day) Value: 7
  misc_feature: MA Experiment 20001450 PARAMETER Experiment Name: At_Far-red-induction_P Parameter: Light Value: Far-red vs. White
  misc_feature: MA Experiment 20001450 PARAMETER Experiment Name: At_Far-red-induction_P Parameter: Organism Value: A. thaliana
  misc_feature: MA Experiment 20001450 PARAMETER Experiment Name: At_Far-red-induction_P Parameter: Plant Line Value: Columbia
  misc_feature: MA Experiment 20001450 PARAMETER Experiment Name: At_Far-red-induction_P Parameter: Timepoint (hr) Value: 8
  misc_feature: MA Experiment 20001450 PARAMETER Experiment Name: At_Far-red-induction_P Parameter: Tissue Value: Whole Plant
  misc_feature: MA Experiment ID: 20001451 Result: Down-regulated in Transcription
  misc_feature: MA Experiment 20001451 PARAMETER Experiment Name: At_Far-red-induction_P Parameter: Age (day) Value: 7
  misc_feature: MA Experiment 20001451 PARAMETER Experiment Name: At_Far-red-induction_P Parameter: Light Value: Far-red vs. White
  misc_feature: MA Experiment 20001451 PARAMETER Experiment Name: At_Far-red-induction_P Parameter: Organism Value: A. thaliana
  misc_feature: MA Experiment 20001451 PARAMETER Experiment Name: At_Far-red-induction_P Parameter: Plant Line Value: Columbia
  misc_feature: MA Experiment 20001451 PARAMETER Experiment Name: At_Far-red-induction_P Parameter: Timepoint (hr) Value: 24
  misc_feature: MA Experiment 20001451 PARAMETER Experiment Name: At_Far-red-induction_P Parameter: Tissue Value: Whole Plant
  misc_feature: MA Experiment ID: 20001554 Result: Up-regulated in Transcription
  misc_feature: MA Experiment 20001554 PARAMETER Experiment Name: At_Drought_Soil_Dry_P Parameter: Age (day) Value: 21
  misc_feature: MA Experiment 20001554 PARAMETER Experiment Name: At_Drought_Soil_Dry_P Parameter: Organism Value: A. thaliana
  misc_feature: MA Experiment 20001554 PARAMETER Experiment Name: At_Drought_Soil_Dry_P Parameter: Plant Line Value: WS
  misc_feature: MA Experiment 20001554 PARAMETER Experiment Name: At_Drought_Soil_Dry_P Parameter: Post Timepoint (hr) Value: None
  misc_feature: MA Experiment 20001554 PARAMETER Experiment Name: At_Drought_Soil_Dry_P Parameter: Post-Treatment Value: None
  misc_feature: MA Experiment 20001554 PARAMETER Experiment Name: At_Drought_Soil_Dry_P Parameter: Timepoint (day) Value: 7
  misc_feature: MA Experiment 20001554 PARAMETER Experiment Name: At_Drought_Soil_Dry_P Parameter: Treatment Value: Drought vs. No Drought
  misc_feature: MA Experiment ID: 20001555 Result: Up-regulated in Transcription
  misc_feature: MA Experiment 20001555 PARAMETER Experiment Name: At_Drought_Soil_Dry_P Parameter: Age (day) Value: 24
  misc_feature: MA Experiment 20001555 PARAMETER Experiment Name: At_Drought_Soil_Dry_P Parameter: Organism Value: A. thaliana
  misc_feature: MA Experiment 20001555 PARAMETER Experiment Name: At_Drought_Soil_Dry_P Parameter: Plant Line Value: WS
  misc_feature: MA Experiment 20001555 PARAMETER Experiment Name: At_Drought_Soil_Dry_P Parameter: Post Timepoint (hr) Value: None
  misc_feature: MA Experiment 20001555 PARAMETER Experiment Name: At_Drought_Soil_Dry_P Parameter: Post-Treatment Value: None
  misc_feature: MA Experiment 20001555 PARAMETER Experiment Name: At_Drought_Soil_Dry_P Parameter: Timepoint (day) Value: 10
  misc_feature: MA Experiment 20001555 PARAMETER Experiment Name: At_Drought_Soil_Dry_P Parameter: Treatment Value: Drought vs. No Drought
  misc_feature: MA Experiment ID: 20001556 Result: Up-regulated in Transcription
  misc_feature: MA Experiment 20001556 PARAMETER Experiment Name: At_Drought_Soil_Dry_P Parameter: Age (day) Value: 26
  misc_feature: MA Experiment 20001556 PARAMETER Experiment Name: At_Drought_Soil_Dry_P Parameter: Organism Value: A. thaliana
  misc_feature: MA Experiment 20001556 PARAMETER Experiment Name: At_Drought_Soil_Dry_P Parameter: Plant Line Value: WS
  misc_feature: MA Experiment 20001556 PARAMETER Experiment Name: At_Drought_Soil_Dry_P Parameter: Post Timepoint (hr) Value: None
  misc_feature: MA Experiment 20001556 PARAMETER Experiment Name: At_Drought_Soil_Dry_P Parameter: Post-Treatment Value: None
  misc_feature: MA Experiment 20001556 PARAMETER Experiment Name: At_Drought_Soil_Dry_P Parameter: Timepoint (day) Value: 12
  misc_feature: MA Experiment 20001556 PARAMETER Experiment Name: At_Drought_Soil_Dry_P Parameter: Treatment Value: Drought vs. No Drought
  misc_feature: MA Experiment ID: 20001559 Result: Up-regulated in Transcription
  misc_feature: MA Experiment 20001559 PARAMETER Experiment Name: At_Drought_Soil_Dry_P Parameter: Age (day) Value: 28
  misc_feature: MA Experiment 20001559 PARAMETER Experiment Name: At_Drought_Soil_Dry_P Parameter: Organism Value: A. thaliana
  misc_feature: MA Experiment 20001559 PARAMETER Experiment Name: At_Drought_Soil_Dry_P Parameter: Plant Line Value: WS
  misc_feature: MA Experiment 20001559 PARAMETER Experiment Name: At_Drought_Soil_Dry_P Parameter: Post Timepoint (hr) Value: 29
  misc_feature: MA Experiment 20001559 PARAMETER Experiment Name: At_Drought_Soil_Dry_P Parameter: Post-Treatment Value: Re-Water vs. No Drought
  misc_feature: MA Experiment 20001559 PARAMETER Experiment Name: At_Drought_Soil_Dry_P Parameter: Timepoint (day) Value: 14
  misc_feature: MA Experiment 20001559 PARAMETER Experiment Name: At_Drought_Soil_Dry_P Parameter: Treatment Value: Drought vs. No Drought
  misc_feature: MA Experiment ID: 20001560 Result: Up-regulated in Transcription
  misc_feature: MA Experiment 20001560 PARAMETER Experiment Name: At_Drought_Soil_Dry_P Parameter: Age (day) Value: 28
  misc_feature: MA Experiment 20001560 PARAMETER Experiment Name: At_Drought_Soil_Dry_P Parameter: Organism Value: A. thaliana
  misc_feature: MA Experiment 20001560 PARAMETER Experiment Name: At_Drought_Soil_Dry_P Parameter: Plant Line Value: WS
  misc_feature: MA Experiment 20001560 PARAMETER Experiment Name: At_Drought_Soil_Dry_P Parameter: Post Timepoint (hr) Value: None
  misc_feature: MA Experiment 20001560 PARAMETER Experiment Name: At_Drought_Soil_Dry_P Parameter: Post-Treatment Value: None
  misc_feature: MA Experiment 20001560 PARAMETER Experiment Name: At_Drought_Soil_Dry_P Parameter: Timepoint (day) Value: 14
  misc_feature: MA Experiment 20001560 PARAMETER Experiment Name: At_Drought_Soil_Dry_P Parameter: Treatment Value: Drought vs. No Drought
  misc_feature: MA Experiment ID: 20001757 Result: Down-regulated in Transcription
  misc_feature: MA Experiment 20001757 PARAMETER Experiment Name: At_50mM_NH4NO3_L-to-H_P Parameter: Timepoint (hr) Value: 6
  misc_feature: MA Experiment 20001757 PARAMETER Experiment Name: At_50mM_NH4NO3_L-to-H_P Parameter: Tissue Value: Leaf
  misc_feature: MA Experiment 20001757 PARAMETER Experiment Name: At_50mM_NH4NO3_L-to-H_P Parameter: Treatment Value: 50mM NH4NO3 vs 100mM Mannitol
  misc_feature: MA Experiment ID: 20001904 Result: Up-regulated in Transcription
  misc_feature: MA Experiment 20001904 PARAMETER Experiment Name: At_Drought_Reproduction_P Parameter: Age (day) Value: 37
  misc_feature: MA Experiment 20001904 PARAMETER Experiment Name: At_Drought_Reproduction_P Parameter: Organism Value: A. thaliana
  misc_feature: MA Experiment 20001904 PARAMETER Experiment Name: At_Drought_Reproduction_P Parameter: Plant Line Value: WS
  misc_feature: MA Experiment 20001904 PARAMETER Experiment Name: At_Drought_Reproduction_P Parameter: Timepoint (day) Value: 7
  misc_feature: MA Experiment 20001904 PARAMETER Experiment Name: At_Drought_Reproduction_P Parameter: Tissue Value: Rosettes
  misc_feature: MA Experiment 20001904 PARAMETER Experiment Name: At_Drought_Reproduction_P Parameter: Treatment Value: Drought vs. No Drought
  misc_feature: MA Experiment ID: 20001910 Result: Up-regulated in Transcription
  misc_feature: MA Experiment 20001910 PARAMETER Experiment Name: At_Drought_Reproduction_P Parameter: Age (day) Value: 37
  misc_feature: MA Experiment 20001910 PARAMETER Experiment Name: At_Drought_Reproduction_P Parameter: Organism Value: A. thaliana
  misc_feature: MA Experiment 20001910 PARAMETER Experiment Name: At_Drought_Reproduction_P Parameter: Plant Line Value: WS
  misc_feature: MA Experiment 20001910 PARAMETER Experiment Name: At_Drought_Reproduction_P Parameter: Timepoint (day) Value: 7
  misc_feature: MA Experiment 20001910 PARAMETER Experiment Name: At_Drought_Reproduction_P Parameter: Tissue Value: Flowers
  misc_feature: MA Experiment 20001910 PARAMETER Experiment Name: At_Drought_Reproduction_P Parameter: Treatment Value: Drought vs. No Drought
atggagattatgcatctattggaactatgttacctcaatcttctgagctttacaatgtttcttgttttgttttattttgaagggggacattgtgggtatggagaatttggaagagatatcaataacggtgaagtgagtggtgtttcatggcgactatggaacaatggaactggctgtggtgcttgttaccaggtgaggtgcaagataccaccacactgcagtgaggaaggagtatacgtagtggctacggactccggagaaggagatggcacggacttcatcttaagccctaaggcgtacggacgtatggcgcgacccggcacagaaaatcagctctactccttcggtgtagtcaacgttgagtaccaaaggatcccttgccgatacgcagggtataatctggtgtataagatccatgagaaaagctacaatcctcattatcttgccatccttgtcttgtacgttggtggtgttaatgacatcctcgccgttgaagtctggcaggtaaatttaatcaaagatgttgagaaacttagatatatgtttttgaggatcaaaatatatagtttactcttagatgattttgaggattgcaaagagtggagacgtatgagaagagtgtttggagcggttcatgatttgcagaatccacctagaggcactctcacattgaggttcttagtctacggaagcgcaggaatcaattggatccaatcgccaaacgctattcccgctgattggactgccggagccacctacgactccaacattctacttacttaa

SEQ ID NO: 81800 - protein, 260 aa, Arabidopsis thaliana
  peptide (1)..(260): Ceres Seq. ID no. 12661419
  misc_feature (1)..(260): Homolog of NCBI NO: 7488049 NR Description: probable allergen - Arabidopsis thaliana allergen like protein [Arabidopsis thaliana]
  misc_feature (29)..(182): Homolog of NCBI NO: 30683908 NR Description: expansin- related [Arabidopsis thaliana]
  misc_feature (196)..(260): Homolog of NCBI NO: 30683908 NR Description: expansin- related [Arabidopsis thaliana]
  misc_feature (29)..(171): Homolog of NCBI NO: 34901812 NR Description: expansin-related protein 1-like [Oryza sativa
  misc_feature (204)..(257): Homolog of NCBI NO: 34901812 NR Description: expansin-related protein 1-like [Oryza sativa
  misc_feature (29)..(169): Homolog of NCBI NO: 33111959 NR Description: expansin-like protein [Quercus robur]
  misc_feature (201)..(260): Homolog of NCBI NO: 33111959 NR Description: expansin-like protein [Quercus robur]
  misc_feature (10)..(182): Homolog of NCBI NO: 30038051 NR Description: beta expansin EXPB2.1 [Mirabilis jalapa]
  misc_feature (201)..(260): Homolog of NCBI NO: 30038051 NR Description: beta expansin EXPB2.1 [Mirabilis jalapa]
  misc_feature (29)..(169): Homolog of NCBI NO: 15231303 NR Description: putative protein; protein id: At3g45970.1, by cDNA: 27534., supported by cDNA: gi_14190436, supported by
MEIMHLLELCYLNLLSFTMFLVLFYFEGGHCGYGEFGRDINNGEVSGVSWRLWNNGTGCGACYQVRCKIPPHCSEEGVYVVATDSGEGDGTDFILSPKAYGRMARPGTENQLYSFGVVNVEYQRIPCRYAGYNLVYKIHEKSYNPHYLAILVLYVGGVNDILAVEVWQVNLIKDVEKLRYMFLRIKIYSLLLDDFEDCKEWRRMRRVFGAVHDLQNPPRGTLTLRFLVYGSAGINWIQSPNAIPADWTAGATYDSNILLT

SEQ ID NO: 81801 - protein, 257 aa, Arabidopsis thaliana
  peptide (1)..(257): Ceres Seq. ID no. 12661420
  misc_feature (1)..(257): Homolog of NCBI NO: 7488049 NR Description: probable allergen - Arabidopsis thaliana allergen like protein [Arabidopsis thaliana]
  misc_feature (26)..(179): Homolog of NCBI NO: 30683908 NR Description: expansin- related [Arabidopsis thaliana]
  misc_feature (193)..(257): Homolog of NCBI NO: 30683908 NR Description: expansin- related [Arabidopsis thaliana]
  misc_feature (26)..(168): Homolog of NCBI NO: 34901812 NR Description: expansin-related protein 1-like [Oryza sativa
  misc_feature (201)..(254): Homolog of NCBI NO: 34901812 NR Description: expansin-related protein 1-like [Oryza sativa
  misc_feature (26)..(166): Homolog of NCBI NO: 33111959 NR Description: expansin-like protein [Quercus robur]
  misc_feature (198)..(257): Homolog of NCBI NO: 33111959 NR Description: expansin-like protein [Quercus robur]
  misc_feature (7)..(179): Homolog of NCBI NO: 30038051 NR Description: beta expansin EXPB2.1 [Mirabilis jalapa]
  misc_feature (198)..(257): Homolog of NCBI NO: 30038051 NR Description: beta expansin EXPB2.1 [Mirabilis jalapa]
  misc_feature (26)..(166): Homolog of NCBI NO: 15231303 NR Description: putative protein; protein id: At3g45970.1, by cDNA: 27534., supported by cDNA: gi_14190436, supported by
MHLLELCYLNLLSFTMFLVLFYFEGGHCGYGEFGRDINNGEVSGVSWRLWNNGTGCGACYQVRCKIPPHCSEEGVYVVATDSGEGDGTDFILSPKAYGRMARPGTENQLYSFGVVNVEYQRIPCRYAGYNLVYKIHEKSYNPHYLAILVLYVGGVNDILAVEVWQVNLIKDVEKLRYMFLRIKIYSLLLDDFEDCKEWRRMRRVFGAVHDLQNPPRGTLTLRFLVYGSAGINWIQSPNAIPADWTAGATYDSNILLT

SEQ ID NO: 81802 - protein, 242 aa, Arabidopsis thaliana
  peptide (1)..(242): Ceres Seq. ID no. 12661421
  misc_feature (1)..(242): Homolog of NCBI NO: 7488049 NR Description: probable allergen - Arabidopsis thaliana allergen like protein [Arabidopsis thaliana]
  misc_feature (11)..(164): Homolog of NCBI NO: 30683908 NR Description: expansin- related [Arabidopsis thaliana]
  misc_feature (178)..(242): Homolog of NCBI NO: 30683908 NR Description: expansin- related [Arabidopsis thaliana]
  misc_feature (11)..(153): Homolog of NCBI NO: 34901812 NR Description: expansin-related protein 1-like [Oryza sativa
  misc_feature (186)..(239): Homolog of NCBI NO: 34901812 NR Description: expansin-related protein 1-like [Oryza sativa
  misc_feature (11)..(151): Homolog of NCBI NO: 33111959 NR Description: expansin-like protein [Quercus robur]
  misc_feature (183)..(242): Homolog of NCBI NO: 33111959 NR Description: expansin-like protein [Quercus robur]
  misc_feature (1)..(164): Homolog of NCBI NO: 30038051 NR Description: beta expansin EXPB2.1 [Mirabilis jalapa]
  misc_feature (183)..(242): Homolog of NCBI NO: 30038051 NR Description: beta expansin EXPB2.1 [Mirabilis jalapa]
  misc_feature (11)..(151): Homolog of NCBI NO: 15231303 NR Description: putative protein; protein id: At3g45970.1, by cDNA: 27534., supported by cDNA: gi_14190436, supported by
MFLVLFYFEGGHCGYGEFGRDINNGEVSGVSWRLWNNGTGCGACYQVRCKIPPHCSEEGVYVVATDSGEGDGTDFILSPKAYGRMARPGTENQLYSFGVVNVEYQRIPCRYAGYNLVYKIHEKSYNPHYLAILVLYVGGVNDILAVEVWQVNLIKDVEKLRYMFLRIKIYSLLLDDFEDCKEWRRMRRVFGAVHDLQNPPRGTLTLRFLVYGSAGINWIQSPNAIPADWTAGATYDSNILLT

SEQ ID NO: 81803 - DNA, 987 bp, Arabidopsis thaliana
  misc_feature (1)..(987): Ceres Seq. ID no. 12661450
  misc_feature: MA Experiment ID: 20000438 Result: Up-regulated in Transcription
  misc_feature: MA Experiment 20000438 PARAMETER Experiment Name: At_Shoots__P Parameter: Age (day) Value: 14
  misc_feature: MA Experiment 20000438 PARAMETER Experiment Name: At_Shoots__P Parameter: Tissue Value: Shoots vs. Whole Plant
  misc_feature: MA Experiment ID: 20001905 Result: Down-regulated in Transcription
  misc_feature: MA Experiment 20001905 PARAMETER Experiment Name: At_Drought_Reproduction_P Parameter: Age (day) Value: 40
  misc_feature: MA Experiment 20001905 PARAMETER Experiment Name: At_Drought_Reproduction_P Parameter: Organism Value: A. thaliana
  misc_feature: MA Experiment 20001905 PARAMETER Experiment Name: At_Drought_Reproduction_P Parameter: Plant Line Value: WS
  misc_feature: MA Experiment 20001905 PARAMETER Experiment Name: At_Drought_Reproduction_P Parameter: Timepoint (day) Value: 10
  misc_feature: MA Experiment 20001905 PARAMETER Experiment Name: At_Drought_Reproduction_P Parameter: Tissue Value: Rosettes
  misc_feature: MA Experiment 20001905 PARAMETER Experiment Name: At_Drought_Reproduction_P Parameter: Treatment Value: Drought vs. No Drought
atgatacgaagagtctccaccacctcatgtctctccgccacagcttttagatcatttaccaaatggtcctttaaatcttctcaatttcacggcgagtccctcgattcctctgtctcacctcttctcattcccggcttccacgtcttccattgtccggatgtcgttgggattgtagcgaaactttcagattgtattgctgctaaaggaggtaacattcttggttatgatgttttggttcctgagaacaagaacgtcttctactctagaagtgagtttatatttgatccagtaaaatggccgaggaggcagatggatgaagattttcaaactattgcacaaaagtttagtgctttgagctcagtagtacgagtgccctctttagaccccaaatacaagatagctcttctactgtcgaaacaggatcattgtctggttgaaatgttacataaatggcaggatggaaaacttcccgttgatataacatgtgtgataagtaatcatgaaagagctccaaacacccatgttatgaggtttctccagaggcatggcatctcttatcattatttaccaacaaccgatcagaataaaatagaagaggagattttggaattggttaagggtaccgattttctagttctcgctagatacatgcagctactatccggtaacttcttgaaaggttatggaaaagatgtaatcaacatccatcatggcctcttgccatcattcaaaggaagaaatcccgtgaaacaggcatttgatgcaggtgtgaaactaattggtgcaacaactcactttgttacagaggagcttgattcaggtcctatcattgagcaaatggttgagagagtttcccaccgagacaatttgaggagctttgtccagaaatcagaggaccttgagaaaaagtgtctcatgaaagctataaaatcttactgcgaactgcgagtattgccttatgggacacaaaggactgtcgtattctaa

SEQ ID NO: 81804 - protein, 328 aa, Arabidopsis thaliana
  peptide (1)..(328): Ceres Seq. ID no. 12661451
  misc_feature (131)..(309): Pfam Name: Formyl transferase Pfam Description: Formyl transferase
  misc_feature (1)..(328): Homolog of NCBI NO: 15236046 NR Description: phosphoribosylglycinamide formyltransferase-like
  misc_feature (25)..(328): Homolog of NCBI NO: 18422794 NR Description: Expressed protein; protein id: At5g47435.1, by cDNA: gi_16648926, supported by cDNA: gi_20148260 [Arabidopsis
  misc_feature (63)..(328): Homolog of NCBI NO: 7433570 NR Description: probable formyltransferase purU - Arabidopsis >gi|2245095|emb|CAB10517.1| formyltransferase purU homolog thaliana] >gi|7268488|emb|CAB78739.1| formyltransferase purU
  misc_feature (51)..(328): Homolog of NCBI NO: 15606867 NR Description: formyltetrahydrofolate deformylase [Aquifex
  misc_feature (51)..(328): Homolog of NCBI NO: 37523894 NR Description: formyltetrahydrofolate deformylase [Gloeobacter >gi|35214900|dbj|BAC92266.1| formyltetrahydrofolate deformylase
  misc_feature (48)..(328): Homolog of NCBI NO: 15599510 NR Description: formyltetrahydrofolate deformylase [Pseudomonas PA01] >gi|11348559|pir||C83105 formyltetrahydrofolate deformylase
  misc_feature (51)..(328): Homolog of NCBI NO: 27381066 NR Description: formyltetrahydrofolate deformylase japonicum] >gi|27354232|dbj|BAC51220.1| formyltetrahydrofolate
  misc_feature (51)..(328): Homolog of NCBI NO: 21674639 NR Description: formyltetrahydrofolate deformylase [Chlorobium TLS] >gi|21647842|gb|AAM73046.1| formyltetrahydrofolate
  misc_feature (48)..(328): Homolog of NCBI NO: 23063861 NR Description: hypothetical protein [Pseudomonas fluorescens
  misc_feature (51)..(328): Homolog of NCBI NO: 16127860 NR Description: formyltetrahydrofolate deformylase [Caulobacter
MIRRVSTTSCLSATAFRSFTKWSFKSSQFHGESLDSSVSPLLIPGFHVFHCPDVVGIVAKLSDCIAAKGGNILGYDVLVPENKNVFYSRSEFIFDPVKWPRRQMDEDFQTIAQKFSALSSVVRVPSLDPKYKIALLLSKQDHCLVEMLHKWQDGKLPVDITCVISNHERAPNTHVMRFLQRHGISYHYLPTTDQNKIEEEILELVKGTDFLVLARYMQLLSGNFLKGYGKDVINIHHGLLPSFKGRNPVKQAFDAGVKLIGATTHFVTEELDSGPIIEQMVERVSHRDNLRSFVQKSEDLEKKCLMKAIKSYCELRVLPYGTQRTVVF

SEQ ID NO: 81805 - protein, 225 aa, Arabidopsis thaliana
  peptide (1)..(225): Ceres Seq. ID no. 12661452
  misc_feature (28)..(206): Pfam Name: Formyl transferase Pfam Description: Formyl transferase
  misc_feature (1)..(225): Homolog of NCBI NO: 15236046 NR Description: phosphoribosylglycinamide formyltransferase-like
  misc_feature (1)..(225): Homolog of NCBI NO: 18422794 NR Description: Expressed protein; protein id: At5g47435.1, by cDNA: gi_16648926, supported by cDNA: gi_20148260 [Arabidopsis
  misc_feature (1)..(225): Homolog of NCBI NO: 7433570 NR Description: probable formyltransferase purU - Arabidopsis >gi|2245095|emb|CAB10517.1| formyltransferase purU homolog thaliana] >gi|7268488|emb|CAB78739.1| formyltransferase purU
  misc_feature (1)..(225): Homolog of NCBI NO: 15606867 NR Description: formyltetrahydrofolate deformylase [Aquifex
  misc_feature (1)..(225): Homolog of NCBI NO: 37523894 NR Description: formyltetrahydrofolate deformylase [Gloeobacter >gi|35214900|dbj|BAC92266.1| formyltetrahydrofolate deformylase
  misc_feature (1)..(225): Homolog of NCBI NO: 15599510 NR Description: formyltetrahydrofolate deformylase [Pseudomonas PA01] >gi|11348559|pir||C83105 formyltetrahydrofolate deformylase
  misc_feature (1)..(225): Homolog of NCBI NO: 27381066 NR Description: formyltetrahydrofolate deformylase japonicum] >gi|27354232|dbj|BAC51220.1| formyltetrahydrofolate
  misc_feature (1)..(225): Homolog of NCBI NO: 21674639 NR Description: formyltetrahydrofolate deformylase [Chlorobium TLS] >gi|21647842|gb|AAM73046.1| formyltetrahydrofolate
  misc_feature (1)..(225): Homolog of NCBI NO: 23063861 NR Description: hypothetical protein [Pseudomonas fluorescens
  misc_feature (1)..(225): Homolog of NCBI NO: 16127860 NR Description: formyltetrahydrofolate deformylase [Caulobacter
MDEDFQTIAQKFSALSSVVRVPSLDPKYKIALLLSKQDHCLVEMLHKWQDGKLPVDITCVISNHERAPNTHVMRFLQRHGISYHYLPTTDQNKIEEEILELVKGTDFLVLARYMQLLSGNFLKGYGKDVINIHHGLLPSFKGRNPVKQAFDAGVKLIGATTHFVTEELDSGPIIEQMVERVSHRDNLRSFVQKSEDLEKKCLMKAIKSYCELRVLPYGTQRTVVF

SEQ ID NO: 81806 - protein, 182 aa, Arabidopsis thaliana
  peptide (1)..(182): Ceres Seq. ID no. 12661453
  misc_feature (1)..(163): Pfam Name: Formyl transferase Pfam Description: Formyl transferase
  misc_feature (1)..(182): Homolog of NCBI NO: 15236046 NR Description: phosphoribosylglycinamide formyltransferase-like
  misc_feature (1)..(182): Homolog of NCBI NO: 18422794 NR Description: Expressed protein; protein id: At5g47435.1, by cDNA: gi_16648926, supported by cDNA: gi_20148260 [Arabidopsis
  misc_feature (1)..(182): Homolog of NCBI NO: 7433570 NR Description: probable formyltransferase purU - Arabidopsis >gi|2245095|emb|CAB10517.1| formyltransferase purU homolog thaliana] >gi|7268488|emb|CAB78739.1| formyltransferase purU
  misc_feature (1)..(182): Homolog of NCBI NO: 15606867 NR Description: formyltetrahydrofolate deformylase [Aquifex
  misc_feature (1)..(182): Homolog of NCBI NO: 37523894 NR Description: formyltetrahydrofolate deformylase [Gloeobacter >gi|35214900|dbj|BAC92266.1| formyltetrahydrofolate deformylase
  misc_feature (1)..(182): Homolog of NCBI NO: 15599510 NR Description: formyltetrahydrofolate deformylase [Pseudomonas PA01] >gi|11348559|pir||C83105 formyltetrahydrofolate deformylase
  misc_feature (1)..(182): Homolog of NCBI NO: 27381066 NR Description: formyltetrahydrofolate deformylase japonicum] >gi|27354232|dbj|BAC51220.1| formyltetrahydrofolate
  misc_feature (1)..(182): Homolog of NCBI NO: 21674639 NR Description: formyltetrahydrofolate deformylase [Chlorobium TLS] >gi|21647842|gb|AAM73046.1| formyltetrahydrofolate
  misc_feature (1)..(182): Homolog of NCBI NO: 23063861 NR Description: hypothetical protein [Pseudomonas fluorescens
  misc_feature (1)..(182): Homolog of NCBI NO: 16127860 NR Description: formyltetrahydrofolate deformylase [Caulobacter
MLHKWQDGKLPVDITCVISNHERAPNTHVMRFLQRHGISYHYLPTTDQNKIEEEILELVKGTDFLVLARYMQLLSGNFLKGYGKDVINIHHGLLPSFKGRNPVKQAFDAGVKLIGATTHFVTEELDSGPIIEQMVERVSHRDNLRSFVQKSEDLEKKCLMKAIKSYCELRVLPYGTQRTVVF

SEQ ID NO: 81807 - DNA, 927 bp, Arabidopsis thaliana
  misc_feature (1)..(927): Ceres Seq. ID no. 12661458
  misc_feature: MA Experiment ID: 20000328 Result: Down-regulated in Transcription
  misc_feature: MA Experiment 20000328 PARAMETER Experiment Name: At_42deg_Heat_Sub_P Parameter: Age (day) Value: 14
  misc_feature: MA Experiment 20000328 PARAMETER Experiment Name: At_42deg_Heat_Sub_P Parameter: Organism Value: A. thaliana
  misc_feature: MA Experiment 20000328 PARAMETER Experiment Name: At_42deg_Heat_Sub_P Parameter: Plant Line Value: WS
  misc_feature: MA Experiment 20000328 PARAMETER Experiment Name: At_42deg_Heat_Sub_P Parameter: Temperature (deg C) Value: 42 vs. 22
  misc_feature: MA Experiment 20000328 PARAMETER Experiment Name: At_42deg_Heat_Sub_P Parameter: Timepoint (hr) Value: 6
  misc_feature: MA Experiment 20000328 PARAMETER Experiment Name: At_42deg_Heat_Sub_P Parameter: Tissue Value: Aerial
  misc_feature: MA Experiment ID: 20000349 Result: Up-regulated in Transcription
  misc_feature: MA Experiment 20000349 PARAMETER Experiment Name: At_100uM_ABA_Sub_P Parameter: Age (day) Value: 14
  misc_feature: MA Experiment 20000349 PARAMETER Experiment Name: At_100uM_ABA_Sub_P Parameter: Organism Value: A. thaliana
  misc_feature: MA Experiment 20000349 PARAMETER Experiment Name: At_100uM_ABA_Sub_P Parameter: Plant Line Value: WS
  misc_feature: MA Experiment 20000349 PARAMETER Experiment Name: At_100uM_ABA_Sub_P Parameter: Timepoint (hr) Value: 6
  misc_feature: MA Experiment 20000349 PARAMETER Experiment Name: At_100uM_ABA_Sub_P Parameter: Tissue Value: Aerial
  misc_feature: MA Experiment 20000349 PARAMETER Experiment Name: At_100uM_ABA_Sub_P Parameter: Treatment Value: 100uM ABA vs. No Treatment
  misc_feature: MA Experiment ID: 20000355 Result: Down-regulated in Transcription
  misc_feature: MA Experiment 20000355 PARAMETER Experiment Name: At_Siliques_Sub_P Parameter: Age (day) Value: 21
  misc_feature: MA Experiment 20000355 PARAMETER Experiment Name: At_Siliques_Sub_P Parameter: Organism Value: A. thaliana
  misc_feature: MA Experiment 20000355 PARAMETER Experiment Name: At_Siliques_Sub_P Parameter: Plant Line Value: WS
  misc_feature: MA Experiment 20000355 PARAMETER Experiment Name: At_Siliques_Sub_P Parameter: Tissue Value: Less Than 5mm Siliques vs. Whole Plant
  misc_feature: MA Experiment ID: 20000440 Result: Down-regulated in Transcription
  misc_feature: MA Experiment 20000440 PARAMETER Experiment Name: At_Closed-Flower__Sub_P Parameter: Tissue Value: Closed Flower vs. Whole Plant
atggagaagagtttccaaaggtctgctctccttgtgactttgtctctcttcttcttctccattccggtttcactctctgttccattcgttctgtttcacgggtttggaggtgaatgctccaatgacaaagtgagcaacttaacacagttcctcatcaaccactccggctaccctggaacttgcgtagaaataggagatggagtgaaagattccttattcatgccgcttaggcaacaagccagcatagcttgtgagaaaattaaacagatgccagagctgagtgaaggttacaacatagtggcagagtctcaaggaaacttggtcgctagaggcctaatcgagttttgcgataatgctccaccagtcatcaactatgtctccttaggaggacctcatgctggcgtcgctgcaatccccgaggggtgtgattcagcattttgcatactcatgaaggcgttttttgcagtgatttacagcgattttgctcaagatcatactgctccaagtggttatgtcaaaaaacctatggaaataaaaaattatttggaacactccaagtatctgccaaagctaaacaacgagagacctggcgagaaaaactccacttttaaagaccgtttcaccagcttgcaaaacttggttctcatcatgttccagaatgatacaatattggttccaagagaaacttcttggttcggatattacccggatggagcttcatcttcaacacctgttttgcctcctcaaaagacaaagctatacactgaggattggattggtctgaaaaccttggatgatgctggaaaagtgaggtttattagtgtccctggcggacacatcgaaataacggaagaagaccttgtcaaatacgttgtgccttacctccagaatgagtctttgttctcttctgaacacgagacaatatag

SEQ ID NO: 81808 - protein, 308 aa, Arabidopsis thaliana
  peptide (1)..(308): Ceres Seq. ID no. 12661459
  misc_feature (35)..(176): Pfam Name: Palmitoyl protein thioesterase Pfam Description: Palmitoyl protein thioesterase
  misc_feature (1)..(308): Homolog of NCBI NO: 15236077 NR Description: putative protein; protein id: At4g17470.1
  misc_feature (1)..(176): Homolog of NCBI NO: 7488214 NR Description: probable thioesterase - Arabidopsis thaliana thioesterase like protein [Arabidopsis thaliana]
  misc_feature (217)..(308): Homolog of NCBI NO: 7488214 NR Description: probable thioesterase - Arabidopsis thaliana thioesterase like protein [Arabidopsis thaliana]
  misc_feature (1)..(304): Homolog of NCBI NO: 15236078 NR Description: putative protein; protein id: At4g17480.1, by cDNA: 253398. [Arabidopsis thaliana] unknown protein [Arabidopsis thaliana]
  misc_feature (1)..(304): Homolog of NCBI NO: 21554369 NR Description: palmitoyl-protein thioesterase precursor-like
  misc_feature (1)..(297): Homolog of NCBI NO: 15236079 NR Description: putative protein; protein id: At4g17483.1 thaliana] >gi|22136628|gb|AAM91633.1| unknown protein
  misc_feature (2)..(298): Homolog of NCBI NO: 15238063 NR Description: palmitoyl-protein thioesterase precursor-like;
  misc_feature (2)..(298): Homolog of NCBI NO: 28393539 NR Description: putative palmitoyl-protein thioesterase precursor
  misc_feature (1)..(141): Homolog of NCBI NO: 15238065 NR Description: palmitoyl-protein thioesterase precursor-like;
  misc_feature (164)..(298): Homolog of NCBI NO: 15238065 NR Description: palmitoyl-protein thioesterase precursor-like;
MEKSFQRSALLVTLSLFFFSIPVSLSVPFVLFHGFGGECSNDKVSNLTQFLINHSGYPGTCVEIGDGVKDSLFMPLRQQASIACEKIKQMPELSEGYNIVAESQGNLVARGLIEFCDNAPPVINYVSLGGPHAGVAAIPEGCDSAFCILMKAFFAVIYSDFAQDHTAPSGYVKKPMEIKNYLEHSKYLPKLNNERPGEKNSTFKDRFTSLQNLVLIMFQNDTILVPRETSWFGYYPDGASSSTPVLPPQKTKLYTEDWIGLKTLDDAGKVRFISVPGGHIEITEEDLVKYVVPYLQNESLFSSEHETI

SEQ ID NO: 81809 - protein, 235 aa, Arabidopsis thaliana
  peptide (1)..(235): Ceres Seq. ID no. 12661460
  misc_feature (1)..(103): Pfam Name: Palmitoyl protein thioesterase Pfam Description: Palmitoyl protein thioesterase
  misc_feature (1)..(235): Homolog of NCBI NO: 15236077 NR Description: putative protein; protein id: At4g17470.1
  misc_feature (1)..(103): Homolog of NCBI NO: 7488214 NR Description: probable thioesterase - Arabidopsis thaliana thioesterase like protein [Arabidopsis thaliana]
  misc_feature (144)..(235): Homolog of NCBI NO: 7488214 NR Description: probable thioesterase - Arabidopsis thaliana thioesterase like protein [Arabidopsis thaliana]
  misc_feature (1)..(231): Homolog of NCBI NO: 15236078 NR Description: putative protein; protein id: At4g17480.1, by cDNA: 253398. [Arabidopsis thaliana] unknown protein [Arabidopsis thaliana]
  misc_feature (1)..(231): Homolog of NCBI NO: 21554369 NR Description: palmitoyl-protein thioesterase precursor-like
  misc_feature (1)..(224): Homolog of NCBI NO: 15236079 NR Description: putative protein; protein id: At4g17483.1 thaliana] >gi|22136628|gb|AAM91633.1| unknown protein
  misc_feature (1)..(225): Homolog of NCBI NO: 15238063 NR Description: palmitoyl-protein thioesterase precursor-like;
  misc_feature (1)..(225): Homolog of NCBI NO: 28393539 NR Description: putative palmitoyl-protein thioesterase precursor
  misc_feature (1)..(68): Homolog of NCBI NO: 15238065 NR Description: palmitoyl-protein thioesterase precursor-like;
  misc_feature (91)..(225): Homolog of NCBI NO: 15238065 NR Description: palmitoyl-protein thioesterase precursor-like;
MPLRQQASIACEKIKQMPELSEGYNIVAESQGNLVARGLIEFCDNAPPVINYVSLGGPHAGVAAIPEGCDSAFCILMKAFFAVIYSDFAQDHTAPSGYVKKPMEIKNYLEHSKYLPKLNNERPGEKNSTFKDRFTSLQNLVLIMFQNDTILVPRETSWFGYYPDGASSSTPVLPPQKTKLYTEDWIGLKTLDDAGKVRFISVPGGHIEITEEDLVKYVVPYLQNESLFSSEHETI

SEQ ID NO: 81810 - protein, 219 aa, Arabidopsis thaliana
  peptide (1)..(219): Ceres Seq. ID no. 12661461
  misc_feature (1)..(87): Pfam Name: Palmitoyl protein thioesterase Pfam Description: Palmitoyl protein thioesterase
  misc_feature (1)..(219): Homolog of NCBI NO: 15236077 NR Description: putative protein; protein id: At4g17470.1
  misc_feature (1)..(87): Homolog of NCBI NO: 7488214 NR Description: probable thioesterase - Arabidopsis thaliana thioesterase like protein [Arabidopsis thaliana]
  misc_feature (128)..(219): Homolog of NCBI NO: 7488214 NR Description: probable thioesterase - Arabidopsis thaliana thioesterase like protein [Arabidopsis thaliana]
  misc_feature (1)..(215): Homolog of NCBI NO: 15236078 NR Description: putative protein; protein id: At4g17480.1, by cDNA: 253398. [Arabidopsis thaliana] unknown protein [Arabidopsis thaliana]
  misc_feature (1)..(215): Homolog of NCBI NO: 21554369 NR Description: palmitoyl-protein thioesterase precursor-like
  misc_feature (1)..(208): Homolog of NCBI NO: 15236079 NR Description: putative protein; protein id: At4g17483.1 thaliana] >gi|22136628|gb|AAM91633.1| unknown protein
  misc_feature (1)..(209): Homolog of NCBI NO: 15238063 NR Description: palmitoyl-protein thioesterase precursor-like;
  misc_feature (1)..(209): Homolog of NCBI NO: 28393539 NR Description: putative palmitoyl-protein thioesterase precursor
  misc_feature (1)..(52): Homolog of NCBI NO: 15238065 NR Description: palmitoyl-protein thioesterase precursor-like;
  misc_feature (75)..(209): Homolog of NCBI NO: 15238065 NR Description: palmitoyl-protein thioesterase precursor-like;
MPELSEGYNIVAESQGNLVARGLIEFCDNAPPVINYVSLGGPHAGVAAIPEGCDSAFCILMKAFFAVIYSDFAQDHTAPSGYVKKPMEIKNYLEHSKYLPKLNNERPGEKNSTFKDRFTSLQNLVLIMFQNDTILVPRETSWFGYYPDGASSSTPVLPPQKTKLYTEDWIGLKTLDDAGKVRFISVPGGHIEITEEDLVKYVVPYLQNESLFSSEHETI

SEQ ID NO: 81811 - DNA, 934 bp, Arabidopsis thaliana
  misc_feature (1)..(934): Ceres Seq. ID no. 12661462
  misc_feature: MA Experiment ID: 20000315 Result: Down-regulated in Transcription
  misc_feature: MA Experiment 20000315 PARAMETER Experiment Name: At_14day_Shoots-Roots_Sub_P Parameter: Age (day) Value: 14
  misc_feature: MA Experiment 20000315 PARAMETER Experiment Name: At_14day_Shoots-Roots_Sub_P Parameter: Organism Value: A. thaliana
  misc_feature: MA Experiment 20000315 PARAMETER Experiment Name: At_14day_Shoots-Roots_Sub_P Parameter: Plant Line Value: WS
  misc_feature: MA Experiment 20000315 PARAMETER Experiment Name: At_14day_Shoots-Roots_Sub_P Parameter: Tissue Value: Shoots vs. Whole Plant
  misc_feature: MA Experiment ID: 20000440 Result: Up-regulated in Transcription
  misc_feature: MA Experiment 20000440 PARAMETER Experiment Name: At_Closed-Flower__Sub_P Parameter: Tissue Value: Closed Flower vs. Whole Plant
  misc_feature: MA Experiment ID: 20001807 Result: Down-regulated in Transcription
  misc_feature: MA Experiment 20001807 PARAMETER Experiment Name: At_50mM_NH4NO3_L-to-H_Sub_P Parameter: Timepoint (hr) Value: 6
  misc_feature: MA Experiment 20001807 PARAMETER Experiment Name: At_50mM_NH4NO3_L-to-H_Sub_P Parameter: Tissue Value: Leaf
  misc_feature: MA Experiment 20001807 PARAMETER Experiment Name: At_50mM_NH4NO3_L-to-H_Sub_P Parameter: Treatment Value: 50mM NH4NO3 vs 100mM Mannitol
atggagaagtattcccggcggtctattctcctttccacggtggtcgccgccgtgttattctctttaattccggtttcaatctctattcccttcatactctttcacggaattggagataaatgttctggtggagttagtaacttcacgcaactcctaaccaacctctctggctctcctggctattgcttagaaataggaaatggagaaaaggactcatggttcatgccactaagaaagcaaacaagtgtagcgtgtgagaaagtgaaagcgatgaaagtgttaagtcaaggttacaacattgttgcagagtctcaaggaaacttagttgctagaggactaatcgagttctgcgataatgctcctcctgttataaactatatctctttaggaggtcctcatgctggcattgccaaaatccctaagtgtaattctggcccaatatgtgcgataggtgaagctttgttgaagttagaggtctatactgacttcgttcaagatcatattgctcctagtggttatatcaagattcctggtgaaatttcaaagtatttggagcactccaagtatctaccaaagcttaacaatgagagacctgacgaaagaaactctactttcaaagaccgattcactaacttacacaatttagttcttgtcatgttcgagagcgatacaatgttaatccctaaagaaactgcatggtttggttattatgaagatgaaggattcgatacccttttgtcagctcaacagacaaagttgtacagagaagattggattggtctgaaagcattggatgctgccggaaaagtgaagtttgaaagtgtgttaggggaccacctcagtatatcggatgaggaggttgtggaatttgttgtgccttacttaatgcaaaactgtatgtgaattttcatgagactataagattgacaaagtt

SEQ ID NO: 81812 - protein, 300 aa, Arabidopsis thaliana
  peptide (1)..(300): Ceres Seq. ID no. 12661463
  misc_feature (24)..(296): Pfam Name: Palmitoyl protein thioesterase Pfam Description: Palmitoyl protein thioesterase
  misc_feature (1)..(300): Homolog of NCBI NO: 15236079 NR Description: putative protein; protein id: At4g17483.1 thaliana] >gi|22136628|gb|AAM91633.1| unknown protein
  misc_feature (62)..(298): Homolog of NCBI NO: 7488215 NR Description: probable thioesterase - Arabidopsis thaliana thioesterase like protein [Arabidopsis thaliana]
  misc_feature (1)..(295): Homolog of NCBI NO: 15236078 NR Description: putative protein; protein id: At4g17480.1, by cDNA: 253398. [Arabidopsis thaliana] unknown protein [Arabidopsis thaliana]
  misc_feature (1)..(295): Homolog of NCBI NO: 21554369 NR Description: palmitoyl-protein thioesterase precursor-like
  misc_feature (2)..(295): Homolog of NCBI NO: 15238063 NR Description: palmitoyl-protein thioesterase precursor-like;
  misc_feature (2)..(295): Homolog of NCBI NO: 28393539 NR Description: putative palmitoyl-protein thioesterase precursor
  misc_feature (1)..(298): Homolog of NCBI NO: 15236077 NR Description: putative protein; protein id: At4g17470.1
  misc_feature (1)..(141): Homolog of NCBI NO: 15238065 NR Description: palmitoyl-protein thioesterase precursor-like;
  misc_feature (166)..(298): Homolog of NCBI NO: 15238065 NR Description: palmitoyl-protein thioesterase precursor-like;
  misc_feature (10)..(295): Homolog of NCBI NO: 15232301 NR Description: palmitoyl-protein thioesterase precursor - like; id: At3g60340.1, supported by cDNA: 38539., supported by cDNA:
MEKYSRRSILLSTVVAAVLFSLIPVSISIPFILFHGIGDKCSGGVSNFTQLLTNLSGSPGYCLEIGNGEKDSWFMPLRKQTSVACEKVKAMKVLSQGYNIVAESQGNLVARGLIEFCDNAPPVINYISLGGPHAGIAKIPKCNSGPICAIGEALLKLEVYTDFVQDHIAPSGYIKIPGEISKYLEHSKYLPKLNNERPDERNSTFKDRFTNLHNLVLVMFESDTMLIPKETAWFGYYEDEGFDTLLSAQQTKLYREDWIGLKALDAAGKVKFESVLGDHLSISDEEVVEFVVPYLMQNCM

SEQ ID NO: 81813 - protein, 226 aa, Arabidopsis thaliana
  peptide (1)..(226): Ceres Seq. ID no. 12661464
  misc_feature (1)..(222): Pfam Name: Palmitoyl protein thioesterase Pfam Description: Palmitoyl protein thioesterase
  misc_feature (1)..(226): Homolog of NCBI NO: 15236079 NR Description: putative protein; protein id: At4g17483.1 thaliana] >gi|22136628|gb|AAM91633.1| unknown protein
  misc_feature (1)..(224): Homolog of NCBI NO: 7488215 NR Description: probable thioesterase - Arabidopsis thaliana thioesterase like protein [Arabidopsis thaliana]
  misc_feature (1)..(221): Homolog of NCBI NO: 15236078 NR Description: putative protein; protein id: At4g17480.1, by cDNA: 253398. [Arabidopsis thaliana] unknown protein [Arabidopsis thaliana]
  misc_feature (1)..(221): Homolog of NCBI NO: 21554369 NR Description: palmitoyl-protein thioesterase precursor-like
  misc_feature (1)..(221): Homolog of NCBI NO: 15238063 NR Description: palmitoyl-protein thioesterase precursor-like;
  misc_feature (1)..(221): Homolog of NCBI NO: 28393539 NR Description: putative palmitoyl-protein thioesterase precursor
  misc_feature (1)..(224): Homolog of NCBI NO: 15236077 NR Description: putative protein; protein id: At4g17470.1
  misc_feature (1)..(67): Homolog of NCBI NO: 15238065 NR Description: palmitoyl-protein thioesterase precursor-like;
  misc_feature (92)..(224): Homolog of NCBI NO: 15238065 NR Description: palmitoyl-protein thioesterase precursor-like;
  misc_feature (1)..(221): Homolog of NCBI NO: 15232301 NR Description: palmitoyl-protein thioesterase precursor - like; id: At3g60340.1, supported by cDNA: 38539., supported by cDNA:
MPLRKQTSVACEKVKAMKVLSQGYNIVAESQGNLVARGLIEFCDNAPPVINYISLGGPHAGIAKIPKCNSGPICAIGEALLKLEVYTDFVQDHIAPSGYIKIPGEISKYLEHSKYLPKLNNERPDERNSTFKDRFTNLHNLVLVMFESDTMLIPKETAWFGYYEDEGFDTLLSAQQTKLYREDWIGLKALDAAGKVKFESVLGDHLSISDEEVVEFVVPYLMQNCM

SEQ ID NO: 81814 - protein, 210 aa, Arabidopsis thaliana
  peptide (1)..(210): Ceres Seq. ID no. 12661465
  misc_feature (1)..(206): Pfam Name: Palmitoyl protein thioesterase Pfam Description: Palmitoyl protein thioesterase
  misc_feature (1)..(210): Homolog of NCBI NO: 15236079 NR Description: putative protein; protein id: At4g17483.1 thaliana] >gi|22136628|gb|AAM91633.1| unknown protein
  misc_feature (1)..(208): Homolog of NCBI NO: 7488215 NR Description: probable thioesterase - Arabidopsis thaliana thioesterase like protein [Arabidopsis thaliana]
  misc_feature (1)..(205): Homolog of NCBI NO: 15236078 NR Description: putative protein; protein id: At4g17480.1, by cDNA: 253398. [Arabidopsis thaliana] unknown protein [Arabidopsis thaliana]
  misc_feature (1)..(205): Homolog of NCBI NO: 21554369 NR Description: palmitoyl-protein thioesterase precursor-like
  misc_feature (1)..(205): Homolog of NCBI NO: 15238063 NR Description: palmitoyl-protein thioesterase precursor-like;
  misc_feature (1)..(205): Homolog of NCBI NO: 28393539 NR Description: putative palmitoyl-protein thioesterase precursor
  misc_feature (1)..(208): Homolog of NCBI NO: 15236077 NR Description: putative protein; protein id: At4g17470.1
  misc_feature (1)..(51): Homolog of NCBI NO: 15238065 NR Description: palmitoyl-protein thioesterase precursor-like;
  misc_feature (76)..(208): Homolog of NCBI NO: 15238065 NR Description: palmitoyl-protein thioesterase precursor-like;
  misc_feature (1)..(205): Homolog of NCBI NO: 15232301 NR Description: palmitoyl-protein thioesterase precursor - like; id: At3g60340.1, supported by cDNA: 38539., supported by cDNA:
MKVLSQGYNIVAESQGNLVARGLIEFCDNAPPVINYISLGGPHAGIAKIPKCNSGPICAIGEALLKLEVYTDFVQDHIAPSGYIKIPGEISKYLEHSKYLPKLNNERPDERNSTFKDRFTNLHNLVLVMFESDTMLIPKETAWFGYYEDEGFDTLLSAQQTKLYREDWIGLKALDAAGKVKFESVLGDHLSISDEEVVEFVVPYLMQNCM

SEQ ID NO: 81815 - DNA, 567 bp, Arabidopsis thaliana
  misc_feature (1)..(567): Ceres Seq. ID no. 12661469
  misc_feature: MA Experiment ID: 20000171 Result: Down-regulated in Transcription
  misc_feature: MA Experiment 20000171 PARAMETER Experiment Name: At_42deg_Heat_P Parameter: Age (day) Value: 14
  misc_feature: MA Experiment 20000171 PARAMETER Experiment Name: At_42deg_Heat_P Parameter: Organism Value: A. thaliana
  misc_feature: MA Experiment 20000171 PARAMETER Experiment Name: At_42deg_Heat_P Parameter: Plant Line Value: WS
  misc_feature: MA Experiment 20000171 PARAMETER Experiment Name: At_42deg_Heat_P Parameter: Temperature (deg C) Value: 42 vs. 22
  misc_feature: MA Experiment 20000171 PARAMETER Experiment Name: At_42deg_Heat_P Parameter: Timepoint (hr) Value: 1
  misc_feature: MA Experiment 20000171 PARAMETER Experiment Name: At_42deg_Heat_P Parameter: Tissue Value: Aerial
  misc_feature: MA Experiment ID: 20000179 Result: Down-regulated in Transcription
  misc_feature: MA Experiment 20000179 PARAMETER Experiment Name: At_Germinating_Seeds_P Parameter: Age (hr) Value: 6 vs. 0
  misc_feature: MA Experiment 20000179 PARAMETER Experiment Name: At_Germinating_Seeds_P Parameter: Tissue Value: Germinating Seeds
  misc_feature: MA Experiment ID: 20000182 Result: Up-regulated in Transcription
  misc_feature: MA Experiment 20000182 PARAMETER Experiment Name: At_2mM_SA_P Parameter: Age (day) Value: 14
  misc_feature: MA Experiment 20000182 PARAMETER Experiment Name: At_2mM_SA_P Parameter: Organism Value: A. thaliana
  misc_feature: MA Experiment 20000182 PARAMETER Experiment Name: At_2mM_SA_P Parameter: Plant Line Value: WS
  misc_feature: MA Experiment 20000182 PARAMETER Experiment Name: At_2mM_SA_P Parameter: Timepoint (hr) Value: 6
  misc_feature: MA Experiment 20000182 PARAMETER Experiment Name: At_2mM_SA_P Parameter: Tissue Value: Aerial
  misc_feature: MA Experiment 20000182 PARAMETER Experiment Name: At_2mM_SA_P Parameter: Treatment Value: 2mM SA vs. No Treatment
  misc_feature: MA Experiment ID: 20000185 Result: Down-regulated in Transcription
  misc_feature: MA Experiment 20000185 PARAMETER Experiment Name: At_Roots__P Parameter: Age (day) Value: 7 vs. 21
  misc_feature: MA Experiment 20000185 PARAMETER Experiment Name: At_Roots__P Parameter: Organism Value: A. thaliana
  misc_feature: MA Experiment 20000185 PARAMETER Experiment Name: At_Roots__P Parameter: Tissue Value: Roots vs. Whole Plant
  misc_feature: MA Experiment ID: 20000227 Result: Down-regulated in Transcription
  misc_feature: MA Experiment 20000227 PARAMETER Experiment Name: At_Root-Tips-vs-Tops_P Parameter: Tissue Value: Root Tips vs. Root Tops
  misc_feature: MA Experiment ID: 20000234 Result: Down-regulated in Transcription
  misc_feature: MA Experiment 20000234 PARAMETER Experiment Name: At_Siliques_P Parameter: Age (day) Value: 21
  misc_feature: MA Experiment 20000234 PARAMETER Experiment Name: At_Siliques_P Parameter: Organism Value: A. thaliana
  misc_feature: MA Experiment 20000234 PARAMETER Experiment Name: At_Siliques_P Parameter: Plant Line Value: WS
  misc_feature: MA Experiment 20000234 PARAMETER Experiment Name: At_Siliques_P Parameter: Tissue Value: Less Than 5mm Siliques vs. Whole Plant
  misc_feature: MA Experiment ID: 20000235 Result: Down-regulated in Transcription
  misc_feature: MA Experiment 20000235 PARAMETER Experiment Name: At_Siliques_P Parameter: Age (day) Value: 21
  misc_feature: MA Experiment 20000235 PARAMETER Experiment Name: At_Siliques_P Parameter: Organism Value: A. thaliana
  misc_feature: MA Experiment 20000235 PARAMETER Experiment Name: At_Siliques_P Parameter: Plant Line Value: WS
  misc_feature: MA Experiment 20000235 PARAMETER Experiment Name: At_Siliques_P Parameter: Tissue Value: 5-10mm Siliques vs. Whole Plant
  misc_feature: MA Experiment ID: 20000264 Result: Down-regulated in Transcription
  misc_feature: MA Experiment 20000264 PARAMETER Experiment Name: At_Open_Flower_P Parameter: Age (day) Value: 21
  misc_feature: MA Experiment 20000264 PARAMETER Experiment Name: At_Open_Flower_P Parameter: Plant Line Value: WS
  misc_feature: MA Experiment 20000264 PARAMETER Experiment Name: At_Open_Flower_P Parameter: Tissue Value: Open Flower vs. Whole Plant
  misc_feature: MA Experiment ID: 20000265 Result: Down-regulated in Transcription
  misc_feature: MA Experiment 20000265 PARAMETER Experiment Name: At_Open_Flower_P Parameter: Age (day) Value: 21
  misc_feature: MA Experiment 20000265 PARAMETER Experiment Name: At_Open_Flower_P Parameter: Plant Line Value: WS
  misc_feature: MA Experiment 20000265 PARAMETER Experiment Name: At_Open_Flower_P Parameter: Tissue Value: Closed Flower vs. Whole Plant
  misc_feature: MA Experiment ID: 20000286 Result: Down-regulated in Transcription
  misc_feature: MA Experiment 20000286 PARAMETER Experiment Name: At_Open_Flower_P Parameter: Age (day) Value: 21
  misc_feature: MA Experiment 20000286 PARAMETER Experiment Name: At_Open_Flower_P Parameter: Plant Line Value: WS
  misc_feature: MA Experiment 20000286 PARAMETER Experiment Name: At_Open_Flower_P Parameter: Tissue Value: Half Open vs. Whole Plant
  misc_feature: MA Experiment ID: 20000436 Result: Down-regulated in Transcription
  misc_feature: MA Experiment 20000436 PARAMETER Experiment Name: At_Drought_P Parameter: Age (day) Value: 7
  misc_feature: MA Experiment 20000436 PARAMETER Experiment Name: At_Drought_P Parameter: Organism Value: A. thaliana
  misc_feature: MA Experiment 20000436 PARAMETER Experiment Name: At_Drought_P Parameter: Plant Line Value: WS
  misc_feature: MA Experiment 20000436 PARAMETER Experiment Name: At_Drought_P Parameter: Timepoint (hr) Value: 12
  misc_feature: MA Experiment 20000436 PARAMETER Experiment Name: At_Drought_P Parameter: Tissue Value: Whole Plant
  misc_feature: MA Experiment 20000436 PARAMETER Experiment Name: At_Drought_P Parameter: Treatment Value: Drought vs. No Drought
  misc_feature: MA Experiment ID: 20000437 Result: Down-regulated in Transcription
  misc_feature: MA Experiment 20000437 PARAMETER Experiment Name: At_Drought_P Parameter: Age (day) Value: 8
  misc_feature: MA Experiment 20000437 PARAMETER Experiment Name: At_Drought_P Parameter: Organism Value: A. thaliana
  misc_feature: MA Experiment 20000437 PARAMETER Experiment Name: At_Drought_P Parameter: Plant Line Value: WS
  misc_feature: MA Experiment 20000437 PARAMETER Experiment Name: At_Drought_P Parameter: Timepoint (hr) Value: 24
  misc_feature: MA Experiment 20000437 PARAMETER Experiment Name: At_Drought_P Parameter: Tissue Value: Whole Plant
  misc_feature: MA Experiment 20000437 PARAMETER Experiment Name: At_Drought_P Parameter: Treatment Value: Drought vs. No Drought
  misc_feature: MA Experiment ID: 20000438 Result: Down-regulated in Transcription
  misc_feature: MA Experiment 20000438 PARAMETER Experiment Name: At_Shoots__P Parameter: Age (day) Value: 14
  misc_feature: MA Experiment 20000438 PARAMETER Experiment Name: At_Shoots__P Parameter: Tissue Value: Shoots vs. Whole Plant
  misc_feature: MA Experiment ID: 20000439 Result: Down-regulated in Transcription
  misc_feature: MA Experiment 20000439 PARAMETER Experiment Name: At_Roots__P Parameter: Age (day) Value: 14 vs. 21
  misc_feature: MA Experiment 20000439 PARAMETER Experiment Name: At_Roots__P Parameter: Organism Value: A. thaliana
  misc_feature: MA Experiment 20000439 PARAMETER Experiment Name: At_Roots__P Parameter: Tissue Value: Roots vs. Whole Plant
  misc_feature: MA Experiment ID: 20000441 Result: Up-regulated in Transcription
  misc_feature: MA Experiment 20000441 PARAMETER Experiment Name: At_1uM_BR-BRZ__P Parameter: Tissue Value: Shoot Apices
  misc_feature: MA Experiment 20000441 PARAMETER Experiment Name: At_1uM_BR-BRZ__P Parameter: Treatment Value: 1uM BR vs. No Treatment
  misc_feature: MA Experiment ID: 20000443 Result: Up-regulated in Transcription
  misc_feature: MA Experiment 20000443 PARAMETER Experiment Name: At_1uM_BR-BRZ__P Parameter: Tissue Value: Shoot Apices
  misc_feature: MA Experiment 20000443 PARAMETER Experiment Name: At_1uM_BR-BRZ__P Parameter: Treatment Value: 1uM BRZ vs. No Treatment
  misc_feature: MA Experiment ID: 20000460 Result: Up-regulated in Transcription
  misc_feature: MA Experiment 20000460 PARAMETER Experiment Name: At_10percent_PEG_P Parameter: Age (day) Value: 12
  misc_feature: MA Experiment 20000460 PARAMETER Experiment Name: At_10percent_PEG_P Parameter: Organism Value: A. thaliana
  misc_feature: MA Experiment 20000460 PARAMETER Experiment Name: At_10percent_PEG_P Parameter: Plant Line Value: WS
  misc_feature: MA Experiment 20000460 PARAMETER Experiment Name: At_10percent_PEG_P Parameter: Timepoint (day) Value: 12
  misc_feature: MA Experiment 20000460 PARAMETER Experiment Name: At_10percent_PEG_P Parameter: Tissue Value: Whole Plant
  misc_feature: MA Experiment 20000460 PARAMETER Experiment Name: At_10percent_PEG_P Parameter: Treatment Value: 10percent PEG vs. No Treatment
  misc_feature: MA Experiment ID: 20000573 Result: Down-regulated in Transcription
  misc_feature: MA Experiment 20000573 PARAMETER Experiment Name: At_100uM_ABA_Mutants__P Parameter: Organism Value: A. thaliana
  misc_feature: MA Experiment 20000573 PARAMETER Experiment Name: At_100uM_ABA_Mutants__P Parameter: Plant Line Value: CS22 vs. Ler wt
  misc_feature: MA Experiment 20000573 PARAMETER Experiment Name: At_100uM_ABA_Mutants__P Parameter: Timepoint (hr) Value: N/A
  misc_feature: MA Experiment 20000573 PARAMETER Experiment Name: At_100uM_ABA_Mutants__P Parameter: Tissue Value: Whole Plant
  misc_feature: MA Experiment 20000573 PARAMETER Experiment Name: At_100uM_ABA_Mutants__P Parameter: Treatment Value: None
  misc_feature: MA Experiment ID: 20000574 Result: Down-regulated in Transcription
  misc_feature: MA Experiment 20000574 PARAMETER Experiment Name: At_100uM_ABA_Mutants__P Parameter: Organism Value: A. thaliana
  misc_feature: MA Experiment 20000574 PARAMETER Experiment Name: At_100uM_ABA_Mutants__P Parameter: Plant Line Value: CS23 vs. Ler wt
  misc_feature: MA Experiment 20000574 PARAMETER Experiment Name: At_100uM_ABA_Mutants__P Parameter: Timepoint (hr) Value: N/A
  misc_feature: MA Experiment 20000574 PARAMETER Experiment Name: At_100uM_ABA_Mutants__P Parameter: Tissue Value: Whole Plant
  misc_feature: MA Experiment 20000574 PARAMETER Experiment Name: At_100uM_ABA_Mutants__P Parameter: Treatment Value: None
  misc_feature: MA Experiment ID: 20000576 Result: Down-regulated in Transcription
  misc_feature: MA Experiment 20000576 PARAMETER Experiment Name: At_100uM_ABA_Mutants__P Parameter: Organism Value: A. thaliana
  misc_feature: MA Experiment 20000576 PARAMETER Experiment Name: At_100uM_ABA_Mutants__P Parameter: Plant Line Value: CS23
  misc_feature: MA Experiment 20000576 PARAMETER Experiment Name: At_100uM_ABA_Mutants__P Parameter: Timepoint (hr) Value: 6
  misc_feature: MA Experiment 20000576 PARAMETER Experiment Name: At_100uM_ABA_Mutants__P Parameter: Tissue Value: Whole Plant
  misc_feature: MA Experiment 20000576 PARAMETER Experiment Name: At_100uM_ABA_Mutants__P Parameter: Treatment Value: 1uM ABA vs. No Treatment
  misc_feature: MA Experiment ID: 20000709 Result: Up-regulated in Transcription
  misc_feature: MA Experiment 20000709 PARAMETER Experiment Name: At_15mM_NH4NO3_L-to-H_P Parameter: Age (hr) Value: 14
  misc_feature: MA Experiment 20000709 PARAMETER Experiment Name: At_15mM_NH4NO3_L-to-H_P Parameter: Organism Value: A. thaliana
  misc_feature: MA Experiment 20000709 PARAMETER Experiment Name: At_15mM_NH4NO3_L-to-H_P Parameter: Plant Line Value: WS
  misc_feature: MA Experiment 20000709 PARAMETER Experiment Name: At_15mM_NH4NO3_L-to-H_P Parameter: Timepoint (hr) Value: 4
  misc_feature: MA Experiment 20000709 PARAMETER Experiment Name: At_15mM_NH4NO3_L-to-H_P Parameter: Tissue Value: Aerial
  misc_feature: MA Experiment 20000709 PARAMETER Experiment Name: At_15mM_NH4NO3_L-to-H_P Parameter: Treatment Value: 15mM NH4NO3 vs. 30mM Mannitol
  misc_feature: MA Experiment ID: 20000794 Result: Down-regulated in Transcription
  misc_feature: MA Experiment 20000794 PARAMETER Experiment Name: At_Petals_P Parameter: Age (day) Value: 23-25 days
  misc_feature: MA Experiment 20000794 PARAMETER Experiment Name: At_Petals_P Parameter: Plant Line Value: WS
  misc_feature: MA Experiment 20000794 PARAMETER Experiment Name: At_Petals_P Parameter: Tissue Value: Petals vs. Whole plant
  misc_feature: MA Experiment ID: 20001556 Result: Down-regulated in Transcription
  misc_feature: MA Experiment 20001556 PARAMETER Experiment Name: At_Drought_Soil_Dry_P Parameter: Age (day) Value: 26
  misc_feature: MA Experiment 20001556 PARAMETER Experiment Name: At_Drought_Soil_Dry_P Parameter: Organism Value: A. thaliana
  misc_feature: MA Experiment 20001556 PARAMETER Experiment Name: At_Drought_Soil_Dry_P Parameter: Plant Line Value: WS
  misc_feature: MA Experiment 20001556 PARAMETER Experiment Name: At_Drought_Soil_Dry_P Parameter: Post Timepoint (hr) Value: None
  misc_feature: MA Experiment 20001556 PARAMETER Experiment Name: At_Drought_Soil_Dry_P Parameter: Post-Treatment Value: None
  misc_feature: MA Experiment 20001556 PARAMETER Experiment Name: At_Drought_Soil_Dry_P Parameter: Timepoint (day) Value: 12
  misc_feature: MA Experiment 20001556 PARAMETER Experiment Name: At_Drought_Soil_Dry_P Parameter: Treatment Value: Drought vs. No Drought
  misc_feature: MA Experiment ID: 20001904 Result: Down-regulated in Transcription
  misc_feature: MA Experiment 20001904 PARAMETER Experiment Name: At_Drought_Reproduction_P Parameter: Age (day) Value: 37
  misc_feature: MA Experiment 20001904 PARAMETER Experiment Name: At_Drought_Reproduction_P Parameter: Organism Value: A. thaliana
  misc_feature: MA Experiment 20001904 PARAMETER Experiment Name: At_Drought_Reproduction_P Parameter: Plant Line Value: WS
  misc_feature: MA Experiment 20001904 PARAMETER Experiment Name: At_Drought_Reproduction_P Parameter: Timepoint (day) Value: 7
  misc_feature: MA Experiment 20001904 PARAMETER Experiment Name: At_Drought_Reproduction_P Parameter: Tissue Value: Rosettes
  misc_feature: MA Experiment 20001904 PARAMETER Experiment Name: At_Drought_Reproduction_P Parameter: Treatment Value: Drought vs. No Drought
atgttagtttacggtatcctcaacgacgcctttcacggcggttgggagccgtcttcttcgtcttccgacgaagatcgtagctctttcccgagtgttaagatcgagactccggagagtttcgcggcggtggattctgttccggtcaagaaggagaagacgagtcctgtttcggcggcggtgacggcggcgaagggaaagcattatagaggagtgagacaaaggccgtgggggaaatttgcggcggagattagagacccggcgaagaacggagctagggtttggttaggaacgtttgagacggcggaggacgcggcgttggcttacgacagagctgctttcaggatgcgtggttcccgcgctttgttgaattttccgttgagagttaattcaggagaacccgacccggttcgaatcaagtccaagagatcttctttttcttcttctaacgagaacggagctccgaagaagaggagaacggtggccgccggtggtggaatggataagggattgacggtgaagtgcgaggttgttgaagtggcacgtggcgatcgtttattggttttataa

SEQ ID NO: 81816 - protein, 188 aa, Arabidopsis thaliana; identical to SEQ ID NO: 27258
  peptide (1)..(188): Ceres Seq. ID no. 12661470
  misc_feature (65)..(130): Pfam Name: AP2 domain Pfam Description: AP2 domain
  misc_feature (1)..(188): Homolog of NCBI NO: 18414897 NR Description: ethylene responsive element binding factor 1 !); protein id: At4g17500.1, supported by cDNA: gi_16648794, by cDNA: gi_17064913, supported by cDNA: gi_3434966 [Arabidopsis
  misc_feature (1)..(188): Homolog of NCBI NO: 21264420 NR Description: Ethylene responsive element binding factor 1
  misc_feature (1)..(188): Homolog of NCBI NO: 25350257 NR Description: EREBP-2 protein [imported] - Arabidopsis thaliana
  misc_feature (1)..(188): Homolog of NCBI NO: 25350258 NR Description: ethylene responsive element binding factor 1 - Arabidopsis thaliana >gi|3434967|dbj|BAA32418.1| ethylene
  misc_feature (1)..(187): Homolog of NCBI NO: 15238041 NR Description: ethylene responsive element binding factor 2 protein id: At5g47220.1, supported by cDNA: 3012., supported by gi_3434968 [Arabidopsis thaliana]
  misc_feature (1)..(187): Homolog of NCBI NO: 21592595 NR Description: ethylene responsive element binding factor 2
  misc_feature (1)..(158): Homolog of NCBI NO: 7528276 NR Description: AP2-related transcription factor
  misc_feature (1)..(187): Homolog of NCBI NO: 7489113 NR Description: DNA binding protein EREBP-2 - common tobacco
  misc_feature (1)..(187): Homolog of NCBI NO: 8809571 NR Description: ethylene-responsive element binding factor
  misc_feature (1)..(162): Homolog of NCBI NO: 28274828 NR Description: ethylene response factor 1 [Lycopersicon

SEQ ID NO: 81817 - DNA, 636 bp, Arabidopsis thaliana
  misc_feature (1)..(636): Ceres Seq. ID no. 12661520
  misc_feature: MA Experiment ID: 20000315 Result: Up-regulated in Transcription
  misc_feature: MA Experiment 20000315 PARAMETER Experiment Name: At_14day_Shoots-Roots_Sub_P Parameter: Age (day) Value: 14
  misc_feature: MA Experiment 20000315 PARAMETER Experiment Name: At_14day_Shoots-Roots_Sub_P Parameter: Organism Value: A. thaliana
  misc_feature: MA Experiment 20000315 PARAMETER Experiment Name: At_14day_Shoots-Roots_Sub_P Parameter: Plant Line Value: WS
  misc_feature: MA Experiment 20000315 PARAMETER Experiment Name: At_14day_Shoots-Roots_Sub_P Parameter: Tissue Value: Shoots vs. Whole Plant
atgacgaccaaagagtgcggaaaccacggtggtggcggtggaggaggcggaaccgcctgtagaatctgtggagcaatcatcggcttcatcatcatcgtcttgatgacaatcttcctcgtttggataatcctccaaccgaaaaacccagaattcatcctccaagacaccaccgtctacgcctttaacctctcgcagcctaacctcctcacctcaaagtttcagataacaatcgcttcacgcaaccgaaactccaacatcggaatctactacgaccatcttcacgcctacgcttcttaccggaaccagcaaatcactctagctagcgaccttcctccgacgtaccaaagacacaaagaagatagcgtttggtcacctctcttatatggaaaccaagtccctatcgctcctttcaacgccgtggctctcggggacgagcagaatagtggggttttcacgttgactatatgcgttgatggacaagtgaggtggaaggtcgggactcttactatagggaattatcatctccatgttcgttgtcaggcgttcataaaccaggctgataaagccgccggagttcatgtcggcgaaaacaccgttaagtacacgttgatcaataagtgcagtgtcaatttttag

SEQ ID NO: 81818 - protein, 211 aa, Arabidopsis thaliana
  peptide (1)..(211): Ceres Seq. ID no. 12661521
  misc_feature (1)..(211): Homolog of NCBI NO: 15233951 NR Description: hairpin-induced protein, putative (HIN1); protein At4g09590.1 [Arabidopsis thaliana] >gi|25354574|pir||A85098
  misc_feature (1)..(211): Homolog of NCBI NO: 15227540 NR Description: hairpin-induced protein, putative (HIN1); protein
  misc_feature (1)..(210): Homolog of NCBI NO: 15227538 NR Description: hairpin-induced protein, putative (HIN1); protein
  misc_feature (3)..(210): Homolog of NCBI NO: 15231227 NR Description: hairpin-induced protein, putative (HIN1); protein At3g52470.1, supported by cDNA: 92178., supported by cDNA: supported by cDNA: gi_21281063 [Arabidopsis thaliana]
  misc_feature (4)..(210): Homolog of NCBI NO: 18399308 NR Description: VAMP protein SEC22; protein id: At3g11660.1, by cDNA: 8166., supported by cDNA: gi_9502171 [Arabidopsis
  misc_feature (4)..(210): Homolog of NCBI NO: 28392929 NR Description: putative VAMP protein SEC22 [Arabidopsis thaliana]
  misc_feature (1)..(210): Homolog of NCBI NO: 15240001 NR Description: hairpin-induced protein, putative (HIN1); protein
  misc_feature (1)..(210): Homolog of NCBI NO: 15229906 NR Description: hairpin-induced protein, putative (HIN1); protein At3g44220.1 [Arabidopsis thaliana] >gi|11282595|pir||T49138
  misc_feature (1)..(210): Homolog of NCBI NO: 22326984 NR Description: similar to hairpin-induced protein, putative
  misc_feature (21)..(195): Homolog of NCBI NO: 38344036 NR Description: OJ991214_12.17 [Oryza sativa (japonica
MTTKECGNHGGGGGGGGTACRICGAIIGFIIIVLMTIFLVWIILQPKNPEFILQDTTVYAFNLSQPNLLTSKFQITIASRNRNSNIGIYYDHLHAYASYRNQQITLASDLPPTYQRHKEDSVWSPLLYGNQVPIAPFNAVALGDEQNSGVFTLTICVDGQVRWKVGTLTIGNYHLHVRCQAFINQADKAAGVHVGENTVKYTLINKCSVNF

SEQ ID NO: 81819 - protein, 177 aa, Arabidopsis thaliana
  peptide (1)..(177): Ceres Seq. ID no. 12661522
  misc_feature (1)..(177): Homolog of NCBI NO: 15233951 NR Description: hairpin-induced protein, putative (HIN1); protein At4g09590.1 [Arabidopsis thaliana] >gi|25354574|pir||A85098
  misc_feature (1)..(177): Homolog of NCBI NO: 15227540 NR Description: hairpin-induced protein, putative (HIN1); protein
  misc_feature (1)..(176): Homolog of NCBI NO: 15227538 NR Description: hairpin-induced protein, putative (HIN1); protein
  misc_feature (1)..(176): Homolog of NCBI NO: 15231227 NR Description: hairpin-induced protein, putative (HIN1); protein At3g52470.1, supported by cDNA: 92178., supported by cDNA: supported by cDNA: gi_21281063 [Arabidopsis thaliana]
  misc_feature (1)..(176): Homolog of NCBI NO: 18399308 NR Description: VAMP protein SEC22; protein id: At3g11660.1, by cDNA: 8166., supported by cDNA: gi_9502171 [Arabidopsis
  misc_feature (1)..(176): Homolog of NCBI NO: 28392929 NR Description: putative VAMP protein SEC22 [Arabidopsis thaliana]
  misc_feature (1)..(176): Homolog of NCBI NO: 15240001 NR Description: hairpin-induced protein, putative (HIN1); protein
  misc_feature (1)..(176): Homolog of NCBI NO: 15229906 NR Description: hairpin-induced protein, putative (HIN1); protein At3g44220.1 [Arabidopsis thaliana] >gi|11282595|pir||T49138
  misc_feature (1)..(176): Homolog of NCBI NO: 22326984 NR Description: similar to hairpin-induced protein, putative
  misc_feature (1)..(161): Homolog of NCBI NO: 38344036 NR Description: OJ991214_12.17 [Oryza sativa (japonica
MTIFLVWIILQPKNPEFILQDTTVYAFNLSQPNLLTSKFQITIASRNRNSNIGIYYDHLHAYASYRNQQITLASDLPPTYQRHKEDSVWSPLLYGNQVPIAPFNAVALGDEQNSGVFTLTICVDGQVRWKVGTLTIGNYHLHVRCQAFINQADKAAGVHVGENTVKYTLINKCSVNF

SEQ ID NO: 81820 - DNA, 2136 bp, Arabidopsis thaliana
  misc_feature (1)..(2136): Ceres Seq. ID no. 12661537
  misc_feature: MA Experiment ID: 20000184 Result: Down-regulated in Transcription
  misc_feature: MA Experiment 20000184 PARAMETER Experiment Name: At_Shoots__P Parameter: Age (day) Value: 7
  misc_feature: MA Experiment 20000184 PARAMETER Experiment Name: At_Shoots__P Parameter: Tissue Value: Shoots vs. Whole Plant
  misc_feature: MA Experiment ID: 20001451 Result: Down-regulated in Transcription
  misc_feature: MA Experiment 20001451 PARAMETER Experiment Name: At_Far-red-induction_P Parameter: Age (day) Value: 7
  misc_feature: MA Experiment 20001451 PARAMETER Experiment Name: At_Far-red-induction_P Parameter: Light Value: Far-red vs. White
  misc_feature: MA Experiment 20001451 PARAMETER Experiment Name: At_Far-red-induction_P Parameter: Organism Value: A. thaliana
  misc_feature: MA Experiment 20001451 PARAMETER Experiment Name: At_Far-red-induction_P Parameter: Plant Line Value: Columbia
  misc_feature: MA Experiment 20001451 PARAMETER Experiment Name: At_Far-red-induction_P Parameter: Timepoint (hr) Value: 24
  misc_feature: MA Experiment 20001451 PARAMETER Experiment Name: At_Far-red-induction_P Parameter: Tissue Value: Whole Plant
atggctcagtatagacaatcaggaacagagaggtttttgggaggtcgaagcggttacaatccttatgtcaacggtggagcttcgtcagatcacgtagcgatcgggatccgtaacggcggtggtagtaatttcggagttgtaactcagcacgggaaagctagtcgatggcggcgatctactcgattagataggaatcgtcgttgtggtgttggctctttggtgtttgttctttgtgttgtgctcgttgtttgtgtctcagcttactattatttctctggttatactaatttcggcaaagatgataaaggaattgatacagctgaaggtgattttcttacgaatgtgtcaagaactgatcctttgaaaatacttaagtttggtcatggttcagtgttacatggaagagattcgagagattgggataaggatgatagaagaagggatgaagattataatgaggatgatgtagaggataaatctgttgttgaggagaggtcagtgtctgaagtgaaaaaggatgtatcgcttcggaatcctttgaagggttcggattggaagggggttggtttttacaatgaagctggacgtgatgagctgaagaagtatgaagtggagtatcaggcttctcttgtaaaaggtggtcaatcgttgaaagagaatgatgggcatcatcagccatttgatacagaatctaatgaagatgattcgattgattctcatgatactcaaggggatgaatatgttgacatggggcatgatggggatgaaaatgaagaatcacacaaagataatcataagcacaatgaggatggtgctgaagaatcacacaaagatagtcataggcacaatgaggatggtgctgaagaatctcacaaagagactgcatctgtgtttcttcattccacgaccaagcatcagaaaattgaaaaggttcatggagctacttcaaaaaggtcacgtgggaagtcttctcttcttagtggtaagtcggggaaaacatcgcaaactgatgcaaaaagaagagctcgaagtcacagattttcaggcgtatcttgtgagatgaagctgttgaattccagtcaacaaatacaagagcctttgaaaactcaaaattttgctgcaccctccttacaatacatacagatggaggataaacctgatggagaagaacagtgggagcctaaatttgcaggtcaccagagtttacaggaacgagaagactctttcttggttcaagagcagaaaatccattgtggctttgtcaaagctcctgaaggattgccaagcactggatttgacctgacagaagatgatgctaactatatcagtaaatgtcacattgctgtgatatcctgtatctttggaaactctgatcgcttgaggcatcctgctaataaaatggtaagtagtttgtcaagaaaagatgtttgcttcgttgtgtttgtggacgagattaccatgcaaacactttctgccgaaggccaagtacccgacggagctggattcgttggtctgtggaagttggttgtggtgaggaatcttccttacacagatatgcggagggtagggaaaataccaaaactgttaccacacagacttttcacttcggcaaggtactcaatctggttggacagcaagttacgtctccagttggaccccctagtcattttggaatactttctgtggcgtgaagggcacgagtatgctatctccaatcactatgaccgccattgcctatgggaagaagttgcacaaaacaagaagctgaacaagtacaatcacactgtcattgatcagcagtttgagttttaccagtctgacgggctgacgagattcaatgcttcagatccccacaagcttcttcccagcaatgttccagaagggtctttcattgtacgggaacatacccccatgtcaaacctattctcctgtctttggttcaacgaagttgagcgcttcactccccgagatcagctaagctttgcatacacttaccagaaattaacaaggatgaatcctgacactccatttaatcttcacatgttcaaggattgcgagaggagaaaaatcaccaaattgtttcgtcacagatcagaggagaagcgaaaccttatacaagcagcaacaacacaataa

SEQ ID NO: 81821 - protein, 711 aa, Arabidopsis thaliana
  peptide (1)..(711): Ceres Seq. ID no. 12661538
  misc_feature (376)..(696): Pfam Name: Protein of unknown function (DUF616) Pfam Description: Protein of unknown function (DUF616)
  misc_feature (246)..(708): Homolog of NCBI NO: 25403429 NR Description: protein F12K21.12 [imported] - Arabidopsis >gi|8778248|gb|AAF79257.1|AC023279_6 F12K21.12 [Arabidopsis
  misc_feature (1)..(246): Homolog of NCBI NO: 25403429 NR Description: protein F12K21.12 [imported] - Arabidopsis >gi|8778248|gb|AAF79257.1|AC023279_6 F12K21.12 [Arabidopsis
  misc_feature (246)..(683): Homolog of NCBI NO: 15218687 NR Description: hypothetical protein; protein id: At1g34550.1
  misc_feature (1)..(246): Homolog of NCBI NO: 15218687 NR Description: hypothetical protein; protein id: At1g34550.1
  misc_feature (346)..(697): Homolog of NCBI NO: 15227062 NR Description: unknown protein; protein id: At2g02910.1
  misc_feature (376)..(697): Homolog of NCBI NO: 25405617 NR Description: hypothetical protein F8L10.10 [imported] - thaliana >gi|9454542|gb|AAF87865.1|AC022520_9 Unknown protein
  misc_feature (376)..(697): Homolog of NCBI NO: 30695403 NR Description: expressed protein [Arabidopsis thaliana]
  misc_feature (376)..(702): Homolog of NCBI NO: 15217874 NR Description: unknown protein; protein id: At1g28240.1,
  misc_feature (376)..(702): Homolog of NCBI NO: 17064856 NR Description: Unknown protein [Arabidopsis thaliana]
  misc_feature (338)..(704): Homolog of NCBI NO: 7452444 NR Description: hypothetical protein F20M13.60 - Arabidopsis >gi|4467137|emb|CAB37506.1| putative protein [Arabidopsis >gi|7270833|emb|CAB80514.1| putative protein [Arabidopsis
MAQYRQSGTERFLGGRSGYNPYVNGGASSDHVAIGIRNGGGSNFGVVTQHGKASRWRRSTRLDRNRRCGVGSLVFVLCVVLVVCVSAYYYFSGYTNFGKDDKGIDTAEGDFLTNVSRTDPLKILKFGHGSVLHGRDSRDWDKDDRRRDEDYNEDDVEDKSVVEERSVSEVKKDVSLRNPLKGSDWKGVGFYNEAGRDELKKYEVEYQASLVKGGQSLKENDGHHQPFDTESNEDDSIDSHDTQGDEYVDMGHDGDENEESHKDNHKHNEDGAEESHKDSHRHNEDGAEESHKETASVFLHSTTKHQKIEKVHGATSKRSRGKSSLLSGKSGKTSQTDAKRRARSHRFSGVSCEMKLLNSSQQIQEPLKTQNFAAPSLQYIQMEDKPDGEEQWEPKFAGHQSLQEREDSFLVQEQKIHCGFVKAPEGLPSTGFDLTEDDANYISKCHIAVISCIFGNSDRLRHPANKMVSSLSRKDVCFVVFVDEITMQTLSAEGQVPDGAGFVGLWKLVVVRNLPYTDMRRVGKIPKLLPHRLFTSARYSIWLDSKLRLQLDPLVILEYFLWREGHEYAISNHYDRHCLWEEVAQNKKLNKYNHTVIDQQFEFYQSDGLTRFNASDPHKLLPSNVPEGSFIVREHTPMSNLFSCLWFNEVERFTPRDQLSFAYTYQKLTRMNPDTPFNLHMFKDCERRKITKLFRHRSEEKRNLIQAATTQ

SEQ ID NO: 81822 - protein, 462 aa, Arabidopsis thaliana
  peptide (1)..(462): Ceres Seq. ID no. 12661539
  misc_feature (127)..(447): Pfam Name: Protein of unknown function (DUF616) Pfam Description: Protein of unknown function (DUF616)
  misc_feature (1)..(459): Homolog of NCBI NO: 25403429 NR Description: protein F12K21.12 [imported] - Arabidopsis >gi|8778248|gb|AAF79257.1|AC023279_6 F12K21.12 [Arabidopsis
  misc_feature (1)..(434): Homolog of NCBI NO: 15218687 NR Description: hypothetical protein; protein id: At1g34550.1
  misc_feature (97)..(448): Homolog of NCBI NO: 15227062 NR Description: unknown protein; protein id: At2g02910.1
  misc_feature (127)..(448): Homolog of NCBI NO: 25405617 NR Description: hypothetical protein F8L10.10 [imported] - thaliana >gi|9454542|gb|AAF87865.1|AC022520_9 Unknown protein
  misc_feature (127)..(448): Homolog of NCBI NO: 30695403 NR Description: expressed protein [Arabidopsis thaliana]
  misc_feature (127)..(453): Homolog of NCBI NO: 15217874 NR Description: unknown protein; protein id: At1g28240.1,
  misc_feature (127)..(453): Homolog of NCBI NO: 17064856 NR Description: Unknown protein [Arabidopsis thaliana]
  misc_feature (89)..(455): Homolog of NCBI NO: 7452444 NR Description: hypothetical protein F20M13.60 - Arabidopsis >gi|4467137|emb|CAB37506.1| putative protein [Arabidopsis >gi|7270833|emb|CAB80514.1| putative protein [Arabidopsis
  misc_feature (119)..(455): Homolog of NCBI NO: 18420250 NR Description: putative protein; protein id: At4g38500.1, by cDNA: gi_15010783 [Arabidopsis thaliana] AT4g38500/F20M13_60 [Arabidopsis thaliana]
  misc_feature (127)..(452): Homolog of NCBI NO: 40539063 NR Description: hypothetical protein [Oryza sativa (japonica
MGHDGDENEESHKDNHKHNEDGAEESHKDSHRHNEDGAEESHKETASVFLHSTTKHQKIEKVHGATSKRSRGKSSLLSGKSGKTSQTDAKRRARSHRFSGVSCEMKLLNSSQQIQEPLKTQNFAAPSLQYIQMEDKPDGEEQWEPKFAGHQSLQEREDSFLVQEQKIHCGFVKAPEGLPSTGFDLTEDDANYISKCHIAVISCIFGNSDRLRHPANKMVSSLSRKDVCFVVFVDEITMQTLSAEGQVPDGAGFVGLWKLVVVRNLPYTDMRRVGKIPKLLPHRLFTSARYSIWLDSKLRLQLDPLVILEYFLWREGHEYAISNHYDRHCLWEEVAQNKKLNKYNHTVIDQQFEFYQSDGLTRFNASDPHKLLPSNVPEGSFIVREHTPMSNLFSCLWFNEVERFTPRDQLSFAYTYQKLTRMNPDTPFNLHMFKDCERRKITKLFRHRSEEKRNLIQAATTQ

SEQ ID NO: 81823 - protein, 358 aa, Arabidopsis thaliana
  peptide (1)..(358): Ceres Seq. ID no. 12661540
  misc_feature (23)..(343): Pfam Name: Protein of unknown function (DUF616) Pfam Description: Protein of unknown function (DUF616)
  misc_feature (1)..(355): Homolog of NCBI NO: 25403429 NR Description: protein F12K21.12 [imported] - Arabidopsis >gi|8778248|gb|AAF79257.1|AC023279_6 F12K21.12 [Arabidopsis
  misc_feature (1)..(330): Homolog of NCBI NO: 15218687 NR Description: hypothetical protein; protein id: At1g34550.1
  misc_feature (1)..(344): Homolog of NCBI NO: 15227062 NR Description: unknown protein; protein id: At2g02910.1
  misc_feature (23)..(344): Homolog of NCBI NO: 25405617 NR Description: hypothetical protein F8L10.10 [imported] - thaliana >gi|9454542|gb|AAF87865.1|AC022520_9 Unknown protein
  misc_feature (23)..(344): Homolog of NCBI NO: 30695403 NR Description: expressed protein [Arabidopsis thaliana]
  misc_feature (23)..(349): Homolog of NCBI NO: 15217874 NR Description: unknown protein; protein id: At1g28240.1,
  misc_feature (23)..(349): Homolog of NCBI NO: 17064856 NR Description: Unknown protein [Arabidopsis thaliana]
  misc_feature (1)..(351): Homolog of NCBI NO: 7452444 NR Description: hypothetical protein F20M13.60 - Arabidopsis >gi|4467137|emb|CAB37506.1| putative protein [Arabidopsis >gi|7270833|emb|CAB80514.1| putative protein [Arabidopsis
  misc_feature (15)..(351): Homolog of NCBI NO: 18420250 NR Description: putative protein; protein id: At4g38500.1, by cDNA: gi_15010783 [Arabidopsis thaliana] AT4g38500/F20M13_60 [Arabidopsis thaliana]
  misc_feature (23)..(348): Homolog of NCBI NO: 40539063 NR Description: hypothetical protein [Oryza sativa (japonica
MKLLNSSQQIQEPLKTQNFAAPSLQYIQMEDKPDGEEQWEPKFAGHQSLQEREDSFLVQEQKIHCGFVKAPEGLPSTGFDLTEDDANYISKCHIAVISCIFGNSDRLRHPANKMVSSLSRKDVCFVVFVDEITMQTLSAEGQVPDGAGFVGLWKLVVVRNLPYTDMRRVGKIPKLLPHRLFTSARYSIWLDSKLRLQLDPLVILEYFLWREGHEYAISNHYDRHCLWEEVAQNKKLNKYNHTVIDQQFEFYQSDGLTRFNASDPHKLLPSNVPEGSFIVREHTPMSNLFSCLWFNEVERFTPRDQLSFAYTYQKLTRMNPDTPFNLHMFKDCERRKITKLFRHRSEEKRNLIQAATTQ

SEQ ID NO: 81824 - DNA, 1008 bp, Arabidopsis thaliana
  misc_feature (1)..(1008): Ceres Seq. ID no. 12661547
  misc_feature: MA Experiment ID: 20000307 Result: Up-regulated in Transcription
  misc_feature: MA Experiment 20000307 PARAMETER Experiment Name: At_Germinating_Seeds_Sub_P Parameter: Age (hr) Value: 24 vs. 0
  misc_feature: MA Experiment 20000307 PARAMETER Experiment Name: At_Germinating_Seeds_Sub_P Parameter: Organism Value: A. thaliana
  misc_feature: MA Experiment 20000307 PARAMETER Experiment Name: At_Germinating_Seeds_Sub_P Parameter: Plant Line Value: WS
  misc_feature: MA Experiment 20000307 PARAMETER Experiment Name: At_Germinating_Seeds_Sub_P Parameter: Tissue Value: Germinating Seeds
  misc_feature: MA Experiment ID: 20000328 Result: Down-regulated in Transcription
  misc_feature: MA Experiment 20000328 PARAMETER Experiment Name: At_42deg_Heat_Sub_P Parameter: Age (day) Value: 14
  misc_feature: MA Experiment 20000328 PARAMETER Experiment Name: At_42deg_Heat_Sub_P Parameter: Organism Value: A. thaliana
  misc_feature: MA Experiment 20000328 PARAMETER Experiment Name: At_42deg_Heat_Sub_P Parameter: Plant Line Value: WS
  misc_feature: MA Experiment 20000328 PARAMETER Experiment Name: At_42deg_Heat_Sub_P Parameter: Temperature (deg C) Value: 42 vs. 22
  misc_feature: MA Experiment 20000328 PARAMETER Experiment Name: At_42deg_Heat_Sub_P Parameter: Timepoint (hr) Value: 6
  misc_feature: MA Experiment 20000328 PARAMETER Experiment Name: At_42deg_Heat_Sub_P Parameter: Tissue Value: Aerial
  misc_feature: MA Experiment ID: 20000355 Result: Up-regulated in Transcription
  misc_feature: MA Experiment 20000355 PARAMETER Experiment Name: At_Siliques_Sub_P Parameter: Age (day) Value: 21
  misc_feature: MA Experiment 20000355 PARAMETER Experiment Name: At_Siliques_Sub_P Parameter: Organism Value: A. thaliana
  misc_feature: MA Experiment 20000355 PARAMETER Experiment Name: At_Siliques_Sub_P Parameter: Plant Line Value: WS
  misc_feature: MA Experiment 20000355 PARAMETER Experiment Name: At_Siliques_Sub_P Parameter: Tissue Value: Less Than 5mm Siliques vs. Whole Plant
atggctccagtgaaaaaatcagataagaaagcaacattagatgctgctgcttggatgttcaatgttgttacttctgttggtatcatcattgttaataaagctttaatggctacttatggctttagctttgctacaacgttaaccggtttacatttcgccactacgacgttgatgacgcttgttttaagatgtttaggatatatacaaccttctcatcttccatttacagagcttcttaagtttattctgtttgctaatttttcgattgttggaatgaatgttagtcttatgtggaactctgttgggttttatcagattgcaaagcttagcatgattcctgtatcatgcttgttggaagtagtatttgataagattcgttactcaagagatacaaaacttagcattggacttgttcttgttggtgttggtgtttgtactgttactgatgttagtgttaacaccaaaggttttgttgctgcttttgttgctgtgtggagtactgctttgcaacaatactatgtacattatctacagcgaaagtactcgcttagctcattcaacctactgggtcatactgctccagctcaggctgcaacgttattgatagtcggtccatttctcgactattggttgacagacaaacgggtagacatgtatgattacaactctgtctctgtgatgtttataaccctctcgtgcacaatagcaatcgggacaaacctgagccagttcatctgcatcgggagattcacagcagtgtcattccaagtcctgggccatatgaagacgatcttggtgcttgtaatgggcttcttcttctttgacagagatggtctaaacctgcatgtgattcttggcatgatcattgcagtactcgggatgatctggtacggtaatgcctcgtccaagccaggcggcaaggagaagaagaattattctcttccaacgacccgacaacagaaacttggggctacttcagattctgatgaacatcgagataaagcgtag

SEQ ID NO: 81825 - protein, 335 aa, Arabidopsis thaliana
  peptide (1)..(335): Ceres Seq. ID no. 12661548
  misc_feature (1)..(335): Homolog of NCBI NO: 15234794 NR Description: hypothetical protein; protein id: At4g09810.1
  misc_feature (1)..(335): Homolog of NCBI NO: 18399097 NR Description: expressed protein; protein id: At1g34020.1, by cDNA: 7642. [Arabidopsis thaliana] >gi|25354483|pir||A86464
  misc_feature (1)..(335): Homolog of NCBI NO: 21595054 NR Description: unknown [Arabidopsis thaliana]
  misc_feature (2)..(330): Homolog of NCBI NO: 18420440 NR Description: putative protein; protein id: At4g39390.1, by cDNA: 35002., supported by cDNA: gi_20259515 [Arabidopsis >gi|20259516|gb|AAM13878.1| unknown protein [Arabidopsis
  misc_feature (2)..(330): Homolog of NCBI NO: 21593003 NR Description: unknown [Arabidopsis thaliana]
  misc_feature (2)..(330): Homolog of NCBI NO: 7486049 NR Description: hypothetical protein F23K16.20 - Arabidopsis >gi|5042155|emb|CAB44674.1| putative protein [Arabidopsis >gi|7270923|emb|CAB80602.1| putative protein [Arabidopsis
  misc_feature (1)..(330): Homolog of NCBI NO: 30313364 NR Description: putative transmembrane protein [Oryza sativa]
  misc_feature (6)..(333): Homolog of NCBI NO: 18394949 NR Description: expressed protein; protein id: At1g21070.1, by cDNA: 108746. [Arabidopsis thaliana] >gi|25354485|pir||G86343
  misc_feature (5)..(297): Homolog of NCBI NO: 15238957 NR Description: putative protein; protein id: At5g42420.1 thaliana] >gi|9759478|dbj|BAB10483.1|
  misc_feature (1)..(333): Homolog of NCBI NO: 21536703 NR Description: unknown [Arabidopsis thaliana]
MAPVKKSDKKATLDAAAWMFNVVTSVGIIIVNKALMATYGFSFATTLTGLHFATTTLMTLVLRCLGYIQPSHLPFTELLKFILFANFSIVGMNVSLMWNSVGFYQIAKLSMIPVSCLLEVVFDKIRYSRDTKLSIGLVLVGVGVCTVTDVSVNTKGFVAAFVAVWSTALQQYYVHYLQRKYSLSSFNLLGHTAPAQAATLLIVGPFLDYWLTDKRVDMYDYNSVSVMFITLSCTIAIGTNLSQFICIGRFTAVSFQVLGHMKTILVLVMGFFFFDRDGLNLHVILGMIIAVLGMIWYGNASSKPGGKEKKNYSLPTTRQQKLGATSDSDEHRDKA

SEQ ID NO: 81826 - protein, 317 aa, Arabidopsis thaliana
  peptide (1)..(317): Ceres Seq. ID no. 12661549
  misc_feature (1)..(317): Homolog of NCBI NO: 15234794 NR Description: hypothetical protein; protein id: At4g09810.1
  misc_feature (1)..(317): Homolog of NCBI NO: 18399097 NR Description: expressed protein; protein id: At1g34020.1, by cDNA: 7642. [Arabidopsis thaliana] >gi|25354483|pir||A86464
  misc_feature (1)..(317): Homolog of NCBI NO: 21595054 NR Description: unknown [Arabidopsis thaliana]
  misc_feature (1)..(312): Homolog of NCBI NO: 18420440 NR Description: putative protein; protein id: At4g39390.1, by cDNA: 35002., supported by cDNA: gi_20259515 [Arabidopsis >gi|20259516|gb|AAM13878.1| unknown protein [Arabidopsis
  misc_feature (1)..(312): Homolog of NCBI NO: 21593003 NR Description: unknown [Arabidopsis thaliana]
  misc_feature (1)..(312): Homolog of NCBI NO: 7486049 NR Description: hypothetical protein F23K16.20 - Arabidopsis >gi|5042155|emb|CAB44674.1| putative protein [Arabidopsis >gi|7270923|emb|CAB80602.1| putative protein [Arabidopsis
  misc_feature (1)..(312): Homolog of NCBI NO: 30313364 NR Description: putative transmembrane protein [Oryza sativa]
  misc_feature (1)..(315): Homolog of NCBI NO: 18394949 NR Description: expressed protein; protein id: At1g21070.1, by cDNA: 108746. [Arabidopsis thaliana] >gi|25354485|pir||G86343
  misc_feature (1)..(279): Homolog of NCBI NO: 15238957 NR Description: putative protein; protein id: At5g42420.1 thaliana] >gi|9759478|dbj|BAB10483.1|
  misc_feature (1)..(315): Homolog of NCBI NO: 21536703 NR Description: unknown [Arabidopsis thaliana]
MFNVVTSVGIIIVNKALMATYGFSFATTLTGLHFATTTLMTLVLRCLGYIQPSHLPFTELLKFILFANFSIVGMNVSLMWNSVGFYQIAKLSMIPVSCLLEVVFDKIRYSRDTKLSIGLVLVGVGVCTVTDVSVNTKGFVAAFVAVWSTALQQYYVHYLQRKYSLSSFNLLGHTAPAQAATLLIVGPFLDYWLTDKRVDMYDYNSVSVMFITLSCTIAIGTNLSQFICIGRFTAVSFQVLGHMKTILVLVMGFFFFDRDGLNLHVILGMIIAVLGMIWYGNASSKPGGKEKKNYSLPTTRQQKLGATSDSDEHRDKA

SEQ ID NO: 81827 - protein, 300 aa, Arabidopsis thaliana
  peptide (1)..(300): Ceres Seq. ID no. 12661550
  misc_feature (1)..(300): Homolog of NCBI NO: 15234794 NR Description: hypothetical protein; protein id: At4g09810.1
  misc_feature (1)..(300): Homolog of NCBI NO: 18399097 NR Description: expressed protein; protein id: At1g34020.1, by cDNA: 7642. [Arabidopsis thaliana] >gi|25354483|pir||A86464
  misc_feature (1)..(300): Homolog of NCBI NO: 21595054 NR Description: unknown [Arabidopsis thaliana]
  misc_feature (1)..(295): Homolog of NCBI NO: 18420440 NR Description: putative protein; protein id: At4g39390.1, by cDNA: 35002., supported by cDNA: gi_20259515 [Arabidopsis >gi|20259516|gb|AAM13878.1| unknown protein [Arabidopsis
  misc_feature (1)..(295): Homolog of NCBI NO: 21593003 NR Description: unknown [Arabidopsis thaliana]
  misc_feature (1)..(295): Homolog of NCBI NO: 7486049 NR Description: hypothetical protein F23K16.20 - Arabidopsis >gi|5042155|emb|CAB44674.1| putative protein [Arabidopsis >gi|7270923|emb|CAB80602.1| putative protein [Arabidopsis
  misc_feature (1)..(295): Homolog of NCBI NO: 30313364 NR Description: putative transmembrane protein [Oryza sativa]
  misc_feature (1)..(298): Homolog of NCBI NO: 18394949 NR Description: expressed protein; protein id: At1g21070.1, by cDNA: 108746. [Arabidopsis thaliana] >gi|25354485|pir||G86343
  misc_feature (1)..(262): Homolog of NCBI NO: 15238957 NR Description: putative protein; protein id: At5g42420.1 thaliana] >gi|9759478|dbj|BAB10483.1|
  misc_feature (1)..(298): Homolog of NCBI NO: 21536703 NR Description: unknown [Arabidopsis thaliana]
MATYGFSFATTLTGLHFATTTLMTLVLRCLGYIQPSHLPFTELLKFILFANFSIVGMNVSLMWNSVGFYQIAKLSMIPVSCLLEVVFDKIRYSRDTKLSIGLVLVGVGVCTVTDVSVNTKGFVAAFVAVWSTALQQYYVHYLQRKYSLSSFNLLGHTAPAQAATLLIVGPFLDYWLTDKRVDMYDYNSVSVMFITLSCTIAIGTNLSQFICIGRFTAVSFQVLGHMKTILVLVMGFFFFDRDGLNLHVILGMIIAVLGMIWYGNASSKPGGKEKKNYSLPTTRQQKLGATSDSDEHRDKA

SEQ ID NO: 81828 - DNA, 645 bp, Arabidopsis thaliana
  misc_feature (1)..(645): Ceres Seq. ID no. 12661569
  misc_feature: MA Experiment ID: 20000171 Result: Up-regulated in Transcription
  misc_feature: MA Experiment 20000171 PARAMETER Experiment Name: At_42deg_Heat_P Parameter: Age (day) Value: 14
  misc_feature: MA Experiment 20000171 PARAMETER Experiment Name: At_42deg_Heat_P Parameter: Organism Value: A. thaliana
  misc_feature: MA Experiment 20000171 PARAMETER Experiment Name: At_42deg_Heat_P Parameter: Plant Line Value: WS
  misc_feature: MA Experiment 20000171 PARAMETER Experiment Name: At_42deg_Heat_P Parameter: Temperature (deg C) Value: 42 vs. 22
  misc_feature: MA Experiment 20000171 PARAMETER Experiment Name: At_42deg_Heat_P Parameter: Timepoint (hr) Value: 1
  misc_feature: MA Experiment 20000171 PARAMETER Experiment Name: At_42deg_Heat_P Parameter: Tissue Value: Aerial
  misc_feature: MA Experiment ID: 20000173 Result: Up-regulated in Transcription
  misc_feature: MA Experiment 20000173 PARAMETER Experiment Name: At_42deg_Heat_P Parameter: Age (day) Value: 14
  misc_feature: MA Experiment 20000173 PARAMETER Experiment Name: At_42deg_Heat_P Parameter: Organism Value: A. thaliana
  misc_feature: MA Experiment 20000173 PARAMETER Experiment Name: At_42deg_Heat_P Parameter: Plant Line Value: WS
  misc_feature: MA Experiment 20000173 PARAMETER Experiment Name: At_42deg_Heat_P Parameter: Temperature (deg C) Value: 42 vs. 22
  misc_feature: MA Experiment 20000173 PARAMETER Experiment Name: At_42deg_Heat_P Parameter: Timepoint (hr) Value: 6
  misc_feature: MA Experiment 20000173 PARAMETER Experiment Name: At_42deg_Heat_P Parameter: Tissue Value: Aerial
  misc_feature: MA Experiment ID: 20000179 Result: Up-regulated in Transcription
  misc_feature: MA Experiment 20000179 PARAMETER Experiment Name: At_Germinating_Seeds_P Parameter: Age (hr) Value: 6 vs. 0
  misc_feature: MA Experiment 20000179 PARAMETER Experiment Name: At_Germinating_Seeds_P Parameter: Tissue Value: Germinating Seeds
  misc_feature: MA Experiment ID: 20000180 Result: Up-regulated in Transcription
  misc_feature: MA Experiment 20000180 PARAMETER Experiment Name: At_Germinating_Seeds_P Parameter: Age (hr) Value: 24 vs. 0
  misc_feature: MA Experiment 20000180 PARAMETER Experiment Name: At_Germinating_Seeds_P Parameter: Tissue Value: Germinating Seeds
  misc_feature: MA Experiment ID: 20000265 Result: Up-regulated in Transcription
  misc_feature: MA Experiment 20000265 PARAMETER Experiment Name: At_Open_Flower_P Parameter: Age (day) Value: 21
  misc_feature: MA Experiment 20000265 PARAMETER Experiment Name: At_Open_Flower_P Parameter: Plant Line Value: WS
  misc_feature: MA Experiment 20000265 PARAMETER Experiment Name: At_Open_Flower_P Parameter: Tissue Value: Closed Flower vs. Whole Plant
  misc_feature: MA Experiment ID: 20000437 Result: Up-regulated in Transcription
  misc_feature: MA Experiment 20000437 PARAMETER Experiment Name: At_Drought_P Parameter: Age (day) Value: 8
  misc_feature: MA Experiment 20000437 PARAMETER Experiment Name: At_Drought_P Parameter: Organism Value: A. thaliana
  misc_feature: MA Experiment 20000437 PARAMETER Experiment Name: At_Drought_P Parameter: Plant Line Value: WS
  misc_feature: MA Experiment 20000437 PARAMETER Experiment Name: At_Drought_P Parameter: Timepoint (hr) Value: 24
  misc_feature: MA Experiment 20000437 PARAMETER Experiment Name: At_Drought_P Parameter: Tissue Value: Whole Plant
  misc_feature: MA Experiment 20000437 PARAMETER Experiment Name: At_Drought_P Parameter: Treatment Value: Drought vs. No Drought
  misc_feature: MA Experiment ID: 20000439 Result: Up-regulated in Transcription
  misc_feature: MA Experiment 20000439 PARAMETER Experiment Name: At_Roots__P Parameter: Age (day) Value: 14 vs. 21
  misc_feature: MA Experiment 20000439 PARAMETER Experiment Name: At_Roots__P Parameter: Organism Value: A. thaliana
  misc_feature: MA Experiment 20000439 PARAMETER Experiment Name: At_Roots__P Parameter: Tissue Value: Roots vs. Whole Plant
  misc_feature: MA Experiment ID: 20001904 Result: Up-regulated in Transcription
  misc_feature: MA Experiment 20001904 PARAMETER Experiment Name: At_Drought_Reproduction_P Parameter: Age (day) Value: 37
  misc_feature: MA Experiment 20001904 PARAMETER Experiment Name: At_Drought_Reproduction_P Parameter: Organism Value: A. thaliana
  misc_feature: MA Experiment 20001904 PARAMETER Experiment Name: At_Drought_Reproduction_P Parameter: Plant Line Value: WS
  misc_feature: MA Experiment 20001904 PARAMETER Experiment Name: At_Drought_Reproduction_P Parameter: Timepoint (day) Value: 7
  misc_feature: MA Experiment 20001904 PARAMETER Experiment Name: At_Drought_Reproduction_P Parameter: Tissue Value: Rosettes
  misc_feature: MA Experiment 20001904 PARAMETER Experiment Name: At_Drought_Reproduction_P Parameter: Treatment Value: Drought vs. No Drought
atggcgaatagaatagatcatgagtacgattacttgttcaagatcgtcctgatcggcgattccggtgttggtaaatccaacattctctctcgattcaccagaaacgagttctgtctcgaatccaaatccaccattggcgtcgaattcgccacccggactttacaggttgaaggcaaaacagtgaaggctcagatttgggacactgcaggtcaagagcgttatcgagcaatcacaagtgcttactacagaggagctgttggagctcttcttgtctacgacataaccaagagacaaacttttgagaatgtcttgagatggttacgtgagctaagggatcatgctgattccaacattgttatcatgatggctggaaacaaatcagacctgaatcacttgagatctgttgctgatgaagatggtcgctctctcgccgagaaggaaggtttgtcgtttctcgagacatctgctttagaagcgactaacatcgagaaagcgtttcagaccattttgtctgagatttatcatatcataagcaagaaagctttagcggcacaagaagctgcaggtaatcttccgggccaaggaacagcgatcaatatatcagattcatctgcaactaacagaaaaggatgctgttctacctaa

SEQ ID NO: 81829 - protein, 214 aa, Arabidopsis thaliana
  peptide (1)..(214): Ceres Seq. ID no. 12661570
  misc_feature (14)..(175): Pfam Name: Ras family Pfam Description: Ras family
  misc_feature (1)..(214): Homolog of NCBI NO: 15222396 NR Description: GTP-binding protein, putative; protein id:
  misc_feature (58)..(214): Homolog of NCBI NO: 25294121 NR Description: protein F22G5.24 [imported] - Arabidopsis >gi|8778562|gb|AAF79570.1|AC022464_28 F22G5.24 [Arabidopsis
  misc_feature (1)..(56): Homolog of NCBI NO: 25294121 NR Description: protein F22G5.24 [imported] - Arabidopsis >gi|8778562|gb|AAF79570.1|AC022464_28 F22G5.24 [Arabidopsis
  misc_feature (1)..(214): Homolog of NCBI NO: 3024528 NR Description: RAS-RELATED PROTEIN RAB2BV
  misc_feature (1)..(214): Homolog of NCBI NO: 3024501 NR Description: RAS-RELATED PROTEIN RAB11C
  misc_feature (1)..(214): Homolog of NCBI NO: 15237828 NR Description: Ras-related GTP-binding protein, putative; id: At5g59150.1, supported by cDNA: gi_13877728 [Arabidopsis
  misc_feature (1)..(214): Homolog of NCBI NO: 15232652 NR Description: GTP-binding protein, putative; protein id: supported by cDNA: 35596., supported by cDNA: gi_20465470
  misc_feature (1)..(214): Homolog of NCBI NO: 3024506 NR Description: RAS-RELATED PROTEIN RAB11A
  misc_feature (1)..(214): Homolog of NCBI NO: 34897394 NR Description: Ras-related GTP-binding protein [Oryza sativa
  misc_feature (1)..(214): Homolog of NCBI NO: 34908298 NR Description: Ras-related GTP-binding protein [Oryza sativa
MANRIDHEYDYLFKIVLIGDSGVGKSNILSRFTRNEFCLESKSTIGVEFATRTLQVEGKTVKAQIWDTAGQERYRAITSAYYRGAVGALLVYDITKRQTFENVLRWLRELRDHADSNIVIMMAGNKSDLNHLRSVADEDGRSLAEKEGLSFLETSALEATNIEKAFQTILSEIYHIISKKALAAQEAAGNLPGQGTAINISDSSATNRKGCCST

SEQ ID NO: 81830 - DNA, 934 bp, Arabidopsis thaliana
  misc_feature (1)..(934): Ceres Seq. ID no. 12661571
  misc_feature: MA Experiment ID: 20000179 Result: Up-regulated in Transcription
  misc_feature: MA Experiment 20000179 PARAMETER Experiment Name: At_Germinating_Seeds_P Parameter: Age (hr) Value: 6 vs. 0
  misc_feature: MA Experiment 20000179 PARAMETER Experiment Name: At_Germinating_Seeds_P Parameter: Tissue Value: Germinating Seeds
  misc_feature: MA Experiment ID: 20000180 Result: Up-regulated in Transcription
  misc_feature: MA Experiment 20000180 PARAMETER Experiment Name: At_Germinating_Seeds_P Parameter: Age (hr) Value: 24 vs. 0
  misc_feature: MA Experiment 20000180 PARAMETER Experiment Name: At_Germinating_Seeds_P Parameter: Tissue Value: Germinating Seeds
  misc_feature: MA Experiment ID: 20000182 Result: Down-regulated in Transcription
  misc_feature: MA Experiment 20000182 PARAMETER Experiment Name: At_2mM_SA_P Parameter: Age (day) Value: 14
  misc_feature: MA Experiment 20000182 PARAMETER Experiment Name: At_2mM_SA_P Parameter: Organism Value: A. thaliana
  misc_feature: MA Experiment 20000182 PARAMETER Experiment Name: At_2mM_SA_P Parameter: Plant Line Value: WS
  misc_feature: MA Experiment 20000182 PARAMETER Experiment Name: At_2mM_SA_P Parameter: Timepoint (hr) Value: 6
  misc_feature: MA Experiment 20000182 PARAMETER Experiment Name: At_2mM_SA_P Parameter: Tissue Value: Aerial
  misc_feature: MA Experiment 20000182 PARAMETER Experiment Name: At_2mM_SA_P Parameter: Treatment Value: 2mM SA vs. No Treatment
  misc_feature: MA Experiment ID: 20000184 Result: Down-regulated in Transcription
  misc_feature: MA Experiment 20000184 PARAMETER Experiment Name: At_Shoots__P Parameter: Age (day) Value: 7
  misc_feature: MA Experiment 20000184 PARAMETER Experiment Name: At_Shoots__P Parameter: Tissue Value: Shoots vs. Whole Plant
  misc_feature: MA Experiment ID: 20000185 Result: Down-regulated in Transcription
  misc_feature: MA Experiment 20000185 PARAMETER Experiment Name: At_Roots__P Parameter: Age (day) Value: 7 vs. 21
  misc_feature: MA Experiment 20000185 PARAMETER Experiment Name: At_Roots__P Parameter: Organism Value: A. thaliana
  misc_feature: MA Experiment 20000185 PARAMETER Experiment Name: At_Roots__P Parameter: Tissue Value: Roots vs. Whole Plant
  misc_feature: MA Experiment ID: 20000439 Result: Down-regulated in Transcription
  misc_feature: MA Experiment 20000439 PARAMETER Experiment Name: At_Roots__P Parameter: Age (day) Value: 14 vs. 21
  misc_feature: MA Experiment 20000439 PARAMETER Experiment Name: At_Roots__P Parameter: Organism Value: A. thaliana
  misc_feature: MA Experiment 20000439 PARAMETER Experiment Name: At_Roots__P Parameter: Tissue Value: Roots vs. Whole Plant
  misc_feature: MA Experiment ID: 20001248 Result: Down-regulated in Transcription
  misc_feature: MA Experiment 20001248 PARAMETER Experiment Name: At_Far-red-induction_P Parameter: Age (day) Value: 7
  misc_feature: MA Experiment 20001248 PARAMETER Experiment Name: At_Far-red-induction_P Parameter: Light Value: Far-red vs. White
  misc_feature: MA Experiment 20001248 PARAMETER Experiment Name: At_Far-red-induction_P Parameter: Organism Value: A. thaliana
  misc_feature: MA Experiment 20001248 PARAMETER Experiment Name: At_Far-red-induction_P Parameter: Plant Line Value: Columbia
  misc_feature: MA Experiment 20001248 PARAMETER Experiment Name: At_Far-red-induction_P Parameter: Timepoint (hr) Value: 4
  misc_feature: MA Experiment 20001248 PARAMETER Experiment Name: At_Far-red-induction_P Parameter: Tissue Value: Whole Plant
  misc_feature: MA Experiment ID: 20001905 Result: Down-regulated in Transcription
  misc_feature: MA Experiment 20001905 PARAMETER Experiment Name: At_Drought_Reproduction_P Parameter: Age (day) Value: 40
  misc_feature: MA Experiment 20001905 PARAMETER Experiment Name: At_Drought_Reproduction_P Parameter: Organism Value: A. thaliana
  misc_feature: MA Experiment 20001905 PARAMETER Experiment Name: At_Drought_Reproduction_P Parameter: Plant Line Value: WS
  misc_feature: MA Experiment 20001905 PARAMETER Experiment Name: At_Drought_Reproduction_P Parameter: Timepoint (day) Value: 10
  misc_feature: MA Experiment 20001905 PARAMETER Experiment Name: At_Drought_Reproduction_P Parameter: Tissue Value: Rosettes
  misc_feature: MA Experiment 20001905 PARAMETER Experiment Name: At_Drought_Reproduction_P Parameter: Treatment Value: Drought vs. No Drought
aagagagaaatggctggagcagagcaaagccagagatggagccttaaggccaagaccgtacttgtaaccggtggaacaaaaggcatcgggcatgctatagtagaggaatttgcaggatttggagcagtaatacatacttgtgctagaaacgaatatgagcttaacgagtgtttaagcaaatggcaaaagaagggttttcaagtcactggttcggtctgtgacgcatctttgagaccagagagagaaaagctaatgcagactgtgtcttcaatgtttggtggaaagctcgatatcctcataaacaatttgggagcgattcggtcaaaaccaacgctggattacacagcagaagatttctcgtttcatatttcgacaaacttagaatctgcttatcatctgagccagcttgcgcatcctctgcttaaggcttcaggatgtgggaacataattttcatgtcctctattgctggagttgtatctgctagtgtcggctccatctactctgcaacgaaaggggcattgaatcagctagcaaggaacttggcatgtgagtgggctagtgatggcattagggctaatgctgtggctcctgcagtcatcgcaactcctttggctgaagctgtgtatgatgatgagttcaagaaagtggtgatatcaagaaagccgttggggcgtttcggggagcctgaagaagtgtcctcgcttgtggcttttctatgtatgcctgcagcttcttatataactggtcaaaccatttgtgtcgatggaggtctcactgtcaatggcttctcctatcagccacaaggttaaaatccaatatccaaaaacaaacacattttcaacttcattactttgaacattgtcatcttgggctaagcccggtttggaagtatggattctggccgtaacactttagaaaataaaaggaaacttc

SEQ ID NO: 81831 - protein, 269 aa, Arabidopsis thaliana
  peptide (1)..(269): Ceres Seq. ID no. 12661572
  misc_feature (4)..(269): Homolog of NCBI NO: 15222399 NR Description: tropinone reductase-I, putative; protein id: supported by cDNA: gi_13605590, supported by cDNA: gi_15777866 thaliana] >gi|13605591|gb|AAK32789.1|AF361621_1
  misc_feature (8)..(269): Homolog of NCBI NO: 25406975 NR Description: protein F22G5.20 [imported] - Arabidopsis >gi|8778545|gb|AAF79553.1|AC022464_11 F22G5.20 [Arabidopsis
  misc_feature (11)..(268): Homolog of NCBI NO: 30684202 NR Description: short-chain dehydrogenase/reductase family [Arabidopsis thaliana] >gi|25283131|pir||B84695 probable
  misc_feature (11)..(267): Homolog of NCBI NO: 15227073 NR Description: putative tropinone reductase; protein id: [Arabidopsis thaliana] >gi|25283130|pir||A84695 probable
  misc_feature (11)..(268): Homolog of NCBI NO: 15227071 NR Description: putative tropinone reductase; protein id: [Arabidopsis thaliana] >gi|25283128|pir||G84694 probable
  misc_feature (11)..(268): Homolog of NCBI NO: 15224550 NR Description: putative tropinone reductase; protein id: [Arabidopsis thaliana] >gi|25283135|pir||C84711 probable
  misc_feature (13)..(267): Homolog of NCBI NO: 15227072 NR Description: putative tropinone reductase; protein id: supported by cDNA: 1637. [Arabidopsis thaliana]
  misc_feature (13)..(267): Homolog of NCBI NO: 15529236 NR Description: At2g29320/F16P2.30 [Arabidopsis thaliana]
  misc_feature (13)..(267): Homolog of NCBI NO: 21553753 NR Description: putative tropinone reductase [Arabidopsis
  misc_feature (11)..(267): Homolog of NCBI NO: 15227069 NR Description: putative tropinone reductase; protein id: [Arabidopsis thaliana] >gi|25283126|pir||E84694 probable
KREMAGAEQSQRWSLKAKTVLVTGGTKGIGHAIVEEFAGFGAVIHTCARNEYELNECLSKWQKKGFQVTGSVCDASLRPEREKLMQTVSSMFGGKLDILINNLGAIRSKPTLDYTAEDFSFHISTNLESAYHLSQLAHPLLKASGCGNIIFMSSIAGVVSASVGSIYSATKGALNQLARNLACEWASDGIRANAVAPAVIATPLAEAVYDDEFKKVVISRKPLGRFGEPEEVSSLVAFLCMPAASYITGQTICVDGGLTVNGFSYQPQG

SEQ ID NO: 81832 - protein, 266 aa, Arabidopsis thaliana
  peptide (1)..(266): Ceres Seq. ID no. 12661573
  misc_feature (1)..(266): Homolog of NCBI NO: 15222399 NR Description: tropinone reductase-I, putative; protein id: supported by cDNA: gi_13605590, supported by cDNA: gi_15777866 thaliana] >gi|13605591|gb|AAK32789.1|AF361621_1
  misc_feature (5)..(266): Homolog of NCBI NO: 25406975 NR Description: protein F22G5.20 [imported] - Arabidopsis >gi|8778545|gb|AAF79553.1|AC022464_11 F22G5.20 [Arabidopsis
  misc_feature (8)..(265): Homolog of NCBI NO: 30684202 NR Description: short-chain dehydrogenase/reductase family [Arabidopsis thaliana] >gi|25283131|pir||B84695 probable
  misc_feature (8)..(264): Homolog of NCBI NO: 15227073 NR Description: putative tropinone reductase; protein id: [Arabidopsis thaliana] >gi|25283130|pir||A84695 probable
  misc_feature (8)..(265): Homolog of NCBI NO: 15227071 NR Description: putative tropinone reductase; protein id: [Arabidopsis thaliana] >gi|25283128|pir||G84694 probable
  misc_feature (8)..(265): Homolog of NCBI NO: 15224550 NR Description: putative tropinone reductase; protein id: [Arabidopsis thaliana] >gi|25283135|pir||C84711 probable
  misc_feature (10)..(264): Homolog of NCBI NO: 15227072 NR Description: putative tropinone reductase; protein id: supported by cDNA: 1637. [Arabidopsis thaliana]
  misc_feature (10)..(264): Homolog of NCBI NO: 15529236 NR Description: At2g29320/F16P2.30 [Arabidopsis thaliana]
  misc_feature (10)..(264): Homolog of NCBI NO: 21553753 NR Description: putative tropinone reductase [Arabidopsis
  misc_feature (8)..(264): Homolog of NCBI NO: 15227069 NR Description: putative tropinone reductase; protein id: [Arabidopsis thaliana] >gi|25283126|pir||E84694 probable
MAGAEQSQRWSLKAKTVLVTGGTKGIGHAIVEEFAGFGAVIHTCARNEYELNECLSKWQKKGFQVTGSVCDASLRPEREKLMQTVSSMFGGKLDILINNLGAIRSKPTLDYTAEDFSFHISTNLESAYHLSQLAHPLLKASGCGNIIFMSSIAGVVSASVGSIYSATKGALNQLARNLACEWASDGIRANAVAPAVIATPLAEAVYDDEFKKVVISRKPLGRFGEPEEVSSLVAFLCMPAASYITGQTICVDGGLTVNGFSYQPQG

SEQ ID NO: 81833 - protein, 185 aa, Arabidopsis thaliana
  peptide (1)..(185): Ceres Seq. ID no. 12661574
  misc_feature (1)..(185): Homolog of NCBI NO: 15222399 NR Description: tropinone reductase-I, putative; protein id: supported by cDNA: gi_13605590, supported by cDNA: gi_15777866 thaliana] >gi|13605591|gb|AAK32789.1|AF361621_1
  misc_feature (1)..(185): Homolog of NCBI NO: 25406975 NR Description: protein F22G5.20 [imported] - Arabidopsis >gi|8778545|gb|AAF79553.1|AC022464_11 F22G5.20 [Arabidopsis
  misc_feature (1)..(184): Homolog of NCBI NO: 30684202 NR Description: short-chain dehydrogenase/reductase family [Arabidopsis thaliana] >gi|25283131|pir||B84695 probable
  misc_feature (1)..(183): Homolog of NCBI NO: 15227073 NR Description: putative tropinone reductase; protein id: [Arabidopsis thaliana] >gi|25283130|pir||A84695 probable
  misc_feature (1)..(184): Homolog of NCBI NO: 15227071 NR Description: putative tropinone reductase; protein id: [Arabidopsis thaliana] >gi|25283128|pir||G84694 probable
  misc_feature (1)..(184): Homolog of NCBI NO: 15224550 NR Description: putative tropinone reductase; protein id: [Arabidopsis thaliana] >gi|25283135|pir||C84711 probable
  misc_feature (1)..(183): Homolog of NCBI NO: 15227072 NR Description: putative tropinone reductase; protein id: supported by cDNA: 1637. [Arabidopsis thaliana]
  misc_feature (1)..(183): Homolog of NCBI NO: 15529236 NR Description: At2g29320/F16P2.30 [Arabidopsis thaliana]
  misc_feature (1)..(183): Homolog of NCBI NO: 21553753 NR Description: putative tropinone reductase [Arabidopsis
  misc_feature (1)..(183): Homolog of NCBI NO: 15227069 NR Description: putative tropinone reductase; protein id: [Arabidopsis thaliana] >gi|25283126|pir||E84694 probable
MQTVSSMFGGKLDILINNLGAIRSKPTLDYTAEDFSFHISTNLESAYHLSQLAHPLLKASGCGNIIFMSSIAGVVSASVGSIYSATKGALNQLARNLACEWASDGIRANAVAPAVIATPLAEAVYDDEFKKVVISRKPLGRFGEPEEVSSLVAFLCMPAASYITGQTICVDGGLTVNGFSYQPQG

SEQ ID NO: 81834 - DNA, 2088 bp, Arabidopsis thaliana
  misc_feature (1)..(2088): Ceres Seq. ID no. 12661578
  misc_feature: MA Experiment ID: 20000355 Result: Down-regulated in Transcription
  misc_feature: MA Experiment 20000355 PARAMETER Experiment Name: At_Siliques_Sub_P Parameter: Age (day) Value: 21
  misc_feature: MA Experiment 20000355 PARAMETER Experiment Name: At_Siliques_Sub_P Parameter: Organism Value: A. thaliana
  misc_feature: MA Experiment 20000355 PARAMETER Experiment Name: At_Siliques_Sub_P Parameter: Plant Line Value: WS
  misc_feature: MA Experiment 20000355 PARAMETER Experiment Name: At_Siliques_Sub_P Parameter: Tissue Value: Less Than 5mm Siliques vs. Whole Plant
atggaatcgaattactcaggtgtggtcaacggctacgatgtgagtttcttaccaacttcgattccggatcttggattcggtgttccttcttctagtgattttgatcttcggatggatcaatactatcaccaaccttcgatttgggttccagatcaagatcatcacttttctccaccagctgatgagattgattctgaaaacacccttttgaaatatgtaaaccagctccttatggaagagagtctcgctgagaagcagtctatcttctatgattccttggctcttcgacaaaccgaggaaatgttgcagcaagtcatcagcgactcgcagactcagtcttctatacctaataattcgattactaccagtagtagtagtaatagtggtgattatagtaacagcagcaattctagtgtacgcatcgagaatgaagtgttgtttgataataaacatcttggtgattctggtgttgtgtcatttccagggtctaacatgttgcgtggaggtgagcaattcgggcagccagcgaatgagattcttgtcaggagtatgtttagtgatgcagaatcagttctgcagtttaagagagggttagaggaagctagcaagtttcttcctaatactgatcaatggatctttaatcttgagcctgagatggaaagagttgttccggtgaaagtagaggaaggatggtcagctatctcgaaaactaggaagaatcatcacgagcgggaagaagaagaagatgatctagaggaagctaggaggaggagtaagcaattcgcagtgaatgaggaagatgggaaattaacagaaatgtttgataaggttttgcttcttgatggtgaatgcgatccgcagattatcgaagatggcgaaaatggttcaagcaaggctctggttaagaaaggccgcgcgaaaaagaagagtcgagcggttgatttccgcacacttctcacactatgcgcacaatctgtttctgcaggggataagattacggctgatgatttgctgaggcagataaggaagcaatgttcacctgttggtgatgcatcacagagactagctcatttcttcgccaatgcacttgaggcgcgtcttgaaggtagcacaggaactatgatccagagttattacgattccatttcctccaagaaacgaacagctgcacagattcttaaatcctatagtgtgttcttgtctgcgtctccgtttatgactttgatctatttcttctccaacaagatgattcttgatgctgccaaggatgcttcggttcttcatatagtcgattttgggatcctttatggtttccagtggccgatgtttatacagcacttatcaaagagcaaccccggactacggaaactacggattaccggtatcgagattcctcaacatgggcttcgtccaactgaaagaatacaggatacaggtcgaagactgacagagtattgcaaacggtttggtgttccatttgaatacaatgcaattgcgtctaagaactgggaaacaatcaagatggaggagttcaagatccgaccaaacgaagttcttgcagttaatgctgtgctccgattcaagaacctccgagatgtgattccaggggaagaggattgcccgagggacggatttctaaaactgatcagagacatgaaccctaacgttttcctcagctcgacagtcaatggatctttcaacgcaccgttcttcaccacacggttcaaagaagctttgtttcactactcggcactctttgacttgtttggtgcgactctgtccaaagaaaacccggagaggatacatttcgaaggggagttttacgggagagaagtgatgaatgtgatagcatgtgaaggagtagatagagtggagagacctgagacgtacaagcaatggcaagtgaggatgataagggctggatttaaacagaagccagtggaggcagagcttgtgcagttatttagggaaaagatgaagaaatggggttatcataaagactttgtccttgatgaagatagtaattggttcttacaaggttggaaaggtcgcatcctcttctcttcttcttgttgggtcccttcttag

SEQ ID NO: 81835 - protein, 695 aa, Arabidopsis thaliana
  peptide (1)..(695): Ceres Seq. ID no. 12661579
  misc_feature (289)..(601): Pfam Name: GRAS family transcription factor Pfam Description: GRAS family transcription factor
  misc_feature (174)..(695): Homolog of NCBI NO: 15227022 NR Description: putative SCARECROW gene regulator; protein id: [Arabidopsis thaliana] >gi|7487873|pir||T02736 probable SCARECROW
  misc_feature (29)..(146): Homolog of NCBI NO: 15227022 NR Description: putative SCARECROW gene regulator; protein id: [Arabidopsis thaliana] >gi|7487873|pir||T02736 probable SCARECROW
  misc_feature (237)..(695): Homolog of NCBI NO: 15222433 NR Description: transcription factor scarecrow-like 14, putative;
  misc_feature (79)..(242): Homolog of NCBI NO: 15222433 NR Description: transcription factor scarecrow-like 14, putative;
  misc_feature (57)..(161): Homolog of NCBI NO: 15222433 NR Description: transcription factor scarecrow-like 14, putative;
  misc_feature (237)..(691): Homolog of NCBI NO: 8778540 NR Description: F22G5.9 [Arabidopsis thaliana]
  misc_feature (79)..(242): Homolog of NCBI NO: 8778540 NR Description: F22G5.9 [Arabidopsis thaliana]
  misc_feature (57)..(161): Homolog of NCBI NO: 8778540 NR Description: F22G5.9 [Arabidopsis thaliana]
  misc_feature (62)..(694): Homolog of NCBI NO: 15227022 NR Description: putative SCARECROW gene regulator; protein id: [Arabidopsis thaliana] >gi|7487873|pir||T02736 probable SCARECROW
  misc_feature (114)..(695): Homolog of NCBI NO: 38346720 NR Description: OSJNBa0086O06.18 [Oryza sativa (japonica
MESNYSGVVNGYDVSFLPTSIPDLGFGVPSSSDFDLRMDQYYHQPSIWVPDQDHHFSPPADEIDSENTLLKYVNQLLMEESLAEKQSIFYDSLALRQTEEMLQQVISDSQTQSSIPNNSITTSSSSNSGDYSNSSNSSVRIENEVLFDNKHLGDSGVVSFPGSNMLRGGEQFGQPANEILVRSMFSDAESVLQFKRGLEEASKFLPNTDQWIFNLEPEMERVVPVKVEEGWSAISKTRKNHHEREEEEDDLEEARRRSKQFAVNEEDGKLTEMFDKVLLLDGECDPQIIEDGENGSSKALVKKGRAKKKSRAVDFRTLLTLCAQSVSAGDKITADDLLRQIRKQCSPVGDASQRLAHFFANALEARLEGSTGTMIQSYYDSISSKKRTAAQILKSYSVFLSASPFMTLIYFFSNKMILDAAKDASVLHIVDFGILYGFQWPMFIQHLSKSNPGLRKLRITGIEIPQHGLRPTERIQDTGRRLTEYCKRFGVPFEYNAIASKNWETIKMEEFKIRPNEVLAVNAVLRFKNLRDVIPGEEDCPRDGFLKLIRDMNPNVFLSSTVNGSFNAPFFTTRFKEALFHYSALFDLFGATLSKENPERIHFEGEFYGREVMNVIACEGVDRVERPETYKQWQVRMIRAGFKQKPVEAELVQLFREKMKKWGYHKDFVLDEDSNWFLQGWKGRILFSSSCWVPS

SEQ ID NO: 81836 - protein, 658 aa, Arabidopsis thaliana
  peptide (1)..(658): Ceres Seq. ID no. 12661580
  misc_feature (252)..(564): Pfam Name: GRAS family transcription factor Pfam Description: GRAS family transcription factor
  misc_feature (137)..(658): Homolog of NCBI NO: 15227022 NR Description: putative SCARECROW gene regulator; protein id: [Arabidopsis thaliana] >gi|7487873|pir||T02736 probable SCARECROW
  misc_feature (1)..(109): Homolog of NCBI NO: 15227022 NR Description: putative SCARECROW gene regulator; protein id: [Arabidopsis thaliana] >gi|7487873|pir||T02736 probable SCARECROW
  misc_feature (200)..(658): Homolog of NCBI NO: 15222433 NR Description: transcription factor scarecrow-like 14, putative;
  misc_feature (42)..(205): Homolog of NCBI NO: 15222433 NR Description: transcription factor scarecrow-like 14, putative;
  misc_feature (20)..(124): Homolog of NCBI NO: 15222433 NR Description: transcription factor scarecrow-like 14, putative;
  misc_feature (200)..(654): Homolog of NCBI NO: 8778540 NR Description: F22G5.9 [Arabidopsis thaliana]
  misc_feature (42)..(205): Homolog of NCBI NO: 8778540 NR Description: F22G5.9 [Arabidopsis thaliana]
  misc_feature (20)..(124): Homolog of NCBI NO: 8778540 NR Description: F22G5.9 [Arabidopsis thaliana]
  misc_feature (25)..(657): Homolog of NCBI NO: 15227022 NR Description: putative SCARECROW gene regulator; protein id: [Arabidopsis thaliana] >gi|7487873|pir||T02736 probable SCARECROW
  misc_feature (77)..(658): Homolog of NCBI NO: 38346720 NR Description: OSJNBa0086O06.18 [Oryza sativa (japonica
MDQYYHQPSIWVPDQDHHFSPPADEIDSENTLLKYVNQLLMEESLAEKQSIFYDSLALRQTEEMLQQVISDSQTQSSIPNNSITTSSSSNSGDYSNSSNSSVRIENEVLFDNKHLGDSGVVSFPGSNMLRGGEQFGQPANEILVRSMFSDAESVLQFKRGLEEASKFLPNTDQWIFNLEPEMERVVPVKVEEGWSAISKTRKNHHEREEEEDDLEEARRRSKQFAVNEEDGKLTEMFDKVLLLDGECDPQIIEDGENGSSKALVKKGRAKKKSRAVDFRTLLTLCAQSVSAGDKITADDLLRQIRKQCSPVGDASQRLAHFFANALEARLEGSTGTMIQSYYDSISSKKRTAAQILKSYSVFLSASPFMTLIYFFSNKMILDAAKDASVLHIVDFGILYGFQWPMFIQHLSKSNPGLRKLRITGIEIPQHGLRPTERIQDTGRRLTEYCKRFGVPFEYNAIASKNWETIKMEEFKIRPNEVLAVNAVLRFKNLRDVIPGEEDCPRDGFLKLIRDMNPNVFLSSTVNGSFNAPFFTTRFKEALFHYSALFDLFGATLSKENPERIHFEGEFYGREVMNVIACEGVDRVERPETYKQWQVRMIRAGFKQKPVEAELVQLFREKMKKWGYHKDFVLDEDSNWFLQGWKGRILFSSSCWVPS

SEQ ID NO: 81837 - protein, 618 aa, Arabidopsis thaliana
  peptide (1)..(618): Ceres Seq. ID no. 12661581
  misc_feature (212)..(524): Pfam Name: GRAS family transcription factor Pfam Description: GRAS family transcription factor
  misc_feature (97)..(618): Homolog of NCBI NO: 15227022 NR Description: putative SCARECROW gene regulator; protein id: [Arabidopsis thaliana] >gi|7487873|pir||T02736 probable SCARECROW
  misc_feature (1)..(69): Homolog of NCBI NO: 15227022 NR Description: putative SCARECROW gene regulator; protein id: [Arabidopsis thaliana] >gi|7487873|pir||T02736 probable SCARECROW
  misc_feature (160)..(618): Homolog of NCBI NO: 15222433 NR Description: transcription factor scarecrow-like 14, putative;
  misc_feature (2)..(165): Homolog of NCBI NO: 15222433 NR Description: transcription factor scarecrow-like 14, putative;
  misc_feature (1)..(84): Homolog of NCBI NO: 15222433 NR Description: transcription factor scarecrow-like 14, putative;
  misc_feature (160)..(614): Homolog of NCBI NO: 8778540 NR Description: F22G5.9 [Arabidopsis thaliana]
  misc_feature (2)..(165): Homolog of NCBI NO: 8778540 NR Description: F22G5.9 [Arabidopsis thaliana]
  misc_feature (1)..(84): Homolog of NCBI NO: 8778540 NR Description: F22G5.9 [Arabidopsis thaliana]
  misc_feature (1)..(617): Homolog of NCBI NO: 15227022 NR Description: putative SCARECROW gene regulator; protein id: [Arabidopsis thaliana] >gi|7487873|pir||T02736 probable SCARECROW
  misc_feature (37)..(618): Homolog of NCBI NO: 38346720 NR Description: OSJNBa0086O06.18 [Oryza sativa (japonica
MEESLAEKQSIFYDSLALRQTEEMLQQVISDSQTQSSIPNNSITTSSSSNSGDYSNSSNSSVRIENEVLFDNKHLGDSGVVSFPGSNMLRGGEQFGQPANEILVRSMFSDAESVLQFKRGLEEASKFLPNTDQWIFNLEPEMERVVPVKVEEGWSAISKTRKNHHEREEEEDDLEEARRRSKQFAVNEEDGKLTEMFDKVLLLDGECDPQIIEDGENGSSKALVKKGRAKKKSRAVDFRTLLTLCAQSVSAGDKITADDLLRQIRKQCSPVGDASQRLAHFFANALEARLEGSTGTMIQSYYDSISSKKRTAAQILKSYSVFLSASPFMTLIYFFSNKMILDAAKDASVLHIVDFGILYGFQWPMFIQHLSKSNPGLRKLRITGIEIPQHGLRPTERIQDTGRRLTEYCKRFGVPFEYNAIASKNWETIKMEEFKIRPNEVLAVNAVLRFKNLRDVIPGEEDCPRDGFLKLIRDMNPNVFLSSTVNGSFNAPFFTTRFKEALFHYSALFDLFGATLSKENPERIHFEGEFYGREVMNVIACEGVDRVERPETYKQWQVRMIRAGFKQKPVEAELVQLFREKMKKWGYHKDFVLDEDSNWFLQGWKGRILFSSSCWVPS

SEQ ID NO: 81838 - DNA, 1632 bp, Arabidopsis thaliana
  misc_feature (1)..(1632): Ceres Seq. ID no. 12661589
  misc_feature: MA Experiment ID: 20000227 Result: Up-regulated in Transcription
  misc_feature: MA Experiment 20000227 PARAMETER Experiment Name: At_Root-Tips-vs-Tops_P Parameter: Tissue Value: Root Tips vs. Root Tops
atggaaggggaagaagacactgtggcgggttctagcataccaaagaagaaaatgatgaaacagctgacaggaaaacgcgacgacactctgcttcattcagcagtgagacacggaaacaaagacagagttgttgagattcttacgaaaaccagagagtctgagttgaatcagctgttggggaaacagaaccagtcaggcgaaaccgcactctatgttgcagcagagtatggtgatgtagagattgtcaaggagatgatcaactgctatgatcttgctctcgttgagatcaaagcaaggaacggatttgatgctttccacattgctgcaaagcaaggagatctcgatgtgttgaaggttttagcagaggctcattcggagttagcgatgacggtggatctatcaaacactacggcactgcacacagcggcaacacaaggacacactgaagtggtaaactttcttttggaactgggaagcagccttgctggaattgccaagagcaatggtaagacggccctgcactctgcatcaaggaacgggcatgtcaaagtcattaaggctctcttggcatccgaacctgcgatcgcaataaggatggacaagaagggccaaacagcccttcacatggcggttaaaggaacaaatgttgaggtcgtggaggaacttatcaaagcagataggtcttctatcaatatagccgacacaaagggaaacacagcgttgcacattgcagcccgaaaaggcagatctcagattgtcaagttgctattagccaacaacatgacagacacaaaagctgttaaccgatcaggcgaaaccgcacttgacacagcagagaaaattggaaatccagaagtggctcttattttacagaaacatggtgttcccagcgccaagaccattaagccatccgggcctaaccccgctcgggaactgaaacaaaccgtaagcgatatcaagcatgaggttcacaatcagcttgagcacacacgcctgaccagaaaacgtgttcaaggaatcgccaaacagcttaacaaaatgcacactgaaggtcttaacaatgcaatcaactcgactactgttgtagctgttcttattgccacggtcgcttttgcagcaattttcactgtcccggggcagtatgtagaagacacaagtaaaattccagatgggcattccctcggggaggcgaatattgcatcgacgactccgttcataattttcttcatctttgattcgatcgcactcttcatctccttagcggtcgtggtggttcagacatcagtggtggtaatagagagcaaggccaagaaacagatgatggctgtgataaacaaactcatgtggcttgcctgtgttctcatctctgttgcctttttggctttgtcgtttgttgttgttggtgaagaagagaagtggctagccatttgggtgactgctatcggggcaactataatgattacgacgttagggacgatgtgctactggataatacagcacaagatcgaagctgccaatttaagaaacattagaagatcctccatcaacagtatatctggatcctgggggattccccagcttacggattctgatattctccagaacgagtgtaagaaaatgtatgcaatctga

SEQ ID NO: 81839 - protein, 543 aa, Arabidopsis thaliana
  peptide (1)..(543): Ceres Seq. ID no. 12661590
  misc_feature (236)..(269): Pfam Name: Ankyrin repeat Pfam Description: Ankyrin repeat
  misc_feature (1)..(543): Homolog of NCBI NO: 15222993 NR Description: hypothetical protein; protein id: At1g07710.1
  misc_feature (9)..(543): Homolog of NCBI NO: 15238604 NR Description: ankyrin-like protein; protein id: At5g60070.1
  misc_feature (9)..(543): Homolog of NCBI NO: 24796797 NR Description: putative ankyrin repeat containing protein [Oryza
  misc_feature (15)..(543): Homolog of NCBI NO: 30679697 NR Description: ankyrin repeat protein family [Arabidopsis
  misc_feature (18)..(543): Homolog of NCBI NO: 11357168 NR Description: ankyrin-like protein - Arabidopsis thaliana
  misc_feature (11)..(543): Homolog of NCBI NO: 15225141 NR Description: ankyrin-like protein; protein id: At2g31820.1
  misc_feature (15)..(543): Homolog of NCBI NO: 15220595 NR Description: unknown protein; protein id: At1g05640.1
  misc_feature (7)..(543): Homolog of NCBI NO: 34908074 NR Description: P0506B12.26 [Oryza sativa (japonica
  misc_feature (15)..(532): Homolog of NCBI NO: 15230470 NR Description: ankyrin-like protein; protein id: At3g12360.1
  misc_feature (53)..(522): Homolog of NCBI NO: 18379277 NR Description: expressed protein; protein id: At2g01680.1, by cDNA: 121540. [Arabidopsis thaliana] >gi|25410921|pir||G84427
MEGEEDTVAGSSIPKKKMMKQLTGKRDDTLLHSAVRHGNKDRVVEILTKTRESELNQLLGKQNQSGETALYVAAEYGDVEIVKEMINCYDLALVEIKARNGFDAFHIAAKQGDLDVLKVLAEAHSELAMTVDLSNTTALHTAATQGHTEVVNFLLELGSSLAGIAKSNGKTALHSASRNGHVKVIKALLASEPAIAIRMDKKGQTALHMAVKGTNVEVVEELIKADRSSINIADTKGNTALHIAARKGRSQIVKLLLANNMTDTKAVNRSGETALDTAEKIGNPEVALILQKHGVPSAKTIKPSGPNPARELKQTVSDIKHEVHNQLEHTRLTRKRVQGIAKQLNKMHTEGLNNAINSTTVVAVLIATVAFAAIFTVPGQYVEDTSKIPDGHSLGEANIASTTPFIIFFIFDSIALFISLAVVVVQTSVVVIESKAKKQMMAVINKLMWLACVLISVAFLALSFVVVGEEEKWLAIWVTAIGATIMITTLGTMCYWIIQHKIEAANLRNIRRSSINSISGSWGIPQLTDSDILQNECKKMYAI

SEQ ID NO: 81840 - protein, 526 aa, Arabidopsis thaliana
  peptide (1)..(526): Ceres Seq. ID no. 12661591
  misc_feature (219)..(252): Pfam Name: Ankyrin repeat Pfam Description: Ankyrin repeat
  misc_feature (1)..(526): Homolog of NCBI NO: 15222993 NR Description: hypothetical protein; protein id: At1g07710.1
  misc_feature (1)..(526): Homolog of NCBI NO: 15238604 NR Description: ankyrin-like protein; protein id: At5g60070.1
  misc_feature (1)..(526): Homolog of NCBI NO: 24796797 NR Description: putative ankyrin repeat containing protein [Oryza
  misc_feature (1)..(526): Homolog of NCBI NO: 30679697 NR Description: ankyrin repeat protein family [Arabidopsis
  misc_feature (1)..(526): Homolog of NCBI NO: 11357168 NR Description: ankyrin-like protein - Arabidopsis thaliana
  misc_feature (1)..(526): Homolog of NCBI NO: 15225141 NR Description: ankyrin-like protein; protein id: At2g31820.1
  misc_feature (1)..(526): Homolog of NCBI NO: 15220595 NR Description: unknown protein; protein id: At1g05640.1
  misc_feature (1)..(526): Homolog of NCBI NO: 34908074 NR Description: P0506B12.26 [Oryza sativa (japonica
  misc_feature (1)..(515): Homolog of NCBI NO: 15230470 NR Description: ankyrin-like protein; protein id: At3g12360.1
  misc_feature (36)..(505): Homolog of NCBI NO: 18379277 NR Description: expressed protein; protein id: At2g01680.1, by cDNA: 121540. [Arabidopsis thaliana] >gi|25410921|pir||G84427
MMKQLTGKRDDTLLHSAVRHGNKDRVVEILTKTRESELNQLLGKQNQSGETALYVAAEYGDVEIVKEMINCYDLALVEIKARNGFDAFHIAAKQGDLDVLKVLAEAHSELAMTVDLSNTTALHTAATQGHTEVVNFLLELGSSLAGIAKSNGKTALHSASRNGHVKVIKALLASEPAIAIRMDKKGQTALHMAVKGTNVEVVEELIKADRSSINIADTKGNTALHIAARKGRSQIVKLLLANNMTDTKAVNRSGETALDTAEKIGNPEVALILQKHGVPSAKTIKPSGPNPARELKQTVSDIKHEVHNQLEHTRLTRKRVQGIAKQLNKMHTEGLNNAINSTTVVAVLIATVAFAAIFTVPGQYVEDTSKIPDGHSLGEANIASTTPFIIFFIFDSIALFISLAVVVVQTSVVVIESKAKKQMMAVINKLMWLACVLISVAFLALSFVVVGEEEKWLAIWVTAIGATIMITTLGTMCYWIIQHKIEAANLRNIRRSSINSISGSWGIPQLTDSDILQNECKKMYAI

SEQ ID NO: 81841 - protein, 525 aa, Arabidopsis thaliana
  peptide (1)..(525): Ceres Seq. ID no. 12661592
  misc_feature (218)..(251): Pfam Name: Ankyrin repeat Pfam Description: Ankyrin repeat
  misc_feature (1)..(525): Homolog of NCBI NO: 15222993 NR Description: hypothetical protein; protein id: At1g07710.1
  misc_feature (1)..(525): Homolog of NCBI NO: 15238604 NR Description: ankyrin-like protein; protein id: At5g60070.1
  misc_feature (1)..(525): Homolog of NCBI NO: 24796797 NR Description: putative ankyrin repeat containing protein [Oryza
  misc_feature (1)..(525): Homolog of NCBI NO: 30679697 NR Description: ankyrin repeat protein family [Arabidopsis
  misc_feature (1)..(525): Homolog of NCBI NO: 11357168 NR Description: ankyrin-like protein - Arabidopsis thaliana
  misc_feature (1)..(525): Homolog of NCBI NO: 15225141 NR Description: ankyrin-like protein; protein id: At2g31820.1
  misc_feature (1)..(525): Homolog of NCBI NO: 15220595 NR Description: unknown protein; protein id: At1g05640.1
  misc_feature (1)..(525): Homolog of NCBI NO: 34908074 NR Description: P0506B12.26 [Oryza sativa (japonica
  misc_feature (1)..(514): Homolog of NCBI NO: 15230470 NR Description: ankyrin-like protein; protein id: At3g12360.1
  misc_feature (35)..(504): Homolog of NCBI NO: 18379277 NR Description: expressed protein; protein id: At2g01680.1, by cDNA: 121540. [Arabidopsis thaliana] >gi|25410921|pir||G84427
MKQLTGKRDDTLLHSAVRHGNKDRVVEILTKTRESELNQLLGKQNQSGETALYVAAEYGDVEIVKEMINCYDLALVEIKARNGFDAFHIAAKQGDLDVLKVLAEAHSELAMTVDLSNTTALHTAATQGHTEVVNFLLELGSSLAGIAKSNGKTALHSASRNGHVKVIKALLASEPAIAIRMDKKGQTALHMAVKGTNVEVVEELIKADRSSINIADTKGNTALHIAARKGRSQIVKLLLANNMTDTKAVNRSGETALDTAEKIGNPEVALILQKHGVPSAKTIKPSGPNPARELKQTVSDIKHEVHNQLEHTRLTRKRVQGIAKQLNKMHTEGLNNAINSTTVVAVLIATVAFAAIFTVPGQYVEDTSKIPDGHSLGEANIASTTPFIIFFIFDSIALFISLAVVVVQTSVVVIESKAKKQMMAVINKLMWLACVLISVAFLALSFVVVGEEEKWLAIWVTAIGATIMITTLGTMCYWIIQHKIEAANLRNIRRSSINSISGSWGIPQLTDSDILQNECKKMYAI

SEQ ID NO: 81842 - DNA, 1059 bp, Arabidopsis thaliana
  misc_feature (1)..(1059): Ceres Seq. ID no. 12661655
  misc_feature: MA Experiment ID: 20000180 Result: Up-regulated in Transcription
  misc_feature: MA Experiment 20000180 PARAMETER Experiment Name: At_Germinating_Seeds_P Parameter: Age (hr) Value: 24 vs. 0
  misc_feature: MA Experiment 20000180 PARAMETER Experiment Name: At_Germinating_Seeds_P Parameter: Tissue Value: Germinating Seeds
  misc_feature: MA Experiment ID: 20000495 Result: Down-regulated in Transcription
  misc_feature: MA Experiment 20000495 PARAMETER Experiment Name: At_Guard_Cells_P Parameter: Harvest Date Value: 8/2/2002
  misc_feature: MA Experiment 20000495 PARAMETER Experiment Name: At_Guard_Cells_P Parameter: Organism Value: A. thaliana
  misc_feature: MA Experiment 20000495 PARAMETER Experiment Name: At_Guard_Cells_P Parameter: Tissue Value: Guard Cells vs. Leaves
  misc_feature: MA Experiment ID: 20001451 Result: Down-regulated in Transcription
  misc_feature: MA Experiment 20001451 PARAMETER Experiment Name: At_Far-red-induction_P Parameter: Age (day) Value: 7
  misc_feature: MA Experiment 20001451 PARAMETER Experiment Name: At_Far-red-induction_P Parameter: Light Value: Far-red vs. White
  misc_feature: MA Experiment 20001451 PARAMETER Experiment Name: At_Far-red-induction_P Parameter: Organism Value: A. thaliana
  misc_feature: MA Experiment 20001451 PARAMETER Experiment Name: At_Far-red-induction_P Parameter: Plant Line Value: Columbia
  misc_feature: MA Experiment 20001451 PARAMETER Experiment Name: At_Far-red-induction_P Parameter: Timepoint (hr) Value: 24
  misc_feature: MA Experiment 20001451 PARAMETER Experiment Name: At_Far-red-induction_P Parameter: Tissue Value: Whole Plant
atgtcggttcctcctagattccggtccgtaaattccgatgagcgagagttccgatcagttcttggtcctaccgggaacaagctgcagaggaaaccaccggggatgaaactggagaagccgatgatggagaagaccatcatcgactcaaaagatgagaaagcgaagaaaccaactactccggcttcaccaaggacgactctgaagcaatgctcgtctctttgctcttcgattttgagaaagaatagtgcttcaatgactgcttcgtattcctctgatgcttcgtcttcgtgtgagtcatcgcctttgagcgtggcgtcttcttcgagctgtaagaaggttgtgaggcgaagtgggtctgtctcttctacaaggaagctgagtgttgggaaagaagaagagaaggtttctggtgattgcttcgctgatggtcgtaaaaggtgtgcttggatcacacctaaagctgacccgtgctatgttgctttccatgacgaagaatggggagttcctgtacatgacgacaagaagctttttgagttattatgcctctctggtgctctagccgaactctcatggaccgacattctctccagaagacatatactcagggaagtttttatggacttcgatccagtcgctgtagctgaattgaatgacaaaaagttaacagcgccaggtactgctgccatttccttactatcagaggtcaagatacgatcaatcctcgataactcacgccatgtgcgcaagattatagctgaatgtggatcattgaagaagtacatgtggaactttgtgaacaacaagcctacacagagccaattcaggtatcagcgccaagtccctgtgaagacatcgaaagctgagtttataagcaaagatcttgtacgcagaggctttcgcagcgttagtccaacagttatttactccttcatgcaagcagctggactcacgaatgatcatctcataggctgcttcagataccaagactgttgcgtagatgcagagacaacaacaacaacgaaggcgaagaagaagaacgagagagagagtgataaataa

SEQ ID NO: 81843 - protein, 352 aa, Arabidopsis thaliana
  peptide (1)..(352): Ceres Seq. ID no. 12661656
  misc_feature (149)..(329): Pfam Name: Methyladenine glycosylase Pfam Description: Methyladenine glycosylase
  misc_feature (1)..(352): Homolog of NCBI NO: 15218379 NR Description: hypothetical protein; protein id: At1g15970.1
  misc_feature (1)..(336): Homolog of NCBI NO: 15220860 NR Description: DNA-3-methyladenine glycosidase, putative; id: At1g80850.1 [Arabidopsis thaliana] >gi|25406698|pir||B96841
  misc_feature (1)..(335): Homolog of NCBI NO: 15242914 NR Description: putative protein; protein id: At5g57970.1
  misc_feature (77)..(352): Homolog of NCBI NO: 38345034 NR Description: OSJNBa0029H02.18 [Oryza sativa (japonica
  misc_feature (49)..(338): Homolog of NCBI NO: 18410766 NR Description: putative DNA-3-methyladenine glycosylase I; id: At1g75090.1, supported by cDNA: gi_14334651, supported by gi_17104586 [Arabidopsis thaliana] >gi|14334652|gb|AAK59504.1|
  misc_feature (150)..(338): Homolog of NCBI NO: 25406407 NR Description: hypothetical protein F9E10.6 [imported] -
  misc_feature (26)..(330): Homolog of NCBI NO: 15241554 NR Description: putative protein; protein id: At5g44680.1, by cDNA: 29551. [Arabidopsis thaliana]
  misc_feature (145)..(330): Homolog of NCBI NO: 18399721 NR Description: expressed protein; protein id: At3g12710.1,
  misc_feature (26)..(330): Homolog of NCBI NO: 21592537 NR Description: unknown [Arabidopsis thaliana]
  misc_feature (145)..(330): Homolog of NCBI NO: 21536975 NR Description: unknown [Arabidopsis thaliana]
MSVPPRFRSVNSDEREFRSVLGPTGNKLQRKPPGMKLEKPMMEKTIIDSKDEKAKKPTTPASPRTTLKQCSSLCSSILRKNSASMTASYSSDASSSCESSPLSVASSSSCKKVVRRSGSVSSTRKLSVGKEEEKVSGDCFADGRKRCAWITPKADPCYVAFHDEEWGVPVHDDKKLFELLCLSGALAELSWTDILSRRHILREVFMDFDPVAVAELNDKKLTAPGTAAISLLSEVKIRSILDNSRHVRKIIAECGSLKKYMWNFVNNKPTQSQFRYQRQVPVKTSKAEFISKDLVRRGFRSVSPTVIYSFMQAAGLTNDHLIGCFRYQDCCVDAETTTTTKAKKKNERESDK

SEQ ID NO: 81844 - protein, 318 aa, Arabidopsis thaliana
  peptide (1)..(318): Ceres Seq. ID no. 12661657
  misc_feature (115)..(295): Pfam Name: Methyladenine glycosylase Pfam Description: Methyladenine glycosylase
  misc_feature (1)..(318): Homolog of NCBI NO: 15218379 NR Description: hypothetical protein; protein id: At1g15970.1
  misc_feature (1)..(302): Homolog of NCBI NO: 15220860 NR Description: DNA-3-methyladenine glycosidase, putative; id: At1g80850.1 [Arabidopsis thaliana] >gi|25406698|pir||B96841
  misc_feature (1)..(301): Homolog of NCBI NO: 15242914 NR Description: putative protein; protein id: At5g57970.1
  misc_feature (43)..(318): Homolog of NCBI NO: 38345034 NR Description: OSJNBa0029H02.18 [Oryza sativa (japonica
  misc_feature (15)..(304): Homolog of NCBI NO: 18410766 NR Description: putative DNA-3-methyladenine glycosylase I; id: At1g75090.1, supported by cDNA: gi_14334651, supported by gi_17104586 [Arabidopsis thaliana] >gi|14334652|gb|AAK59504.1|
  misc_feature (116)..(304): Homolog of NCBI NO: 25406407 NR Description: hypothetical protein F9E10.6 [imported] -
  misc_feature (1)..(296): Homolog of NCBI NO: 15241554 NR Description: putative protein; protein id: At5g44680.1, by cDNA: 29551. [Arabidopsis thaliana]
  misc_feature (111)..(296): Homolog of NCBI NO: 18399721 NR Description: expressed protein; protein id: At3g12710.1,
  misc_feature (1)..(296): Homolog of NCBI NO: 21592537 NR Description: unknown [Arabidopsis thaliana]
  misc_feature (111)..(296): Homolog of NCBI NO: 21536975 NR Description: unknown [Arabidopsis thaliana]
MKLEKPMMEKTIIDSKDEKAKKPTTPASPRTTLKQCSSLCSSILRKNSASMTASYSSDASSSCESSPLSVASSSSCKKVVRRSGSVSSTRKLSVGKEEEKVSGDCFADGRKRCAWITPKADPCYVAFHDEEWGVPVHDDKKLFELLCLSGALAELSWTDILSRRHILREVFMDFDPVAVAELNDKKLTAPGTAAISLLSEVKIRSILDNSRHVRKIIAECGSLKKYMWNFVNNKPTQSQFRYQRQVPVKTSKAEFISKDLVRRGFRSVSPTVIYSFMQAAGLTNDHLIGCFRYQDCCVDAETTTTTKAKKKNERESDK

SEQ ID NO: 81845 - protein, 312 aa, Arabidopsis thaliana
  peptide (1)..(312): Ceres Seq. ID no. 12661658
  misc_feature (109)..(289): Pfam Name: Methyladenine glycosylase Pfam Description: Methyladenine glycosylase
  misc_feature (1)..(312): Homolog of NCBI NO: 15218379 NR Description: hypothetical protein; protein id: At1g15970.1
  misc_feature (1)..(296): Homolog of NCBI NO: 15220860 NR Description: DNA-3-methyladenine glycosidase, putative; id: At1g80850.1 [Arabidopsis thaliana] >gi|25406698|pir||B96841
  misc_feature (1)..(295): Homolog of NCBI NO: 15242914 NR Description: putative protein; protein id: At5g57970.1
  misc_feature (37)..(312): Homolog of NCBI NO: 38345034 NR Description: OSJNBa0029H02.18 [Oryza sativa (japonica
  misc_feature (9)..(298): Homolog of NCBI NO: 18410766 NR Description: putative DNA-3-methyladenine glycosylase I; id: At1g75090.1, supported by cDNA: gi_14334651, supported by gi_17104586 [Arabidopsis thaliana] >gi|14334652|gb|AAK59504.1|
  misc_feature (110)..(298): Homolog of NCBI NO: 25406407 NR Description: hypothetical protein F9E10.6 [imported] -
  misc_feature (1)..(290): Homolog of NCBI NO: 15241554 NR Description: putative protein; protein id: At5g44680.1, by cDNA: 29551. [Arabidopsis thaliana]
  misc_feature (105)..(290): Homolog of NCBI NO: 18399721 NR Description: expressed protein; protein id: At3g12710.1,
  misc_feature (1)..(290): Homolog of NCBI NO: 21592537 NR Description: unknown [Arabidopsis thaliana]
  misc_feature (105)..(290): Homolog of NCBI NO: 21536975 NR Description: unknown [Arabidopsis thaliana]
MMEKTIIDSKDEKAKKPTTPASPRTTLKQCSSLCSSILRKNSASMTASYSSDASSSCESSPLSVASSSSCKKVVRRSGSVSSTRKLSVGKEEEKVSGDCFADGRKRCAWITPKADPCYVAFHDEEWGVPVHDDKKLFELLCLSGALAELSWTDILSRRHILREVFMDFDPVAVAELNDKKLTAPGTAAISLLSEVKIRSILDNSRHVRKIIAECGSLKKYMWNFVNNKPTQSQFRYQRQVPVKTSKAEFISKDLVRRGFRSVSPTVIYSFMQAAGLTNDHLIGCFRYQDCCVDAETTTTTKAKKKNERESDK

SEQ ID NO: 81846 - DNA, 2163 bp, Arabidopsis thaliana
  misc_feature (1)..(2163): Ceres Seq. ID no. 12661695
  misc_feature: MA Experiment ID: 20000182 Result: Up-regulated in Transcription
  misc_feature: MA Experiment 20000182 PARAMETER Experiment Name: At_2mM_SA_P Parameter: Age (day) Value: 14
  misc_feature: MA Experiment 20000182 PARAMETER Experiment Name: At_2mM_SA_P Parameter: Organism Value: A. thaliana
  misc_feature: MA Experiment 20000182 PARAMETER Experiment Name: At_2mM_SA_P Parameter: Plant Line Value: WS
  misc_feature: MA Experiment 20000182 PARAMETER Experiment Name: At_2mM_SA_P Parameter: Timepoint (hr) Value: 6
  misc_feature: MA Experiment 20000182 PARAMETER Experiment Name: At_2mM_SA_P Parameter: Tissue Value: Aerial
  misc_feature: MA Experiment 20000182 PARAMETER Experiment Name: At_2mM_SA_P Parameter: Treatment Value: 2mM SA vs. No Treatment
  misc_feature: MA Experiment ID: 20000184 Result: Down-regulated in Transcription
  misc_feature: MA Experiment 20000184 PARAMETER Experiment Name: At_Shoots__P Parameter: Age (day) Value: 7
  misc_feature: MA Experiment 20000184 PARAMETER Experiment Name: At_Shoots__P Parameter: Tissue Value: Shoots vs. Whole Plant
  misc_feature: MA Experiment ID: 20000185 Result: Down-regulated in Transcription
  misc_feature: MA Experiment 20000185 PARAMETER Experiment Name: At_Roots__P Parameter: Age (day) Value: 7 vs. 21
  misc_feature: MA Experiment 20000185 PARAMETER Experiment Name: At_Roots__P Parameter: Organism Value: A. thaliana
  misc_feature: MA Experiment 20000185 PARAMETER Experiment Name: At_Roots__P Parameter: Tissue Value: Roots vs. Whole Plant
  misc_feature: MA Experiment ID: 20000264 Result: Down-regulated in Transcription
  misc_feature: MA Experiment 20000264 PARAMETER Experiment Name: At_Open_Flower_P Parameter: Age (day) Value: 21
  misc_feature: MA Experiment 20000264 PARAMETER Experiment Name: At_Open_Flower_P Parameter: Plant Line Value: WS
  misc_feature: MA Experiment 20000264 PARAMETER Experiment Name: At_Open_Flower_P Parameter: Tissue Value: Open Flower vs. Whole Plant
  misc_feature: MA Experiment ID: 20000265 Result: Down-regulated in Transcription
  misc_feature: MA Experiment 20000265 PARAMETER Experiment Name: At_Open_Flower_P Parameter: Age (day) Value: 21
  misc_feature: MA Experiment 20000265 PARAMETER Experiment Name: At_Open_Flower_P Parameter: Plant Line Value: WS
  misc_feature: MA Experiment 20000265 PARAMETER Experiment Name: At_Open_Flower_P Parameter: Tissue Value: Closed Flower vs. Whole Plant
  misc_feature: MA Experiment ID: 20000437 Result: Down-regulated in Transcription
  misc_feature: MA Experiment 20000437 PARAMETER Experiment Name: At_Drought_P Parameter: Age (day) Value: 8
  misc_feature: MA Experiment 20000437 PARAMETER Experiment Name: At_Drought_P Parameter: Organism Value: A. thaliana
  misc_feature: MA Experiment 20000437 PARAMETER Experiment Name: At_Drought_P Parameter: Plant Line Value: WS
  misc_feature: MA Experiment 20000437 PARAMETER Experiment Name: At_Drought_P Parameter: Timepoint (hr) Value: 24
  misc_feature: MA Experiment 20000437 PARAMETER Experiment Name: At_Drought_P Parameter: Tissue Value: Whole Plant
  misc_feature: MA Experiment 20000437 PARAMETER Experiment Name: At_Drought_P Parameter: Treatment Value: Drought vs. No Drought
  misc_feature: MA Experiment ID: 20000439 Result: Down-regulated in Transcription
  misc_feature: MA Experiment 20000439 PARAMETER Experiment Name: At_Roots__P Parameter: Age (day) Value: 14 vs. 21
  misc_feature: MA Experiment 20000439 PARAMETER Experiment Name: At_Roots__P Parameter: Organism Value: A. thaliana
  misc_feature: MA Experiment 20000439 PARAMETER Experiment Name: At_Roots__P Parameter: Tissue Value: Roots vs. Whole Plant
  misc_feature: MA Experiment ID: 20000573 Result: Down-regulated in Transcription
  misc_feature: MA Experiment 20000573 PARAMETER Experiment Name: At_100uM_ABA_Mutants__P Parameter: Organism Value: A. thaliana
  misc_feature: MA Experiment 20000573 PARAMETER Experiment Name: At_100uM_ABA_Mutants__P Parameter: Plant Line Value: CS22 vs. Ler wt
  misc_feature: MA Experiment 20000573 PARAMETER Experiment Name: At_100uM_ABA_Mutants__P Parameter: Timepoint (hr) Value: N/A
  misc_feature: MA Experiment 20000573 PARAMETER Experiment Name: At_100uM_ABA_Mutants__P Parameter: Tissue Value: Whole Plant
  misc_feature: MA Experiment 20000573 PARAMETER Experiment Name: At_100uM_ABA_Mutants__P Parameter: Treatment Value: None
  misc_feature: MA Experiment ID: 20000574 Result: Down-regulated in Transcription
  misc_feature: MA Experiment 20000574 PARAMETER Experiment Name: At_100uM_ABA_Mutants__P Parameter: Organism Value: A. thaliana
  misc_feature: MA Experiment 20000574 PARAMETER Experiment Name: At_100uM_ABA_Mutants__P Parameter: Plant Line Value: CS23 vs. Ler wt
  misc_feature: MA Experiment 20000574 PARAMETER Experiment Name: At_100uM_ABA_Mutants__P Parameter: Timepoint (hr) Value: N/A
  misc_feature: MA Experiment 20000574 PARAMETER Experiment Name: At_100uM_ABA_Mutants__P Parameter: Tissue Value: Whole Plant
  misc_feature: MA Experiment 20000574 PARAMETER Experiment Name: At_100uM_ABA_Mutants__P Parameter: Treatment Value: None
  misc_feature: MA Experiment ID: 20000794 Result: Down-regulated in Transcription
  misc_feature: MA Experiment 20000794 PARAMETER Experiment Name: At_Petals_P Parameter: Age (day) Value: 23-25 days
  misc_feature: MA Experiment 20000794 PARAMETER Experiment Name: At_Petals_P Parameter: Plant Line Value: WS
  misc_feature: MA Experiment 20000794 PARAMETER Experiment Name: At_Petals_P Parameter: Tissue Value: Petals vs. Whole plant
  misc_feature: MA Experiment ID: 20001248 Result: Down-regulated in Transcription
  misc_feature: MA Experiment 20001248 PARAMETER Experiment Name: At_Far-red-induction_P Parameter: Age (day) Value: 7
  misc_feature: MA Experiment 20001248 PARAMETER Experiment Name: At_Far-red-induction_P Parameter: Light Value: Far-red vs. White
  misc_feature: MA Experiment 20001248 PARAMETER Experiment Name: At_Far-red-induction_P Parameter: Organism Value: A. thaliana
  misc_feature: MA Experiment 20001248 PARAMETER Experiment Name: At_Far-red-induction_P Parameter: Plant Line Value: Columbia
  misc_feature: MA Experiment 20001248 PARAMETER Experiment Name: At_Far-red-induction_P Parameter: Timepoint (hr) Value: 4
  misc_feature: MA Experiment 20001248 PARAMETER Experiment Name: At_Far-red-induction_P Parameter: Tissue Value: Whole Plant
  misc_feature: MA Experiment ID: 20001554 Result: Down-regulated in Transcription
  misc_feature: MA Experiment 20001554 PARAMETER Experiment Name: At_Drought_Soil_Dry_P Parameter: Age (day) Value: 21
  misc_feature: MA Experiment 20001554 PARAMETER Experiment Name: At_Drought_Soil_Dry_P Parameter: Organism Value: A. thaliana
  misc_feature: MA Experiment 20001554 PARAMETER Experiment Name: At_Drought_Soil_Dry_P Parameter: Plant Line Value: WS
  misc_feature: MA Experiment 20001554 PARAMETER Experiment Name: At_Drought_Soil_Dry_P Parameter: Post Timepoint (hr) Value: None
  misc_feature: MA Experiment 20001554 PARAMETER Experiment Name: At_Drought_Soil_Dry_P Parameter: Post-Treatment Value: None
  misc_feature: MA Experiment 20001554 PARAMETER Experiment Name: At_Drought_Soil_Dry_P Parameter: Timepoint (day) Value: 7
  misc_feature: MA Experiment 20001554 PARAMETER Experiment Name: At_Drought_Soil_Dry_P Parameter: Treatment Value: Drought vs. No Drought
  misc_feature: MA Experiment ID: 20001555 Result: Down-regulated in Transcription
  misc_feature: MA Experiment 20001555 PARAMETER Experiment Name: At_Drought_Soil_Dry_P Parameter: Age (day) Value: 24
  misc_feature: MA Experiment 20001555 PARAMETER Experiment Name: At_Drought_Soil_Dry_P Parameter: Organism Value: A. thaliana
  misc_feature: MA Experiment 20001555 PARAMETER Experiment Name: At_Drought_Soil_Dry_P Parameter: Plant Line Value: WS
  misc_feature: MA Experiment 20001555 PARAMETER Experiment Name: At_Drought_Soil_Dry_P Parameter: Post Timepoint (hr) Value: None
  misc_feature: MA Experiment 20001555 PARAMETER Experiment Name: At_Drought_Soil_Dry_P Parameter: Post-Treatment Value: None
  misc_feature: MA Experiment 20001555 PARAMETER Experiment Name: At_Drought_Soil_Dry_P Parameter: Timepoint (day) Value: 10
  misc_feature: MA Experiment 20001555 PARAMETER Experiment Name: At_Drought_Soil_Dry_P Parameter: Treatment Value: Drought vs. No Drought
  misc_feature: MA Experiment ID: 20001556 Result: Down-regulated in Transcription
  misc_feature: MA Experiment 20001556 PARAMETER Experiment Name: At_Drought_Soil_Dry_P Parameter: Age (day) Value: 26
  misc_feature: MA Experiment 20001556 PARAMETER Experiment Name: At_Drought_Soil_Dry_P Parameter: Organism Value: A. thaliana
  misc_feature: MA Experiment 20001556 PARAMETER Experiment Name: At_Drought_Soil_Dry_P Parameter: Plant Line Value: WS
  misc_feature: MA Experiment 20001556 PARAMETER Experiment Name: At_Drought_Soil_Dry_P Parameter: Post Timepoint (hr) Value: None
  misc_feature: MA Experiment 20001556 PARAMETER Experiment Name: At_Drought_Soil_Dry_P Parameter: Post-Treatment Value: None
  misc_feature: MA Experiment 20001556 PARAMETER Experiment Name: At_Drought_Soil_Dry_P Parameter: Timepoint (day) Value: 12
  misc_feature: MA Experiment 20001556 PARAMETER Experiment Name: At_Drought_Soil_Dry_P Parameter: Treatment Value: Drought vs. No Drought
  misc_feature: MA Experiment ID: 20001557 Result: Down-regulated in Transcription
  misc_feature: MA Experiment 20001557 PARAMETER Experiment Name: At_Drought_Soil_Dry_P Parameter: Age (day) Value: 27
  misc_feature: MA Experiment 20001557 PARAMETER Experiment Name: At_Drought_Soil_Dry_P Parameter: Organism Value: A. thaliana
  misc_feature: MA Experiment 20001557 PARAMETER Experiment Name: At_Drought_Soil_Dry_P Parameter: Plant Line Value: WS
  misc_feature: MA Experiment 20001557 PARAMETER Experiment Name: At_Drought_Soil_Dry_P Parameter: Post Timepoint (hr) Value: 3
  misc_feature: MA Experiment 20001557 PARAMETER Experiment Name: At_Drought_Soil_Dry_P Parameter: Post-Treatment Value: Re-Water vs. No Drought
  misc_feature: MA Experiment 20001557 PARAMETER Experiment Name: At_Drought_Soil_Dry_P Parameter: Timepoint (day) Value: 13
  misc_feature: MA Experiment 20001557 PARAMETER Experiment Name: At_Drought_Soil_Dry_P Parameter: Treatment Value: Drought vs. No Drought
  misc_feature: MA Experiment ID: 20001560 Result: Down-regulated in Transcription
  misc_feature: MA Experiment 20001560 PARAMETER Experiment Name: At_Drought_Soil_Dry_P Parameter: Age (day) Value: 28
  misc_feature: MA Experiment 20001560 PARAMETER Experiment Name: At_Drought_Soil_Dry_P Parameter: Organism Value: A. thaliana
  misc_feature: MA Experiment 20001560 PARAMETER Experiment Name: At_Drought_Soil_Dry_P Parameter: Plant Line Value: WS
  misc_feature: MA Experiment 20001560 PARAMETER Experiment Name: At_Drought_Soil_Dry_P Parameter: Post Timepoint (hr) Value: None
  misc_feature: MA Experiment 20001560 PARAMETER Experiment Name: At_Drought_Soil_Dry_P Parameter: Post-Treatment Value: None
  misc_feature: MA Experiment 20001560 PARAMETER Experiment Name: At_Drought_Soil_Dry_P Parameter: Timepoint (day) Value: 14
  misc_feature: MA Experiment 20001560 PARAMETER Experiment Name: At_Drought_Soil_Dry_P Parameter: Treatment Value: Drought vs. No Drought
  misc_feature: MA Experiment ID: 20001904 Result: Down-regulated in Transcription
  misc_feature: MA Experiment 20001904 PARAMETER Experiment Name: At_Drought_Reproduction_P Parameter: Age (day) Value: 37
  misc_feature: MA Experiment 20001904 PARAMETER Experiment Name: At_Drought_Reproduction_P Parameter: Organism Value: A. thaliana
  misc_feature: MA Experiment 20001904 PARAMETER Experiment Name: At_Drought_Reproduction_P Parameter: Plant Line Value: WS
  misc_feature: MA Experiment 20001904 PARAMETER Experiment Name: At_Drought_Reproduction_P Parameter: Timepoint (day) Value: 7
  misc_feature: MA Experiment 20001904 PARAMETER Experiment Name: At_Drought_Reproduction_P Parameter: Tissue Value: Rosettes
  misc_feature: MA Experiment 20001904 PARAMETER Experiment Name: At_Drought_Reproduction_P Parameter: Treatment Value: Drought vs. No Drought
atgggtgttgatgtgaaacgtttccttgttgttatgcttctgttgcgaatctgtgaatacgcagctgcttctacttttcctcttgcacttcgtaattgcagtgaccattgcggaaatgttagtgttccttacccttttgggataggcaaaggttgttacaagaacaaatggttcgagattgtctgcaaaagctcatcagaccaacaaccgatacttttgttgccaaggatccgacgagcagttacttccttcaaccttggagaccctttctccatatcggtgtacaacaaattctacatccagagtccattgaaacattcaggttgtcccaacagagatggttattcatcatcgtctttgaatttgaagggcagcccattcttcatatcagaaaacaataagttcacagctgttggatgcaacaacaaggcgttcatgaatgtcacagggttacaaatcgtgggatgtgagacgacatgtggaaatgagatacggtcttacaaaggagctaacacgagttgtgttggttacaaatgctgccagatgactataccacctcttcttcaacttcaagtgtttgatgcaaccgtagagaaactggaaccaaataaacaaggatgtcaggttgccttcttgactcaattcacattgtcagggtccttgtttactcctcccgaattaatggagtacagtgaatatacaacaatagagctagaatggcgtcttgatctttcctacatgacttcaaagcgtgtactatgcaaaggcaatacatttttcgaagatagctatcaatgttcgtgtcacaatggttacgaaggaaatccctacatacctggcggatgccaagacattgatgaatgcagagatccacatctaaataaatgtggaaagagaaagtgtgtgaatgttctcggatcatatagatgtgagaaaacttggccagccattttaagtggaactctaagctctggattgttgctcctgatctttggtatgtggttgctatgcaaggctaatagaaagcggaaagtagccaagcagaagaggaagttcttccaaagaaatggaggtttgttgttgcagcaacaaacatccttccttcacggaagtgtaaatagaaccaaagttttcagctccaatgacctggagaatgcaacagatagattcaatgcgagcagaatactggggcaaggcgggcagggtacagtttataaaggaatgttggaagatgggatgatcgtcgctgtcaagaagtccaaagcattgaaagaagagaatcttgaggaattcatcaatgagatcatccttttgtcacagattaaccaccgaaatgttgtcaagatcttaggatgttgtcttgagacagaagtacctatattggtgtatgagttcattcctaaccgtaaccttttcgatcatcttcacaacccatcagaggatttcccaatgagttgggaagtccgtctctgcatcgcctgtgaagtcgccgatgccctctcctacctgcattcagccgtctctatccccatttatcacagagatgtcaagtcaacaaatatcttattggatgaaaagcaccgtgcaaaagtgtcagattttggaatctcgagatctgttgctatagatgatactcacttgacaacaattgtacaaggaacaattggatatgtagacccagagtaccttcagtcaaaccacttcacagggaagagtgacgtctacagctttggggttttgctcattgagctcttaaccggagagaaacctgtctcccttctgagacggcaagaagtccgaatgttgggtgcttacttcctcgaagccatgagaaatgacagacttcatgaaattctcgatgctcgcatcaaggaggaatgtgatcgagaagaggtccttgcagtagccaaacttgcaagaaggtgtttgagcttgaactcagaacatcgccctaccatgagagacgtatttattgaactagataggatgcaatctaagagaaaaggtactcaaagccaagcacagaatggtgaagagcatgcacacatccagatcgcaatgccggagtctatgtcacttagttactcttctccgaacatagtcgttgaaaacagctcattctcattggacacaaaaccactaatgcctcacaagacacagtga

SEQ ID NO: 81847 - protein, 720 aa, Arabidopsis thaliana
  peptide (1)..(720): Ceres Seq. ID no. 12661696
  misc_feature (246)..(719): Homolog of NCBI NO: 15219445 NR Description: WAK-like kinase (WLK); protein id: At1g79670.1, by cDNA: gi_19310446 [Arabidopsis thaliana]
  misc_feature (23)..(320): Homolog of NCBI NO: 15219445 NR Description: WAK-like kinase (WLK); protein id: At1g79670.1, by cDNA: gi_19310446 [Arabidopsis thaliana]
  misc_feature (246)..(719): Homolog of NCBI NO: 15219134 NR Description: WAK-like kinase (WLK); protein id: At1g16130.1
  misc_feature (33)..(311): Homolog of NCBI NO: 15219134 NR Description: WAK-like kinase (WLK); protein id: At1g16130.1
  misc_feature (254)..(679): Homolog of NCBI NO: 15219132 NR Description: WAK-like kinase (WLK); protein id: At1g16120.1
  misc_feature (7)..(293): Homolog of NCBI NO: 15219132 NR Description: WAK-like kinase (WLK); protein id: At1g16120.1
  misc_feature (140)..(716): Homolog of NCBI NO: 15219447 NR Description: WAK-like kinase (WLK); protein id: At1g79680.1,
  misc_feature (32)..(169): Homolog of NCBI NO: 15219447 NR Description: WAK-like kinase (WLK); protein id: At1g79680.1,
  misc_feature (140)..(711): Homolog of NCBI NO: 25405037 NR Description: protein F20B17.10 [imported] - Arabidopsis >gi|7715604|gb|AAF68122.1|AC010793_17 F20B17.10 [Arabidopsis
  misc_feature (32)..(169): Homolog of NCBI NO: 25405037 NR Description: protein F20B17.10 [imported] - Arabidopsis >gi|7715604|gb|AAF68122.1|AC010793_17 F20B17.10 [Arabidopsis
MGVDVKRFLVVMLLLRICEYAAASTFPLALRNCSDHCGNVSVPYPFGIGKGCYKNKWFEIVCKSSSDQQPILLLPRIRRAVTSFNLGDPFSISVYNKFYIQSPLKHSGCPNRDGYSSSSLNLKGSPFFISENNKFTAVGCNNKAFMNVTGLQIVGCETTCGNEIRSYKGANTSCVGYKCCQMTIPPLLQLQVFDATVEKLEPNKQGCQVAFLTQFTLSGSLFTPPELMEYSEYTTIELEWRLDLSYMTSKRVLCKGNTFFEDSYQCSCHNGYEGNPYIPGGCQDIDECRDPHLNKCGKRKCVNVLGSYRCEKTWPAILSGTLSSGLLLLIFGMWLLCKANRKRKVAKQKRKFFQRNGGLLLQQQTSFLHGSVNRTKVFSSNDLENATDRFNASRILGQGGQGTVYKGMLEDGMIVAVKKSKALKEENLEEFINEIILLSQINHRNVVKILGCCLETEVPILVYEFIPNRNLFDHLHNPSEDFPMSWEVRLCIACEVADALSYLHSAVSIPIYHRDVKSTNILLDEKHRAKVSDFGISRSVAIDDTHLTTIVQGTIGYVDPEYLQSNHFTGKSDVYSFGVLLIELLTGEKPVSLLRRQEVRMLGAYFLEAMRNDRLHEILDARIKEECDREEVLAVAKLARRCLSLNSEHRPTMRDVFIELDRMQSKRKGTQSQAQNGEEHAHIQIAMPESMSLSYSSPNIVVENSSFSLDTKPLMPHKTQ

SEQ ID NO: 81848 - protein, 709 aa, Arabidopsis thaliana
  peptide (1)..(709): Ceres Seq. ID no. 12661697
  misc_feature (235)..(708): Homolog of NCBI NO: 15219445 NR Description: WAK-like kinase (WLK); protein id: At1g79670.1, by cDNA: gi_19310446 [Arabidopsis thaliana]
  misc_feature (12)..(309): Homolog of NCBI NO: 15219445 NR Description: WAK-like kinase (WLK); protein id: At1g79670.1, by cDNA: gi_19310446 [Arabidopsis thaliana]
  misc_feature (235)..(708): Homolog of NCBI NO: 15219134 NR Description: WAK-like kinase (WLK); protein id: At1g16130.1
  misc_feature (22)..(300): Homolog of NCBI NO: 15219134 NR Description: WAK-like kinase (WLK); protein id: At1g16130.1
  misc_feature (243)..(668): Homolog of NCBI NO: 15219132 NR Description: WAK-like kinase (WLK); protein id: At1g16120.1
  misc_feature (1)..(282): Homolog of NCBI NO: 15219132 NR Description: WAK-like kinase (WLK); protein id: At1g16120.1
  misc_feature (129)..(705): Homolog of NCBI NO: 15219447 NR Description: WAK-like kinase (WLK); protein id: At1g79680.1,
  misc_feature (21)..(158): Homolog of NCBI NO: 15219447 NR Description: WAK-like kinase (WLK); protein id: At1g79680.1,
  misc_feature (129)..(700): Homolog of NCBI NO: 25405037 NR Description: protein F20B17.10 [imported] - Arabidopsis >gi|7715604|gb|AAF68122.1|AC010793_17 F20B17.10 [Arabidopsis
  misc_feature (21)..(158): Homolog of NCBI NO: 25405037 NR Description: protein F20B17.10 [imported] - Arabidopsis >gi|7715604|gb|AAF68122.1|AC010793_17 F20B17.10 [Arabidopsis
MLLLRICEYAAASTFPLALRNCSDHCGNVSVPYPFGIGKGCYKNKWFEIVCKSSSDQQPILLLPRIRRAVTSFNLGDPFSISVYNKFYIQSPLKHSGCPNRDGYSSSSLNLKGSPFFISENNKFTAVGCNNKAFMNVTGLQIVGCETTCGNEIRSYKGANTSCVGYKCCQMTIPPLLQLQVFDATVEKLEPNKQGCQVAFLTQFTLSGSLFTPPELMEYSEYTTIELEWRLDLSYMTSKRVLCKGNTFFEDSYQCSCHNGYEGNPYIPGGCQDIDECRDPHLNKCGKRKCVNVLGSYRCEKTWPAILSGTLSSGLLLLIFGMWLLCKANRKRKVAKQKRKFFQRNGGLLLQQQTSFLHGSVNRTKVFSSNDLENATDRFNASRILGQGGQGTVYKGMLEDGMIVAVKKSKALKEENLEEFINEIILLSQINHRNVVKILGCCLETEVPILVYEFIPNRNLFDHLHNPSEDFPMSWEVRLCIACEVADALSYLHSAVSIPIYHRDVKSTNILLDEKHRAKVSDFGISRSVAIDDTHLTTIVQGTIGYVDPEYLQSNHFTGKSDVYSFGVLLIELLTGEKPVSLLRRQEVRMLGAYFLEAMRNDRLHEILDARIKEECDREEVLAVAKLARRCLSLNSEHRPTMRDVFIELDRMQSKRKGTQSQAQNGEEHAHIQIAMPESMSLSYSSPNIVVENSSFSLDTKPLMPHKTQ

SEQ ID NO: 81849 - protein, 575 aa, Arabidopsis thaliana
  peptide (1)..(575): Ceres Seq. ID no. 12661698
  misc_feature (101)..(574): Homolog of NCBI NO: 15219445 NR Description: WAK-like kinase (WLK); protein id: At1g79670.1, by cDNA: gi_19310446 [Arabidopsis thaliana]
  misc_feature (1)..(175): Homolog of NCBI NO: 15219445 NR Description: WAK-like kinase (WLK); protein id: At1g79670.1, by cDNA: gi_19310446 [Arabidopsis thaliana]
  misc_feature (101)..(574): Homolog of NCBI NO: 15219134 NR Description: WAK-like kinase (WLK); protein id: At1g16130.1
  misc_feature (1)..(166): Homolog of NCBI NO: 15219134 NR Description: WAK-like kinase (WLK); protein id: At1g16130.1
  misc_feature (109)..(534): Homolog of NCBI NO: 15219132 NR Description: WAK-like kinase (WLK); protein id: At1g16120.1
  misc_feature (1)..(148): Homolog of NCBI NO: 15219132 NR Description: WAK-like kinase (WLK); protein id: At1g16120.1
  misc_feature (1)..(571): Homolog of NCBI NO: 15219447 NR Description: WAK-like kinase (WLK); protein id: At1g79680.1,
  misc_feature (1)..(24): Homolog of NCBI NO: 15219447 NR Description: WAK-like kinase (WLK); protein id: At1g79680.1,
  misc_feature (1)..(566): Homolog of NCBI NO: 25405037 NR Description: protein F20B17.10 [imported] - Arabidopsis >gi|7715604|gb|AAF68122.1|AC010793_17 F20B17.10 [Arabidopsis
  misc_feature (1)..(24): Homolog of NCBI NO: 25405037 NR Description: protein F20B17.10 [imported] - Arabidopsis >gi|7715604|gb|AAF68122.1|AC010793_17 F20B17.10 [Arabidopsis
MNVTGLQIVGCETTCGNEIRSYKGANTSCVGYKCCQMTIPPLLQLQVFDATVEKLEPNKQGCQVAFLTQFTLSGSLFTPPELMEYSEYTTIELEWRLDLSYMTSKRVLCKGNTFFEDSYQCSCHNGYEGNPYIPGGCQDIDECRDPHLNKCGKRKCVNVLGSYRCEKTWPAILSGTLSSGLLLLIFGMWLLCKANRKRKVAKQKRKFFQRNGGLLLQQQTSFLHGSVNRTKVFSSNDLENATDRFNASRILGQGGQGTVYKGMLEDGMIVAVKKSKALKEENLEEFINEIILLSQINHRNVVKILGCCLETEVPILVYEFIPNRNLFDHLHNPSEDFPMSWEVRLCIACEVADALSYLHSAVSIPIYHRDVKSTNILLDEKHRAKVSDFGISRSVAIDDTHLTTIVQGTIGYVDPEYLQSNHFTGKSDVYSFGVLLIELLTGEKPVSLLRRQEVRMLGAYFLEAMRNDRLHEILDARIKEECDREEVLAVAKLARRCLSLNSEHRPTMRDVFIELDRMQSKRKGTQSQAQNGEEHAHIQIAMPESMSLSYSSPNIVVENSSFSLDTKPLMPHKTQ

SEQ ID NO: 81850 - DNA, 1476 bp, Arabidopsis thaliana
  misc_feature (1)..(1476): Ceres Seq. ID no. 12661703
  misc_feature: MA Experiment ID: 20000171 Result: Up-regulated in Transcription
  misc_feature: MA Experiment 20000171 PARAMETER Experiment Name: At_42deg_Heat_P Parameter: Age (day) Value: 14
  misc_feature: MA Experiment 20000171 PARAMETER Experiment Name: At_42deg_Heat_P Parameter: Organism Value: A. thaliana
  misc_feature: MA Experiment 20000171 PARAMETER Experiment Name: At_42deg_Heat_P Parameter: Plant Line Value: WS
  misc_feature: MA Experiment 20000171 PARAMETER Experiment Name: At_42deg_Heat_P Parameter: Temperature (deg C) Value: 42 vs. 22
  misc_feature: MA Experiment 20000171 PARAMETER Experiment Name: At_42deg_Heat_P Parameter: Timepoint (hr) Value: 1
  misc_feature: MA Experiment 20000171 PARAMETER Experiment Name: At_42deg_Heat_P Parameter: Tissue Value: Aerial
  misc_feature: MA Experiment ID: 20000179 Result: Down-regulated in Transcription
  misc_feature: MA Experiment 20000179 PARAMETER Experiment Name: At_Germinating_Seeds_P Parameter: Age (hr) Value: 6 vs. 0
  misc_feature: MA Experiment 20000179 PARAMETER Experiment Name: At_Germinating_Seeds_P Parameter: Tissue Value: Germinating Seeds
  misc_feature: MA Experiment ID: 20000180 Result: Down-regulated in Transcription
  misc_feature: MA Experiment 20000180 PARAMETER Experiment Name: At_Germinating_Seeds_P Parameter: Age (hr) Value: 24 vs. 0
  misc_feature: MA Experiment 20000180 PARAMETER Experiment Name: At_Germinating_Seeds_P Parameter: Tissue Value: Germinating Seeds
  misc_feature: MA Experiment ID: 20000184 Result: Down-regulated in Transcription
  misc_feature: MA Experiment 20000184 PARAMETER Experiment Name: At_Shoots__P Parameter: Age (day) Value: 7
  misc_feature: MA Experiment 20000184 PARAMETER Experiment Name: At_Shoots__P Parameter: Tissue Value: Shoots vs. Whole Plant
  misc_feature: MA Experiment ID: 20001557 Result: Up-regulated in Transcription
  misc_feature: MA Experiment 20001557 PARAMETER Experiment Name: At_Drought_Soil_Dry_P Parameter: Age (day) Value: 27
  misc_feature: MA Experiment 20001557 PARAMETER Experiment Name: At_Drought_Soil_Dry_P Parameter: Organism Value: A. thaliana
  misc_feature: MA Experiment 20001557 PARAMETER Experiment Name: At_Drought_Soil_Dry_P Parameter: Plant Line Value: WS
  misc_feature: MA Experiment 20001557 PARAMETER Experiment Name: At_Drought_Soil_Dry_P Parameter: Post Timepoint (hr) Value: 3
  misc_feature: MA Experiment 20001557 PARAMETER Experiment Name: At_Drought_Soil_Dry_P Parameter: Post-Treatment Value: Re-Water vs. No Drought
  misc_feature: MA Experiment 20001557 PARAMETER Experiment Name: At_Drought_Soil_Dry_P Parameter: Timepoint (day) Value: 13
  misc_feature: MA Experiment 20001557 PARAMETER Experiment Name: At_Drought_Soil_Dry_P Parameter: Treatment Value: Drought vs. No Drought
  misc_feature: MA Experiment ID: 20001558 Result: Up-regulated in Transcription
  misc_feature: MA Experiment 20001558 PARAMETER Experiment Name: At_Drought_Soil_Dry_P Parameter: Age (day) Value: 27
  misc_feature: MA Experiment 20001558 PARAMETER Experiment Name: At_Drought_Soil_Dry_P Parameter: Organism Value: A. thaliana
  misc_feature: MA Experiment 20001558 PARAMETER Experiment Name: At_Drought_Soil_Dry_P Parameter: Plant Line Value: WS
  misc_feature: MA Experiment 20001558 PARAMETER Experiment Name: At_Drought_Soil_Dry_P Parameter: Post Timepoint (hr) Value: 6
  misc_feature: MA Experiment 20001558 PARAMETER Experiment Name: At_Drought_Soil_Dry_P Parameter: Post-Treatment Value: Re-Water vs. No Drought
  misc_feature: MA Experiment 20001558 PARAMETER Experiment Name: At_Drought_Soil_Dry_P Parameter: Timepoint (day) Value: 13
  misc_feature: MA Experiment 20001558 PARAMETER Experiment Name: At_Drought_Soil_Dry_P Parameter: Treatment Value: Drought vs. No Drought
atggaggaaccaacgccggaggaggaagggggaatcaccatcatgtctaaatcccgcaaaaatcctaaaaccgtagtaaacattcagtcccagaaacttgattcggaccagaatactcctcaatttgagaaattcactaatcctaaccctagctccgacaccacatccgccactaatttcgaagggctcggattagctgagtgggcagtggaaacgtgtaaagagcttgggatgcgtaaacccactccagttcaaactcactgcgtgccgaagatattagccggacgagacgttttagggcttgctcagactggtagtggtaaaactgctgcgtttgctctacctatacttcaccgccttgctgaagatccttatggagtcttcgcgcttgtagtgacgccgactagagagctagcgttccagctcgctgagcagtttaaggctttgggttcgtgtttgaatttgcgttgctctgtaattgtgggaggaatggatatgttgacgcaaactatgagcttggtttcacgacctcatatcgttattactactcctggaagaatcaaggttttgcttgaaaacaatcctgatgttcctccagttttctctagaaccaagttcttagtgctggacgaggcggatagagttcttgatgttggtttccaagacgagttacgcacaatctttcagtgtctgccaaagagtagacaaacattgttgttctctgctaccatgactagtaacttacaggctttgcttgaacattcttcaaacaaagcttatttctatgaagcctatgaagggttaaagactgttgacactcttacgcagcagttcattttcgaagacaaagatgccaaagagctgtatcttgtgcacatcctctcgcaaatggaagacaagggcattcgatcagccatgatttttgtctccacttgcagaacatgtcaaaggttaagtcttatgcttgacgagcttgaagtggaaaatatagctatgcattctctgaattctcagtctatgcgactatctgcactaagtaaattcaagtctgggaaagtaccgatattgcttgcgactgatgttgccagccgtggattggacattcctactgttgaccttgtcatcaattatgacattccgagagatcctagggattatgttcatcgtgttggacgtacagctagagctggtagaggaggactggctgtaagcattatcactgagaccgatgtgaaacttatccataaaatagaagaggaagttggaaaaaagatggaaccatacaacaaaaaagtaatcactgacagtttagaagtcacaaaggtctcaaaagccaaaagagtggcaatgatgaagatgctagataatggattcgaagacaaggttaaagaccggaggaaattgaaacggaaaacacttgcggataaagggttgcttaagaaacggggcaaaaggcagaaatcaacagaaaattga

SEQ ID NO: 81851 - protein, 491 aa, Arabidopsis thaliana
  peptide (1)..(491): Ceres Seq. ID no. 12661704
  misc_feature (71)..(277): Pfam Name: DEAD/DEAH box helicase Pfam Description: DEAD/DEAH box helicase
  misc_feature (1)..(491): Homolog of NCBI NO: 15219185 NR Description: DEAD/DEAH box RNA helicase, putative; protein id:
  misc_feature (2)..(471): Homolog of NCBI NO: 34913306 NR Description: P0519E12.31 [Oryza sativa (japonica
  misc_feature (60)..(476): Homolog of NCBI NO: 40787696 NR Description: Unknown (protein for MGC:76291) [Silurana
  misc_feature (60)..(476): Homolog of NCBI NO: 29612573 NR Description: Similar to hypothetical protein FLJ10432 [Xenopus
  misc_feature (26)..(478): Homolog of NCBI NO: 39595087 NR Description: Hypothetical protein CBG03667 [Caenorhabditis
  misc_feature (60)..(476): Homolog of NCBI NO: 34877820 NR Description: similar to R27090_2 [Rattus norvegicus]
  misc_feature (48)..(448): Homolog of NCBI NO: 32564750 NR Description: DEAD/DEAH box helicase and helicase, C-terminal [Caenorhabditis elegans] >gi|24418257|gb|AAF39890.2| Hypothetical
  misc_feature (59)..(488): Homolog of NCBI NO: 19113586 NR Description: atp-dependent rna helicase [Schizosaccharomyces
  misc_feature (59)..(476): Homolog of NCBI NO: 13161879 NR Description: hypothetical protein [Takifugu rubripes]
  misc_feature (51)..(467): Homolog of NCBI NO: 27229058 NR Description: RIKEN cDNA 4930588A18 [Mus musculus] unnamed protein product [Mus musculus]
MEEPTPEEEGGITIMSKSRKNPKTVVNIQSQKLDSDQNTPQFEKFTNPNPSSDTTSATNFEGLGLAEWAVETCKELGMRKPTPVQTHCVPKILAGRDVLGLAQTGSGKTAAFALPILHRLAEDPYGVFALVVTPTRELAFQLAEQFKALGSCLNLRCSVIVGGMDMLTQTMSLVSRPHIVITTPGRIKVLLENNPDVPPVFSRTKFLVLDEADRVLDVGFQDELRTIFQCLPKSRQTLLFSATMTSNLQALLEHSSNKAYFYEAYEGLKTVDTLTQQFIFEDKDAKELYLVHILSQMEDKGIRSAMIFVSTCRTCQRLSLMLDELEVENIAMHSLNSQSMRLSALSKFKSGKVPILLATDVASRGLDIPTVDLVINYDIPRDPRDYVHRVGRTARAGRGGLAVSIITETDVKLIHKIEEEVGKKMEPYNKKVITDSLEVTKVSKAKRVAMMKMLDNGFEDKVKDRRKLKRKTLADKGLLKKRGKRQKSTEN

SEQ ID NO: 81852 - protein, 477 aa, Arabidopsis thaliana
  peptide (1)..(477): Ceres Seq. ID no. 12661705
  misc_feature (57)..(263): Pfam Name: DEAD/DEAH box helicase Pfam Description: DEAD/DEAH box helicase
  misc_feature (1)..(477): Homolog of NCBI NO: 15219185 NR Description: DEAD/DEAH box RNA helicase, putative; protein id:
  misc_feature (1)..(457): Homolog of NCBI NO: 34913306 NR Description: P0519E12.31 [Oryza sativa (japonica
  misc_feature (46)..(462): Homolog of NCBI NO: 40787696 NR Description: Unknown (protein for MGC:76291) [Silurana
  misc_feature (46)..(462): Homolog of NCBI NO: 29612573 NR Description: Similar to hypothetical protein FLJ10432 [Xenopus
  misc_feature (12)..(464): Homolog of NCBI NO: 39595087 NR Description: Hypothetical protein CBG03667 [Caenorhabditis
  misc_feature (46)..(462): Homolog of NCBI NO: 34877820 NR Description: similar to R27090_2 [Rattus norvegicus]
  misc_feature (34)..(434): Homolog of NCBI NO: 32564750 NR Description: DEAD/DEAH box helicase and helicase, C-terminal [Caenorhabditis elegans] >gi|24418257|gb|AAF39890.2| Hypothetical
  misc_feature (45)..(474): Homolog of NCBI NO: 19113586 NR Description: atp-dependent rna helicase [Schizosaccharomyces
  misc_feature (45)..(462): Homolog of NCBI NO: 13161879 NR Description: hypothetical protein [Takifugu rubripes]
  misc_feature (37)..(453): Homolog of NCBI NO: 27229058 NR Description: RIKEN cDNA 4930588A18 [Mus musculus] unnamed protein product [Mus musculus]
MSKSRKNPKTVVNIQSQKLDSDQNTPQFEKFTNPNPSSDTTSATNFEGLGLAEWAVETCKELGMRKPTPVQTHCVPKILAGRDVLGLAQTGSGKTAAFALPILHRLAEDPYGVFALVVTPTRELAFQLAEQFKALGSCLNLRCSVIVGGMDMLTQTMSLVSRPHIVITTPGRIKVLLENNPDVPPVFSRTKFLVLDEADRVLDVGFQDELRTIFQCLPKSRQTLLFSATMTSNLQALLEHSSNKAYFYEAYEGLKTVDTLTQQFIFEDKDAKELYLVHILSQMEDKGIRSAMIFVSTCRTCQRLSLMLDELEVENIAMHSLNSQSMRLSALSKFKSGKVPILLATDVASRGLDIPTVDLVINYDIPRDPRDYVHRVGRTARAGRGGLAVSIITETDVKLIHKIEEEVGKKMEPYNKKVITDSLEVTKVSKAKRVAMMKMLDNGFEDKVKDRRKLKRKTLADKGLLKKRGKRQKSTEN

SEQ ID NO: 81853 - protein, 414 aa, Arabidopsis thaliana
  peptide (1)..(414): Ceres Seq. ID no. 12661706
  misc_feature (1)..(200): Pfam Name: DEAD/DEAH box helicase Pfam Description: DEAD/DEAH box helicase
  misc_feature (1)..(414): Homolog of NCBI NO: 15219185 NR Description: DEAD/DEAH box RNA helicase, putative; protein id:
  misc_feature (1)..(394): Homolog of NCBI NO: 34913306 NR Description: P0519E12.31 [Oryza sativa (japonica
  misc_feature (1)..(399): Homolog of NCBI NO: 40787696 NR Description: Unknown (protein for MGC:76291) [Silurana
  misc_feature (1)..(399): Homolog of NCBI NO: 29612573 NR Description: Similar to hypothetical protein FLJ10432 [Xenopus
  misc_feature (1)..(401): Homolog of NCBI NO: 39595087 NR Description: Hypothetical protein CBG03667 [Caenorhabditis
  misc_feature (1)..(399): Homolog of NCBI NO: 34877820 NR Description: similar to R27090_2 [Rattus norvegicus]
  misc_feature (1)..(371): Homolog of NCBI NO: 32564750 NR Description: DEAD/DEAH box helicase and helicase, C-terminal [Caenorhabditis elegans] >gi|24418257|gb|AAF39890.2| Hypothetical
  misc_feature (1)..(411): Homolog of NCBI NO: 19113586 NR Description: atp-dependent rna helicase [Schizosaccharomyces
  misc_feature (1)..(399): Homolog of NCBI NO: 13161879 NR Description: hypothetical protein [Takifugu rubripes]
  misc_feature (1)..(390): Homolog of NCBI NO: 27229058 NR Description: RIKEN cDNA 4930588A18 [Mus musculus] unnamed protein product [Mus musculus]
MRKPTPVQTHCVPKILAGRDVLGLAQTGSGKTAAFALPILHRLAEDPYGVFALVVTPTRELAFQLAEQFKALGSCLNLRCSVIVGGMDMLTQTMSLVSRPHIVITTPGRIKVLLENNPDVPPVFSRTKFLVLDEADRVLDVGFQDELRTIFQCLPKSRQTLLFSATMTSNLQALLEHSSNKAYFYEAYEGLKTVDTLTQQFIFEDKDAKELYLVHILSQMEDKGIRSAMIFVSTCRTCQRLSLMLDELEVENIAMHSLNSQSMRLSALSKFKSGKVPILLATDVASRGLDIPTVDLVINYDIPRDPRDYVHRVGRTARAGRGGLAVSIITETDVKLIHKIEEEVGKKMEPYNKKVITDSLEVTKVSKAKRVAMMKMLDNGFEDKVKDRRKLKRKTLADKGLLKKRGKRQKSTEN

SEQ ID NO: 81854 - DNA, 1874 bp, Arabidopsis thaliana
  misc_feature (1)..(1874): Ceres Seq. ID no. 12661723
  misc_feature: MA Experiment ID: 20000227 Result: Down-regulated in Transcription
  misc_feature: MA Experiment 20000227 PARAMETER Experiment Name: At_Root-Tips-vs-Tops_P Parameter: Tissue Value: Root Tips vs. Root Tops
  misc_feature: MA Experiment ID: 20000437 Result: Down-regulated in Transcription
  misc_feature: MA Experiment 20000437 PARAMETER Experiment Name: At_Drought_P Parameter: Age (day) Value: 8
  misc_feature: MA Experiment 20000437 PARAMETER Experiment Name: At_Drought_P Parameter: Organism Value: A. thaliana
  misc_feature: MA Experiment 20000437 PARAMETER Experiment Name: At_Drought_P Parameter: Plant Line Value: WS
  misc_feature: MA Experiment 20000437 PARAMETER Experiment Name: At_Drought_P Parameter: Timepoint (hr) Value: 24
  misc_feature: MA Experiment 20000437 PARAMETER Experiment Name: At_Drought_P Parameter: Tissue Value: Whole Plant
  misc_feature: MA Experiment 20000437 PARAMETER Experiment Name: At_Drought_P Parameter: Treatment Value: Drought vs. No Drought
  misc_feature: MA Experiment ID: 20000439 Result: Up-regulated in Transcription
  misc_feature: MA Experiment 20000439 PARAMETER Experiment Name: At_Roots__P Parameter: Age (day) Value: 14 vs. 21
  misc_feature: MA Experiment 20000439 PARAMETER Experiment Name: At_Roots__P Parameter: Organism Value: A. thaliana
  misc_feature: MA Experiment 20000439 PARAMETER Experiment Name: At_Roots__P Parameter: Tissue Value: Roots vs. Whole Plant
  misc_feature: MA Experiment ID: 20000451 Result: Up-regulated in Transcription
  misc_feature: MA Experiment 20000451 PARAMETER Experiment Name: At_CS6879_Shoots-Roots_P Parameter: Age (day) Value: 14
  misc_feature: MA Experiment 20000451 PARAMETER Experiment Name: At_CS6879_Shoots-Roots_P Parameter: Organism Value: A. thaliana
  misc_feature: MA Experiment 20000451 PARAMETER Experiment Name: At_CS6879_Shoots-Roots_P Parameter: Plant Line Value: CS6879 vs. WS
  misc_feature: MA Experiment 20000451 PARAMETER Experiment Name: At_CS6879_Shoots-Roots_P Parameter: Tissue Value: Roots
  misc_feature: MA Experiment ID: 20000495 Result: Up-regulated in Transcription
  misc_feature: MA Experiment 20000495 PARAMETER Experiment Name: At_Guard_Cells_P Parameter: Harvest Date Value: 8/2/2002
  misc_feature: MA Experiment 20000495 PARAMETER Experiment Name: At_Guard_Cells_P Parameter: Organism Value: A. thaliana
  misc_feature: MA Experiment 20000495 PARAMETER Experiment Name: At_Guard_Cells_P Parameter: Tissue Value: Guard Cells vs. Leaves
  misc_feature: MA Experiment ID: 20001247 Result: Down-regulated in Transcription
  misc_feature: MA Experiment 20001247 PARAMETER Experiment Name: At_Far-red-induction_P Parameter: Age (day) Value: 7
  misc_feature: MA Experiment 20001247 PARAMETER Experiment Name: At_Far-red-induction_P Parameter: Light Value: Far-red vs. White
  misc_feature: MA Experiment 20001247 PARAMETER Experiment Name: At_Far-red-induction_P Parameter: Organism Value: A. thaliana
  misc_feature: MA Experiment 20001247 PARAMETER Experiment Name: At_Far-red-induction_P Parameter: Plant Line Value: Columbia
  misc_feature: MA Experiment 20001247 PARAMETER Experiment Name: At_Far-red-induction_P Parameter: Timepoint (hr) Value: 1
  misc_feature: MA Experiment 20001247 PARAMETER Experiment Name: At_Far-red-induction_P Parameter: Tissue Value: Whole Plant
  misc_feature: MA Experiment ID: 20001248 Result: Down-regulated in Transcription
  misc_feature: MA Experiment 20001248 PARAMETER Experiment Name: At_Far-red-induction_P Parameter: Age (day) Value: 7
  misc_feature: MA Experiment 20001248 PARAMETER Experiment Name: At_Far-red-induction_P Parameter: Light Value: Far-red vs. White
  misc_feature: MA Experiment 20001248 PARAMETER Experiment Name: At_Far-red-induction_P Parameter: Organism Value: A. thaliana
  misc_feature: MA Experiment 20001248 PARAMETER Experiment Name: At_Far-red-induction_P Parameter: Plant Line Value: Columbia
  misc_feature: MA Experiment 20001248 PARAMETER Experiment Name: At_Far-red-induction_P Parameter: Timepoint (hr) Value: 4
  misc_feature: MA Experiment 20001248 PARAMETER Experiment Name: At_Far-red-induction_P Parameter: Tissue Value: Whole Plant
  misc_feature: MA Experiment ID: 20001450 Result: Down-regulated in Transcription
  misc_feature: MA Experiment 20001450 PARAMETER Experiment Name: At_Far-red-induction_P Parameter: Age (day) Value: 7
  misc_feature: MA Experiment 20001450 PARAMETER Experiment Name: At_Far-red-induction_P Parameter: Light Value: Far-red vs. White
  misc_feature: MA Experiment 20001450 PARAMETER Experiment Name: At_Far-red-induction_P Parameter: Organism Value: A. thaliana
  misc_feature: MA Experiment 20001450 PARAMETER Experiment Name: At_Far-red-induction_P Parameter: Plant Line Value: Columbia
  misc_feature: MA Experiment 20001450 PARAMETER Experiment Name: At_Far-red-induction_P Parameter: Timepoint (hr) Value: 8
  misc_feature: MA Experiment 20001450 PARAMETER Experiment Name: At_Far-red-induction_P Parameter: Tissue Value: Whole Plant
aaatatcgtagtgttcataacgaaacgagcacacaactcactaaacactcaaacaaaaatacaaacattaagatgatgatgaagattagctttaacacatgctttcaaatcttactaggatttatcgtcttcatcgcatcaatcactttactaggtcgaatattctcaaggccttccaaaaccaaagaccggtgtcgccagcttcctcctggccgaccaggatggcccatcctcggcaatctacccgaactaatcatgactcgtcctaggtccaaatatttccaccttgccatgaaagagctaaaaacggatatcgcatgtttcaactttgccggaacccacaccatcaccataaactccgacgagatcgctagagaagcttttagagagcgagacgcagatttggcagaccggcctcaactttccatcgtagagtccattggagacaattacaaaacaatgggaacctcatcgtacggtgaacatttcatgaagatgaaaaaagtgatcacaacggaaattatgtccgttaaaacgttgaatatgttggaagctgcgagaaccatcgaagcggataatctcattgcttacattcactcgatgtatcaacggtcggagacggtcgacgttagagaactttcgagagtttatggttacgcagtgaccatgagaatgttgtttggaaggagacatgtcacgaaagaaaacatgttttcggatgatgggagactaggaaaagccgaaaaacatcatcttgaggtgattttcaacactctaaactgtttgccaggttttagtcccgtggattacgtggaccgatggttaggtggttggaatattgatggtgaagaggagagagcgaaagtgaatgttaatcttgttcgtagttacaacaatcccataatagacgagagggtcgaaatttggagggaaaaaggtggtaaggctgctgtggaagattggcttgatacgttcattacgctaaaagatcaaaacggaaactacttggttacgccagacgaaatcaaagctcaatgcgtcgaattttgtatagcagcgatcgataatccggcaaataacatggagtggacacttggggaaatgttaaagaacccggagattcttagaaaagctctgaaggagttggatgaagtagttggaaaagacaggcttgtgcaagaatcagacatacgaaatctaaactacttaaaagcttgttgcagagaaacattcaggattcacccaagcgctcattatgtcccacctcatgttgcccgtcaagataccacccttgggggttattttattcccaaaggtagccacattcatgtatgccgccctgggctaggccggaaccctaaaatatggaaagatccattagcatacgaaccggagcgtcacctccaaggagacggaatcacaaaagaggttactctggtcgaaacagagatgcgttttgtctcatttagcactggtagacgtggctgcgtcggtgtcaaagtcgggacaattatgatggctatgatgttggctaggtttcttcaaggttttaactggaaactccatcgagatttcggaccgttaagcctcgaggaagatgatgcatcattgcttatggctaagcctcttcttttgtctgttgagccacgcttggcatcaaacctttatccaaaattccgtccttaaaaacaagacgccttgttttttctctgtgatgtgtttcgacgctttgtcgtttctgtattacttgacgtactgttgtttttagactatccattgcccgaaaacgctatattgttaaaatcgtgtgtcttgtttattcttttgtatctccgtaacttaatcatgaatatcaatcaataccatatgaggtt

SEQ ID NO: 81855 - protein, 561 aa, Arabidopsis thaliana
  peptide (1)..(561): Ceres Seq. ID no. 12661724
  misc_feature (25)..(561): Homolog of NCBI NO: 30684835 NR Description: cytochrome P450 family [Arabidopsis thaliana]
  misc_feature (27)..(561): Homolog of NCBI NO: 10946208 NR Description: cytochrome P450 CYP79F2 [Arabidopsis thaliana]
  misc_feature (27)..(561): Homolog of NCBI NO: 25518051 NR Description: F3O9.20 protein - Arabidopsis thaliana Similar to gb|AF069494 cytochrome P450 from Sinapis alba and is a
  misc_feature (35)..(561): Homolog of NCBI NO: 25518479 NR Description: hypothetical protein F3O9.21 - Arabidopsis >gi|4966362|gb|AAD34693.1|AC006341_21 Similar to gb|AF069494 P450 from Sinapis alba and is a member of the PF|00067 Cytochrome
  misc_feature (35)..(561): Homolog of NCBI NO: 30684842 NR Description: cytochrome P450, putative [Arabidopsis thaliana] putative cytochrome P450 protein [Arabidopsis thaliana]
  misc_feature (41)..(560): Homolog of NCBI NO: 30696238 NR Description: cytochrome P450 family [Arabidopsis thaliana]
  misc_feature (32)..(558): Homolog of NCBI NO: 22330739 NR Description: cytochrome p450 family; protein id: At1g79370.1
  misc_feature (18)..(557): Homolog of NCBI NO: 6739527 NR Description: N-hydroxylating cytochrome P450 [Manihot
  misc_feature (30)..(557): Homolog of NCBI NO: 6739530 NR Description: N-hydroxylating cytochrome P450 [Manihot
  misc_feature (8)..(557): Homolog of NCBI NO: 15227187 NR Description: putative cytochrome P450; protein id: At2g22330.1
KYRSVHNETSTQLTKHSNKNTNIKMMMKISFNTCFQILLGFIVFIASITLLGRIFSRPSKTKDRCRQLPPGRPGWPILGNLPELIMTRPRSKYFHLAMKELKTDIACFNFAGTHTITINSDEIAREAFRERDADLADRPQLSIVESIGDNYKTMGTSSYGEHFMKMKKVITTEIMSVKTLNMLEAARTIEADNLIAYIHSMYQRSETVDVRELSRVYGYAVTMRMLFGRRHVTKENMFSDDGRLGKAEKHHLEVIFNTLNCLPGFSPVDYVDRWLGGWNIDGEEERAKVNVNLVRSYNNPIIDERVEIWREKGGKAAVEDWLDTFITLKDQNGNYLVTPDEIKAQCVEFCIAAIDNPANNMEWTLGEMLKNPEILRKALKELDEVVGKDRLVQESDIRNLNYLKACCRETFRIHPSAHYVPPHVARQDTTLGGYFIPKGSHIHVCRPGLGRNPKIWKDPLAYEPERHLQGDGITKEVTLVETEMRFVSFSTGRRGCVGVKVGTIMMAMMLARFLQGFNWKLHRDFGPLSLEEDDASLLMAKPLLLSVEPRLASNLYPKFRP

SEQ ID NO: 81856 - protein, 537 aa, Arabidopsis thaliana
  peptide (1)..(537): Ceres Seq. ID no. 12661725
  misc_feature (1)..(537): Homolog of NCBI NO: 30684835 NR Description: cytochrome P450 family [Arabidopsis thaliana]
  misc_feature (3)..(537): Homolog of NCBI NO: 10946208 NR Description: cytochrome P450 CYP79F2 [Arabidopsis thaliana]
  misc_feature (3)..(537): Homolog of NCBI NO: 25518051 NR Description: F3O9.20 protein - Arabidopsis thaliana Similar to gb|AF069494 cytochrome P450 from Sinapis alba and is a
  misc_feature (11)..(537): Homolog of NCBI NO: 25518479 NR Description: hypothetical protein F3O9.21 - Arabidopsis >gi|4966362|gb|AAD34693.1|AC006341_21 Similar to gb|AF069494 P450 from Sinapis alba and is a member of the PF|00067 Cytochrome
  misc_feature (11)..(537): Homolog of NCBI NO: 30684842 NR Description: cytochrome P450, putative [Arabidopsis thaliana] putative cytochrome P450 protein [Arabidopsis thaliana]
  misc_feature (17)..(536): Homolog of NCBI NO: 30696238 NR Description: cytochrome P450 family [Arabidopsis thaliana]
  misc_feature (8)..(534): Homolog of NCBI NO: 22330739 NR Description: cytochrome p450 family; protein id: At1g79370.1
  misc_feature (1)..(533): Homolog of NCBI NO: 6739527 NR Description: N-hydroxylating cytochrome P450 [Manihot
  misc_feature (6)..(533): Homolog of NCBI NO: 6739530 NR Description: N-hydroxylating cytochrome P450 [Manihot
  misc_feature (1)..(533): Homolog of NCBI NO: 15227187 NR Description: putative cytochrome P450; protein id: At2g22330.1
MMMKISFNTCFQILLGFIVFIASITLLGRIFSRPSKTKDRCRQLPPGRPGWPILGNLPELIMTRPRSKYFHLAMKELKTDIACFNFAGTHTITINSDEIAREAFRERDADLADRPQLSIVESIGDNYKTMGTSSYGEHFMKMKKVITTEIMSVKTLNMLEAARTIEADNLIAYIHSMYQRSETVDVRELSRVYGYAVTMRMLFGRRHVTKENMFSDDGRLGKAEKHHLEVIFNTLNCLPGFSPVDYVDRWLGGWNIDGEEERAKVNVNLVRSYNNPIIDERVEIWREKGGKAAVEDWLDTFITLKDQNGNYLVTPDEIKAQCVEFCIAAIDNPANNMEWTLGEMLKNPEILRKALKELDEVVGKDRLVQESDIRNLNYLKACCRETFRIHPSAHYVPPHVARQDTTLGGYFIPKGSHIHVCRPGLGRNPKIWKDPLAYEPERHLQGDGITKEVTLVETEMRFVSFSTGRRGCVGVKVGTIMMAMMLARFLQGFNWKLHRDFGPLSLEEDDASLLMAKPLLLSVEPRLASNLYPKFRP

SEQ ID NO: 81857 - protein, 536 aa, Arabidopsis thaliana
  peptide (1)..(536): Ceres Seq. ID no. 12661726
  misc_feature (1)..(536): Homolog of NCBI NO: 30684835 NR Description: cytochrome P450 family [Arabidopsis thaliana]
  misc_feature (2)..(536): Homolog of NCBI NO: 10946208 NR Description: cytochrome P450 CYP79F2 [Arabidopsis thaliana]
  misc_feature (2)..(536): Homolog of NCBI NO: 25518051 NR Description: F3O9.20 protein - Arabidopsis thaliana Similar to gb|AF069494 cytochrome P450 from Sinapis alba and is a
  misc_feature (10)..(536): Homolog of NCBI NO: 25518479 NR Description: hypothetical protein F3O9.21 - Arabidopsis >gi|4966362|gb|AAD34693.1|AC006341_21 Similar to gb|AF069494 P450 from Sinapis alba and is a member of the PF|00067 Cytochrome
  misc_feature (10)..(536): Homolog of NCBI NO: 30684842 NR Description: cytochrome P450, putative [Arabidopsis thaliana] putative cytochrome P450 protein [Arabidopsis thaliana]
  misc_feature (16)..(535): Homolog of NCBI NO: 30696238 NR Description: cytochrome P450 family [Arabidopsis thaliana]
  misc_feature (7)..(533): Homolog of NCBI NO: 22330739 NR Description: cytochrome p450 family; protein id: At1g79370.1
  misc_feature (1)..(532): Homolog of NCBI NO: 6739527 NR Description: N-hydroxylating cytochrome P450 [Manihot
  misc_feature (5)..(532): Homolog of NCBI NO: 6739530 NR Description: N-hydroxylating cytochrome P450 [Manihot
  misc_feature (1)..(532): Homolog of NCBI NO: 15227187 NR Description: putative cytochrome P450; protein id: At2g22330.1
MMKISFNTCFQILLGFIVFIASITLLGRIFSRPSKTKDRCRQLPPGRPGWPILGNLPELIMTRPRSKYFHLAMKELKTDIACFNFAGTHTITINSDEIAREAFRERDADLADRPQLSIVESIGDNYKTMGTSSYGEHFMKMKKVITTEIMSVKTLNMLEAARTIEADNLIAYIHSMYQRSETVDVRELSRVYGYAVTMRMLFGRRHVTKENMFSDDGRLGKAEKHHLEVIFNTLNCLPGFSPVDYVDRWLGGWNIDGEEERAKVNVNLVRSYNNPIIDERVEIWREKGGKAAVEDWLDTFITLKDQNGNYLVTPDEIKAQCVEFCIAAIDNPANNMEWTLGEMLKNPEILRKALKELDEVVGKDRLVQESDIRNLNYLKACCRETFRIHPSAHYVPPHVARQDTTLGGYFIPKGSHIHVCRPGLGRNPKIWKDPLAYEPERHLQGDGITKEVTLVETEMRFVSFSTGRRGCVGVKVGTIMMAMMLARFLQGFNWKLHRDFGPLSLEEDDASLLMAKPLLLSVEPRLASNLYPKFRP

SEQ ID NO: 81858 - DNA, 1146 bp, Arabidopsis thaliana
  misc_feature (1)..(1146): Ceres Seq. ID no. 12661730
  misc_feature: MA Experiment ID: 20000346 Result: Up-regulated in Transcription
  misc_feature: MA Experiment 20000346 PARAMETER Experiment Name: At_2mM_SA_Sub_P Parameter: Age (day) Value: 14
  misc_feature: MA Experiment 20000346 PARAMETER Experiment Name: At_2mM_SA_Sub_P Parameter: Organism Value: A. thaliana
  misc_feature: MA Experiment 20000346 PARAMETER Experiment Name: At_2mM_SA_Sub_P Parameter: Plant Line Value: WS
  misc_feature: MA Experiment 20000346 PARAMETER Experiment Name: At_2mM_SA_Sub_P Parameter: Timepoint (hr) Value: 1
  misc_feature: MA Experiment 20000346 PARAMETER Experiment Name: At_2mM_SA_Sub_P Parameter: Tissue Value: Aerial
  misc_feature: MA Experiment 20000346 PARAMETER Experiment Name: At_2mM_SA_Sub_P Parameter: Treatment Value: 2mM SA vs. No Treatment
  misc_feature: MA Experiment ID: 20000347 Result: Up-regulated in Transcription
  misc_feature: MA Experiment 20000347 PARAMETER Experiment Name: At_2mM_SA_Sub_P Parameter: Age (day) Value: 14
  misc_feature: MA Experiment 20000347 PARAMETER Experiment Name: At_2mM_SA_Sub_P Parameter: Organism Value: A. thaliana
  misc_feature: MA Experiment 20000347 PARAMETER Experiment Name: At_2mM_SA_Sub_P Parameter: Plant Line Value: WS
  misc_feature: MA Experiment 20000347 PARAMETER Experiment Name: At_2mM_SA_Sub_P Parameter: Timepoint (hr) Value: 6
  misc_feature: MA Experiment 20000347 PARAMETER Experiment Name: At_2mM_SA_Sub_P Parameter: Tissue Value: Aerial
  misc_feature: MA Experiment 20000347 PARAMETER Experiment Name: At_2mM_SA_Sub_P Parameter: Treatment Value: 2mM SA vs. No Treatment
  misc_feature: MA Experiment ID: 20000348 Result: Down-regulated in Transcription
  misc_feature: MA Experiment 20000348 PARAMETER Experiment Name: At_100uM_ABA_Sub_P Parameter: Age (day) Value: 14
  misc_feature: MA Experiment 20000348 PARAMETER Experiment Name: At_100uM_ABA_Sub_P Parameter: Organism Value: A. thaliana
  misc_feature: MA Experiment 20000348 PARAMETER Experiment Name: At_100uM_ABA_Sub_P Parameter: Plant Line Value: WS
  misc_feature: MA Experiment 20000348 PARAMETER Experiment Name: At_100uM_ABA_Sub_P Parameter: Timepoint (hr) Value: 1
  misc_feature: MA Experiment 20000348 PARAMETER Experiment Name: At_100uM_ABA_Sub_P Parameter: Tissue Value: Aerial
  misc_feature: MA Experiment 20000348 PARAMETER Experiment Name: At_100uM_ABA_Sub_P Parameter: Treatment Value: 100uM ABA vs. No Treatment
  misc_feature: MA Experiment ID: 20000349 Result: Down-regulated in Transcription
  misc_feature: MA Experiment 20000349 PARAMETER Experiment Name: At_100uM_ABA_Sub_P Parameter: Age (day) Value: 14
  misc_feature: MA Experiment 20000349 PARAMETER Experiment Name: At_100uM_ABA_Sub_P Parameter: Organism Value: A. thaliana
  misc_feature: MA Experiment 20000349 PARAMETER Experiment Name: At_100uM_ABA_Sub_P Parameter: Plant Line Value: WS
  misc_feature: MA Experiment 20000349 PARAMETER Experiment Name: At_100uM_ABA_Sub_P Parameter: Timepoint (hr) Value: 6
  misc_feature: MA Experiment 20000349 PARAMETER Experiment Name: At_100uM_ABA_Sub_P Parameter: Tissue Value: Aerial
  misc_feature: MA Experiment 20000349 PARAMETER Experiment Name: At_100uM_ABA_Sub_P Parameter: Treatment Value: 100uM ABA vs. No Treatment
  misc_feature: MA Experiment ID: 20000355 Result: Down-regulated in Transcription
  misc_feature: MA Experiment 20000355 PARAMETER Experiment Name: At_Siliques_Sub_P Parameter: Age (day) Value: 21
  misc_feature: MA Experiment 20000355 PARAMETER Experiment Name: At_Siliques_Sub_P Parameter: Organism Value: A. thaliana
  misc_feature: MA Experiment 20000355 PARAMETER Experiment Name: At_Siliques_Sub_P Parameter: Plant Line Value: WS
  misc_feature: MA Experiment 20000355 PARAMETER Experiment Name: At_Siliques_Sub_P Parameter: Tissue Value: Less Than 5mm Siliques vs. Whole Plant
  misc_feature: MA Experiment ID: 20000440 Result: Down-regulated in Transcription
  misc_feature: MA Experiment 20000440 PARAMETER Experiment Name: At_Closed-Flower__Sub_P Parameter: Tissue Value: Closed Flower vs. Whole Plant
atggcgaagaaagcacttttgataggaatcaactacccaggaaccgcggtggagttacgtggctgtgtcaacgacgtccaccggatgcagaaatgcctaatcgagctttacgggttcgccaacaaggacatcgtcataatgatagacacagacaaatcatgtatacaacctacgggcaagaatatctgcgacgaactggataatctcatcgcatcagggcaatctggcgattttctggtctttcattacagtggacatggcacgagaatccctcctgggatagaagactcagaagaccctacagggtttgacgagtgtatcactccgtgcgatatgaatctaataaaggaccagcaatttagagaaatggtgtcacgtgtaaaagaaggttgtcagttgacgataatctcggactcttgtcatagtggtggtctcatccaggaagtaaaggagcagatcggtgaaagccatatgaagccggtcgataaagttaaggagcagatcgaggaaagccatatgaagcagccaaaactcgggattgctagttacttccttaacattgtgatgaatttgttagcgacttgtggagtctcaaaatctcagagagaccgtggaggtggcgaagaaagctttagaggagagatagaattagagaaagacgaaacgcttgatataaaaacaagatatctacctttcgaaagctacttaagtcttctcaaggaacaaaccgggcaaaccaatatcgaacctgtgagaattagacagacacttctcaaattattcggtgaagacccaagcccgaatcgtcagagaggtttaagtgacctaggaaactgcgaggttgatgcaggtgattctggagcttcaagattgaatgccgttaccgacaatgggattctattaagtggatgtcaaacagatcagagatcagaggatgtttatgtgacaagaactggaaaagcttatggagcattcagtgatgcgattcagatgatattgtccgcgccgagaaaggataagaagaagattacgaacaaagaattggtttccgaagctagagtgtttctcaagaaacgggggtatagtcaacgaccaggcttgtattgtcatgaccgttttgttgataaaccatttatatgctactaa

SEQ ID NO: 81859 - protein, 381 aa, Arabidopsis thaliana
  peptide (1)..(381): Ceres Seq. ID no. 12661731
  misc_feature (3)..(381): Pfam Name: Caspase domain Pfam Description: Caspase domain
  misc_feature (1)..(381): Homolog of NCBI NO: 15219249 NR Description: hypothetical protein common family; protein id:
  misc_feature (1)..(267): Homolog of NCBI NO: 32482818 NR Description: metacaspase 4 [Arabidopsis thaliana]
  misc_feature (1)..(267): Homolog of NCBI NO: 37788557 NR Description: metacaspase 7 [Arabidopsis thaliana]
  misc_feature (287)..(380): Homolog of NCBI NO: 32482818 NR Description: metacaspase 4 [Arabidopsis thaliana]
  misc_feature (287)..(380): Homolog of NCBI NO: 37788557 NR Description: metacaspase 7 [Arabidopsis thaliana]
  misc_feature (1)..(315): Homolog of NCBI NO: 15219345 NR Description: hypothetical protein common family; protein id: supported by cDNA: gi_19347868 [Arabidopsis thaliana]
  misc_feature (280)..(380): Homolog of NCBI NO: 15219345 NR Description: hypothetical protein common family; protein id: supported by cDNA: gi_19347868 [Arabidopsis thaliana]
  misc_feature (1)..(315): Homolog of NCBI NO: 33304380 NR Description: metacaspase 7 [Arabidopsis thaliana]
  misc_feature (280)..(380): Homolog of NCBI NO: 33304380 NR Description: metacaspase 7 [Arabidopsis thaliana]
  misc_feature (8)..(278): Homolog of NCBI NO: 23343885 NR Description: metacaspase 1 [Lycopersicon esculentum]
MAKKALLIGINYPGTAVELRGCVNDVHRMQKCLIELYGFANKDIVIMIDTDKSCIQPTGKNICDELDNLIASGQSGDFLVFHYSGHGTRIPPGIEDSEDPTGFDECITPCDMNLIKDQQFREMVSRVKEGCQLTIISDSCHSGGLIQEVKEQIGESHMKPVDKVKEQIEESHMKQPKLGIASYFLNIVMNLLATCGVSKSQRDRGGGEESFRGEIELEKDETLDIKTRYLPFESYLSLLKEQTGQTNIEPVRIRQTLLKLFGEDPSPNRQRGLSDLGNCEVDAGDSGASRLNAVTDNGILLSGCQTDQRSEDVYVTRTGKAYGAFSDAIQMILSAPRKDKKKITNKELVSEARVFLKKRGYSQRPGLYCHDRFVDKPFICY

SEQ ID NO: 81860 - protein, 353 aa, Arabidopsis thaliana
  peptide (1)..(353): Ceres Seq. ID no. 12661732
  misc_feature (1)..(353): Pfam Name: Caspase domain Pfam Description: Caspase domain
  misc_feature (1)..(353): Homolog of NCBI NO: 15219249 NR Description: hypothetical protein common family; protein id:
  misc_feature (1)..(239): Homolog of NCBI NO: 32482818 NR Description: metacaspase 4 [Arabidopsis thaliana]
  misc_feature (1)..(239): Homolog of NCBI NO: 37788557 NR Description: metacaspase 7 [Arabidopsis thaliana]
  misc_feature (259)..(352): Homolog of NCBI NO: 32482818 NR Description: metacaspase 4 [Arabidopsis thaliana]
  misc_feature (259)..(352): Homolog of NCBI NO: 37788557 NR Description: metacaspase 7 [Arabidopsis thaliana]
  misc_feature (1)..(287): Homolog of NCBI NO: 15219345 NR Description: hypothetical protein common family; protein id: supported by cDNA: gi_19347868 [Arabidopsis thaliana]
  misc_feature (252)..(352): Homolog of NCBI NO: 15219345 NR Description: hypothetical protein common family; protein id: supported by cDNA: gi_19347868 [Arabidopsis thaliana]
  misc_feature (1)..(287): Homolog of NCBI NO: 33304380 NR Description: metacaspase 7 [Arabidopsis thaliana]
  misc_feature (252)..(352): Homolog of NCBI NO: 33304380 NR Description: metacaspase 7 [Arabidopsis thaliana]
  misc_feature (1)..(250): Homolog of NCBI NO: 23343885 NR Description: metacaspase 1 [Lycopersicon esculentum]
MQKCLIELYGFANKDIVIMIDTDKSCIQPTGKNICDELDNLIASGQSGDFLVFHYSGHGTRIPPGIEDSEDPTGFDECITPCDMNLIKDQQFREMVSRVKEGCQLTIISDSCHSGGLIQEVKEQIGESHMKPVDKVKEQIEESHMKQPKLGIASYFLNIVMNLLATCGVSKSQRDRGGGEESFRGEIELEKDETLDIKTRYLPFESYLSLLKEQTGQTNIEPVRIRQTLLKLFGEDPSPNRQRGLSDLGNCEVDAGDSGASRLNAVTDNGILLSGCQTDQRSEDVYVTRTGKAYGAFSDAIQMILSAPRKDKKKITNKELVSEARVFLKKRGYSQRPGLYCHDRFVDKPFICY

SEQ ID NO: 81861 - protein, 335 aa, Arabidopsis thaliana
  peptide (1)..(335): Ceres Seq. ID no. 12661733
  misc_feature (1)..(335): Pfam Name: Caspase domain Pfam Description: Caspase domain
  misc_feature (1)..(335): Homolog of NCBI NO: 15219249 NR Description: hypothetical protein common family; protein id:
  misc_feature (1)..(221): Homolog of NCBI NO: 32482818 NR Description: metacaspase 4 [Arabidopsis thaliana]
  misc_feature (1)..(221): Homolog of NCBI NO: 37788557 NR Description: metacaspase 7 [Arabidopsis thaliana]
  misc_feature (241)..(334): Homolog of NCBI NO: 32482818 NR Description: metacaspase 4 [Arabidopsis thaliana]
  misc_feature (241)..(334): Homolog of NCBI NO: 37788557 NR Description: metacaspase 7 [Arabidopsis thaliana]
  misc_feature (1)..(269): Homolog of NCBI NO: 15219345 NR Description: hypothetical protein common family; protein id: supported by cDNA: gi_19347868 [Arabidopsis thaliana]
  misc_feature (234)..(334): Homolog of NCBI NO: 15219345 NR Description: hypothetical protein common family; protein id: supported by cDNA: gi_19347868 [Arabidopsis thaliana]
  misc_feature (1)..(269): Homolog of NCBI NO: 33304380 NR Description: metacaspase 7 [Arabidopsis thaliana]
  misc_feature (234)..(334): Homolog of NCBI NO: 33304380 NR Description: metacaspase 7 [Arabidopsis thaliana]
  misc_feature (1)..(232): Homolog of NCBI NO: 23343885 NR Description: metacaspase 1 [Lycopersicon esculentum]
MIDTDKSCIQPTGKNICDELDNLIASGQSGDFLVFHYSGHGTRIPPGIEDSEDPTGFDECITPCDMNLIKDQQFREMVSRVKEGCQLTIISDSCHSGGLIQEVKEQIGESHMKPVDKVKEQIEESHMKQPKLGIASYFLNIVMNLLATCGVSKSQRDRGGGEESFRGEIELEKDETLDIKTRYLPFESYLSLLKEQTGQTNIEPVRIRQTLLKLFGEDPSPNRQRGLSDLGNCEVDAGDSGASRLNAVTDNGILLSGCQTDQRSEDVYVTRTGKAYGAFSDAIQMILSAPRKDKKKITNKELVSEARVFLKKRGYSQRPGLYCHDRFVDKPFICY

SEQ ID NO: 81862 - DNA, 495 bp, Arabidopsis thaliana
  misc_feature (1)..(495): Ceres Seq. ID no. 12661785
  misc_feature: MA Experiment ID: 20000355 Result: Up-regulated in Transcription
  misc_feature: MA Experiment 20000355 PARAMETER Experiment Name: At_Siliques_Sub_P Parameter: Age (day) Value: 21
  misc_feature: MA Experiment 20000355 PARAMETER Experiment Name: At_Siliques_Sub_P Parameter: Organism Value: A. thaliana
  misc_feature: MA Experiment 20000355 PARAMETER Experiment Name: At_Siliques_Sub_P Parameter: Plant Line Value: WS
  misc_feature: MA Experiment 20000355 PARAMETER Experiment Name: At_Siliques_Sub_P Parameter: Tissue Value: Less Than 5mm Siliques vs. Whole Plant
atgacgagtacaaacacgagaaacaaaggcaaatgcatagtagaaggaccaccaccgactctaagccgttatgagtcacaaaaaagccgcgactggaacacgttttgccagtatctcatgaccaagatgccaccagttcacgtatgggagtgtgaatcaaaccacatcctcgatttcctccaaagtcgtgaccagtttggtaaaacaaaagttcatatccaaggatgcgttttcttcggacagaaagagccaccaggagagtgtaactgcccgttgaaacaggcgtggggaagcttagatgctttgatcggacggctgagagcagcttacgaggagaacggtggcttaacggagaaaaacccgtttgcccggggagggattaggatttttctgagggaagtgagaggttcacaggcgaaggcgagaggagttttgtacaaaaaaaagaagcgtcttgtagttgttggtacgggaactagtactacttggacttaa

SEQ ID NO: 81863 - protein, 164 aa, Arabidopsis thaliana
  peptide (1)..(164): Ceres Seq. ID no. 12661786
  misc_feature (5)..(137): Pfam Name: Protein of unknown function (DUF640) Pfam Description: Protein of unknown function (DUF640)
  misc_feature (1)..(164): Homolog of NCBI NO: 15219952 NR Description: hypothetical protein; protein id: At1g16910.1
  misc_feature (18)..(151): Homolog of NCBI NO: 18412120 NR Description: Expressed protein; protein id: At1g78815.1, by cDNA: 230925. [Arabidopsis thaliana] >gi|25341951|pir||D96817
  misc_feature (18)..(151): Homolog of NCBI NO: 21592379 NR Description: unknown [Arabidopsis thaliana]
  misc_feature (4)..(151): Homolog of NCBI NO: 18406012 NR Description: expressed protein; protein id: At2g42610.1, by cDNA: gi_6691164 [Arabidopsis thaliana]
  misc_feature (10)..(151): Homolog of NCBI NO: 18390725 NR Description: expressed protein; protein id: At1g07090.1, by cDNA: 28780. [Arabidopsis thaliana] >gi|25341953|pir||G86205
  misc_feature (17)..(151): Homolog of NCBI NO: 34907938 NR Description: B1088C09.17 [Oryza sativa (japonica
  misc_feature (17)..(151): Homolog of NCBI NO: 15233942 NR Description: putative protein; protein id: At4g18610.1
  misc_feature (18)..(153): Homolog of NCBI NO: 15229310 NR Description: unknown protein; protein id: At3g04510.1 thaliana] >gi|7547110|gb|AAF63782.1| unknown protein [Arabidopsis
  misc_feature (18)..(153): Homolog of NCBI NO: 15241821 NR Description: putative protein; protein id: At5g28490.1
  misc_feature (4)..(151): Homolog of NCBI NO: 38344650 NR Description: OSJNBb0072M01.12 [Oryza sativa (japonica
MTSTNTRNKGKCIVEGPPPTLSRYESQKSRDWNTFCQYLMTKMPPVHVWECESNHILDFLQSRDQFGKTKVHIQGCVFFGQKEPPGECNCPLKQAWGSLDALIGRLRAAYEENGGLTEKNPFARGGIRIFLREVRGSQAKARGVLYKKKKRLVVVGTGTSTTWT

SEQ ID NO: 81864 - protein, 125 aa, Arabidopsis thaliana
  peptide (1)..(125): Ceres Seq. ID no. 12661787
  misc_feature (1)..(98): Pfam Name: Protein of unknown function (DUF640) Pfam Description: Protein of unknown function (DUF640)
  misc_feature (1)..(125): Homolog of NCBI NO: 15219952 NR Description: hypothetical protein; protein id: At1g16910.1
  misc_feature (1)..(112): Homolog of NCBI NO: 18412120 NR Description: Expressed protein; protein id: At1g78815.1, by cDNA: 230925. [Arabidopsis thaliana] >gi|25341951|pir||D96817
  misc_feature (1)..(112): Homolog of NCBI NO: 21592379 NR Description: unknown [Arabidopsis thaliana]
  misc_feature (1)..(112): Homolog of NCBI NO: 18406012 NR Description: expressed protein; protein id: At2g42610.1, by cDNA: gi_6691164 [Arabidopsis thaliana]
  misc_feature (1)..(112): Homolog of NCBI NO: 18390725 NR Description: expressed protein; protein id: At1g07090.1, by cDNA: 28780. [Arabidopsis thaliana] >gi|25341953|pir||G86205
  misc_feature (1)..(112): Homolog of NCBI NO: 34907938 NR Description: B1088C09.17 [Oryza sativa (japonica
  misc_feature (1)..(112): Homolog of NCBI NO: 15233942 NR Description: putative protein; protein id: At4g18610.1
  misc_feature (1)..(114): Homolog of NCBI NO: 15229310 NR Description: unknown protein; protein id: At3g04510.1 thaliana] >gi|7547110|gb|AAF63782.1| unknown protein [Arabidopsis
  misc_feature (1)..(114): Homolog of NCBI NO: 15241821 NR Description: putative protein; protein id: At5g28490.1
  misc_feature (1)..(112): Homolog of NCBI NO: 38344650 NR Description: OSJNBb0072M01.12 [Oryza sativa (japonica
MTKMPPVHVWECESNHILDFLQSRDQFGKTKVHIQGCVFFGQKEPPGECNCPLKQAWGSLDALIGRLRAAYEENGGLTEKNPFARGGIRIFLREVRGSQAKARGVLYKKKKRLVVVGTGTSTTWT

SEQ ID NO: 81865 - protein, 122 aa, Arabidopsis thaliana
  peptide (1)..(122): Ceres Seq. ID no. 12661788
  misc_feature (1)..(95): Pfam Name: Protein of unknown function (DUF640) Pfam Description: Protein of unknown function (DUF640)
  misc_feature (1)..(122): Homolog of NCBI NO: 15219952 NR Description: hypothetical protein; protein id: At1g16910.1
  misc_feature (1)..(109): Homolog of NCBI NO: 18412120 NR Description: Expressed protein; protein id: At1g78815.1, by cDNA: 230925. [Arabidopsis thaliana] >gi|25341951|pir||D96817
  misc_feature (1)..(109): Homolog of NCBI NO: 21592379 NR Description: unknown [Arabidopsis thaliana]
  misc_feature (1)..(109): Homolog of NCBI NO: 18406012 NR Description: expressed protein; protein id: At2g42610.1, by cDNA: gi_6691164 [Arabidopsis thaliana]
  misc_feature (1)..(109): Homolog of NCBI NO: 18390725 NR Description: expressed protein; protein id: At1g07090.1, by cDNA: 28780. [Arabidopsis thaliana] >gi|25341953|pir||G86205
  misc_feature (1)..(109): Homolog of NCBI NO: 34907938 NR Description: B1088C09.17 [Oryza sativa (japonica
  misc_feature (1)..(109): Homolog of NCBI NO: 15233942 NR Description: putative protein; protein id: At4g18610.1
  misc_feature (1)..(111): Homolog of NCBI NO: 15229310 NR Description: unknown protein; protein id: At3g04510.1 thaliana] >gi|7547110|gb|AAF63782.1| unknown protein [Arabidopsis
  misc_feature (1)..(111): Homolog of NCBI NO: 15241821 NR Description: putative protein; protein id: At5g28490.1
  misc_feature (1)..(109): Homolog of NCBI NO: 38344650 NR Description: OSJNBb0072M01.12 [Oryza sativa (japonica
MPPVHVWECESNHILDFLQSRDQFGKTKVHIQGCVFFGQKEPPGECNCPLKQAWGSLDALIGRLRAAYEENGGLTEKNPFARGGIRIFLREVRGSQAKARGVLYKKKKRLVVVGTGTSTTWT

SEQ ID NO: 81866 - DNA, 657 bp, Arabidopsis thaliana
  misc_feature (1)..(657): Ceres Seq. ID no. 12661824
  misc_feature: MA Experiment ID: 20000166 Result: Up-regulated in Transcription
  misc_feature: MA Experiment 20000166 PARAMETER Experiment Name: At_100uM_ABA_P Parameter: Age (day) Value: 14
  misc_feature: MA Experiment 20000166 PARAMETER Experiment Name: At_100uM_ABA_P Parameter: Organism Value: A. thaliana
  misc_feature: MA Experiment 20000166 PARAMETER Experiment Name: At_100uM_ABA_P Parameter: Plant Line Value: WS
  misc_feature: MA Experiment 20000166 PARAMETER Experiment Name: At_100uM_ABA_P Parameter: Timepoint (hr) Value: 1
  misc_feature: MA Experiment 20000166 PARAMETER Experiment Name: At_100uM_ABA_P Parameter: Tissue Value: Aerial
  misc_feature: MA Experiment 20000166 PARAMETER Experiment Name: At_100uM_ABA_P Parameter: Treatment Value: 100uM ABA vs. No Treatment
  misc_feature: MA Experiment ID: 20000173 Result: Down-regulated in Transcription
  misc_feature: MA Experiment 20000173 PARAMETER Experiment Name: At_42deg_Heat_P Parameter: Age (day) Value: 14
  misc_feature: MA Experiment 20000173 PARAMETER Experiment Name: At_42deg_Heat_P Parameter: Organism Value: A. thaliana
  misc_feature: MA Experiment 20000173 PARAMETER Experiment Name: At_42deg_Heat_P Parameter: Plant Line Value: WS
  misc_feature: MA Experiment 20000173 PARAMETER Experiment Name: At_42deg_Heat_P Parameter: Temperature (deg C) Value: 42 vs. 22
  misc_feature: MA Experiment 20000173 PARAMETER Experiment Name: At_42deg_Heat_P Parameter: Timepoint (hr) Value: 6
  misc_feature: MA Experiment 20000173 PARAMETER Experiment Name: At_42deg_Heat_P Parameter: Tissue Value: Aerial
  misc_feature: MA Experiment ID: 20000180 Result: Down-regulated in Transcription
  misc_feature: MA Experiment 20000180 PARAMETER Experiment Name: At_Germinating_Seeds_P Parameter: Age (hr) Value: 24 vs. 0
  misc_feature: MA Experiment 20000180 PARAMETER Experiment Name: At_Germinating_Seeds_P Parameter: Tissue Value: Germinating Seeds
  misc_feature: MA Experiment ID: 20000182 Result: Up-regulated in Transcription
  misc_feature: MA Experiment 20000182 PARAMETER Experiment Name: At_2mM_SA_P Parameter: Age (day) Value: 14
  misc_feature: MA Experiment 20000182 PARAMETER Experiment Name: At_2mM_SA_P Parameter: Organism Value: A. thaliana
  misc_feature: MA Experiment 20000182 PARAMETER Experiment Name: At_2mM_SA_P Parameter: Plant Line Value: WS
  misc_feature: MA Experiment 20000182 PARAMETER Experiment Name: At_2mM_SA_P Parameter: Timepoint (hr) Value: 6
  misc_feature: MA Experiment 20000182 PARAMETER Experiment Name: At_2mM_SA_P Parameter: Tissue Value: Aerial
  misc_feature: MA Experiment 20000182 PARAMETER Experiment Name: At_2mM_SA_P Parameter: Treatment Value: 2mM SA vs. No Treatment
  misc_feature: MA Experiment ID: 20000185 Result: Up-regulated in Transcription
  misc_feature: MA Experiment 20000185 PARAMETER Experiment Name: At_Roots__P Parameter: Age (day) Value: 7 vs. 21
  misc_feature: MA Experiment 20000185 PARAMETER Experiment Name: At_Roots__P Parameter: Organism Value: A. thaliana
  misc_feature: MA Experiment 20000185 PARAMETER Experiment Name: At_Roots__P Parameter: Tissue Value: Roots vs. Whole Plant
  misc_feature: MA Experiment ID: 20000439 Result: Up-regulated in Transcription
  misc_feature: MA Experiment 20000439 PARAMETER Experiment Name: At_Roots__P Parameter: Age (day) Value: 14 vs. 21
  misc_feature: MA Experiment 20000439 PARAMETER Experiment Name: At_Roots__P Parameter: Organism Value: A. thaliana
  misc_feature: MA Experiment 20000439 PARAMETER Experiment Name: At_Roots__P Parameter: Tissue Value: Roots vs. Whole Plant
  misc_feature: MA Experiment ID: 20000441 Result: Down-regulated in Transcription
  misc_feature: MA Experiment 20000441 PARAMETER Experiment Name: At_1uM_BR-BRZ__P Parameter: Tissue Value: Shoot Apices
  misc_feature: MA Experiment 20000441 PARAMETER Experiment Name: At_1uM_BR-BRZ__P Parameter: Treatment Value: 1uM BR vs. No Treatment
  misc_feature: MA Experiment ID: 20000443 Result: Down-regulated in Transcription
  misc_feature: MA Experiment 20000443 PARAMETER Experiment Name: At_1uM_BR-BRZ__P Parameter: Tissue Value: Shoot Apices
  misc_feature: MA Experiment 20000443 PARAMETER Experiment Name: At_1uM_BR-BRZ__P Parameter: Treatment Value: 1uM BRZ vs. No Treatment
  misc_feature: MA Experiment ID: 20000451 Result: Down-regulated in Transcription
  misc_feature: MA Experiment 20000451 PARAMETER Experiment Name: At_CS6879_Shoots-Roots_P Parameter: Age (day) Value: 14
  misc_feature: MA Experiment 20000451 PARAMETER Experiment Name: At_CS6879_Shoots-Roots_P Parameter: Organism Value: A. thaliana
  misc_feature: MA Experiment 20000451 PARAMETER Experiment Name: At_CS6879_Shoots-Roots_P Parameter: Plant Line Value: CS6879 vs. WS
  misc_feature: MA Experiment 20000451 PARAMETER Experiment Name: At_CS6879_Shoots-Roots_P Parameter: Tissue Value: Roots
  misc_feature: MA Experiment ID: 20000456 Result: Up-regulated in Transcription
  misc_feature: MA Experiment 20000456 PARAMETER Experiment Name: At_100uM_BA_P Parameter: Age (day) Value: 14
  misc_feature: MA Experiment 20000456 PARAMETER Experiment Name: At_100uM_BA_P Parameter: Organism Value: A. thaliana
  misc_feature: MA Experiment 20000456 PARAMETER Experiment Name: At_100uM_BA_P Parameter: Plant Line Value: WS
  misc_feature: MA Experiment 20000456 PARAMETER Experiment Name: At_100uM_BA_P Parameter: Timepoint (hr) Value: 6
  misc_feature: MA Experiment 20000456 PARAMETER Experiment Name: At_100uM_BA_P Parameter: Tissue Value: Aerial
  misc_feature: MA Experiment 20000456 PARAMETER Experiment Name: At_100uM_BA_P Parameter: Treatment Value: 100uM BA vs. No Treatment
  misc_feature: MA Experiment ID: 20000496 Result: Down-regulated in Transcription
  misc_feature: MA Experiment 20000496 PARAMETER Experiment Name: At_Guard_Cells_P Parameter: Harvest Date Value: 7/19/2002
  misc_feature: MA Experiment 20000496 PARAMETER Experiment Name: At_Guard_Cells_P Parameter: Organism Value: Canola
  misc_feature: MA Experiment 20000496 PARAMETER Experiment Name: At_Guard_Cells_P Parameter: Tissue Value: Guard Cells vs. Leaves
  misc_feature: MA Experiment ID: 20000506 Result: Up-regulated in Transcription
  misc_feature: MA Experiment 20000506 PARAMETER Experiment Name: At_Wounding_P Parameter: Organism Value: A. thaliana
  misc_feature: MA Experiment 20000506 PARAMETER Experiment Name: At_Wounding_P Parameter: Plant Line Value: WS
  misc_feature: MA Experiment 20000506 PARAMETER Experiment Name: At_Wounding_P Parameter: Timepoint (hr) Value: 6
  misc_feature: MA Experiment 20000506 PARAMETER Experiment Name: At_Wounding_P Parameter: Tissue Value: Aerial
  misc_feature: MA Experiment 20000506 PARAMETER Experiment Name: At_Wounding_P Parameter: Treatment Value: Wounding vs. No Wounding
  misc_feature: MA Experiment ID: 20000527 Result: Down-regulated in Transcription
  misc_feature: MA Experiment 20000527 PARAMETER Experiment Name: At_10percent_PEG_P Parameter: Age (day) Value: 20
  misc_feature: MA Experiment 20000527 PARAMETER Experiment Name: At_10percent_PEG_P Parameter: Organism Value: A. thaliana
  misc_feature: MA Experiment 20000527 PARAMETER Experiment Name: At_10percent_PEG_P Parameter: Plant Line Value: WS
  misc_feature: MA Experiment 20000527 PARAMETER Experiment Name: At_10percent_PEG_P Parameter: Timepoint (day) Value: 20
  misc_feature: MA Experiment 20000527 PARAMETER Experiment Name: At_10percent_PEG_P Parameter: Tissue Value: Whole Plant
  misc_feature: MA Experiment 20000527 PARAMETER Experiment Name: At_10percent_PEG_P Parameter: Treatment Value: 10percent PEG vs. No Treatment
  misc_feature: MA Experiment ID: 20000576 Result: Down-regulated in Transcription
  misc_feature: MA Experiment 20000576 PARAMETER Experiment Name: At_100uM_ABA_Mutants__P Parameter: Organism Value: A. thaliana
  misc_feature: MA Experiment 20000576 PARAMETER Experiment Name: At_100uM_ABA_Mutants__P Parameter: Plant Line Value: CS23
  misc_feature: MA Experiment 20000576 PARAMETER Experiment Name: At_100uM_ABA_Mutants__P Parameter: Timepoint (hr) Value: 6
  misc_feature: MA Experiment 20000576 PARAMETER Experiment Name: At_100uM_ABA_Mutants__P Parameter: Tissue Value: Whole Plant
  misc_feature: MA Experiment 20000576 PARAMETER Experiment Name: At_100uM_ABA_Mutants__P Parameter: Treatment Value: 1uM ABA vs. No Treatment
  misc_feature: MA Experiment ID: 20000709 Result: Up-regulated in Transcription
  misc_feature: MA Experiment 20000709 PARAMETER Experiment Name: At_15mM_NH4NO3_L-to-H_P Parameter: Age (hr) Value: 14
  misc_feature: MA Experiment 20000709 PARAMETER Experiment Name: At_15mM_NH4NO3_L-to-H_P Parameter: Organism Value: A. thaliana
  misc_feature: MA Experiment 20000709 PARAMETER Experiment Name: At_15mM_NH4NO3_L-to-H_P Parameter: Plant Line Value: WS
  misc_feature: MA Experiment 20000709 PARAMETER Experiment Name: At_15mM_NH4NO3_L-to-H_P Parameter: Timepoint (hr) Value: 4
  misc_feature: MA Experiment 20000709 PARAMETER Experiment Name: At_15mM_NH4NO3_L-to-H_P Parameter: Tissue Value: Aerial
  misc_feature: MA Experiment 20000709 PARAMETER Experiment Name: At_15mM_NH4NO3_L-to-H_P Parameter: Treatment Value: 15mM NH4NO3 vs. 30mM Mannitol
  misc_feature: MA Experiment ID: 20000794 Result: Down-regulated in Transcription
  misc_feature: MA Experiment 20000794 PARAMETER Experiment Name: At_Petals_P Parameter: Age (day) Value: 23-25 days
  misc_feature: MA Experiment 20000794 PARAMETER Experiment Name: At_Petals_P Parameter: Plant Line Value: WS
  misc_feature: MA Experiment 20000794 PARAMETER Experiment Name: At_Petals_P Parameter: Tissue Value: Petals vs. Whole plant
  misc_feature: MA Experiment ID: 20001247 Result: Down-regulated in Transcription
  misc_feature: MA Experiment 20001247 PARAMETER Experiment Name: At_Far-red-induction_P Parameter: Age (day) Value: 7
  misc_feature: MA Experiment 20001247 PARAMETER Experiment Name: At_Far-red-induction_P Parameter: Light Value: Far-red vs. White
  misc_feature: MA Experiment 20001247 PARAMETER Experiment Name: At_Far-red-induction_P Parameter: Organism Value: A. thaliana
  misc_feature: MA Experiment 20001247 PARAMETER Experiment Name: At_Far-red-induction_P Parameter: Plant Line Value: Columbia
  misc_feature: MA Experiment 20001247 PARAMETER Experiment Name: At_Far-red-induction_P Parameter: Timepoint (hr) Value: 1
  misc_feature: MA Experiment 20001247 PARAMETER Experiment Name: At_Far-red-induction_P Parameter: Tissue Value: Whole Plant
  misc_feature: MA Experiment ID: 20001450 Result: Down-regulated in Transcription
  misc_feature: MA Experiment 20001450 PARAMETER Experiment Name: At_Far-red-induction_P Parameter: Age (day) Value: 7
  misc_feature: MA Experiment 20001450 PARAMETER Experiment Name: At_Far-red-induction_P Parameter: Light Value: Far-red vs. White
  misc_feature: MA Experiment 20001450 PARAMETER Experiment Name: At_Far-red-induction_P Parameter: Organism Value: A. thaliana
  misc_feature: MA Experiment 20001450 PARAMETER Experiment Name: At_Far-red-induction_P Parameter: Plant Line Value: Columbia
  misc_feature: MA Experiment 20001450 PARAMETER Experiment Name: At_Far-red-induction_P Parameter: Timepoint (hr) Value: 8
  misc_feature: MA Experiment 20001450 PARAMETER Experiment Name: At_Far-red-induction_P Parameter: Tissue Value: Whole Plant
  misc_feature: MA Experiment ID: 20001451 Result: Down-regulated in Transcription
  misc_feature: MA Experiment 20001451 PARAMETER Experiment Name: At_Far-red-induction_P Parameter: Age (day) Value: 7
  misc_feature: MA Experiment 20001451 PARAMETER Experiment Name: At_Far-red-induction_P Parameter: Light Value: Far-red vs. White
  misc_feature: MA Experiment 20001451 PARAMETER Experiment Name: At_Far-red-induction_P Parameter: Organism Value: A. thaliana
  misc_feature: MA Experiment 20001451 PARAMETER Experiment Name: At_Far-red-induction_P Parameter: Plant Line Value: Columbia
  misc_feature: MA Experiment 20001451 PARAMETER Experiment Name: At_Far-red-induction_P Parameter: Timepoint (hr) Value: 24
  misc_feature: MA Experiment 20001451 PARAMETER Experiment Name: At_Far-red-induction_P Parameter: Tissue Value: Whole Plant
  misc_feature: MA Experiment ID: 20001554 Result: Down-regulated in Transcription
  misc_feature: MA Experiment 20001554 PARAMETER Experiment Name: At_Drought_Soil_Dry_P Parameter: Age (day) Value: 21
  misc_feature: MA Experiment 20001554 PARAMETER Experiment Name: At_Drought_Soil_Dry_P Parameter: Organism Value: A. thaliana
  misc_feature: MA Experiment 20001554 PARAMETER Experiment Name: At_Drought_Soil_Dry_P Parameter: Plant Line Value: WS
  misc_feature: MA Experiment 20001554 PARAMETER Experiment Name: At_Drought_Soil_Dry_P Parameter: Post Timepoint (hr) Value: None
  misc_feature: MA Experiment 20001554 PARAMETER Experiment Name: At_Drought_Soil_Dry_P Parameter: Post-Treatment Value: None
  misc_feature: MA Experiment 20001554 PARAMETER Experiment Name: At_Drought_Soil_Dry_P Parameter: Timepoint (day) Value: 7
  misc_feature: MA Experiment 20001554 PARAMETER Experiment Name: At_Drought_Soil_Dry_P Parameter: Treatment Value: Drought vs. No Drought
  misc_feature: MA Experiment ID: 20001557 Result: Up-regulated in Transcription
  misc_feature: MA Experiment 20001557 PARAMETER Experiment Name: At_Drought_Soil_Dry_P Parameter: Age (day) Value: 27
  misc_feature: MA Experiment 20001557 PARAMETER Experiment Name: At_Drought_Soil_Dry_P Parameter: Organism Value: A. thaliana
  misc_feature: MA Experiment 20001557 PARAMETER Experiment Name: At_Drought_Soil_Dry_P Parameter: Plant Line Value: WS
  misc_feature: MA Experiment 20001557 PARAMETER Experiment Name: At_Drought_Soil_Dry_P Parameter: Post Timepoint (hr) Value: 3
  misc_feature: MA Experiment 20001557 PARAMETER Experiment Name: At_Drought_Soil_Dry_P Parameter: Post-Treatment Value: Re-Water vs. No Drought
  misc_feature: MA Experiment 20001557 PARAMETER Experiment Name: At_Drought_Soil_Dry_P Parameter: Timepoint (day) Value: 13
  misc_feature: MA Experiment 20001557 PARAMETER Experiment Name: At_Drought_Soil_Dry_P Parameter: Treatment Value: Drought vs. No Drought
  misc_feature: MA Experiment ID: 20001560 Result: Up-regulated in Transcription
  misc_feature: MA Experiment 20001560 PARAMETER Experiment Name: At_Drought_Soil_Dry_P Parameter: Age (day) Value: 28
  misc_feature: MA Experiment 20001560 PARAMETER Experiment Name: At_Drought_Soil_Dry_P Parameter: Organism Value: A. thaliana
  misc_feature: MA Experiment 20001560 PARAMETER Experiment Name: At_Drought_Soil_Dry_P Parameter: Plant Line Value: WS
  misc_feature: MA Experiment 20001560 PARAMETER Experiment Name: At_Drought_Soil_Dry_P Parameter: Post Timepoint (hr) Value: None
  misc_feature: MA Experiment 20001560 PARAMETER Experiment Name: At_Drought_Soil_Dry_P Parameter: Post-Treatment Value: None
  misc_feature: MA Experiment 20001560 PARAMETER Experiment Name: At_Drought_Soil_Dry_P Parameter: Timepoint (day) Value: 14
  misc_feature: MA Experiment 20001560 PARAMETER Experiment Name: At_Drought_Soil_Dry_P Parameter: Treatment Value: Drought vs. No Drought
atggcagatgaggtgattcttctggatttctgggcgagtatgtttgggatgaggacaagaattgctctggcggagaaaagagttaagtacgatcacagagaagaagatctatggaataagagctccttgctcctcgagatgaacccggttcataagaaaattccggttctcatccacaatggtaaaccggtatgtgaatctctcattcagatcgagtacatagacgagacttggcccgacaataaccctctccttccctccgatccttacaagagagctcatgccaaattctgggccgacttcatcgacaaaaaggtgaatgttacggcgagaaggatttgggcggtcaaaggtgaggagcaagaagcagccaaggagttaatcgaaatactcaagacgctagagtctgagcttggagacaaaaagtactttggagacgaaacttttgggtatgtagatatagctctcattggattccatagctggtttgcagtgtacgagaagtttggaaatgtcagtatcgaatctgagtgttcgaaattggttgcgtgggccaaaaggtgtttggagagagagagcgtcgctaaagccctgcctgagtcagagaaggtcattacattcatttccgaacgtaggaagaaacttgggttggagtaa

SEQ ID NO: 81867 - protein, 218 aa, Arabidopsis thaliana
  peptide (1)..(218): Ceres Seq. ID no. 12661825
  misc_feature (1)..(218): Homolog of NCBI NO: 15220040 NR Description: glutathione transferase, putative; protein id: [Arabidopsis thaliana] >gi|25313210|pir||G86307 probable
  misc_feature (1)..(218): Homolog of NCBI NO: 15220041 NR Description: glutathione transferase, putative; protein id: [Arabidopsis thaliana] >gi|25313212|pir||H86307 probable
  misc_feature (1)..(214): Homolog of NCBI NO: 18411929 NR Description: glutathione transferase, putative; protein id: supported by cDNA: 30759., supported by cDNA: gi_14326476
  misc_feature (1)..(217): Homolog of NCBI NO: 7447307 NR Description: glutathione transferase (EC 2.5.1.18) - papaya
  misc_feature (1)..(214): Homolog of NCBI NO: 21592644 NR Description: glutathione transferase, putative [Arabidopsis
MADEVILLDFWASMFGMRTRIALAEKRVKYDHREEDLWNKSSLLLEMNPVHKKIPVLIHNGKPVCESLIQIEYIDETWPDNNPLLPSDPYKRAHAKFWADFIDKKVNVTARRIWAVKGEEQEAAKELIEILKTLESELGDKKYFGDETFGYVDIALIGFHSWFAVYEKFGNVSIESECSKLVAWAKRCLERESVAKALPESEKVITFISERRKKLGLE

SEQ ID NO: 81868 - protein, 205 aa, Arabidopsis thaliana
  peptide (1)..(205): Ceres Seq. ID no. 12661826
  misc_feature (1)..(205): Homolog of NCBI NO: 15220040 NR Description: glutathione transferase, putative; protein id: [Arabidopsis thaliana] >gi|25313210|pir||G86307 probable
  misc_feature (1)..(205): Homolog of NCBI NO: 15220041 NR Description: glutathione transferase, putative; protein id: [Arabidopsis thaliana] >gi|25313212|pir||H86307 probable
  misc_feature (1)..(201): Homolog of NCBI NO: 18411929 NR Description: glutathione transferase, putative; protein id: supported by cDNA: 30759., supported by cDNA: gi_14326476
  misc_feature (1)..(204): Homolog of NCBI NO: 7447307 NR Description: glutathione transferase (EC 2.5.1.18) - papaya
  misc_feature (1)..(201): Homolog of NCBI NO: 21592644 NR Description: glutathione transferase, putative [Arabidopsis
MFGMRTRIALAEKRVKYDHREEDLWNKSSLLLEMNPVHKKIPVLIHNGKPVCESLIQIEYIDETWPDNNPLLPSDPYKRAHAKFWADFIDKKVNVTARRIWAVKGEEQEAAKELIEILKTLESELGDKKYFGDETFGYVDIALIGFHSWFAVYEKFGNVSIESECSKLVAWAKRCLERESVAKALPESEKVITFISERRKKLGLE

SEQ ID NO: 81869 - protein, 202 aa, Arabidopsis thaliana
  peptide (1)..(202): Ceres Seq. ID no. 12661827
  misc_feature (1)..(202): Homolog of NCBI NO: 15220040 NR Description: glutathione transferase, putative; protein id: [Arabidopsis thaliana] >gi|25313210|pir||G86307 probable
  misc_feature (1)..(202): Homolog of NCBI NO: 15220041 NR Description: glutathione transferase, putative; protein id: [Arabidopsis thaliana] >gi|25313212|pir||H86307 probable
  misc_feature (1)..(198): Homolog of NCBI NO: 18411929 NR Description: glutathione transferase, putative; protein id: supported by cDNA: 30759., supported by cDNA: gi_14326476
  misc_feature (1)..(201): Homolog of NCBI NO: 7447307 NR Description: glutathione transferase (EC 2.5.1.18) - papaya
  misc_feature (1)..(198): Homolog of NCBI NO: 21592644 NR Description: glutathione transferase, putative [Arabidopsis
MRTRIALAEKRVKYDHREEDLWNKSSLLLEMNPVHKKIPVLIHNGKPVCESLIQIEYIDETWPDNNPLLPSDPYKRAHAKFWADFIDKKVNVTARRIWAVKGEEQEAAKELIEILKTLESELGDKKYFGDETFGYVDIALIGFHSWFAVYEKFGNVSIESECSKLVAWAKRCLERESVAKALPESEKVITFISERRKKLGLE

SEQ ID NO: 81870 - DNA, 2765 bp, Arabidopsis thaliana
  misc_feature (1)..(2765): Ceres Seq. ID no. 12661860
  misc_feature: MA Experiment ID: 20000182 Result: Up-regulated in Transcription
  misc_feature: MA Experiment 20000182 PARAMETER Experiment Name: At_2mM_SA_P Parameter: Age (day) Value: 14
  misc_feature: MA Experiment 20000182 PARAMETER Experiment Name: At_2mM_SA_P Parameter: Organism Value: A. thaliana
  misc_feature: MA Experiment 20000182 PARAMETER Experiment Name: At_2mM_SA_P Parameter: Plant Line Value: WS
  misc_feature: MA Experiment 20000182 PARAMETER Experiment Name: At_2mM_SA_P Parameter: Timepoint (hr) Value: 6
  misc_feature: MA Experiment 20000182 PARAMETER Experiment Name: At_2mM_SA_P Parameter: Tissue Value: Aerial
  misc_feature: MA Experiment 20000182 PARAMETER Experiment Name: At_2mM_SA_P Parameter: Treatment Value: 2mM SA vs. No Treatment
  misc_feature: MA Experiment ID: 20000184 Result: Down-regulated in Transcription
  misc_feature: MA Experiment 20000184 PARAMETER Experiment Name: At_Shoots__P Parameter: Age (day) Value: 7
  misc_feature: MA Experiment 20000184 PARAMETER Experiment Name: At_Shoots__P Parameter: Tissue Value: Shoots vs. Whole Plant
  misc_feature: MA Experiment ID: 20000234 Result: Down-regulated in Transcription
  misc_feature: MA Experiment 20000234 PARAMETER Experiment Name: At_Siliques_P Parameter: Age (day) Value: 21
  misc_feature: MA Experiment 20000234 PARAMETER Experiment Name: At_Siliques_P Parameter: Organism Value: A. thaliana
  misc_feature: MA Experiment 20000234 PARAMETER Experiment Name: At_Siliques_P Parameter: Plant Line Value: WS
  misc_feature: MA Experiment 20000234 PARAMETER Experiment Name: At_Siliques_P Parameter: Tissue Value: Less Than 5mm Siliques vs. Whole Plant
  misc_feature: MA Experiment ID: 20000235 Result: Down-regulated in Transcription
  misc_feature: MA Experiment 20000235 PARAMETER Experiment Name: At_Siliques_P Parameter: Age (day) Value: 21
  misc_feature: MA Experiment 20000235 PARAMETER Experiment Name: At_Siliques_P Parameter: Organism Value: A. thaliana
  misc_feature: MA Experiment 20000235 PARAMETER Experiment Name: At_Siliques_P Parameter: Plant Line Value: WS
  misc_feature: MA Experiment 20000235 PARAMETER Experiment Name: At_Siliques_P Parameter: Tissue Value: 5-10mm Siliques vs. Whole Plant
  misc_feature: MA Experiment ID: 20000264 Result: Down-regulated in Transcription
  misc_feature: MA Experiment 20000264 PARAMETER Experiment Name: At_Open_Flower_P Parameter: Age (day) Value: 21
  misc_feature: MA Experiment 20000264 PARAMETER Experiment Name: At_Open_Flower_P Parameter: Plant Line Value: WS
  misc_feature: MA Experiment 20000264 PARAMETER Experiment Name: At_Open_Flower_P Parameter: Tissue Value: Open Flower vs. Whole Plant
  misc_feature: MA Experiment ID: 20000265 Result: Down-regulated in Transcription
  misc_feature: MA Experiment 20000265 PARAMETER Experiment Name: At_Open_Flower_P Parameter: Age (day) Value: 21
  misc_feature: MA Experiment 20000265 PARAMETER Experiment Name: At_Open_Flower_P Parameter: Plant Line Value: WS
  misc_feature: MA Experiment 20000265 PARAMETER Experiment Name: At_Open_Flower_P Parameter: Tissue Value: Closed Flower vs. Whole Plant
  misc_feature: MA Experiment ID: 20000286 Result: Down-regulated in Transcription
  misc_feature: MA Experiment 20000286 PARAMETER Experiment Name: At_Open_Flower_P Parameter: Age (day) Value: 21
  misc_feature: MA Experiment 20000286 PARAMETER Experiment Name: At_Open_Flower_P Parameter: Plant Line Value: WS
  misc_feature: MA Experiment 20000286 PARAMETER Experiment Name: At_Open_Flower_P Parameter: Tissue Value: Half Open vs. Whole Plant
  misc_feature: MA Experiment ID: 20000495 Result: Down-regulated in Transcription
  misc_feature: MA Experiment 20000495 PARAMETER Experiment Name: At_Guard_Cells_P Parameter: Harvest Date Value: 8/2/2002
  misc_feature: MA Experiment 20000495 PARAMETER Experiment Name: At_Guard_Cells_P Parameter: Organism Value: A. thaliana
  misc_feature: MA Experiment 20000495 PARAMETER Experiment Name: At_Guard_Cells_P Parameter: Tissue Value: Guard Cells vs. Leaves
  misc_feature: MA Experiment ID: 20001905 Result: Up-regulated in Transcription
  misc_feature: MA Experiment 20001905 PARAMETER Experiment Name: At_Drought_Reproduction_P Parameter: Age (day) Value: 40
  misc_feature: MA Experiment 20001905 PARAMETER Experiment Name: At_Drought_Reproduction_P Parameter: Organism Value: A. thaliana
  misc_feature: MA Experiment 20001905 PARAMETER Experiment Name: At_Drought_Reproduction_P Parameter: Plant Line Value: WS
  misc_feature: MA Experiment 20001905 PARAMETER Experiment Name: At_Drought_Reproduction_P Parameter: Timepoint (day) Value: 10
  misc_feature: MA Experiment 20001905 PARAMETER Experiment Name: At_Drought_Reproduction_P Parameter: Tissue Value: Rosettes
  misc_feature: MA Experiment 20001905 PARAMETER Experiment Name: At_Drought_Reproduction_P Parameter: Treatment Value: Drought vs. No Drought
acgctctaatttactcgtctgctcggctgtttctctgtattggctgattcgaaatccggggtcaaaccgggtctgagctatctccaggttcggaatttacagattttatctggtctgatgggatcagagcctcggttcgagccgaggccggaactgattgacttgcctgttcttcagaaattcaagctctacgctactccctcgaatttttatttgattggaagagatgagaacaaaagctttaggaggattcttaagattgatagaagggaccaaaatgagttaaatttatttgaagatcctacaaggtatacaaaagacgaaatgcgcgaacttaaaagacggatgattgtagggaacgaggagtctggtggctttaaagcaatcacaacttgctatggaatcattgggtttgtgagattcttggagccttattatatgctgctgataacaaaacgaaagaaagtgggtgagatctgtggccatacagtttatggtatagcagagagtcaaatgatcgcgattccacatccttcaattcaatcaaaagtggctaagtctgaagccgagctgaggtacaagaagctcttaagcgtggtggatcttagcaaaaacttctacttcagctacacatatcacctcatgtattcccttcagaagaacataggcaacactgagagaggaaaccctcatgacaacacaatgttcgtgtggaactccttcttaacacgcgagatcagaaagatcctgcagaattccatatggacagttgcattgatatacggattctttcaacagactaaatgttcagtatctggtgaaaaatttgtattcactatcattgctcggcgttcacggcattatgctggtacaagatatttaaggcgtggtgtaaatgatataggcagggtagccaatgatgttgagacagagcagattgtttccaaagtggttcctgcgggtcagaaaatcccgataacatcagttgtgcaggttcgaggctccatacccctattttggtcacaggaggcatctgttttcaacccacagcccgagattatattgaataagaaggacgcaaattatgaggctacccaacaccactttcagaatctgagacagaggtatgggaaccggataataattctcaacctcctaaagactgtgacaggtgagaaaaagcaccgagaaaccatcttaaggggagagtttgcaaagacaatccgatttattaacaaaggcatggacagggagcatcgtttaaaggcaatccattttgatctaagcaaacactacaaaaaaggagctgatggtgcattcaaccacttgtgtatcttttcaaggaaatcattggaactaactgacctgttttactgtaaagctccttcaggtgtaggagctgaagaagtaatttatgattcatttttcaataaccctattccaagtcaagatgaagaggcaagtagtccagaaaaagaagatatgaaggcggatatatttctgcttcaaaatggggtcttgaggacaaactgcatagactgtttagatcgcactaattttgcgcagtacgcccacggattggtttctctcgggcatcagctgcgtacattaggtatctcaggacctcctgtcgtcgatcttaataatcctctggcaatagaactgatggacgcttaccaaaagatgggtaatacacttgcgatgcagtatggtggctcggaagcacacagcaagatgttctgtgatctgagaggtaattggaatatggtgatgaggcagcgtgatatcttcacagctgtacgtcgttactacagtaacgcgtatcaggacagtgataagcaaaacgccatcaatgtgttcttgggtcatttccggcctcgactggggaggccagcgctatgggagttggattctgaccagcacaacatcggaagatctggttctaacttagatatcgaaaatatgaggccactaattagaagatcattttccgataacattattatggactgtgatttgaatctggaggagctggtacgcgaaaattctcagcctacatatgaagggttaaacgggggtgtctcaggaaccaatttagaatttccattctatgaaactgaaccagcttctctaagcttcctctcggttatgcgcaatgaagagcttatgagagaaacagggtcagggcagatgtttcaaggcagttcctctaattctgattcccacaggcccaatgatatacctggtttttcacactcatacgtaactaagttcacgccggcagaagacatatttgaacgtggcagctcaaagtctgtttcgtcagataacttgttcaccgaccgggatgaatccgtcacttctttaactaatacgaactccagttttgagtttcctataatgggtggttccgatttactacctggtttctcaaatgctttcgctcggtgggtattctccgcaagagcatggtaaagagggtctggagaaagaaatgagccttgcacaggaaggtaacggtggttacttggcaggtacggcagggttgaacagagtcgtaataacaggaaaagcacagaataacagttacatcttgtaaatatccgactcatacctttgtaaagatccacgtttcttgttttcttttttttttctttctttctttctattcttagcaaaatagatttcattcttgttttttcaccaccacccacaaagtttgattctgtttttctgtttttggtatatatagagggtttggtttg

SEQ ID NO: 81871 - protein, 785 aa, Arabidopsis thaliana
  peptide (1)..(785): Ceres Seq. ID no. 12661861
  misc_feature (115)..(400): Pfam Name: SacI homology domain Pfam Description: SacI homology domain
  misc_feature (19)..(466): Homolog of NCBI NO: 18400310 NR Description: Expressed protein; protein id: At3g14205.1, by cDNA: gi_15215805, supported by cDNA: gi_20334797 [Arabidopsis >gi|15215806|gb|AAK91448.1| At3g14201 [Arabidopsis thaliana]
  misc_feature (449)..(630): Homolog of NCBI NO: 18400310 NR Description: Expressed protein; protein id: At3g14205.1, by cDNA: gi_15215805, supported by cDNA: gi_20334797 [Arabidopsis >gi|15215806|gb|AAK91448.1| At3g14201 [Arabidopsis thaliana]
  misc_feature (19)..(466): Homolog of NCBI NO: 9294649 NR Description: gb|AAC25523.1~gene_id:MAG2.20~similar to unknown
  misc_feature (449)..(630): Homolog of NCBI NO: 9294649 NR Description: gb|AAC25523.1~gene_id:MAG2.20~similar to unknown
  misc_feature (19)..(633): Homolog of NCBI NO: 15217295 NR Description: Putative phosphoinositide phosphatase [Oryza
  misc_feature (19)..(430): Homolog of NCBI NO: 22331537 NR Description: putative protein; protein id: At3g43220.1,
  misc_feature (463)..(626): Homolog of NCBI NO: 22331537 NR Description: putative protein; protein id: At3g43220.1,
  misc_feature (16)..(650): Homolog of NCBI NO: 30688003 NR Description: expressed protein [Arabidopsis thaliana]
  misc_feature (463)..(779): Homolog of NCBI NO: 11357847 NR Description: hypothetical protein F7K15.70 - Arabidopsis >gi|7649362|emb|CAB89043.1| putative protein [Arabidopsis
  misc_feature (170)..(430): Homolog of NCBI NO: 11357847 NR Description: hypothetical protein F7K15.70 - Arabidopsis >gi|7649362|emb|CAB89043.1| putative protein [Arabidopsis
MGSEPRFEPRPELIDLPVLQKFKLYATPSNFYLIGRDENKSFRRILKIDRRDQNELNLFEDPTRYTKDEMRELKRRMIVGNEESGGFKAITTCYGIIGFVRFLEPYYMLLITKRKKVGEICGHTVYGIAESQMIAIPHPSIQSKVAKSEAELRYKKLLSVVDLSKNFYFSYTYHLMYSLQKNIGNTERGNPHDNTMFVWNSFLTREIRKILQNSIWTVALIYGFFQQTKCSVSGEKFVFTIIARRSRHYAGTRYLRRGVNDIGRVANDVETEQIVSKVVPAGQKIPITSVVQVRGSIPLFWSQEASVFNPQPEIILNKKDANYEATQHHFQNLRQRYGNRIIILNLLKTVTGEKKHRETILRGEFAKTIRFINKGMDREHRLKAIHFDLSKHYKKGADGAFNHLCIFSRKSLELTDLFYCKAPSGVGAEEVIYDSFFNNPIPSQDEEASSPEKEDMKADIFLLQNGVLRTNCIDCLDRTNFAQYAHGLVSLGHQLRTLGISGPPVVDLNNPLAIELMDAYQKMGNTLAMQYGGSEAHSKMFCDLRGNWNMVMRQRDIFTAVRRYYSNAYQDSDKQNAINVFLGHFRPRLGRPALWELDSDQHNIGRSGSNLDIENMRPLIRRSFSDNIIMDCDLNLEELVRENSQPTYEGLNGGVSGTNLEFPFYETEPASLSFLSVMRNEELMRETGSGQMFQGSSSNSDSHRPNDIPGFSHSYVTKFTPAEDIFERGSSKSVSSDNLFTDRDESVTSLTNTNSSFEFPIMGGSDLLPGFSNAFARWVFSARAW

SEQ ID NO: 81872 - protein, 716 aa, Arabidopsis thaliana
  peptide (1)..(716): Ceres Seq. ID no. 12661862
  misc_feature (46)..(331): Pfam Name: SacI homology domain Pfam Description: SacI homology domain
  misc_feature (1)..(397): Homolog of NCBI NO: 18400310 NR Description: Expressed protein; protein id: At3g14205.1, by cDNA: gi_15215805, supported by cDNA: gi_20334797 [Arabidopsis >gi|15215806|gb|AAK91448.1| At3g14201 [Arabidopsis thaliana]
  misc_feature (380)..(561): Homolog of NCBI NO: 18400310 NR Description: Expressed protein; protein id: At3g14205.1, by cDNA: gi_15215805, supported by cDNA: gi_20334797 [Arabidopsis >gi|15215806|gb|AAK91448.1| At3g14201 [Arabidopsis thaliana]
  misc_feature (1)..(397): Homolog of NCBI NO: 9294649 NR Description: gb|AAC25523.1~gene_id:MAG2.20~similar to unknown
  misc_feature (380)..(561): Homolog of NCBI NO: 9294649 NR Description: gb|AAC25523.1~gene_id:MAG2.20~similar to unknown
  misc_feature (1)..(564): Homolog of NCBI NO: 15217295 NR Description: Putative phosphoinositide phosphatase [Oryza
  misc_feature (1)..(361): Homolog of NCBI NO: 22331537 NR Description: putative protein; protein id: At3g43220.1,
  misc_feature (394)..(557): Homolog of NCBI NO: 22331537 NR Description: putative protein; protein id: At3g43220.1,
  misc_feature (1)..(581): Homolog of NCBI NO: 30688003 NR Description: expressed protein [Arabidopsis thaliana]
  misc_feature (394)..(710): Homolog of NCBI NO: 11357847 NR Description: hypothetical protein F7K15.70 - Arabidopsis >gi|7649362|emb|CAB89043.1| putative protein [Arabidopsis
  misc_feature (101)..(361): Homolog of NCBI NO: 11357847 NR Description: hypothetical protein F7K15.70 - Arabidopsis >gi|7649362|emb|CAB89043.1| putative protein [Arabidopsis
MRELKRRMIVGNEESGGFKAITTCYGIIGFVRFLEPYYMLLITKRKKVGEICGHTVYGIAESQMIAIPHPSIQSKVAKSEAELRYKKLLSVVDLSKNFYFSYTYHLMYSLQKNIGNTERGNPHDNTMFVWNSFLTREIRKILQNSIWTVALIYGFFQQTKCSVSGEKFVFTIIARRSRHYAGTRYLRRGVNDIGRVANDVETEQIVSKVVPAGQKIPITSVVQVRGSIPLFWSQEASVFNPQPEIILNKKDANYEATQHHFQNLRQRYGNRIIILNLLKTVTGEKKHRETILRGEFAKTIRFINKGMDREHRLKAIHFDLSKHYKKGADGAFNHLCIFSRKSLELTDLFYCKAPSGVGAEEVIYDSFFNNPIPSQDEEASSPEKEDMKADIFLLQNGVLRTNCIDCLDRTNFAQYAHGLVSLGHQLRTLGISGPPVVDLNNPLAIELMDAYQKMGNTLAMQYGGSEAHSKMFCDLRGNWNMVMRQRDIFTAVRRYYSNAYQDSDKQNAINVFLGHFRPRLGRPALWELDSDQHNIGRSGSNLDIENMRPLIRRSFSDNIIMDCDLNLEELVRENSQPTYEGLNGGVSGTNLEFPFYETEPASLSFLSVMRNEELMRETGSGQMFQGSSSNSDSHRPNDIPGFSHSYVTKFTPAEDIFERGSSKSVSSDNLFTDRDESVTSLTNTNSSFEFPIMGGSDLLPGFSNAFARWVFSARAW

SEQ ID NO: 81873 - protein, 709 aa, Arabidopsis thaliana
  peptide (1)..(709): Ceres Seq. ID no. 12661863
  misc_feature (39)..(324): Pfam Name: SacI homology domain Pfam Description: SacI homology domain
  misc_feature (1)..(390): Homolog of NCBI NO: 18400310 NR Description: Expressed protein; protein id: At3g14205.1, by cDNA: gi_15215805, supported by cDNA: gi_20334797 [Arabidopsis >gi|15215806|gb|AAK91448.1| At3g14201 [Arabidopsis thaliana]
  misc_feature (373)..(554): Homolog of NCBI NO: 18400310 NR Description: Expressed protein; protein id: At3g14205.1, by cDNA: gi_15215805, supported by cDNA: gi_20334797 [Arabidopsis >gi|15215806|gb|AAK91448.1| At3g14201 [Arabidopsis thaliana]
  misc_feature (1)..(390): Homolog of NCBI NO: 9294649 NR Description: gb|AAC25523.1~gene_id:MAG2.20~similar to unknown
  misc_feature (373)..(554): Homolog of NCBI NO: 9294649 NR Description: gb|AAC25523.1~gene_id:MAG2.20~similar to unknown
  misc_feature (1)..(557): Homolog of NCBI NO: 15217295 NR Description: Putative phosphoinositide phosphatase [Oryza
  misc_feature (1)..(354): Homolog of NCBI NO: 22331537 NR Description: putative protein; protein id: At3g43220.1,
  misc_feature (387)..(550): Homolog of NCBI NO: 22331537 NR Description: putative protein; protein id: At3g43220.1,
  misc_feature (1)..(574): Homolog of NCBI NO: 30688003 NR Description: expressed protein [Arabidopsis thaliana]
  misc_feature (387)..(703): Homolog of NCBI NO: 11357847 NR Description: hypothetical protein F7K15.70 - Arabidopsis >gi|7649362|emb|CAB89043.1| putative protein [Arabidopsis
  misc_feature (94)..(354): Homolog of NCBI NO: 11357847 NR Description: hypothetical protein F7K15.70 - Arabidopsis >gi|7649362|emb|CAB89043.1| putative protein [Arabidopsis
MIVGNEESGGFKAITTCYGIIGFVRFLEPYYMLLITKRKKVGEICGHTVYGIAESQMIAIPHPSIQSKVAKSEAELRYKKLLSVVDLSKNFYFSYTYHLMYSLQKNIGNTERGNPHDNTMFVWNSFLTREIRKILQNSIWTVALIYGFFQQTKCSVSGEKFVFTIIARRSRHYAGTRYLRRGVNDIGRVANDVETEQIVSKVVPAGQKIPITSVVQVRGSIPLFWSQEASVFNPQPEIILNKKDANYEATQHHFQNLRQRYGNRIIILNLLKTVTGEKKHRETILRGEFAKTIRFINKGMDREHRLKAIHFDLSKHYKKGADGAFNHLCIFSRKSLELTDLFYCKAPSGVGAEEVIYDSFFNNPIPSQDEEASSPEKEDMKADIFLLQNGVLRTNCIDCLDRTNFAQYAHGLVSLGHQLRTLGISGPPVVDLNNPLAIELMDAYQKMGNTLAMQYGGSEAHSKMFCDLRGNWNMVMRQRDIFTAVRRYYSNAYQDSDKQNAINVFLGHFRPRLGRPALWELDSDQHNIGRSGSNLDIENMRPLIRRSFSDNIIMDCDLNLEELVRENSQPTYEGLNGGVSGTNLEFPFYETEPASLSFLSVMRNEELMRETGSGQMFQGSSSNSDSHRPNDIPGFSHSYVTKFTPAEDIFERGSSKSVSSDNLFTDRDESVTSLTNTNSSFEFPIMGGSDLLPGFSNAFARWVFSARAW

SEQ ID NO: 81874 - DNA, 2957 bp, Arabidopsis thaliana
  misc_feature (1)..(2957): Ceres Seq. ID no. 12661867
  misc_feature: MA Experiment ID: 20000166 Result: Up-regulated in Transcription
  misc_feature: MA Experiment 20000166 PARAMETER Experiment Name: At_100uM_ABA_P Parameter: Age (day) Value: 14
  misc_feature: MA Experiment 20000166 PARAMETER Experiment Name: At_100uM_ABA_P Parameter: Organism Value: A. thaliana
  misc_feature: MA Experiment 20000166 PARAMETER Experiment Name: At_100uM_ABA_P Parameter: Plant Line Value: WS
  misc_feature: MA Experiment 20000166 PARAMETER Experiment Name: At_100uM_ABA_P Parameter: Timepoint (hr) Value: 1
  misc_feature: MA Experiment 20000166 PARAMETER Experiment Name: At_100uM_ABA_P Parameter: Tissue Value: Aerial
  misc_feature: MA Experiment 20000166 PARAMETER Experiment Name: At_100uM_ABA_P Parameter: Treatment Value: 100uM ABA vs. No Treatment
  misc_feature: MA Experiment ID: 20000171 Result: Down-regulated in Transcription
  misc_feature: MA Experiment 20000171 PARAMETER Experiment Name: At_42deg_Heat_P Parameter: Age (day) Value: 14
  misc_feature: MA Experiment 20000171 PARAMETER Experiment Name: At_42deg_Heat_P Parameter: Organism Value: A. thaliana
  misc_feature: MA Experiment 20000171 PARAMETER Experiment Name: At_42deg_Heat_P Parameter: Plant Line Value: WS
  misc_feature: MA Experiment 20000171 PARAMETER Experiment Name: At_42deg_Heat_P Parameter: Temperature (deg C) Value: 42 vs. 22
  misc_feature: MA Experiment 20000171 PARAMETER Experiment Name: At_42deg_Heat_P Parameter: Timepoint (hr) Value: 1
  misc_feature: MA Experiment 20000171 PARAMETER Experiment Name: At_42deg_Heat_P Parameter: Tissue Value: Aerial
  misc_feature: MA Experiment ID: 20000182 Result: Up-regulated in Transcription
  misc_feature: MA Experiment 20000182 PARAMETER Experiment Name: At_2mM_SA_P Parameter: Age (day) Value: 14
  misc_feature: MA Experiment 20000182 PARAMETER Experiment Name: At_2mM_SA_P Parameter: Organism Value: A. thaliana
  misc_feature: MA Experiment 20000182 PARAMETER Experiment Name: At_2mM_SA_P Parameter: Plant Line Value: WS
  misc_feature: MA Experiment 20000182 PARAMETER Experiment Name: At_2mM_SA_P Parameter: Timepoint (hr) Value: 6
  misc_feature: MA Experiment 20000182 PARAMETER Experiment Name: At_2mM_SA_P Parameter: Tissue Value: Aerial
  misc_feature: MA Experiment 20000182 PARAMETER Experiment Name: At_2mM_SA_P Parameter: Treatment Value: 2mM SA vs. No Treatment
  misc_feature: MA Experiment ID: 20000184 Result: Down-regulated in Transcription
  misc_feature: MA Experiment 20000184 PARAMETER Experiment Name: At_Shoots__P Parameter: Age (day) Value: 7
  misc_feature: MA Experiment 20000184 PARAMETER Experiment Name: At_Shoots__P Parameter: Tissue Value: Shoots vs. Whole Plant
  misc_feature: MA Experiment ID: 20000185 Result: Down-regulated in Transcription
  misc_feature: MA Experiment 20000185 PARAMETER Experiment Name: At_Roots__P Parameter: Age (day) Value: 7 vs. 21
  misc_feature: MA Experiment 20000185 PARAMETER Experiment Name: At_Roots__P Parameter: Organism Value: A. thaliana
  misc_feature: MA Experiment 20000185 PARAMETER Experiment Name: At_Roots__P Parameter: Tissue Value: Roots vs. Whole Plant
  misc_feature: MA Experiment ID: 20000211 Result: Up-regulated in Transcription
  misc_feature: MA Experiment 20000211 PARAMETER Experiment Name: At_0.001percent_MeJA__P Parameter: Age (day) Value: 14
  misc_feature: MA Experiment 20000211 PARAMETER Experiment Name: At_0.001percent_MeJA__P Parameter: Organism Value: A. thaliana
  misc_feature: MA Experiment 20000211 PARAMETER Experiment Name: At_0.001percent_MeJA__P Parameter: Plant Line Value: WS
  misc_feature: MA Experiment 20000211 PARAMETER Experiment Name: At_0.001percent_MeJA__P Parameter: Timepoint (hr) Value: 1
  misc_feature: MA Experiment 20000211 PARAMETER Experiment Name: At_0.001percent_MeJA__P Parameter: Tissue Value: Aerial
  misc_feature: MA Experiment 20000211 PARAMETER Experiment Name: At_0.001percent_MeJA__P Parameter: Treatment Value: 0.001percent MeJA vs. No Treatment
  misc_feature: MA Experiment ID: 20000214 Result: Up-regulated in Transcription
  misc_feature: MA Experiment 20000214 PARAMETER Experiment Name: At_4deg_Cold_P Parameter: Timepoint (hr) Value: 6
  misc_feature: MA Experiment ID: 20000234 Result: Down-regulated in Transcription
  misc_feature: MA Experiment 20000234 PARAMETER Experiment Name: At_Siliques_P Parameter: Age (day) Value: 21
  misc_feature: MA Experiment 20000234 PARAMETER Experiment Name: At_Siliques_P Parameter: Organism Value: A. thaliana
  misc_feature: MA Experiment 20000234 PARAMETER Experiment Name: At_Siliques_P Parameter: Plant Line Value: WS
  misc_feature: MA Experiment 20000234 PARAMETER Experiment Name: At_Siliques_P Parameter: Tissue Value: Less Than 5mm Siliques vs. Whole Plant
  misc_feature: MA Experiment ID: 20000235 Result: Down-regulated in Transcription
  misc_feature: MA Experiment 20000235 PARAMETER Experiment Name: At_Siliques_P Parameter: Age (day) Value: 21
  misc_feature: MA Experiment 20000235 PARAMETER Experiment Name: At_Siliques_P Parameter: Organism Value: A. thaliana
  misc_feature: MA Experiment 20000235 PARAMETER Experiment Name: At_Siliques_P Parameter: Plant Line Value: WS
  misc_feature: MA Experiment 20000235 PARAMETER Experiment Name: At_Siliques_P Parameter: Tissue Value: 5-10mm Siliques vs. Whole Plant
  misc_feature: MA Experiment ID: 20000267 Result: Up-regulated in Transcription
  misc_feature: MA Experiment 20000267 PARAMETER Experiment Name: At_Drought_P Parameter: Age (day) Value: 7
  misc_feature: MA Experiment 20000267 PARAMETER Experiment Name: At_Drought_P Parameter: Organism Value: A. thaliana
  misc_feature: MA Experiment 20000267 PARAMETER Experiment Name: At_Drought_P Parameter: Plant Line Value: WS
  misc_feature: MA Experiment 20000267 PARAMETER Experiment Name: At_Drought_P Parameter: Timepoint (hr) Value: 6
  misc_feature: MA Experiment 20000267 PARAMETER Experiment Name: At_Drought_P Parameter: Tissue Value: Whole Plant
  misc_feature: MA Experiment 20000267 PARAMETER Experiment Name: At_Drought_P Parameter: Treatment Value: Drought vs. No Drought
  misc_feature: MA Experiment ID: 20000308 Result: Up-regulated in Transcription
  misc_feature: MA Experiment 20000308 PARAMETER Experiment Name: At_100mM_NaCl__P Parameter: Age (day) Value: 17
  misc_feature: MA Experiment 20000308 PARAMETER Experiment Name: At_100mM_NaCl__P Parameter: Organism Value: A. thaliana
  misc_feature: MA Experiment 20000308 PARAMETER Experiment Name: At_100mM_NaCl__P Parameter: Plant Line Value: WS
  misc_feature: MA Experiment 20000308 PARAMETER Experiment Name: At_100mM_NaCl__P Parameter: Timepoint (hr) Value: 72
  misc_feature: MA Experiment 20000308 PARAMETER Experiment Name: At_100mM_NaCl__P Parameter: Tissue Value: Whole Plant
  misc_feature: MA Experiment 20000308 PARAMETER Experiment Name: At_100mM_NaCl__P Parameter: Treatment Value: 100mM NaCl vs. No Treatment
  misc_feature: MA Experiment ID: 20000438 Result: Down-regulated in Transcription
  misc_feature: MA Experiment 20000438 PARAMETER Experiment Name: At_Shoots__P Parameter: Age (day) Value: 14
  misc_feature: MA Experiment 20000438 PARAMETER Experiment Name: At_Shoots__P Parameter: Tissue Value: Shoots vs. Whole Plant
  misc_feature: MA Experiment ID: 20000439 Result: Down-regulated in Transcription
  misc_feature: MA Experiment 20000439 PARAMETER Experiment Name: At_Roots__P Parameter: Age (day) Value: 14 vs. 21
  misc_feature: MA Experiment 20000439 PARAMETER Experiment Name: At_Roots__P Parameter: Organism Value: A. thaliana
  misc_feature: MA Experiment 20000439 PARAMETER Experiment Name: At_Roots__P Parameter: Tissue Value: Roots vs. Whole Plant
  misc_feature: MA Experiment ID: 20000460 Result: Up-regulated in Transcription
  misc_feature: MA Experiment 20000460 PARAMETER Experiment Name: At_10percent_PEG_P Parameter: Age (day) Value: 12
  misc_feature: MA Experiment 20000460 PARAMETER Experiment Name: At_10percent_PEG_P Parameter: Organism Value: A. thaliana
  misc_feature: MA Experiment 20000460 PARAMETER Experiment Name: At_10percent_PEG_P Parameter: Plant Line Value: WS
  misc_feature: MA Experiment 20000460 PARAMETER Experiment Name: At_10percent_PEG_P Parameter: Timepoint (day) Value: 12
  misc_feature: MA Experiment 20000460 PARAMETER Experiment Name: At_10percent_PEG_P Parameter: Tissue Value: Whole Plant
  misc_feature: MA Experiment 20000460 PARAMETER Experiment Name: At_10percent_PEG_P Parameter: Treatment Value: 10percent PEG vs. No Treatment
  misc_feature: MA Experiment ID: 20000495 Result: Down-regulated in Transcription
  misc_feature: MA Experiment 20000495 PARAMETER Experiment Name: At_Guard_Cells_P Parameter: Harvest Date Value: 8/2/2002
  misc_feature: MA Experiment 20000495 PARAMETER Experiment Name: At_Guard_Cells_P Parameter: Organism Value: A. thaliana
  misc_feature: MA Experiment 20000495 PARAMETER Experiment Name: At_Guard_Cells_P Parameter: Tissue Value: Guard Cells vs. Leaves
  misc_feature: MA Experiment ID: 20000527 Result: Up-regulated in Transcription
  misc_feature: MA Experiment 20000527 PARAMETER Experiment Name: At_10percent_PEG_P Parameter: Age (day) Value: 20
  misc_feature: MA Experiment 20000527 PARAMETER Experiment Name: At_10percent_PEG_P Parameter: Organism Value: A. thaliana
  misc_feature: MA Experiment 20000527 PARAMETER Experiment Name: At_10percent_PEG_P Parameter: Plant Line Value: WS
  misc_feature: MA Experiment 20000527 PARAMETER Experiment Name: At_10percent_PEG_P Parameter: Timepoint (day) Value: 20
  misc_feature: MA Experiment 20000527 PARAMETER Experiment Name: At_10percent_PEG_P Parameter: Tissue Value: Whole Plant
  misc_feature: MA Experiment 20000527 PARAMETER Experiment Name: At_10percent_PEG_P Parameter: Treatment Value: 10percent PEG vs. No Treatment
  misc_feature: MA Experiment ID: 20000573 Result: Down-regulated in Transcription
  misc_feature: MA Experiment 20000573 PARAMETER Experiment Name: At_100uM_ABA_Mutants__P Parameter: Organism Value: A. thaliana
  misc_feature: MA Experiment 20000573 PARAMETER Experiment Name: At_100uM_ABA_Mutants__P Parameter: Plant Line Value: CS22 vs. Ler wt
  misc_feature: MA Experiment 20000573 PARAMETER Experiment Name: At_100uM_ABA_Mutants__P Parameter: Timepoint (hr) Value: N/A
  misc_feature: MA Experiment 20000573 PARAMETER Experiment Name: At_100uM_ABA_Mutants__P Parameter: Tissue Value: Whole Plant
  misc_feature: MA Experiment 20000573 PARAMETER Experiment Name: At_100uM_ABA_Mutants__P Parameter: Treatment Value: None
  misc_feature: MA Experiment ID: 20000574 Result: Down-regulated in Transcription
  misc_feature: MA Experiment 20000574 PARAMETER Experiment Name: At_100uM_ABA_Mutants__P Parameter: Organism Value: A. thaliana
  misc_feature: MA Experiment 20000574 PARAMETER Experiment Name: At_100uM_ABA_Mutants__P Parameter: Plant Line Value: CS23 vs. Ler wt
  misc_feature: MA Experiment 20000574 PARAMETER Experiment Name: At_100uM_ABA_Mutants__P Parameter: Timepoint (hr) Value: N/A
  misc_feature: MA Experiment 20000574 PARAMETER Experiment Name: At_100uM_ABA_Mutants__P Parameter: Tissue Value: Whole Plant
  misc_feature: MA Experiment 20000574 PARAMETER Experiment Name: At_100uM_ABA_Mutants__P Parameter: Treatment Value: None
  misc_feature: MA Experiment ID: 20000606 Result: Up-regulated in Transcription
  misc_feature: MA Experiment 20000606 PARAMETER Experiment Name: At_CS8548_Mutant_P Parameter: Age (day) Value: 14
  misc_feature: MA Experiment 20000606 PARAMETER Experiment Name: At_CS8548_Mutant_P Parameter: Plant Line Value: CS8548 vs. wt
  misc_feature: MA Experiment 20000606 PARAMETER Experiment Name: At_CS8548_Mutant_P Parameter: Tissue Value: Whole Plant
  misc_feature: MA Experiment ID: 20001248 Result: Down-regulated in Transcription
  misc_feature: MA Experiment 20001248 PARAMETER Experiment Name: At_Far-red-induction_P Parameter: Age (day) Value: 7
  misc_feature: MA Experiment 20001248 PARAMETER Experiment Name: At_Far-red-induction_P Parameter: Light Value: Far-red vs. White
  misc_feature: MA Experiment 20001248 PARAMETER Experiment Name: At_Far-red-induction_P Parameter: Organism Value: A. thaliana
  misc_feature: MA Experiment 20001248 PARAMETER Experiment Name: At_Far-red-induction_P Parameter: Plant Line Value: Columbia
  misc_feature: MA Experiment 20001248 PARAMETER Experiment Name: At_Far-red-induction_P Parameter: Timepoint (hr) Value: 4
  misc_feature: MA Experiment 20001248 PARAMETER Experiment Name: At_Far-red-induction_P Parameter: Tissue Value: Whole Plant
  misc_feature: MA Experiment ID: 20001450 Result: Down-regulated in Transcription
  misc_feature: MA Experiment 20001450 PARAMETER Experiment Name: At_Far-red-induction_P Parameter: Age (day) Value: 7
  misc_feature: MA Experiment 20001450 PARAMETER Experiment Name: At_Far-red-induction_P Parameter: Light Value: Far-red vs. White
  misc_feature: MA Experiment 20001450 PARAMETER Experiment Name: At_Far-red-induction_P Parameter: Organism Value: A. thaliana
  misc_feature: MA Experiment 20001450 PARAMETER Experiment Name: At_Far-red-induction_P Parameter: Plant Line Value: Columbia
  misc_feature: MA Experiment 20001450 PARAMETER Experiment Name: At_Far-red-induction_P Parameter: Timepoint (hr) Value: 8
  misc_feature: MA Experiment 20001450 PARAMETER Experiment Name: At_Far-red-induction_P Parameter: Tissue Value: Whole Plant
  misc_feature: MA Experiment ID: 20001761 Result: Down-regulated in Transcription
  misc_feature: MA Experiment 20001761 PARAMETER Experiment Name: At_50mM_NH4NO3_L-to-H_P Parameter: Timepoint (hr) Value: 4
  misc_feature: MA Experiment 20001761 PARAMETER Experiment Name: At_50mM_NH4NO3_L-to-H_P Parameter: Tissue Value: Siliques
  misc_feature: MA Experiment 20001761 PARAMETER Experiment Name: At_50mM_NH4NO3_L-to-H_P Parameter: Treatment Value: 50mM NH4NO3 vs 100mM Mannitol
  misc_feature: MA Experiment ID: 20001905 Result: Up-regulated in Transcription
  misc_feature: MA Experiment 20001905 PARAMETER Experiment Name: At_Drought_Reproduction_P Parameter: Age (day) Value: 40
  misc_feature: MA Experiment 20001905 PARAMETER Experiment Name: At_Drought_Reproduction_P Parameter: Organism Value: A. thaliana
  misc_feature: MA Experiment 20001905 PARAMETER Experiment Name: At_Drought_Reproduction_P Parameter: Plant Line Value: WS
  misc_feature: MA Experiment 20001905 PARAMETER Experiment Name: At_Drought_Reproduction_P Parameter: Timepoint (day) Value: 10
  misc_feature: MA Experiment 20001905 PARAMETER Experiment Name: At_Drought_Reproduction_P Parameter: Tissue Value: Rosettes
  misc_feature: MA Experiment 20001905 PARAMETER Experiment Name: At_Drought_Reproduction_P Parameter: Treatment Value: Drought vs. No Drought
aattaaccagaacgttcatctaccaacaaatcctcaactccttcttcttcactaatagtataccacaaaacctcaaaattgtaatttattagattatcgtgatggccttagctaaagagttaatgggttatcctctcatcacagaaaggtcatcacttgtctcgtcggcgtcgcatttcaagaagaggacacagtcaacacagttctcgatcaacccttttgaccggagaccaagaaaaaccaaatccggcgtcgttgcagccatcagcgaggatttggtcaaaacgctgcgtttttccacaacgaccggagacagaaagagcgaagaggaggagaaagcggcggtgaagttcaaggtgagagctgtggttactgtgaggaacaagaacaaggaggatttgaaagagactcttgttaagcatttggatgcttttgctgataaaattggtcgaaacattgtcttggagcttatcagcacccaacttgatccaaaaacgaagttgccgaagaaaagcaatgcagcagttttaaaggattggtcaaagaaatcgaaaactaaggcggagagagttcactatacggcggagttcacggtggatgcagcgtttggctcgccgggagcaatcaccgtcatgaataaacaccaaaaagagtttttcttggagagcataaccattgaaggcttcgcacttggtcctgttcactttccatgcaattcttgggttcagtctcaaaaagatcaccctgataaacgaattttcttcactaatcagccgtatttgccgaatgagacaccaagcggattaagagtattgagggagaaagagttgaagaatctacgaggagatggaagtggagtgagaaaattatcagacagaatttacgactttgatgtttacaacgaccttggaaatcccgacaaatcatccgagctctctcgccccaaactcggtggcaaagaggttccttaccctagacgttgtcgtactggtcgccaatcaacagtttctgataaagacgcggagagccgagtagagaagccattacctatgtatgtgccacgagacgagcaatttgaagagtcgaagcaggacacttttgctgcagggaggctaaaagcagtcttacaccacctaattccgtcgctcaaagccagtattgtagctgaggactttgcagacttcggcgagatcgatcgtctttataaagaaggcttgttactcaagttagggtttcaagatgacatctttaagaagtttcctctccctaaggtcgtagttgataccctccaagaatctactaaaggactcctcaaatacgacactcccaaaatattatcgaaggataaaaacgcatggttaagagatgacgaattcgcacgtcaagccatagctggaatcaatccagtgaacattgagagagtcaagacttttccaccggtcagcaatcttgaccccaagatctacggtccacaacactccgctcttactgacgaccatatcattggtcacctcgacggattctccgtacaacaagcgttggaagagaatagattgtatatgttggattaccatgacatattcttaccgttcctagaccggattaatgcgctagacggacgcaaagcctatgctactcgaactatcttcttcttgactcgtctaggcacacttaagccggtagccattgagctaagcctccctccccatggtccaaaacatcggtccaagcgtgtgcttacacctccagtcgatgcaacctctaattggatgtggcagctcgctaaagcccacgttagttctaacgatgctggtgtccatcagcttgtcaatcactggttacggacacatgcatgcttggagccatttatattagctgcacacaggcaattgagcgctatgcatcccatattcaagctactggatccacacatgagatacacgttggaaatcaatgctttggctagacaatcgttgatcagtgcagatggtgtgatcgaaggaggcttcactgctggtgcatacggcatggaaatgagtgccgccgcatacaaaagcagctggcggttcgacatggaaggcctccctgccgatctaattcgcagaggaatggcaattcctgatgcaacacaaccacatggtcttaaactcctaatcgaagactatccgtacgccaacgacggtcttttactctggtcagcaatccaaacctgggtccgaacctatgttgaacgctactatccaaacccgaaccttatcaaaacagactctgagctccaatcttggtactcagaatcaatcaacgtcggccacgctgacctccgcgacgctgattggtggccggagttatcaaccgtcgacgacctcgtgtcgattctaaccactctaatctggctcgcctctgctcaacacgccgctctaaactttggacaatacccttacggtggctacgtcccaaaccgaccaccgttgatgcggcggttaatccccgacgagtcggatccagagtacgcgagtttcatctcccatccggagaagtattacttctcgtcgatgccaagtttggcgcagacttcgaagtttatggccgtggttgatactttgtcgacgcattcgccggatgaggagtatattggagagagacaacagccgtcgatttggacaggagatgcggagattgttgaagcgttttatggatttgcggcagagatcggacggatagagaaagagattgagaaaaggaacgctgatcctgaccgtagaaataggtgtggggctggtgttttgccttatgagttgttggttccgagttctgagcctggtgttacgtgtagaggtgtacctaatagtgtatctatataattaagaaggaaattatttataagaagtaaatgtagaaaacacataaataatttcttgtaaaccatgatatataatatataaagataattttcgtaa

SEQ ID NO: 81875 - protein, 919 aa, Arabidopsis thaliana
  peptide (1)..(919): Ceres Seq. ID no. 12661868
  misc_feature (119)..(220): Pfam Name: PLAT/LH2 domain Pfam Description: PLAT/LH2 domain
  misc_feature (39)..(919): Homolog of NCBI NO: 27436755 NR Description: Putative lipoxygenase [Oryza sativa (japonica
  misc_feature (86)..(919): Homolog of NCBI NO: 7433169 NR Description: probable lipoxygenase (EC 1.13.11.12) (clone H1)
  misc_feature (86)..(919): Homolog of NCBI NO: 7433168 NR Description: lipoxygenase (EC 1.13.11.12) loxC, chloroplast -
  misc_feature (81)..(919): Homolog of NCBI NO: 18461098 NR Description: lipoxygenase [Citrus jambhiri]
  misc_feature (81)..(919): Homolog of NCBI NO: 27372775 NR Description: lipoxygenase 2 [Brassica napus]
  misc_feature (117)..(919): Homolog of NCBI NO: 7433162 NR Description: lipoxygenase (EC 1.13.11.12) - kidney bean
  misc_feature (55)..(919): Homolog of NCBI NO: 30686619 NR Description: lipoxygenase (LOX), putative [Arabidopsis
  misc_feature (117)..(919): Homolog of NCBI NO: 126409 NR Description: Lipoxygenase 1 >gi|100005|pir||S22153
  misc_feature (108)..(919): Homolog of NCBI NO: 11991840 NR Description: lipoxygenase [Phaseolus vulgaris]
  misc_feature (115)..(919): Homolog of NCBI NO: 9909849 NR Description: lipoxygenase [Pisum sativum]
MALAKELMGYPLITERSSLVSSASHFKKRTQSTQFSINPFDRRPRKTKSGVVAAISEDLVKTLRFSTTTGDRKSEEEEKAAVKFKVRAVVTVRNKNKEDLKETLVKHLDAFADKIGRNIVLELISTQLDPKTKLPKKSNAAVLKDWSKKSKTKAERVHYTAEFTVDAAFGSPGAITVMNKHQKEFFLESITIEGFALGPVHFPCNSWVQSQKDHPDKRIFFTNQPYLPNETPSGLRVLREKELKNLRGDGSGVRKLSDRIYDFDVYNDLGNPDKSSELSRPKLGGKEVPYPRRCRTGRQSTVSDKDAESRVEKPLPMYVPRDEQFEESKQDTFAAGRLKAVLHHLIPSLKASIVAEDFADFGEIDRLYKEGLLLKLGFQDDIFKKFPLPKVVVDTLQESTKGLLKYDTPKILSKDKNAWLRDDEFARQAIAGINPVNIERVKTFPPVSNLDPKIYGPQHSALTDDHIIGHLDGFSVQQALEENRLYMLDYHDIFLPFLDRINALDGRKAYATRTIFFLTRLGTLKPVAIELSLPPHGPKHRSKRVLTPPVDATSNWMWQLAKAHVSSNDAGVHQLVNHWLRTHACLEPFILAAHRQLSAMHPIFKLLDPHMRYTLEINALARQSLISADGVIEGGFTAGAYGMEMSAAAYKSSWRFDMEGLPADLIRRGMAIPDATQPHGLKLLIEDYPYANDGLLLWSAIQTWVRTYVERYYPNPNLIKTDSELQSWYSESINVGHADLRDADWWPELSTVDDLVSILTTLIWLASAQHAALNFGQYPYGGYVPNRPPLMRRLIPDESDPEYASFISHPEKYYFSSMPSLAQTSKFMAVVDTLSTHSPDEEYIGERQQPSIWTGDAEIVEAFYGFAAEIGRIEKEIEKRNADPDRRNRCGAGVLPYELLVPSSEPGVTCRGVPNSVSI

SEQ ID NO: 81876 - protein, 912 aa, Arabidopsis thaliana
  peptide (1)..(912): Ceres Seq. ID no. 12661869
  misc_feature (112)..(213): Pfam Name: PLAT/LH2 domain Pfam Description: PLAT/LH2 domain
  misc_feature (32)..(912): Homolog of NCBI NO: 27436755 NR Description: Putative lipoxygenase [Oryza sativa (japonica
  misc_feature (79)..(912): Homolog of NCBI NO: 7433169 NR Description: probable lipoxygenase (EC 1.13.11.12) (clone H1)
  misc_feature (79)..(912): Homolog of NCBI NO: 7433168 NR Description: lipoxygenase (EC 1.13.11.12) loxC, chloroplast -
  misc_feature (74)..(912): Homolog of NCBI NO: 18461098 NR Description: lipoxygenase [Citrus jambhiri]
  misc_feature (74)..(912): Homolog of NCBI NO: 27372775 NR Description: lipoxygenase 2 [Brassica napus]
  misc_feature (110)..(912): Homolog of NCBI NO: 7433162 NR Description: lipoxygenase (EC 1.13.11.12) - kidney bean
  misc_feature (48)..(912): Homolog of NCBI NO: 30686619 NR Description: lipoxygenase (LOX), putative [Arabidopsis
  misc_feature (110)..(912): Homolog of NCBI NO: 126409 NR Description: Lipoxygenase 1 >gi|100005|pir||S22153
  misc_feature (101)..(912): Homolog of NCBI NO: 11991840 NR Description: lipoxygenase [Phaseolus vulgaris]
  misc_feature (108)..(912): Homolog of NCBI NO: 9909849 NR Description: lipoxygenase [Pisum sativum]
MGYPLITERSSLVSSASHFKKRTQSTQFSINPFDRRPRKTKSGVVAAISEDLVKTLRFSTTTGDRKSEEEEKAAVKFKVRAVVTVRNKNKEDLKETLVKHLDAFADKIGRNIVLELISTQLDPKTKLPKKSNAAVLKDWSKKSKTKAERVHYTAEFTVDAAFGSPGAITVMNKHQKEFFLESITIEGFALGPVHFPCNSWVQSQKDHPDKRIFFTNQPYLPNETPSGLRVLREKELKNLRGDGSGVRKLSDRIYDFDVYNDLGNPDKSSELSRPKLGGKEVPYPRRCRTGRQSTVSDKDAESRVEKPLPMYVPRDEQFEESKQDTFAAGRLKAVLHHLIPSLKASIVAEDFADFGEIDRLYKEGLLLKLGFQDDIFKKFPLPKVVVDTLQESTKGLLKYDTPKILSKDKNAWLRDDEFARQAIAGINPVNIERVKTFPPVSNLDPKIYGPQHSALTDDHIIGHLDGFSVQQALEENRLYMLDYHDIFLPFLDRINALDGRKAYATRTIFFLTRLGTLKPVAIELSLPPHGPKHRSKRVLTPPVDATSNWMWQLAKAHVSSNDAGVHQLVNHWLRTHACLEPFILAAHRQLSAMHPIFKLLDPHMRYTLEINALARQSLISADGVIEGGFTAGAYGMEMSAAAYKSSWRFDMEGLPADLIRRGMAIPDATQPHGLKLLIEDYPYANDGLLLWSAIQTWVRTYVERYYPNPNLIKTDSELQSWYSESINVGHADLRDADWWPELSTVDDLVSILTTLIWLASAQHAALNFGQYPYGGYVPNRPPLMRRLIPDESDPEYASFISHPEKYYFSSMPSLAQTSKFMAVVDTLSTHSPDEEYIGERQQPSIWTGDAEIVEAFYGFAAEIGRIEKEIEKRNADPDRRNRCGAGVLPYELLVPSSEPGVTCRGVPNSVSI

SEQ ID NO: 81877 - protein, 742 aa, Arabidopsis thaliana
  peptide (1)..(742): Ceres Seq. ID no. 12661870
  misc_feature (1)..(742): Homolog of NCBI NO: 27436755 NR Description: Putative lipoxygenase [Oryza sativa (japonica
  misc_feature (1)..(742): Homolog of NCBI NO: 7433169 NR Description: probable lipoxygenase (EC 1.13.11.12) (clone H1)
  misc_feature (1)..(742): Homolog of NCBI NO: 7433168 NR Description: lipoxygenase (EC 1.13.11.12) loxC, chloroplast -
  misc_feature (1)..(742): Homolog of NCBI NO: 18461098 NR Description: lipoxygenase [Citrus jambhiri]
  misc_feature (1)..(742): Homolog of NCBI NO: 27372775 NR Description: lipoxygenase 2 [Brassica napus]
  misc_feature (1)..(742): Homolog of NCBI NO: 7433162 NR Description: lipoxygenase (EC 1.13.11.12) - kidney bean
  misc_feature (1)..(742): Homolog of NCBI NO: 30686619 NR Description: lipoxygenase (LOX), putative [Arabidopsis
  misc_feature (1)..(742): Homolog of NCBI NO: 126409 NR Description: Lipoxygenase 1 >gi|100005|pir||S22153
  misc_feature (1)..(742): Homolog of NCBI NO: 11991840 NR Description: lipoxygenase [Phaseolus vulgaris]
  misc_feature (1)..(742): Homolog of NCBI NO: 9909849 NR Description: lipoxygenase [Pisum sativum]
MNKHQKEFFLESITIEGFALGPVHFPCNSWVQSQKDHPDKRIFFTNQPYLPNETPSGLRVLREKELKNLRGDGSGVRKLSDRIYDFDVYNDLGNPDKSSELSRPKLGGKEVPYPRRCRTGRQSTVSDKDAESRVEKPLPMYVPRDEQFEESKQDTFAAGRLKAVLHHLIPSLKASIVAEDFADFGEIDRLYKEGLLLKLGFQDDIFKKFPLPKVVVDTLQESTKGLLKYDTPKILSKDKNAWLRDDEFARQAIAGINPVNIERVKTFPPVSNLDPKIYGPQHSALTDDHIIGHLDGFSVQQALEENRLYMLDYHDIFLPFLDRINALDGRKAYATRTIFFLTRLGTLKPVAIELSLPPHGPKHRSKRVLTPPVDATSNWMWQLAKAHVSSNDAGVHQLVNHWLRTHACLEPFILAAHRQLSAMHPIFKLLDPHMRYTLEINALARQSLISADGVIEGGFTAGAYGMEMSAAAYKSSWRFDMEGLPADLIRRGMAIPDATQPHGLKLLIEDYPYANDGLLLWSAIQTWVRTYVERYYPNPNLIKTDSELQSWYSESINVGHADLRDADWWPELSTVDDLVSILTTLIWLASAQHAALNFGQYPYGGYVPNRPPLMRRLIPDESDPEYASFISHPEKYYFSSMPSLAQTSKFMAVVDTLSTHSPDEEYIGERQQPSIWTGDAEIVEAFYGFAAEIGRIEKEIEKRNADPDRRNRCGAGVLPYELLVPSSEPGVTCRGVPNSVSI

SEQ ID NO: 81878 - DNA, 827 bp, Arabidopsis thaliana
  misc_feature (1)..(827): Ceres Seq. ID no. 12661875
  misc_feature: MA Experiment ID: 20000173 Result: Up-regulated in Transcription
  misc_feature: MA Experiment 20000173 PARAMETER Experiment Name: At_42deg_Heat_P Parameter: Age (day) Value: 14
  misc_feature: MA Experiment 20000173 PARAMETER Experiment Name: At_42deg_Heat_P Parameter: Organism Value: A. thaliana
  misc_feature: MA Experiment 20000173 PARAMETER Experiment Name: At_42deg_Heat_P Parameter: Plant Line Value: WS
  misc_feature: MA Experiment 20000173 PARAMETER Experiment Name: At_42deg_Heat_P Parameter: Temperature (deg C) Value: 42 vs. 22
  misc_feature: MA Experiment 20000173 PARAMETER Experiment Name: At_42deg_Heat_P Parameter: Timepoint (hr) Value: 6
  misc_feature: MA Experiment 20000173 PARAMETER Experiment Name: At_42deg_Heat_P Parameter: Tissue Value: Aerial
  misc_feature: MA Experiment ID: 20000214 Result: Down-regulated in Transcription
  misc_feature: MA Experiment 20000214 PARAMETER Experiment Name: At_4deg_Cold_P Parameter: Timepoint (hr) Value: 6
  misc_feature: MA Experiment ID: 20000235 Result: Down-regulated in Transcription
  misc_feature: MA Experiment 20000235 PARAMETER Experiment Name: At_Siliques_P Parameter: Age (day) Value: 21
  misc_feature: MA Experiment 20000235 PARAMETER Experiment Name: At_Siliques_P Parameter: Organism Value: A. thaliana
  misc_feature: MA Experiment 20000235 PARAMETER Experiment Name: At_Siliques_P Parameter: Plant Line Value: WS
  misc_feature: MA Experiment 20000235 PARAMETER Experiment Name: At_Siliques_P Parameter: Tissue Value: 5-10mm Siliques vs. Whole Plant
  misc_feature: MA Experiment ID: 20000265 Result: Down-regulated in Transcription
  misc_feature: MA Experiment 20000265 PARAMETER Experiment Name: At_Open_Flower_P Parameter: Age (day) Value: 21
  misc_feature: MA Experiment 20000265 PARAMETER Experiment Name: At_Open_Flower_P Parameter: Plant Line Value: WS
  misc_feature: MA Experiment 20000265 PARAMETER Experiment Name: At_Open_Flower_P Parameter: Tissue Value: Closed Flower vs. Whole Plant
  misc_feature: MA Experiment ID: 20000436 Result: Up-regulated in Transcription
  misc_feature: MA Experiment 20000436 PARAMETER Experiment Name: At_Drought_P Parameter: Age (day) Value: 7
  misc_feature: MA Experiment 20000436 PARAMETER Experiment Name: At_Drought_P Parameter: Organism Value: A. thaliana
  misc_feature: MA Experiment 20000436 PARAMETER Experiment Name: At_Drought_P Parameter: Plant Line Value: WS
  misc_feature: MA Experiment 20000436 PARAMETER Experiment Name: At_Drought_P Parameter: Timepoint (hr) Value: 12
  misc_feature: MA Experiment 20000436 PARAMETER Experiment Name: At_Drought_P Parameter: Tissue Value: Whole Plant
  misc_feature: MA Experiment 20000436 PARAMETER Experiment Name: At_Drought_P Parameter: Treatment Value: Drought vs. No Drought
  misc_feature: MA Experiment ID: 20000438 Result: Down-regulated in Transcription
  misc_feature: MA Experiment 20000438 PARAMETER Experiment Name: At_Shoots__P Parameter: Age (day) Value: 14
  misc_feature: MA Experiment 20000438 PARAMETER Experiment Name: At_Shoots__P Parameter: Tissue Value: Shoots vs. Whole Plant
  misc_feature: MA Experiment ID: 20000495 Result: Up-regulated in Transcription
  misc_feature: MA Experiment 20000495 PARAMETER Experiment Name: At_Guard_Cells_P Parameter: Harvest Date Value: 8/2/2002
  misc_feature: MA Experiment 20000495 PARAMETER Experiment Name: At_Guard_Cells_P Parameter: Organism Value: A. thaliana
  misc_feature: MA Experiment 20000495 PARAMETER Experiment Name: At_Guard_Cells_P Parameter: Tissue Value: Guard Cells vs. Leaves
  misc_feature: MA Experiment ID: 20001450 Result: Up-regulated in Transcription
  misc_feature: MA Experiment 20001450 PARAMETER Experiment Name: At_Far-red-induction_P Parameter: Age (day) Value: 7
  misc_feature: MA Experiment 20001450 PARAMETER Experiment Name: At_Far-red-induction_P Parameter: Light Value: Far-red vs. White
  misc_feature: MA Experiment 20001450 PARAMETER Experiment Name: At_Far-red-induction_P Parameter: Organism Value: A. thaliana
  misc_feature: MA Experiment 20001450 PARAMETER Experiment Name: At_Far-red-induction_P Parameter: Plant Line Value: Columbia
  misc_feature: MA Experiment 20001450 PARAMETER Experiment Name: At_Far-red-induction_P Parameter: Timepoint (hr) Value: 8
  misc_feature: MA Experiment 20001450 PARAMETER Experiment Name: At_Far-red-induction_P Parameter: Tissue Value: Whole Plant
  misc_feature: MA Experiment ID: 20001451 Result: Up-regulated in Transcription
  misc_feature: MA Experiment 20001451 PARAMETER Experiment Name: At_Far-red-induction_P Parameter: Age (day) Value: 7
  misc_feature: MA Experiment 20001451 PARAMETER Experiment Name: At_Far-red-induction_P Parameter: Light Value: Far-red vs. White
  misc_feature: MA Experiment 20001451 PARAMETER Experiment Name: At_Far-red-induction_P Parameter: Organism Value: A. thaliana
  misc_feature: MA Experiment 20001451 PARAMETER Experiment Name: At_Far-red-induction_P Parameter: Plant Line Value: Columbia
  misc_feature: MA Experiment 20001451 PARAMETER Experiment Name: At_Far-red-induction_P Parameter: Timepoint (hr) Value: 24
  misc_feature: MA Experiment 20001451 PARAMETER Experiment Name: At_Far-red-induction_P Parameter: Tissue Value: Whole Plant
  misc_feature: MA Experiment ID: 20001559 Result: Up-regulated in Transcription
  misc_feature: MA Experiment 20001559 PARAMETER Experiment Name: At_Drought_Soil_Dry_P Parameter: Age (day) Value: 28
  misc_feature: MA Experiment 20001559 PARAMETER Experiment Name: At_Drought_Soil_Dry_P Parameter: Organism Value: A. thaliana
  misc_feature: MA Experiment 20001559 PARAMETER Experiment Name: At_Drought_Soil_Dry_P Parameter: Plant Line Value: WS
  misc_feature: MA Experiment 20001559 PARAMETER Experiment Name: At_Drought_Soil_Dry_P Parameter: Post Timepoint (hr) Value: 29
  misc_feature: MA Experiment 20001559 PARAMETER Experiment Name: At_Drought_Soil_Dry_P Parameter: Post-Treatment Value: Re-Water vs. No Drought
  misc_feature: MA Experiment 20001559 PARAMETER Experiment Name: At_Drought_Soil_Dry_P Parameter: Timepoint (day) Value: 14
  misc_feature: MA Experiment 20001559 PARAMETER Experiment Name: At_Drought_Soil_Dry_P Parameter: Treatment Value: Drought vs. No Drought
  misc_feature: MA Experiment ID: 20001911 Result: Up-regulated in Transcription
  misc_feature: MA Experiment 20001911 PARAMETER Experiment Name: At_Drought_Reproduction_P Parameter: Age (day) Value: 40
  misc_feature: MA Experiment 20001911 PARAMETER Experiment Name: At_Drought_Reproduction_P Parameter: Organism Value: A. thaliana
  misc_feature: MA Experiment 20001911 PARAMETER Experiment Name: At_Drought_Reproduction_P Parameter: Plant Line Value: WS
  misc_feature: MA Experiment 20001911 PARAMETER Experiment Name: At_Drought_Reproduction_P Parameter: Timepoint (day) Value: 10
  misc_feature: MA Experiment 20001911 PARAMETER Experiment Name: At_Drought_Reproduction_P Parameter: Tissue Value: Flowers
  misc_feature: MA Experiment 20001911 PARAMETER Experiment Name: At_Drought_Reproduction_P Parameter: Treatment Value: Drought vs. No Drought
attctgtaccacatcataagctggaggttctctgactccgtcgtctctttctccgtcgccaccgttcctaaaacgtctcccgtcttcttctaatggcgatcaatcgtagctccgatcatgaatccgacgaaaacacccgtctttaccatccttaccagaactaccaggtcccgatcaaatctcagtatctatacaagcttccgacttctccggaatttctattcacggaagagtctctcaagcagcgtcgatcatggggagaaaatctcactttctacacagggacgggttatctagccggctctgtagccggtgcttcagctgggatcttctctggtatcaagagtttcgaaaatggagacacgacgaagctgaaaatcaacaggattttgaattcgtctggtcaggcaggtcgtacttggggtaatagggttgggattgttgggttgatctacgcagggattgagagtggtgtggtggcggtaactgataaggacgatgtttggaccagtgttgtcgctggtctgggaactggagcggtctttagggcagcacgaggagtgagatctgcggctgtggctggtgcttttggcggaattgcggctggtgcagttgtggcggggaagcaggttttcaagcggtatgctcacatatgaagaaccggagtgatctttagagcccacctatatgggaaaatcataaaaatcaaagctttttcgggtttctagggtagaattctggtttacattttagcgtatgttaacctgcgaacctttctttatagatataataataacaataataaaggttttaccttttgatattcg

SEQ ID NO: 81879 - protein, 187 aa, Arabidopsis thaliana
  peptide (1)..(187): Ceres Seq. ID no. 12661876
  misc_feature (48)..(181): Pfam Name: Tim17/Tim22/Tim23 family Pfam Description: Tim17/Tim22/Tim23 family
  misc_feature (1)..(187): Homolog of NCBI NO: 18394498 NR Description: inner mitochondrial membrane protein, putative; id: At1g17530.1, supported by cDNA: gi_13641345, supported by gi_15010569, supported by cDNA: gi_20147386 [Arabidopsis
  misc_feature (1)..(187): Homolog of NCBI NO: 13641346 NR Description: translocase of inner mitochondrial membrane TIM23
  misc_feature (1)..(187): Homolog of NCBI NO: 15218593 NR Description: inner mitochondrial membrane protein; protein id: supported by cDNA: 6793., supported by cDNA: gi_14596208, by cDNA: gi_18377493, supported by cDNA: gi_603055 [Arabidopsis
  misc_feature (1)..(184): Homolog of NCBI NO: 34902184 NR Description: Putative mitochondrial inner membrane protein
  misc_feature (1)..(184): Homolog of NCBI NO: 37536126 NR Description: putaive mitochondrial inner membrane protein
  misc_feature (3)..(187): Homolog of NCBI NO: 15229350 NR Description: putative inner mitochondrial membrane protein; id: At3g04800.1 [Arabidopsis thaliana] putative inner mitochondrial membrane protein [Arabidopsis
  misc_feature (53)..(183): Homolog of NCBI NO: 19075496 NR Description: putative mitochondrial import inner membrane subunit [Schizosaccharomyces pombe] Probable mitochondrial import inner membrane translocase subunit
  misc_feature (16)..(95): Homolog of NCBI NO: 38344267 NR Description: OSJNBa0005N02.5 [Oryza sativa (japonica
  misc_feature (87)..(185): Homolog of NCBI NO: 34394286 NR Description: hypothetical protein [Oryza sativa (japonica
  misc_feature (47)..(179): Homolog of NCBI NO: 40739542 NR Description: hypothetical protein AN6348.2 [Aspergillus
MAINRSSDHESDENTRLYHPYQNYQVPIKSQYLYKLPTSPEFLFTEESLKQRRSWGENLTFYTGTGYLAGSVAGASAGIFSGIKSFENGDTTKLKINRILNSSGQAGRTWGNRVGIVGLIYAGIESGVVAVTDKDDVWTSVVAGLGTGAVFRAARGVRSAAVAGAFGGIAAGAVVAGKQVFKRYAHI

SEQ ID NO: 81880 - DNA, 2196 bp, Arabidopsis thaliana
  misc_feature (1)..(2196): Ceres Seq. ID no. 12661889
  misc_feature: MA Experiment ID: 20001247 Result: Down-regulated in Transcription
  misc_feature: MA Experiment 20001247 PARAMETER Experiment Name: At_Far-red-induction_P Parameter: Age (day) Value: 7
  misc_feature: MA Experiment 20001247 PARAMETER Experiment Name: At_Far-red-induction_P Parameter: Light Value: Far-red vs. White
  misc_feature: MA Experiment 20001247 PARAMETER Experiment Name: At_Far-red-induction_P Parameter: Organism Value: A. thaliana
  misc_feature: MA Experiment 20001247 PARAMETER Experiment Name: At_Far-red-induction_P Parameter: Plant Line Value: Columbia
  misc_feature: MA Experiment 20001247 PARAMETER Experiment Name: At_Far-red-induction_P Parameter: Timepoint (hr) Value: 1
  misc_feature: MA Experiment 20001247 PARAMETER Experiment Name: At_Far-red-induction_P Parameter: Tissue Value: Whole Plant
atggttcacgcttctctttggcaatttcgccttcaaattatcccttggcgtcttcgtaatttttgcttcctcacttctcaatgtccatacacatcgatttcttctcccgacaccgtttcagtttcctcgtactactcccttacgtctaacaatgatcaatccctcttccattacttcgatcatcttcttggattatgcctgacagctcagcaatgcaggcaagttcatgcccaagtacttctatccgatttcatcttccgttctgggtcattagctgcgaatctcatatcggtttacgctcggttaggactccttctcgatgcccgtaacgttttcgagactgtttctcttgttttgttgtcggatttgcgtttgtggaactcgattctaaaagctaatgtgtcacatgggttatacgagaatgctcttgagctttacaggggaatgcgtcaacgaggtctcacaggggacggatatattttgcccttgatccttcgtgcttgtaggtacttaggtcgttttggtttgtgtcgggcttttcatactcaagttattcagattggtttgaaagagaatcttcatgtggttaatgagttgcttacgttgtatccaaaggcgggaaggatgggagatgcttacaatctgtttgttgaaatgcctgtgagaaaccgtatgtcatggaatgtcatgattaaagggttttctcaagagtatgattgtgaaagtgctgttaagatttttgaatggatgcaacgtgaagagtttaaaccagatgaagtgacttggacttcggttttgtcttgtcattcgcagtgtgggaagtttgaagatgttttaaagtattttcatcttatgaggatgagtggaaatgcagttagtggtgaagctcttgctgttttcttttctgtatgtgctgaattagaagcattaagtattgctgagaaagttcatgggtatgttataaaaggtggatttgaagagtatttgccctcgaggaacgcattgatacacgtatacgggaagcaagggaaagttaaagatgcagaacacttgttccggcaaataagaaacaaaggtatagagagctggaattctttgataacatcgtttgtggatgctggtaaactcgacgaggctctttcattgttttctgagttggaggaaatgaatcatgtttgtaacgtaaaggctaatgtagttacatggacctctgttattaagggttgtaatgtccaaggaagaggagacgattcacttgaatatttccggcaaatgcagttttccaaagtattggctaattcagtgacaatttgttgtatactatcaatttgtgcggagcttccagctttgaatctcggaagagagatccatgggcatgtgatacggacctcgatgagcgagaacattctggttcagaatgcattggtgaatatgtacgcaaaatgtgggttactcagtgaggggagtctagtatttgaagcaattagggataaggatttgatctcatggaactcgataatcaaaggttatggtatgcatgggtttgctgagaaagctctaagtatgttcgatcgaatgataagttctgggtttcatcctgatgggatcgctttggtagctgttctttcagcctgtagtcatgcagggctggttgaaaagggacgcgaaattttctattccatgagcaagagatttggattagagccccaacaagagcactatgcatgtattgttgatctccttggtcgtgtaggctttctgaaagaagcgagtgagattgtgaagaacatgcctatggagcccaaggtctgtgtgttgggagctctgttgaattcttgccggatgcataaaaacgtggacattgcagagggtatagcatcacaacttagtgttcttgaaccggagaggacaggaagctatatgttgctttccaacatctactctgctggtggaagatgggaagaatctgcaaatgtaagggctttagccaagaaaaaggatttgaagaaagtttctggaagcagttggattgaagtgaagaagaaaaagtacaaattctcgtcaggatcaatagtacagagcgagtttgagaccatctacccggttcttgaagatttggttagtcatatgttgaaaaaaggccctacacatgatgggaacaattatgaggatgatctagacctatggacagcataa

SEQ ID NO: 81881 - protein, 731 aa, Arabidopsis thaliana
  peptide (1)..(731): Ceres Seq. ID no. 12661890
  misc_feature (225)..(259): Pfam Name: PPR repeat Pfam Description: PPR repeat
  misc_feature (126)..(710): Homolog of NCBI NO: 34903592 NR Description: P0419B01.9 [Oryza sativa (japonica
  misc_feature (74)..(729): Homolog of NCBI NO: 15223802 NR Description: hypothetical protein; protein id: At1g20230.1
  misc_feature (74)..(729): Homolog of NCBI NO: 25345465 NR Description: T20H2.1 protein (truncated) - Arabidopsis >gi|8778977|gb|AAF79892.1|AC022472_1 Contains similarity to an protein F28A21.160 gi|7486269 from Arabidopsis thaliana BAC
  misc_feature (75)..(727): Homolog of NCBI NO: 15227144 NR Description: hypothetical protein; protein id: At2g22070.1
  misc_feature (73)..(718): Homolog of NCBI NO: 34393605 NR Description: pentatricopeptide (PPR) repeat-containing
  misc_feature (96)..(714): Homolog of NCBI NO: 15235498 NR Description: hypothetical protein; protein id: At4g02750.1
  misc_feature (94)..(727): Homolog of NCBI NO: 34896896 NR Description: hypothetical protein [Oryza sativa (japonica group)] >gi|24899461|gb|AAN65031.1| hypothetical protein [Oryza
  misc_feature (364)..(727): Homolog of NCBI NO: 38344863 NR Description: OSJNBa0020P07.6 [Oryza sativa (japonica
  misc_feature (45)..(356): Homolog of NCBI NO: 38344863 NR Description: OSJNBa0020P07.6 [Oryza sativa (japonica
  misc_feature (239)..(727): Homolog of NCBI NO: 15228590 NR Description: hypothetical protein; protein id: At3g03580.1 thaliana] >gi|6091764|gb|AAF03474.1|AC009327_13 hypothetical [Arabidopsis thaliana] >gi|28393735|gb|AAO42278.1| unknown
MVHASLWQFRLQIIPWRLRNFCFLTSQCPYTSISSPDTVSVSSYYSLTSNNDQSLFHYFDHLLGLCLTAQQCRQVHAQVLLSDFIFRSGSLAANLISVYARLGLLLDARNVFETVSLVLLSDLRLWNSILKANVSHGLYENALELYRGMRQRGLTGDGYILPLILRACRYLGRFGLCRAFHTQVIQIGLKENLHVVNELLTLYPKAGRMGDAYNLFVEMPVRNRMSWNVMIKGFSQEYDCESAVKIFEWMQREEFKPDEVTWTSVLSCHSQCGKFEDVLKYFHLMRMSGNAVSGEALAVFFSVCAELEALSIAEKVHGYVIKGGFEEYLPSRNALIHVYGKQGKVKDAEHLFRQIRNKGIESWNSLITSFVDAGKLDEALSLFSELEEMNHVCNVKANVVTWTSVIKGCNVQGRGDDSLEYFRQMQFSKVLANSVTICCILSICAELPALNLGREIHGHVIRTSMSENILVQNALVNMYAKCGLLSEGSLVFEAIRDKDLISWNSIIKGYGMHGFAEKALSMFDRMISSGFHPDGIALVAVLSACSHAGLVEKGREIFYSMSKRFGLEPQQEHYACIVDLLGRVGFLKEASEIVKNMPMEPKVCVLGALLNSCRMHKNVDIAEGIASQLSVLEPERTGSYMLLSNIYSAGGRWEESANVRALAKKKDLKKVSGSSWIEVKKKKYKFSSGSIVQSEFETIYPVLEDLVSHMLKKGPTHDGNNYEDDLDLWTA

SEQ ID NO: 81882 - protein, 583 aa, Arabidopsis thaliana
  peptide (1)..(583): Ceres Seq. ID no. 12661891
  misc_feature (77)..(111): Pfam Name: PPR repeat Pfam Description: PPR repeat
  misc_feature (1)..(562): Homolog of NCBI NO: 34903592 NR Description: P0419B01.9 [Oryza sativa (japonica
  misc_feature (1)..(581): Homolog of NCBI NO: 15223802 NR Description: hypothetical protein; protein id: At1g20230.1
  misc_feature (1)..(581): Homolog of NCBI NO: 25345465 NR Description: T20H2.1 protein (truncated) - Arabidopsis >gi|8778977|gb|AAF79892.1|AC022472_1 Contains similarity to an protein F28A21.160 gi|7486269 from Arabidopsis thaliana BAC
  misc_feature (1)..(579): Homolog of NCBI NO: 15227144 NR Description: hypothetical protein; protein id: At2g22070.1
  misc_feature (1)..(570): Homolog of NCBI NO: 34393605 NR Description: pentatricopeptide (PPR) repeat-containing
  misc_feature (1)..(566): Homolog of NCBI NO: 15235498 NR Description: hypothetical protein; protein id: At4g02750.1
  misc_feature (1)..(579): Homolog of NCBI NO: 34896896 NR Description: hypothetical protein [Oryza sativa (japonica group)] >gi|24899461|gb|AAN65031.1| hypothetical protein [Oryza
  misc_feature (216)..(579): Homolog of NCBI NO: 38344863 NR Description: OSJNBa0020P07.6 [Oryza sativa (japonica
  misc_feature (1)..(208): Homolog of NCBI NO: 38344863 NR Description: OSJNBa0020P07.6 [Oryza sativa (japonica
  misc_feature (91)..(579): Homolog of NCBI NO: 15228590 NR Description: hypothetical protein; protein id: At3g03580.1 thaliana] >gi|6091764|gb|AAF03474.1|AC009327_13 hypothetical [Arabidopsis thaliana] >gi|28393735|gb|AAO42278.1| unknown
MRQRGLTGDGYILPLILRACRYLGRFGLCRAFHTQVIQIGLKENLHVVNELLTLYPKAGRMGDAYNLFVEMPVRNRMSWNVMIKGFSQEYDCESAVKIFEWMQREEFKPDEVTWTSVLSCHSQCGKFEDVLKYFHLMRMSGNAVSGEALAVFFSVCAELEALSIAEKVHGYVIKGGFEEYLPSRNALIHVYGKQGKVKDAEHLFRQIRNKGIESWNSLITSFVDAGKLDEALSLFSELEEMNHVCNVKANVVTWTSVIKGCNVQGRGDDSLEYFRQMQFSKVLANSVTICCILSICAELPALNLGREIHGHVIRTSMSENILVQNALVNMYAKCGLLSEGSLVFEAIRDKDLISWNSIIKGYGMHGFAEKALSMFDRMISSGFHPDGIALVAVLSACSHAGLVEKGREIFYSMSKRFGLEPQQEHYACIVDLLGRVGFLKEASEIVKNMPMEPKVCVLGALLNSCRMHKNVDIAEGIASQLSVLEPERTGSYMLLSNIYSAGGRWEESANVRALAKKKDLKKVSGSSWIEVKKKKYKFSSGSIVQSEFETIYPVLEDLVSHMLKKGPTHDGNNYEDDLDLWTA

SEQ ID NO: 81883 - protein, 523 aa, Arabidopsis thaliana
  peptide (1)..(523): Ceres Seq. ID no. 12661892
  misc_feature (17)..(51): Pfam Name: PPR repeat Pfam Description: PPR repeat
  misc_feature (1)..(502): Homolog of NCBI NO: 34903592 NR Description: P0419B01.9 [Oryza sativa (japonica
  misc_feature (1)..(521): Homolog of NCBI NO: 15223802 NR Description: hypothetical protein; protein id: At1g20230.1
  misc_feature (1)..(521): Homolog of NCBI NO: 25345465 NR Description: T20H2.1 protein (truncated) - Arabidopsis >gi|8778977|gb|AAF79892.1|AC022472_1 Contains similarity to an protein F28A21.160 gi|7486269 from Arabidopsis thaliana BAC
  misc_feature (1)..(519): Homolog of NCBI NO: 15227144 NR Description: hypothetical protein; protein id: At2g22070.1
  misc_feature (1)..(510): Homolog of NCBI NO: 34393605 NR Description: pentatricopeptide (PPR) repeat-containing
  misc_feature (1)..(506): Homolog of NCBI NO: 15235498 NR Description: hypothetical protein; protein id: At4g02750.1
  misc_feature (1)..(519): Homolog of NCBI NO: 34896896 NR Description: hypothetical protein [Oryza sativa (japonica group)] >gi|24899461|gb|AAN65031.1| hypothetical protein [Oryza
  misc_feature (156)..(519): Homolog of NCBI NO: 38344863 NR Description: OSJNBa0020P07.6 [Oryza sativa (japonica
  misc_feature (1)..(148): Homolog of NCBI NO: 38344863 NR Description: OSJNBa0020P07.6 [Oryza sativa (japonica
  misc_feature (31)..(519): Homolog of NCBI NO: 15228590 NR Description: hypothetical protein; protein id: At3g03580.1 thaliana] >gi|6091764|gb|AAF03474.1|AC009327_13 hypothetical [Arabidopsis thaliana] >gi|28393735|gb|AAO42278.1| unknown
MGDAYNLFVEMPVRNRMSWNVMIKGFSQEYDCESAVKIFEWMQREEFKPDEVTWTSVLSCHSQCGKFEDVLKYFHLMRMSGNAVSGEALAVFFSVCAELEALSIAEKVHGYVIKGGFEEYLPSRNALIHVYGKQGKVKDAEHLFRQIRNKGIESWNSLITSFVDAGKLDEALSLFSELEEMNHVCNVKANVVTWTSVIKGCNVQGRGDDSLEYFRQMQFSKVLANSVTICCILSICAELPALNLGREIHGHVIRTSMSENILVQNALVNMYAKCGLLSEGSLVFEAIRDKDLISWNSIIKGYGMHGFAEKALSMFDRMISSGFHPDGIALVAVLSACSHAGLVEKGREIFYSMSKRFGLEPQQEHYACIVDLLGRVGFLKEASEIVKNMPMEPKVCVLGALLNSCRMHKNVDIAEGIASQLSVLEPERTGSYMLLSNIYSAGGRWEESANVRALAKKKDLKKVSGSSWIEVKKKKYKFSSGSIVQSEFETIYPVLEDLVSHMLKKGPTHDGNNYEDDLDLWTA

SEQ ID NO: 81884 - DNA, 1110 bp, Arabidopsis thaliana
  misc_feature (1)..(1110): Ceres Seq. ID no. 12661893
  misc_feature: MA Experiment ID: 20000184 Result: Down-regulated in Transcription
  misc_feature: MA Experiment 20000184 PARAMETER Experiment Name: At_Shoots__P Parameter: Age (day) Value: 7
  misc_feature: MA Experiment 20000184 PARAMETER Experiment Name: At_Shoots__P Parameter: Tissue Value: Shoots vs. Whole Plant
  misc_feature: MA Experiment ID: 20001450 Result: Up-regulated in Transcription
  misc_feature: MA Experiment 20001450 PARAMETER Experiment Name: At_Far-red-induction_P Parameter: Age (day) Value: 7
  misc_feature: MA Experiment 20001450 PARAMETER Experiment Name: At_Far-red-induction_P Parameter: Light Value: Far-red vs. White
  misc_feature: MA Experiment 20001450 PARAMETER Experiment Name: At_Far-red-induction_P Parameter: Organism Value: A. thaliana
  misc_feature: MA Experiment 20001450 PARAMETER Experiment Name: At_Far-red-induction_P Parameter: Plant Line Value: Columbia
  misc_feature: MA Experiment 20001450 PARAMETER Experiment Name: At_Far-red-induction_P Parameter: Timepoint (hr) Value: 8
  misc_feature: MA Experiment 20001450 PARAMETER Experiment Name: At_Far-red-induction_P Parameter: Tissue Value: Whole Plant
atggattataactcagatcgtggttatgatgactcttaccatcatcacgtacacgacgaacaattaccacaatcggattttgaagtggagacctttgatgaccggaggaacggtggtgcagccgttgatactggtgggattcagatgaagcattccgttgaccatcgccattcttcttcgtccatgtcttctcctgggaaactgttcgtaggtggagtttcttgggaaacaactgcagaaacttttgcgaattactttggaaagtttggagaagttgtcgactctgtaatcatgacagatagaataactgggaacccaagggggtttgggtttgtcacttttgctgattcagctgttgctgagaaagttttggaggaagatcatgtaatagatgaccgaaaggttgatctgaaaaggacacttcctagaggggacaaggatactgatatcaaagcggtatcaaagaccaggaaaatctttgttggtggacttccaccacttttggaagaagatgaactgaagaattatttctgtgtatatggtgacataattgagcatcagatcatgtatgaccaccacacgggaaggtcaaggggatttggttttgtaaccttccagaccgaagattctgttgatagacttttctccgatggaaaagttcacgagctcggtgacaaacaggtggaaataaaaagggccgaaccaaagagaaccgggagagataacagctttcgatcctatggtgctagtggcaagtatgatcaggaagatagttatagtgggaaagctaatgaagattacagtatgtattcgggttatggtggttatggcggttatggagcctacgcagggaactccatggttaaccctgctggtttttatggttatggtggtgggtatggctatggttatggctatggaggtcaaatgttcaacatgggctatggagctggcggttatagccatatgggtagtggctatggtgttgctgcggctgctgcttatggaggtggaaaatctcatggaaacggaaataacggctcaagtagtggcaaaggaaatgggactaatggttctgggccagatcgataccatccttatcaaaagtag

SEQ ID NO: 81885 - protein, 369 aa, Arabidopsis thaliana
  peptide (1)..(369): Ceres Seq. ID no. 12661894
  misc_feature (159)..(230): Pfam Name: RNA recognition motif. (a.k.a. RRM, RBD, or RNP domain) Pfam Description: RNA recognition motif. (a.k.a. RRM, RBD, or RNP
  misc_feature (1)..(369): Homolog of NCBI NO: 15220810 NR Description: RRM-containing RNA-binding protein, putative;
  misc_feature (67)..(369): Homolog of NCBI NO: 8778468 NR Description: F1L3.34 [Arabidopsis thaliana]
  misc_feature (1)..(70): Homolog of NCBI NO: 8778468 NR Description: F1L3.34 [Arabidopsis thaliana]
  misc_feature (57)..(364): Homolog of NCBI NO: 15242719 NR Description: RRM-containing RNA-binding protein, putative; id: At5g40490.1 [Arabidopsis thaliana] contains similarity to RNA binding protein~gene_id:MNF13.1
  misc_feature (59)..(364): Homolog of NCBI NO: 30682553 NR Description: RNA recognition motif (RRM)-containing protein thaliana] >gi|11994764|dbj|BAB03120.1| contains similarity to RNA
  misc_feature (63)..(366): Homolog of NCBI NO: 35215091 NR Description: putative heterogeneous nuclear ribonucleoprotein
  misc_feature (63)..(351): Homolog of NCBI NO: 22328624 NR Description: heterogeneous nuclear ribonucleoprotein(hnRNP), protein id: At4g14300.1 [Arabidopsis thaliana]
  misc_feature (154)..(364): Homolog of NCBI NO: 37535274 NR Description: putative RNA-binding protein [Oryza sativa
  misc_feature (63)..(146): Homolog of NCBI NO: 37535274 NR Description: putative RNA-binding protein [Oryza sativa
  misc_feature (63)..(361): Homolog of NCBI NO: 15226106 NR Description: heterogeneous nuclear ribonucleoprotein(hnRNP), protein id: At2g33410.1 [Arabidopsis thaliana]
MDYNSDRGYDDSYHHHVHDEQLPQSDFEVETFDDRRNGGAAVDTGGIQMKHSVDHRHSSSSMSSPGKLFVGGVSWETTAETFANYFGKFGEVVDSVIMTDRITGNPRGFGFVTFADSAVAEKVLEEDHVIDDRKVDLKRTLPRGDKDTDIKAVSKTRKIFVGGLPPLLEEDELKNYFCVYGDIIEHQIMYDHHTGRSRGFGFVTFQTEDSVDRLFSDGKVHELGDKQVEIKRAEPKRTGRDNSFRSYGASGKYDQEDSYSGKANEDYSMYSGYGGYGGYGAYAGNSMVNPAGFYGYGGGYGYGYGYGGQMFNMGYGAGGYSHMGSGYGVAAAAAYGGGKSHGNGNNGSSSGKGNGTNGSGPDRYHPYQK

SEQ ID NO: 81886 - protein, 321 aa, Arabidopsis thaliana
  peptide (1)..(321): Ceres Seq. ID no. 12661895
  misc_feature (111)..(182): Pfam Name: RNA recognition motif. (a.k.a. RRM, RBD, or RNP domain) Pfam Description: RNA recognition motif. (a.k.a. RRM, RBD, or RNP
  misc_feature (1)..(321): Homolog of NCBI NO: 15220810 NR Description: RRM-containing RNA-binding protein, putative;
  misc_feature (19)..(321): Homolog of NCBI NO: 8778468 NR Description: F1L3.34 [Arabidopsis thaliana]
  misc_feature (1)..(22): Homolog of NCBI NO: 8778468 NR Description: F1L3.34 [Arabidopsis thaliana]
  misc_feature (9)..(316): Homolog of NCBI NO: 15242719 NR Description: RRM-containing RNA-binding protein, putative; id: At5g40490.1 [Arabidopsis thaliana] contains similarity to RNA binding protein~gene_id:MNF13.1
  misc_feature (11)..(316): Homolog of NCBI NO: 30682553 NR Description: RNA recognition motif (RRM)-containing protein thaliana] >gi|11994764|dbj|BAB03120.1| contains similarity to RNA
  misc_feature (15)..(318): Homolog of NCBI NO: 35215091 NR Description: putative heterogeneous nuclear ribonucleoprotein
  misc_feature (15)..(303): Homolog of NCBI NO: 22328624 NR Description: heterogeneous nuclear ribonucleoprotein(hnRNP), protein id: At4g14300.1 [Arabidopsis thaliana]
  misc_feature (106)..(316): Homolog of NCBI NO: 37535274 NR Description: putative RNA-binding protein [Oryza sativa
  misc_feature (15)..(98): Homolog of NCBI NO: 37535274 NR Description: putative RNA-binding protein [Oryza sativa
  misc_feature (15)..(313): Homolog of NCBI NO: 15226106 NR Description: heterogeneous nuclear ribonucleoprotein(hnRNP), protein id: At2g33410.1 [Arabidopsis thaliana]
MKHSVDHRHSSSSMSSPGKLFVGGVSWETTAETFANYFGKFGEVVDSVIMTDRITGNPRGFGFVTFADSAVAEKVLEEDHVIDDRKVDLKRTLPRGDKDTDIKAVSKTRKIFVGGLPPLLEEDELKNYFCVYGDIIEHQIMYDHHTGRSRGFGFVTFQTEDSVDRLFSDGKVHELGDKQVEIKRAEPKRTGRDNSFRSYGASGKYDQEDSYSGKANEDYSMYSGYGGYGGYGAYAGNSMVNPAGFYGYGGGYGYGYGYGGQMFNMGYGAGGYSHMGSGYGVAAAAAYGGGKSHGNGNNGSSSGKGNGTNGSGPDRYHPYQK

SEQ ID NO: 81887 - protein, 308 aa, Arabidopsis thaliana
  peptide (1)..(308): Ceres Seq. ID no. 12661896
  misc_feature (98)..(169): Pfam Name: RNA recognition motif. (a.k.a. RRM, RBD, or RNP domain) Pfam Description: RNA recognition motif. (a.k.a. RRM, RBD, or RNP
  misc_feature (1)..(308): Homolog of NCBI NO: 15220810 NR Description: RRM-containing RNA-binding protein, putative;
  misc_feature (6)..(308): Homolog of NCBI NO: 8778468 NR Description: F1L3.34 [Arabidopsis thaliana]
  misc_feature (1)..(303): Homolog of NCBI NO: 15242719 NR Description: RRM-containing RNA-binding protein, putative; id: At5g40490.1 [Arabidopsis thaliana] contains similarity to RNA binding protein~gene_id:MNF13.1
  misc_feature (1)..(303): Homolog of NCBI NO: 30682553 NR Description: RNA recognition motif (RRM)-containing protein thaliana] >gi|11994764|dbj|BAB03120.1| contains similarity to RNA
  misc_feature (2)..(305): Homolog of NCBI NO: 35215091 NR Description: putative heterogeneous nuclear ribonucleoprotein
  misc_feature (2)..(290): Homolog of NCBI NO: 22328624 NR Description: heterogeneous nuclear ribonucleoprotein(hnRNP), protein id: At4g14300.1 [Arabidopsis thaliana]
  misc_feature (93)..(303): Homolog of NCBI NO: 37535274 NR Description: putative RNA-binding protein [Oryza sativa
  misc_feature (2)..(85): Homolog of NCBI NO: 37535274 NR Description: putative RNA-binding protein [Oryza sativa
  misc_feature (2)..(300): Homolog of NCBI NO: 15226106 NR Description: heterogeneous nuclear ribonucleoprotein(hnRNP), protein id: At2g33410.1 [Arabidopsis thaliana]
  misc_feature (1)..(169): Homolog of NCBI NO: 30682550 NR Description: RNA recognition motif (RRM)-containing protein thaliana] >gi|17065240|gb|AAL32774.1| Unknown protein thaliana] >gi|20260060|gb|AAM13377.1| unknown protein
MSSPGKLFVGGVSWETTAETFANYFGKFGEVVDSVIMTDRITGNPRGFGFVTFADSAVAEKVLEEDHVIDDRKVDLKRTLPRGDKDTDIKAVSKTRKIFVGGLPPLLEEDELKNYFCVYGDIIEHQIMYDHHTGRSRGFGFVTFQTEDSVDRLFSDGKVHELGDKQVEIKRAEPKRTGRDNSFRSYGASGKYDQEDSYSGKANEDYSMYSGYGGYGGYGAYAGNSMVNPAGFYGYGGGYGYGYGYGGQMFNMGYGAGGYSHMGSGYGVAAAAAYGGGKSHGNGNNGSSSGKGNGTNGSGPDRYHPYQK

SEQ ID NO: 81888 - DNA, 1355 bp, Arabidopsis thaliana
  misc_feature (1)..(1355): Ceres Seq. ID no. 12661921
  misc_feature: MA Experiment ID: 108434 Result: Down-regulated in Transcription
  misc_feature: MA Experiment 108434 PARAMETER Experiment Name: At_Root_Tips_cDNA_P Parameter: Tissue Value: Root Tips
  misc_feature: MA Experiment ID: 108464 Result: Up-regulated in Transcription
  misc_feature: MA Experiment 108464 PARAMETER Experiment Name: At_Germinating_Seeds_cDNA_P Parameter: Age (day) Value: 4 vs. 0
  misc_feature: MA Experiment 108464 PARAMETER Experiment Name: At_Germinating_Seeds_cDNA_P Parameter: Tissue Value: Germinating Seeds
  misc_feature: MA Experiment ID: 20000184 Result: Down-regulated in Transcription
  misc_feature: MA Experiment 20000184 PARAMETER Experiment Name: At_Shoots__P Parameter: Age (day) Value: 7
  misc_feature: MA Experiment 20000184 PARAMETER Experiment Name: At_Shoots__P Parameter: Tissue Value: Shoots vs. Whole Plant
  misc_feature: MA Experiment ID: 20000185 Result: Down-regulated in Transcription
  misc_feature: MA Experiment 20000185 PARAMETER Experiment Name: At_Roots__P Parameter: Age (day) Value: 7 vs. 21
  misc_feature: MA Experiment 20000185 PARAMETER Experiment Name: At_Roots__P Parameter: Organism Value: A. thaliana
  misc_feature: MA Experiment 20000185 PARAMETER Experiment Name: At_Roots__P Parameter: Tissue Value: Roots vs. Whole Plant
  misc_feature: MA Experiment ID: 20000234 Result: Down-regulated in Transcription
  misc_feature: MA Experiment 20000234 PARAMETER Experiment Name: At_Siliques_P Parameter: Age (day) Value: 21
  misc_feature: MA Experiment 20000234 PARAMETER Experiment Name: At_Siliques_P Parameter: Organism Value: A. thaliana
  misc_feature: MA Experiment 20000234 PARAMETER Experiment Name: At_Siliques_P Parameter: Plant Line Value: WS
  misc_feature: MA Experiment 20000234 PARAMETER Experiment Name: At_Siliques_P Parameter: Tissue Value: Less Than 5mm Siliques vs. Whole Plant
  misc_feature: MA Experiment ID: 20000439 Result: Down-regulated in Transcription
  misc_feature: MA Experiment 20000439 PARAMETER Experiment Name: At_Roots__P Parameter: Age (day) Value: 14 vs. 21
  misc_feature: MA Experiment 20000439 PARAMETER Experiment Name: At_Roots__P Parameter: Organism Value: A. thaliana
  misc_feature: MA Experiment 20000439 PARAMETER Experiment Name: At_Roots__P Parameter: Tissue Value: Roots vs. Whole Plant
  misc_feature: MA Experiment ID: 20000794 Result: Up-regulated in Transcription
  misc_feature: MA Experiment 20000794 PARAMETER Experiment Name: At_Petals_P Parameter: Age (day) Value: 23-25 days
  misc_feature: MA Experiment 20000794 PARAMETER Experiment Name: At_Petals_P Parameter: Plant Line Value: WS
  misc_feature: MA Experiment 20000794 PARAMETER Experiment Name: At_Petals_P Parameter: Tissue Value: Petals vs. Whole plant
  misc_feature: MA Experiment ID: 20001558 Result: Down-regulated in Transcription
  misc_feature: MA Experiment 20001558 PARAMETER Experiment Name: At_Drought_Soil_Dry_P Parameter: Age (day) Value: 27
  misc_feature: MA Experiment 20001558 PARAMETER Experiment Name: At_Drought_Soil_Dry_P Parameter: Organism Value: A. thaliana
  misc_feature: MA Experiment 20001558 PARAMETER Experiment Name: At_Drought_Soil_Dry_P Parameter: Plant Line Value: WS
  misc_feature: MA Experiment 20001558 PARAMETER Experiment Name: At_Drought_Soil_Dry_P Parameter: Post Timepoint (hr) Value: 6
  misc_feature: MA Experiment 20001558 PARAMETER Experiment Name: At_Drought_Soil_Dry_P Parameter: Post-Treatment Value: Re-Water vs. No Drought
  misc_feature: MA Experiment 20001558 PARAMETER Experiment Name: At_Drought_Soil_Dry_P Parameter: Timepoint (day) Value: 13
  misc_feature: MA Experiment 20001558 PARAMETER Experiment Name: At_Drought_Soil_Dry_P Parameter: Treatment Value: Drought vs. No Drought
  misc_feature: MA Experiment ID: 20001560 Result: Down-regulated in Transcription
  misc_feature: MA Experiment 20001560 PARAMETER Experiment Name: At_Drought_Soil_Dry_P Parameter: Age (day) Value: 28
  misc_feature: MA Experiment 20001560 PARAMETER Experiment Name: At_Drought_Soil_Dry_P Parameter: Organism Value: A. thaliana
  misc_feature: MA Experiment 20001560 PARAMETER Experiment Name: At_Drought_Soil_Dry_P Parameter: Plant Line Value: WS
  misc_feature: MA Experiment 20001560 PARAMETER Experiment Name: At_Drought_Soil_Dry_P Parameter: Post Timepoint (hr) Value: None
  misc_feature: MA Experiment 20001560 PARAMETER Experiment Name: At_Drought_Soil_Dry_P Parameter: Post-Treatment Value: None
  misc_feature: MA Experiment 20001560 PARAMETER Experiment Name: At_Drought_Soil_Dry_P Parameter: Timepoint (day) Value: 14
  misc_feature: MA Experiment 20001560 PARAMETER Experiment Name: At_Drought_Soil_Dry_P Parameter: Treatment Value: Drought vs. No Drought
  misc_feature: MA Experiment ID: 20001911 Result: Up-regulated in Transcription
  misc_feature: MA Experiment 20001911 PARAMETER Experiment Name: At_Drought_Reproduction_P Parameter: Age (day) Value: 40
  misc_feature: MA Experiment 20001911 PARAMETER Experiment Name: At_Drought_Reproduction_P Parameter: Organism Value: A. thaliana
  misc_feature: MA Experiment 20001911 PARAMETER Experiment Name: At_Drought_Reproduction_P Parameter: Plant Line Value: WS
  misc_feature: MA Experiment 20001911 PARAMETER Experiment Name: At_Drought_Reproduction_P Parameter: Timepoint (day) Value: 10
  misc_feature: MA Experiment 20001911 PARAMETER Experiment Name: At_Drought_Reproduction_P Parameter: Tissue Value: Flowers
  misc_feature: MA Experiment 20001911 PARAMETER Experiment Name: At_Drought_Reproduction_P Parameter: Treatment Value: Drought vs. No Drought
aaaaagaaagattactaacgccgactctctaaaactctctcaaaccataaaaaatattctccgatcatcattttaatggagagtacagattcttccggtggtcctccgccgccgcaaccaaacctccctccaggattccggtttcatccaacagacgaagaacttgtaattcattacctcaaacgcaaagcagattctgttcctttaccagtcgcgatcatcgccgacgttgatctttacaaatttgatccatgggaacttcccgcgaaagcttcgtttggagaacaagaatggtattttttcagtccaagagatcggaaatatcccaacggagctagacctaaccgagctgcgacttccggttattggaaagcgactggtacagataaaccggtgatttcaaccggcggtggtggtagtaaaaaagtgggagttaaaaaggctctagtgttttacagtggtaaaccaccaaaaggagttaaatcagattggattatgcatgaatatcggttaactgataataaacctactcatatttgtgacttcggcaacaagaaaaactctctcaggcttgatgattgggtgttgtgtcgtatctacaagaaaaacaatagtacagcatctagacatcatcatcatcttcatcatattcatctagataatgatcatcatcgtcatgatatgatgattgatgatgatcgattccgtcatgttcctcctggtcttcacttcccggcgattttttctgacaataatgatccgacggctatatatgatggtggcggcggcggatacggaggtggaagttactcgatgaatcattgtttcgcatctggatcaaagcaggagcagttgtttccaccggtgatgatgatgactagtctaaatcaagattccggtattggatcgtcgtcgtcacctagcaagagatttaacggcggcggcgttggagattgttcgacttctatggcggcgacgccgttaatgcagaaccaaggtgggatttaccaattgcctggtttgaattggtattcttgaaaacaatttacgatgaagaatttttaaaatttgtgtatatatatacggtttgagtgattagggggcattgggggatttatttacggttgattattattgtagtgttatagaactaaggagattaaattaaatagattggaggagaggtataaggtaacatatagaaattatacaacaatagtttaaatattcttttcttttctttttcatgttattatttttactaatgtataggtgatgattatacttagatgtttgtagcttgtataaattaatgcatgcatatatataaaaatatattaacagttatagaaact

SEQ ID NO: 81889 - protein, 320 aa, Arabidopsis thaliana; identical to SEQ ID NO: 34954
  peptide (1)..(320): Ceres Seq. ID no. 12661922
  misc_feature (17)..(147): Pfam Name: No apical meristem (NAM) protein Pfam Description: No apical meristem (NAM) protein
  misc_feature (1)..(320): Homolog of NCBI NO: 15219110 NR Description: NAM-like protein; protein id: At1g52880.1, by cDNA: 21243., supported by cDNA: gi_20466639, supported by
  misc_feature (1)..(320): Homolog of NCBI NO: 21554226 NR Description: NAM-like protein [Arabidopsis thaliana]
  misc_feature (1)..(320): Homolog of NCBI NO: 20466640 NR Description: NAM-like protein [Arabidopsis thaliana]
  misc_feature (1)..(274): Homolog of NCBI NO: 15232606 NR Description: putative jasmonic acid regulatory protein; id: At3g15510.1, supported by cDNA: gi_12060425 [Arabidopsis
  misc_feature (1)..(320): Homolog of NCBI NO: 18407026 NR Description: NAM protein, putative; protein id: At1g61110.1, by cDNA: 38858. [Arabidopsis thaliana]
  misc_feature (5)..(180): Homolog of NCBI NO: 25352286 NR Description: hypothetical protein F11P17.16 [imported] - thaliana >gi|2443890|gb|AAB71483.1| similar to NAM
  misc_feature (1)..(180): Homolog of NCBI NO: 21593425 NR Description: NAM protein, putative [Arabidopsis thaliana]
  misc_feature (1)..(183): Homolog of NCBI NO: 34899790 NR Description: OJ1773_H01.21 [Oryza sativa (japonica >gi|24417196|dbj|BAC22555.1| putative OsNAC5 protein [Oryza
  misc_feature (13)..(210): Homolog of NCBI NO: 6223651 NR Description: NAM-like protein (no apical meristem)
  misc_feature (13)..(210): Homolog of NCBI NO: 30679026 NR Description: No apical meristem (NAM) protein family thaliana] >gi|29029082|gb|AAO64920.1| At3g04070 [Arabidopsis

SEQ ID NO: 81890 - protein, 180 aa, Arabidopsis thaliana; identical to SEQ ID NO: 34955
  peptide (1)..(180): Ceres Seq. ID no. 12661923
  misc_feature (1)..(180): Homolog of NCBI NO: 15219110 NR Description: NAM-like protein; protein id: At1g52880.1, by cDNA: 21243., supported by cDNA: gi_20466639, supported by
  misc_feature (1)..(180): Homolog of NCBI NO: 21554226 NR Description: NAM-like protein [Arabidopsis thaliana]
  misc_feature (1)..(180): Homolog of NCBI NO: 20466640 NR Description: NAM-like protein [Arabidopsis thaliana]
  misc_feature (1)..(134): Homolog of NCBI NO: 15232606 NR Description: putative jasmonic acid regulatory protein; id: At3g15510.1, supported by cDNA: gi_12060425 [Arabidopsis
  misc_feature (1)..(180): Homolog of NCBI NO: 18407026 NR Description: NAM protein, putative; protein id: At1g61110.1, by cDNA: 38858. [Arabidopsis thaliana]
  misc_feature (1)..(40): Homolog of NCBI NO: 25352286 NR Description: hypothetical protein F11P17.16 [imported] - thaliana >gi|2443890|gb|AAB71483.1| similar to NAM
  misc_feature (1)..(40): Homolog of NCBI NO: 21593425 NR Description: NAM protein, putative [Arabidopsis thaliana]
  misc_feature (1)..(43): Homolog of NCBI NO: 34899790 NR Description: OJ1773_H01.21 [Oryza sativa (japonica >gi|24417196|dbj|BAC22555.1| putative OsNAC5 protein [Oryza
  misc_feature (1)..(70): Homolog of NCBI NO: 6223651 NR Description: NAM-like protein (no apical meristem)
  misc_feature (1)..(70): Homolog of NCBI NO: 30679026 NR Description: No apical meristem (NAM) protein family thaliana] >gi|29029082|gb|AAO64920.1| At3g04070 [Arabidopsis

SEQ ID NO: 81891 - DNA, 846 bp, Arabidopsis thaliana
  misc_feature (1)..(846): Ceres Seq. ID no. 12661928
  misc_feature: MA Experiment ID: 20000180 Result: Up-regulated in Transcription
  misc_feature: MA Experiment 20000180 PARAMETER Experiment Name: At_Germinating_Seeds_P Parameter: Age (hr) Value: 24 vs. 0
  misc_feature: MA Experiment 20000180 PARAMETER Experiment Name: At_Germinating_Seeds_P Parameter: Tissue Value: Germinating Seeds
atttgggtgatgtttaggcactgagaggtgcaacgaagcgctagaaaagctggagaagaagtatgatgtcgttgttaacattcaaggagatgaaccacttattgagcctgagattatagacggtgtagtcaaagcacttcaggtctcgtaaactgctcagtgagatgatgtcttatatgtttcatcgtggattatgatcctactacttagaagtctttcgaatgctgttgaatagtgttcctatggttgtggtttctaggtaacaccggatgcagtgtttagcacagcggtgacatcattgaaaccagaagacgggcttgatcctaaccgagttaaatgtgtggtggacaatcgtggctatgctatctatttctcaaggggtttgattccttataacaagagtggtaaagtcaatccagattttccgtacatgcttcatcttggaattcagagctttgattcgaagtttctgaaggtatattcagagcttcaaccaacgccattgcagcaagaagaggatctagaacagctcaaagttcttgagaatggctacaaaatgaaggttataaaggtagatcatgaagctcatggagttgacacacccgatgatgtcgaaaagattgaatctttaatgcgcgaaagaaacatgtcctagtccacaaaatcattttcctttcttttctttttttccctttcattaggagtacgtgataaacgccttgaaagagttgtggcattgtgtgtgagacatcgaaggtttactgatacgacatcgaaggtttactatcatttacctaaagaaagtatcgtgttactttttgatagtatcgatctttttattttccc

SEQ ID NO: 81892 - protein, 74 aa, Arabidopsis thaliana
  peptide (1)..(74): Ceres Seq. ID no. 12661929
  misc_feature (1)..(74): Homolog of NCBI NO: 30695393 NR Description: CMP-KDO synthetase -related [Arabidopsis >gi|12324630|gb|AAG52266.1|AC019018_3 putative deoxyoctulonosic
  misc_feature (1)..(73): Homolog of NCBI NO: 7688435 NR Description: CMP-KDO synthetase [Zea mays]
  misc_feature (1)..(68): Homolog of NCBI NO: 7688437 NR Description: CMP-KDO synthetase [Zea mays]
  misc_feature (1)..(74): Homolog of NCBI NO: 15724191 NR Description: F14G24.28/F14G24.28 [Arabidopsis thaliana]
  misc_feature (1)..(73): Homolog of NCBI NO: 19704142 NR Description: 3-deoxy-manno-octulosonate cytidylyltransferase
  misc_feature (1)..(73): Homolog of NCBI NO: 34762436 NR Description: 3-deoxy-manno-octulosonate cytidylyltransferase
  misc_feature (1)..(71): Homolog of NCBI NO: 21674644 NR Description: 3-deoxy-manno-octulosonate cytidylyltransferase
  misc_feature (1)..(73): Homolog of NCBI NO: 34541435 NR Description: 3-deoxy-D-manno-octulosonate cytidylyltransferase
  misc_feature (1)..(68): Homolog of NCBI NO: 1361311 NR Description: CMP-2-keto-3-deoxyoctulosonic acid synthetase
  misc_feature (1)..(68): Homolog of NCBI NO: 15604902 NR Description: CMP-2-keto-3-deoxyoctulosonic acid synthetase
MLHLGIQSFDSKFLKVYSELQPTPLQQEEDLEQLKVLENGYKMKVIKVDHEAHGVDTPDDVEKIESLMRERNMS

SEQ ID NO: 81893 - DNA, 2169 bp, Arabidopsis thaliana
  misc_feature (1)..(2169): Ceres Seq. ID no. 12661943
  misc_feature: MA Experiment ID: 20000180 Result: Up-regulated in Transcription
  misc_feature: MA Experiment 20000180 PARAMETER Experiment Name: At_Germinating_Seeds_P Parameter: Age (hr) Value: 24 vs. 0
  misc_feature: MA Experiment 20000180 PARAMETER Experiment Name: At_Germinating_Seeds_P Parameter: Tissue Value: Germinating Seeds
  misc_feature: MA Experiment ID: 20001451 Result: Down-regulated in Transcription
  misc_feature: MA Experiment 20001451 PARAMETER Experiment Name: At_Far-red-induction_P Parameter: Age (day) Value: 7
  misc_feature: MA Experiment 20001451 PARAMETER Experiment Name: At_Far-red-induction_P Parameter: Light Value: Far-red vs. White
  misc_feature: MA Experiment 20001451 PARAMETER Experiment Name: At_Far-red-induction_P Parameter: Organism Value: A. thaliana
  misc_feature: MA Experiment 20001451 PARAMETER Experiment Name: At_Far-red-induction_P Parameter: Plant Line Value: Columbia
  misc_feature: MA Experiment 20001451 PARAMETER Experiment Name: At_Far-red-induction_P Parameter: Timepoint (hr) Value: 24
  misc_feature: MA Experiment 20001451 PARAMETER Experiment Name: At_Far-red-induction_P Parameter: Tissue Value: Whole Plant
atggatgatactacgtataagccaaagaacattctcattactggagctgctggatttattgcttctcatgttgccaacagattaatccgtaactatcctgattacaagatcgttgttcttgacaagcttgattactgttcagatctgaagaatcttgatccttctttttcttcaccaaatttcaagtttgtcaaaggagatatcgcgagtgatgatctcgttaactaccttctcatcactgaaaacattgatacgataatgcattttgctgctcaaactcatgttgataactcttttggtaatagctttgagtttaccaagaacaatatttatggtactcatgttcttttggaagcctgtaaagttacaggacagatcaggaggtttatccatgtgagtaccgatgaagtctatggagaaaccgatgaggatgctgctgtaggaaaccatgaagcttctcagctgttaccgacgaatccttactctgcaactaaggctggtgctgagatgcttgtgatggcttatggtagatcatatggattgcctgttattacgactcgcgggaacaatgtttatgggcctaaccagtttcctgaaaaaatgattcctaagttcatcttgttggctatgagtgggaagccgcttcccatccatggagatggatctaatgtccggagttacttgtactgcgaagacgttgctgaggcttttgaggttgttcttcacaaaggagaaatcggtcatgtctacaatgtcggcacaaaaagagaaaggagagtgatcgatgtggctagagacatctgcaaacttttcgggaaagaccctgagtcaagcattcagtttgtggagaaccggccctttaatgatcaaaggtacttccttgatgatcagaagctgaagaaattggggtggcaagagcgaacaaattgggaagatggattgaagaagacaatggactggtacactcagaatcctgagtggtggggtgatgtttctggagctttgcttcctcatccgagaatgcttatgatgcccggtggaagactttctgatggatctagtgagaagaaagacgtttcaagcaacacggtccagacatttacggttgtaacacctaagaatggtgattctggtgacaaagcttcgttgaagtttttgatctatggtaagactggttggcttggtggtcttctagggaaactatgtgagaagcaagggattacatatgagtatgggaaaggacgtctggaggatagagcttctcttgtggcggatattcgtagcatcaaacctactcatgtgtttaatgctgctggtttaactggcagacccaacgttgactggtgtgaatctcacaaaccagagaccattcgtgtaaatgtcgcaggtactttgactctagctgatgtttgcagagagaatgatctcttgatgatgaacttcgccaccggttgcatctttgagtatgacgctacacatcctgagggttcgggtataggtttcaaggaagaagacaagccaaatttctttggttctttctactcgaaaaccaaagccatggttgaggagctcttgagagaatttgacaatgtatgtaccttgagagtccggatgccaatctcctcagacctaaacaacccgagaaacttcatcacgaagatctcgcgctacaacaaagtggtggacatcccgaacagcatgaccgtactagacgagcttctcccaatctctatcgagatggcgaagagaaacctaagaggcatatggaatttcaccaacccaggggtggtgagccacaacgagatattggagatgtacaagaattacatcgagccaggttttaaatggtccaacttcacagtggaagaacaagcaaaggtcattgttgctgctcgaagcaacaacgaaatggatggatctaaactaagcaaggagttcccagagatgctctccatcaaagagtcactgctcaaatacgtctttgaaccaaacaagagaacctaagccttcaatgaacatcacactcttccacaagtgcttactttaaactgttttgttttgtttttttttctttttgccttttcttccaacagatatatcttttttatatttactcatcgtcttatgatccttgtaggtagtttcactatattgattctactaaaatat

SEQ ID NO: 81894 - protein, 667 aa, Arabidopsis thaliana
  peptide (1)..(667): Ceres Seq. ID no. 12661944
  misc_feature (11)..(325): Pfam Name: NAD dependent epimerase/dehydratase family Pfam Description: NAD dependent epimerase/dehydratase family
  misc_feature (170)..(667): Homolog of NCBI NO: 18404494 NR Description: dTDP-D-glucose 4,6-dehydratase, putative; protein At1g53500.1, supported by cDNA: gi_15081768 [Arabidopsis
  misc_feature (170)..(667): Homolog of NCBI NO: 15081769 NR Description: At1g53500/F22G10_13 [Arabidopsis thaliana]
  misc_feature (369)..(667): Homolog of NCBI NO: 18407710 NR Description: expressed protein; protein id: At1g63000.1, by cDNA: 41505., supported by cDNA: gi_12083297, supported by
  misc_feature (369)..(667): Homolog of NCBI NO: 14423536 NR Description: Unknown protein [Arabidopsis thaliana]
  misc_feature (377)..(667): Homolog of NCBI NO: 21593701 NR Description: unknown [Arabidopsis thaliana]
  misc_feature (400)..(666): Homolog of NCBI NO: 2982303 NR Description: hypothetical protein [Picea mariana]
  misc_feature (4)..(318): Homolog of NCBI NO: 39595079 NR Description: Hypothetical protein CBG03656 [Caenorhabditis
  misc_feature (387)..(662): Homolog of NCBI NO: 39595079 NR Description: Hypothetical protein CBG03656 [Caenorhabditis
  misc_feature (9)..(339): Homolog of NCBI NO: 30173340 NR Description: dTDP-D-glucose 4,6-dehydratase
  misc_feature (98)..(339): Homolog of NCBI NO: 34875984 NR Description: similar to 2610025M23Rik protein [Rattus
MDDTTYKPKNILITGAAGFIASHVANRLIRNYPDYKIVVLDKLDYCSDLKNLDPSFSSPNFKFVKGDIASDDLVNYLLITENIDTIMHFAAQTHVDNSFGNSFEFTKNNIYGTHVLLEACKVTGQIRRFIHVSTDEVYGETDEDAAVGNHEASQLLPTNPYSATKAGAEMLVMAYGRSYGLPVITTRGNNVYGPNQFPEKMIPKFILLAMSGKPLPIHGDGSNVRSYLYCEDVAEAFEVVLHKGEIGHVYNVGTKRERRVIDVARDICKLFGKDPESSIQFVENRPFNDQRYFLDDQKLKKLGWQERTNWEDGLKKTMDWYTQNPEWWGDVSGALLPHPRMLMMPGGRLSDGSSEKKDVSSNTVQTFTVVTPKNGDSGDKASLKFLIYGKTGWLGGLLGKLCEKQGITYEYGKGRLEDRASLVADIRSIKPTHVFNAAGLTGRPNVDWCESHKPETIRVNVAGTLTLADVCRENDLLMMNFATGCIFEYDATHPEGSGIGFKEEDKPNFFGSFYSKTKAMVEELLREFDNVCTLRVRMPISSDLNNPRNFITKISRYNKVVDIPNSMTVLDELLPISIEMAKRNLRGIWNFTNPGVVSHNEILEMYKNYIEPGFKWSNFTVEEQAKVIVAARSNNEMDGSKLSKEFPEMLSIKESLLKYVFEPNKRT

SEQ ID NO: 81895 - protein, 581 aa, Arabidopsis thaliana
  peptide (1)..(581): Ceres Seq. ID no. 12661945
  misc_feature (1)..(239): Pfam Name: NAD dependent epimerase/dehydratase family Pfam Description: NAD dependent epimerase/dehydratase family
  misc_feature (84)..(581): Homolog of NCBI NO: 18404494 NR Description: dTDP-D-glucose 4,6-dehydratase, putative; protein At1g53500.1, supported by cDNA: gi_15081768 [Arabidopsis
  misc_feature (84)..(581): Homolog of NCBI NO: 15081769 NR Description: At1g53500/F22G10_13 [Arabidopsis thaliana]
  misc_feature (283)..(581): Homolog of NCBI NO: 18407710 NR Description: expressed protein; protein id: At1g63000.1, by cDNA: 41505., supported by cDNA: gi_12083297, supported by
  misc_feature (283)..(581): Homolog of NCBI NO: 14423536 NR Description: Unknown protein [Arabidopsis thaliana]
  misc_feature (291)..(581): Homolog of NCBI NO: 21593701 NR Description: unknown [Arabidopsis thaliana]
  misc_feature (314)..(580): Homolog of NCBI NO: 2982303 NR Description: hypothetical protein [Picea mariana]
  misc_feature (1)..(232): Homolog of NCBI NO: 39595079 NR Description: Hypothetical protein CBG03656 [Caenorhabditis
  misc_feature (301)..(576): Homolog of NCBI NO: 39595079 NR Description: Hypothetical protein CBG03656 [Caenorhabditis
  misc_feature (1)..(253): Homolog of NCBI NO: 30173340 NR Description: dTDP-D-glucose 4,6-dehydratase
  misc_feature (12)..(253): Homolog of NCBI NO: 34875984 NR Description: similar to 2610025M23Rik protein [Rattus
MHFAAQTHVDNSFGNSFEFTKNNIYGTHVLLEACKVTGQIRRFIHVSTDEVYGETDEDAAVGNHEASQLLPTNPYSATKAGAEMLVMAYGRSYGLPVITTRGNNVYGPNQFPEKMIPKFILLAMSGKPLPIHGDGSNVRSYLYCEDVAEAFEVVLHKGEIGHVYNVGTKRERRVIDVARDICKLFGKDPESSIQFVENRPFNDQRYFLDDQKLKKLGWQERTNWEDGLKKTMDWYTQNPEWWGDVSGALLPHPRMLMMPGGRLSDGSSEKKDVSSNTVQTFTVVTPKNGDSGDKASLKFLIYGKTGWLGGLLGKLCEKQGITYEYGKGRLEDRASLVADIRSIKPTHVFNAAGLTGRPNVDWCESHKPETIRVNVAGTLTLADVCRENDLLMMNFATGCIFEYDATHPEGSGIGFKEEDKPNFFGSFYSKTKAMVEELLREFDNVCTLRVRMPISSDLNNPRNFITKISRYNKVVDIPNSMTVLDELLPISIEMAKRNLRGIWNFTNPGVVSHNEILEMYKNYIEPGFKWSNFTVEEQAKVIVAARSNNEMDGSKLSKEFPEMLSIKESLLKYVFEPNKRT

SEQ ID NO: 81896 - protein, 498 aa, Arabidopsis thaliana
  peptide (1)..(498): Ceres Seq. ID no. 12661946
  misc_feature (1)..(156): Pfam Name: NAD dependent epimerase/dehydratase family Pfam Description: NAD dependent epimerase/dehydratase family
  misc_feature (1)..(498): Homolog of NCBI NO: 18404494 NR Description: dTDP-D-glucose 4,6-dehydratase, putative; protein At1g53500.1, supported by cDNA: gi_15081768 [Arabidopsis
  misc_feature (1)..(498): Homolog of NCBI NO: 15081769 NR Description: At1g53500/F22G10_13 [Arabidopsis thaliana]
  misc_feature (200)..(498): Homolog of NCBI NO: 18407710 NR Description: expressed protein; protein id: At1g63000.1, by cDNA: 41505., supported by cDNA: gi_12083297, supported by
  misc_feature (200)..(498): Homolog of NCBI NO: 14423536 NR Description: Unknown protein [Arabidopsis thaliana]
  misc_feature (208)..(498): Homolog of NCBI NO: 21593701 NR Description: unknown [Arabidopsis thaliana]
  misc_feature (231)..(497): Homolog of NCBI NO: 2982303 NR Description: hypothetical protein [Picea mariana]
  misc_feature (1)..(149): Homolog of NCBI NO: 39595079 NR Description: Hypothetical protein CBG03656 [Caenorhabditis
  misc_feature (218)..(493): Homolog of NCBI NO: 39595079 NR Description: Hypothetical protein CBG03656 [Caenorhabditis
  misc_feature (1)..(170): Homolog of NCBI NO: 30173340 NR Description: dTDP-D-glucose 4,6-dehydratase
  misc_feature (1)..(170): Homolog of NCBI NO: 34875984 NR Description: similar to 2610025M23Rik protein [Rattus
MLVMAYGRSYGLPVITTRGNNVYGPNQFPEKMIPKFILLAMSGKPLPIHGDGSNVRSYLYCEDVAEAFEVVLHKGEIGHVYNVGTKRERRVIDVARDICKLFGKDPESSIQFVENRPFNDQRYFLDDQKLKKLGWQERTNWEDGLKKTMDWYTQNPEWWGDVSGALLPHPRMLMMPGGRLSDGSSEKKDVSSNTVQTFTVVTPKNGDSGDKASLKFLIYGKTGWLGGLLGKLCEKQGITYEYGKGRLEDRASLVADIRSIKPTHVFNAAGLTGRPNVDWCESHKPETIRVNVAGTLTLADVCRENDLLMMNFATGCIFEYDATHPEGSGIGFKEEDKPNFFGSFYSKTKAMVEELLREFDNVCTLRVRMPISSDLNNPRNFITKISRYNKVVDIPNSMTVLDELLPISIEMAKRNLRGIWNFTNPGVVSHNEILEMYKNYIEPGFKWSNFTVEEQAKVIVAARSNNEMDGSKLSKEFPEMLSIKESLLKYVFEPNKRT

SEQ ID NO: 81897 - DNA, 914 bp, Arabidopsis thaliana
  misc_feature (1)..(914): Ceres Seq. ID no. 12661947
  misc_feature: MA Experiment ID: 108434 Result: Up-regulated in Transcription
  misc_feature: MA Experiment 108434 PARAMETER Experiment Name: At_Root_Tips_cDNA_P Parameter: Tissue Value: Root Tips
  misc_feature: MA Experiment ID: 108462 Result: Down-regulated in Transcription
  misc_feature: MA Experiment 108462 PARAMETER Experiment Name: At_Germinating_Seeds_cDNA_P Parameter: Age (day) Value: 2 vs. 0
  misc_feature: MA Experiment 108462 PARAMETER Experiment Name: At_Germinating_Seeds_cDNA_P Parameter: Tissue Value: Germinating Seeds
  misc_feature: MA Experiment ID: 108463 Result: Down-regulated in Transcription
  misc_feature: MA Experiment 108463 PARAMETER Experiment Name: At_Germinating_Seeds_cDNA_P Parameter: Age (day) Value: 3 vs. 0
  misc_feature: MA Experiment 108463 PARAMETER Experiment Name: At_Germinating_Seeds_cDNA_P Parameter: Tissue Value: Germinating Seeds
  misc_feature: MA Experiment ID: 108464 Result: Down-regulated in Transcription
  misc_feature: MA Experiment 108464 PARAMETER Experiment Name: At_Germinating_Seeds_cDNA_P Parameter: Age (day) Value: 4 vs. 0
  misc_feature: MA Experiment 108464 PARAMETER Experiment Name: At_Germinating_Seeds_cDNA_P Parameter: Tissue Value: Germinating Seeds
  misc_feature: MA Experiment ID: 20000144 Result: Up-regulated in Transcription
  misc_feature: MA Experiment 20000144 PARAMETER Experiment Name: At_42deg_Heat_cDNA_P Parameter: Temperature (deg C) Value: 42 vs. 22
  misc_feature: MA Experiment 20000144 PARAMETER Experiment Name: At_42deg_Heat_cDNA_P Parameter: Timepoint (hr) Value: 1
  misc_feature: MA Experiment 20000144 PARAMETER Experiment Name: At_42deg_Heat_cDNA_P Parameter: Tissue Value: Aerial
  misc_feature: MA Experiment ID: 20000224 Result: Down-regulated in Transcription
  misc_feature: MA Experiment ID: 20001558 Result: Up-regulated in Transcription
  misc_feature: MA Experiment 20001558 PARAMETER Experiment Name: At_Drought_Soil_Dry_P Parameter: Age (day) Value: 27
  misc_feature: MA Experiment 20001558 PARAMETER Experiment Name: At_Drought_Soil_Dry_P Parameter: Organism Value: A. thaliana
  misc_feature: MA Experiment 20001558 PARAMETER Experiment Name: At_Drought_Soil_Dry_P Parameter: Plant Line Value: WS
  misc_feature: MA Experiment 20001558 PARAMETER Experiment Name: At_Drought_Soil_Dry_P Parameter: Post Timepoint (hr) Value: 6
  misc_feature: MA Experiment 20001558 PARAMETER Experiment Name: At_Drought_Soil_Dry_P Parameter: Post-Treatment Value: Re-Water vs. No Drought
  misc_feature: MA Experiment 20001558 PARAMETER Experiment Name: At_Drought_Soil_Dry_P Parameter: Timepoint (day) Value: 13
  misc_feature: MA Experiment 20001558 PARAMETER Experiment Name: At_Drought_Soil_Dry_P Parameter: Treatment Value: Drought vs. No Drought
  misc_feature: MA Experiment ID: 20001911 Result: Down-regulated in Transcription
  misc_feature: MA Experiment 20001911 PARAMETER Experiment Name: At_Drought_Reproduction_P Parameter: Age (day) Value: 40
  misc_feature: MA Experiment 20001911 PARAMETER Experiment Name: At_Drought_Reproduction_P Parameter: Organism Value: A. thaliana
  misc_feature: MA Experiment 20001911 PARAMETER Experiment Name: At_Drought_Reproduction_P Parameter: Plant Line Value: WS
  misc_feature: MA Experiment 20001911 PARAMETER Experiment Name: At_Drought_Reproduction_P Parameter: Timepoint (day) Value: 10
  misc_feature: MA Experiment 20001911 PARAMETER Experiment Name: At_Drought_Reproduction_P Parameter: Tissue Value: Flowers
  misc_feature: MA Experiment 20001911 PARAMETER Experiment Name: At_Drought_Reproduction_P Parameter: Treatment Value: Drought vs. No Drought
aactctagactggaccgagttcgctaccttcgtctcgccttcggcctttttctggttcttcacttcttctgacgagattcgcttttaccagagagagagagagatgagaatgacatttttgagttatctgaagcaatggcgtggaacagcgaaagaagcattcgagaatgtatcaatcgtcgccaagtttctctgtttgcttcatgtcaccgatcgatacataatctccacgacccacgttcacgggccgagcatgcttccgacgcttaatctaaccggcgatgtaatattggcggaacatttatcacaccggtttggtaagattggactcggtgacgttgtattggttcgatctcctagagacccaaaaaggatggtgacaaagcgaatcttgggtttagaaggcgatagactcactttttctgctgacccattggtcggtgatgcttcagtgagcgttttggttccgaaaggtcatgtttggattcagggagataacttgtatgcttcaactgattcacgtcattttgggcctgtaccttacagtctcattgaaggaaaagctcttctacgggtctggccaccagaatactttgggtcattgagatgacgattatatacacatacacattcaggtaatcaggttgtctgcctactgtatacgtcaagagatcactccaacgattttgttgcactgtaactcatgcgagtaatgtatcattcatgtgggataagcattttcgtctactctcctttttggcagtaatagaagaaaagccatggtcctgatattgtttctgaaacccgaacttcaatatcaaatgttaagattcatattgttggtatcgaaaaagctggtgcgttatgggatgataattgtgtccttgatacaaagttttatagatgttttgatt

SEQ ID NO: 81898 - protein, 202 aa, Arabidopsis thaliana
  peptide (1)..(202): Ceres Seq. ID no. 12661948
  misc_feature (80)..(137): Pfam Name: Signal peptidase I Pfam Description: Signal peptidase I
  misc_feature (35)..(202): Homolog of NCBI NO: 30695525 NR Description: expressed protein [Arabidopsis thaliana]
  misc_feature (72)..(159): Homolog of NCBI NO: 8671873 NR Description: Contains similarity to 17.6 KD class I heat shock from Arabidopsis thaliana gi|P13853 and contains Hsp20/alpha PF|00011 and signal peptidase I PF|00461 domains. ESTs
  misc_feature (46)..(191): Homolog of NCBI NO: 22208508 NR Description: unknown protein [Sorghum bicolor]
  misc_feature (46)..(191): Homolog of NCBI NO: 22329754 NR Description: polygalacturonase, putative; protein id:
  misc_feature (46)..(191): Homolog of NCBI NO: 25518432 NR Description: hypothetical protein F5O8.3 - Arabidopsis >gi|4056468|gb|AAC98041.1| Contains similarity to gb|X66426 from Persea americana and is a member of the signal peptidase
  misc_feature (46)..(191): Homolog of NCBI NO: 15220621 NR Description: hypothetical protein; protein id: At1g29960.1
  misc_feature (47)..(202): Homolog of NCBI NO: 21312276 NR Description: RIKEN cDNA 1500034J20 [Mus musculus] unnamed protein product [Mus musculus] unnamed protein product [Mus musculus]
  misc_feature (29)..(177): Homolog of NCBI NO: 8778577 NR Description: F28C11.10 [Arabidopsis thaliana]
  misc_feature (47)..(202): Homolog of NCBI NO: 21450679 NR Description: hypothetical protein FLJ25059 [Homo sapiens] unnamed protein product [Homo sapiens]
  misc_feature (47)..(191): Homolog of NCBI NO: 34856630 NR Description: similar to RIKEN cDNA 1500034J20 [Rattus
TLDWTEFATFVSPSAFFWFFTSSDEIRFYQREREMRMTFLSYLKQWRGTAKEAFENVSIVAKFLCLLHVTDRYIISTTHVHGPSMLPTLNLTGDVILAEHLSHRFGKIGLGDVVLVRSPRDPKRMVTKRILGLEGDRLTFSADPLVGDASVSVLVPKGHVWIQGDNLYASTDSRHFGPVPYSLIEGKALLRVWPPEYFGSLR

SEQ ID NO: 81899 - protein, 168 aa, Arabidopsis thaliana; identical to SEQ ID NO: 21418
  peptide (1)..(168): Ceres Seq. ID no. 12661949
  misc_feature (46)..(103): Pfam Name: Signal peptidase I Pfam Description: Signal peptidase I
  misc_feature (1)..(168): Homolog of NCBI NO: 30695525 NR Description: expressed protein [Arabidopsis thaliana]
  misc_feature (38)..(125): Homolog of NCBI NO: 8671873 NR Description: Contains similarity to 17.6 KD class I heat shock from Arabidopsis thaliana gi|P13853 and contains Hsp20/alpha PF|00011 and signal peptidase I PF|00461 domains. ESTs
  misc_feature (12)..(157): Homolog of NCBI NO: 22208508 NR Description: unknown protein [Sorghum bicolor]
  misc_feature (12)..(157): Homolog of NCBI NO: 22329754 NR Description: polygalacturonase, putative; protein id:
  misc_feature (12)..(157): Homolog of NCBI NO: 25518432 NR Description: hypothetical protein F5O8.3 - Arabidopsis >gi|4056468|gb|AAC98041.1| Contains similarity to gb|X66426 from Persea americana and is a member of the signal peptidase
  misc_feature (12)..(157): Homolog of NCBI NO: 15220621 NR Description: hypothetical protein; protein id: At1g29960.1
  misc_feature (13)..(168): Homolog of NCBI NO: 21312276 NR Description: RIKEN cDNA 1500034J20 [Mus musculus] unnamed protein product [Mus musculus] unnamed protein product [Mus musculus]
  misc_feature (1)..(143): Homolog of NCBI NO: 8778577 NR Description: F28C11.10 [Arabidopsis thaliana]
  misc_feature (13)..(168): Homolog of NCBI NO: 21450679 NR Description: hypothetical protein FLJ25059 [Homo sapiens] unnamed protein product [Homo sapiens]
  misc_feature (13)..(157): Homolog of NCBI NO: 34856630 NR Description: similar to RIKEN cDNA 1500034J20 [Rattus

SEQ ID NO: 81900 - protein, 166 aa, Arabidopsis thaliana; identical to SEQ ID NO: 21419
  peptide (1)..(166): Ceres Seq. ID no. 12661950
  misc_feature (44)..(101): Pfam Name: Signal peptidase I Pfam Description: Signal peptidase I
  misc_feature (1)..(166): Homolog of NCBI NO: 30695525 NR Description: expressed protein [Arabidopsis thaliana]
  misc_feature (36)..(123): Homolog of NCBI NO: 8671873 NR Description: Contains similarity to 17.6 KD class I heat shock from Arabidopsis thaliana gi|P13853 and contains Hsp20/alpha PF|00011 and signal peptidase I PF|00461 domains. ESTs
  misc_feature (10)..(155): Homolog of NCBI NO: 22208508 NR Description: unknown protein [Sorghum bicolor]
  misc_feature (10)..(155): Homolog of NCBI NO: 22329754 NR Description: polygalacturonase, putative; protein id:
  misc_feature (10)..(155): Homolog of NCBI NO: 25518432 NR Description: hypothetical protein F5O8.3 - Arabidopsis >gi|4056468|gb|AAC98041.1| Contains similarity to gb|X66426 from Persea americana and is a member of the signal peptidase
  misc_feature (10)..(155): Homolog of NCBI NO: 15220621 NR Description: hypothetical protein; protein id: At1g29960.1
  misc_feature (11)..(166): Homolog of NCBI NO: 21312276 NR Description: RIKEN cDNA 1500034J20 [Mus musculus] unnamed protein product [Mus musculus] unnamed protein product [Mus musculus]
  misc_feature (1)..(141): Homolog of NCBI NO: 8778577 NR Description: F28C11.10 [Arabidopsis thaliana]
  misc_feature (11)..(166): Homolog of NCBI NO: 21450679 NR Description: hypothetical protein FLJ25059 [Homo sapiens] unnamed protein product [Homo sapiens]
  misc_feature (11)..(155): Homolog of NCBI NO: 34856630 NR Description: similar to RIKEN cDNA 1500034J20 [Rattus

SEQ ID NO: 81901 - DNA, 2300 bp, Arabidopsis thaliana
  misc_feature (1)..(2300): Ceres Seq. ID no. 12661959
  misc_feature: MA Experiment ID: 20000173 Result: Down-regulated in Transcription
  misc_feature: MA Experiment 20000173 PARAMETER Experiment Name: At_42deg_Heat_P Parameter: Age (day) Value: 14
  misc_feature: MA Experiment 20000173 PARAMETER Experiment Name: At_42deg_Heat_P Parameter: Organism Value: A. thaliana
  misc_feature: MA Experiment 20000173 PARAMETER Experiment Name: At_42deg_Heat_P Parameter: Plant Line Value: WS
  misc_feature: MA Experiment 20000173 PARAMETER Experiment Name: At_42deg_Heat_P Parameter: Temperature (deg C) Value: 42 vs. 22
  misc_feature: MA Experiment 20000173 PARAMETER Experiment Name: At_42deg_Heat_P Parameter: Timepoint (hr) Value: 6
  misc_feature: MA Experiment 20000173 PARAMETER Experiment Name: At_42deg_Heat_P Parameter: Tissue Value: Aerial
  misc_feature: MA Experiment ID: 20000184 Result: Down-regulated in Transcription
  misc_feature: MA Experiment 20000184 PARAMETER Experiment Name: At_Shoots__P Parameter: Age (day) Value: 7
  misc_feature: MA Experiment 20000184 PARAMETER Experiment Name: At_Shoots__P Parameter: Tissue Value: Shoots vs. Whole Plant
  misc_feature: MA Experiment ID: 20000437 Result: Up-regulated in Transcription
  misc_feature: MA Experiment 20000437 PARAMETER Experiment Name: At_Drought_P Parameter: Age (day) Value: 8
  misc_feature: MA Experiment 20000437 PARAMETER Experiment Name: At_Drought_P Parameter: Organism Value: A. thaliana
  misc_feature: MA Experiment 20000437 PARAMETER Experiment Name: At_Drought_P Parameter: Plant Line Value: WS
  misc_feature: MA Experiment 20000437 PARAMETER Experiment Name: At_Drought_P Parameter: Timepoint (hr) Value: 24
  misc_feature: MA Experiment 20000437 PARAMETER Experiment Name: At_Drought_P Parameter: Tissue Value: Whole Plant
  misc_feature: MA Experiment 20000437 PARAMETER Experiment Name: At_Drought_P Parameter: Treatment Value: Drought vs. No Drought
  misc_feature: MA Experiment ID: 20001247 Result: Up-regulated in Transcription
  misc_feature: MA Experiment 20001247 PARAMETER Experiment Name: At_Far-red-induction_P Parameter: Age (day) Value: 7
  misc_feature: MA Experiment 20001247 PARAMETER Experiment Name: At_Far-red-induction_P Parameter: Light Value: Far-red vs. White
  misc_feature: MA Experiment 20001247 PARAMETER Experiment Name: At_Far-red-induction_P Parameter: Organism Value: A. thaliana
  misc_feature: MA Experiment 20001247 PARAMETER Experiment Name: At_Far-red-induction_P Parameter: Plant Line Value: Columbia
  misc_feature: MA Experiment 20001247 PARAMETER Experiment Name: At_Far-red-induction_P Parameter: Timepoint (hr) Value: 1
  misc_feature: MA Experiment 20001247 PARAMETER Experiment Name: At_Far-red-induction_P Parameter: Tissue Value: Whole Plant
  misc_feature: MA Experiment ID: 20001451 Result: Down-regulated in Transcription
  misc_feature: MA Experiment 20001451 PARAMETER Experiment Name: At_Far-red-induction_P Parameter: Age (day) Value: 7
  misc_feature: MA Experiment 20001451 PARAMETER Experiment Name: At_Far-red-induction_P Parameter: Light Value: Far-red vs. White
  misc_feature: MA Experiment 20001451 PARAMETER Experiment Name: At_Far-red-induction_P Parameter: Organism Value: A. thaliana
  misc_feature: MA Experiment 20001451 PARAMETER Experiment Name: At_Far-red-induction_P Parameter: Plant Line Value: Columbia
  misc_feature: MA Experiment 20001451 PARAMETER Experiment Name: At_Far-red-induction_P Parameter: Timepoint (hr) Value: 24
  misc_feature: MA Experiment 20001451 PARAMETER Experiment Name: At_Far-red-induction_P Parameter: Tissue Value: Whole Plant
  misc_feature: MA Experiment ID: 20001911 Result: Up-regulated in Transcription
  misc_feature: MA Experiment 20001911 PARAMETER Experiment Name: At_Drought_Reproduction_P Parameter: Age (day) Value: 40
  misc_feature: MA Experiment 20001911 PARAMETER Experiment Name: At_Drought_Reproduction_P Parameter: Organism Value: A. thaliana
  misc_feature: MA Experiment 20001911 PARAMETER Experiment Name: At_Drought_Reproduction_P Parameter: Plant Line Value: WS
  misc_feature: MA Experiment 20001911 PARAMETER Experiment Name: At_Drought_Reproduction_P Parameter: Timepoint (day) Value: 10
  misc_feature: MA Experiment 20001911 PARAMETER Experiment Name: At_Drought_Reproduction_P Parameter: Tissue Value: Flowers
  misc_feature: MA Experiment 20001911 PARAMETER Experiment Name: At_Drought_Reproduction_P Parameter: Treatment Value: Drought vs. No Drought
gaaatcttcatctttcgtatctctcctccttctcatgccctaaatttcatctcctctcttgtattgattctgttaaaaatctcacctttcaattcaaaaccccttccatttttgtgattaatatgcctacttggtggggaagaaagtcctgcaagaacaaggacgataatcacagaggaatcatctccacagatagagatatcaagagctctgctgttgttgttgatcctcctctcactcctactcgtggtggtacacctcgttgcagtcgtgaattcgctggagcttcttctgctttctctggttttgactctgattctaccgagaagaaaggtcaccctcttcctcgtcctttgctctctcctgtttcgatccatcatcaagatcatgtaagcggatccacttctggatctacatctgtttctagcgttagctcatctggatcagctgatgatcagagtcaacttgttgcttctaggggtcgtggtgatgtgaaattcaatgtagcagcagcaccacgtagtcctgagagagtttctccaaaggcagctactattactactaggcccacgtctccacggcatcagcgtttgtctggagttgtgagcttagagtcttctacagggaggaatgatgatggaaggtcctcctctgagtgtcatcctttgcctcgaccacctacttctcctacaagcccttctgctgtgcatggttccaggattggaggaggctacgagacctctccttcggggttttccacgtggaaaaaagggaaatttcttgggagtggcacctttggtcaagtctatcttggtttcaacagtgagaaagggaaaatgtgtgctattaaagaggtcaaggtcatttctgacgatcaaacatcaaaagaatgtctgaagcaactaaatcaggagataaatttgcttaaccagctttgtcatccgaatattgtccagtattacggaagtgaactgagtgaagaaaccttgtccgtctacttggagtacgtgtcaggtggttcaatccataaactacttaaggattatggttctttcactgaacccgttatccaaaactacacgcggcagattcttgctgggcttgcctatttacatggacgaaatacagtacatagggacatcaaaggagcaaatatattagtggatccgaatggtgaaatcaagttggcagactttgggatggccaaacatgtaacagccttttctactatgctttcttttaaagggagtccttactggatggcacccgaggttgtgatgagccaaaatggctacactcatgcagtcgatatctggagtttgggttgtactattctggaaatggcaacatcaaagccaccttggagccagtttgaaggggttgctgcgattttcaaaatcggaaacagtaaagacaccccggaaatacctgatcacctttcaaatgatgcaaagaattttataaggctttgtctgcaacgaaatccgacagtacgtcctacagcttctcagcttctagaacacccttttctacgtaacacaacaagagtggctagtactagtttgcccaaagacttccccccacgttcctatgatggaaacttctcactgcctacaagggaaccctatccagggagactgagccatgataattatgcaaaacagccattgtctagaactataaagagcccgagcagagaaaacgtaagagctatcacatccttaccagtatctccatgttcaagccctttacgccaacttgggccagcatacaaaagttgtttcctgtcacctcctcacccgtcttacgcatttcctgggcaagacagtgggtacaacctagcagagtttgctgcaagccctttcaggatgaagaaagacgcaatgatggaaccatctagtttcaggactcaaacaccgaattcaccattgagatcaagactggtgtagaaatggagcaaagattgagagactgaaagccacatactataaacaaggcccaatgaccatgtataaaacagtgtctacccctagttttggccttctccttctcaacacccagggaaatatgaagttatgagaccttagttgtgtgtgtgtggagcatctcctagaagtggagatttttggaacaagaaggagaaatttggggggaaaacagaaagatgtaaagagaaacatgaaaatgaatacaaagtttatagagtgtgagaagtatagatagtaagttgtgttgtcacacaaagataatattcaaccatttgttttcaacctacagtgtgaatatacttttcagaaagt

SEQ ID NO: 81902 - protein, 648 aa, Arabidopsis thaliana
  peptide (1)..(648): Ceres Seq. ID no. 12661960
  misc_feature (254)..(510): Pfam Name: Protein kinase domain Pfam Description: Protein kinase domain
  misc_feature (41)..(386): Homolog of NCBI NO: 11358501 NR Description: MAP3K alpha protein kinase (EC 2.7.1.-) - Arabidopsis thaliana >gi|3688191|emb|CAA08994.1| MAP3K alpha
  misc_feature (413)..(648): Homolog of NCBI NO: 11358501 NR Description: MAP3K alpha protein kinase (EC 2.7.1.-) - Arabidopsis thaliana >gi|3688191|emb|CAA08994.1| MAP3K alpha
  misc_feature (41)..(648): Homolog of NCBI NO: 3688193 NR Description: MAP3K alpha 1 protein kinase [Brassica napus]
  misc_feature (189)..(644): Homolog of NCBI NO: 6979343 NR Description: similar to mitogen-activated protein kinases
  misc_feature (82)..(152): Homolog of NCBI NO: 6979343 NR Description: similar to mitogen-activated protein kinases
  misc_feature (150)..(644): Homolog of NCBI NO: 38344069 NR Description: OSJNBa0006B20.13 [Oryza sativa (japonica
  misc_feature (133)..(646): Homolog of NCBI NO: 38345839 NR Description: OSJNBa0084K11.3 [Oryza sativa (japonica
  misc_feature (97)..(583): Homolog of NCBI NO: 15222512 NR Description: putative protein kinase; protein id: At1g63700.1
  misc_feature (97)..(583): Homolog of NCBI NO: 38049268 NR Description: YDA [Arabidopsis thaliana]
  misc_feature (93)..(520): Homolog of NCBI NO: 18425121 NR Description: MAP protein kinase; protein id: At5g66850.1, by cDNA: gi_13430659, supported by cDNA: gi_15982851 [Arabidopsis >gi|13430660|gb|AAK25952.1|AF360242_1 putative MAP protein kinase
NLHLSYLSSFSCPKFHLLSCIDSVKNLTFQFKTPSIFVINMPTWWGRKSCKNKDDNHRGIISTDRDIKSSAVVVDPPLTPTRGGTPRCSREFAGASSAFSGFDSDSTEKKGHPLPRPLLSPVSIHHQDHVSGSTSGSTSVSSVSSSGSADDQSQLVASRGRGDVKFNVAAAPRSPERVSPKAATITTRPTSPRHQRLSGVVSLESSTGRNDDGRSSSECHPLPRPPTSPTSPSAVHGSRIGGGYETSPSGFSTWKKGKFLGSGTFGQVYLGFNSEKGKMCAIKEVKVISDDQTSKECLKQLNQEINLLNQLCHPNIVQYYGSELSEETLSVYLEYVSGGSIHKLLKDYGSFTEPVIQNYTRQILAGLAYLHGRNTVHRDIKGANILVDPNGEIKLADFGMAKHVTAFSTMLSFKGSPYWMAPEVVMSQNGYTHAVDIWSLGCTILEMATSKPPWSQFEGVAAIFKIGNSKDTPEIPDHLSNDAKNFIRLCLQRNPTVRPTASQLLEHPFLRNTTRVASTSLPKDFPPRSYDGNFSLPTREPYPGRLSHDNYAKQPLSRTIKSPSRENVRAITSLPVSPCSSPLRQLGPAYKSCFLSPPHPSYAFPGQDSGYNLAEFAASPFRMKKDAMMEPSSFRTQTPNSPLRSRLV

SEQ ID NO: 81903 - protein, 608 aa, Arabidopsis thaliana
  peptide (1)..(608): Ceres Seq. ID no. 12661961
  misc_feature (214)..(470): Pfam Name: Protein kinase domain Pfam Description: Protein kinase domain
  misc_feature (1)..(346): Homolog of NCBI NO: 11358501 NR Description: MAP3K alpha protein kinase (EC 2.7.1.-) - Arabidopsis thaliana >gi|3688191|emb|CAA08994.1| MAP3K alpha
  misc_feature (373)..(608): Homolog of NCBI NO: 11358501 NR Description: MAP3K alpha protein kinase (EC 2.7.1.-) - Arabidopsis thaliana >gi|3688191|emb|CAA08994.1| MAP3K alpha
  misc_feature (1)..(608): Homolog of NCBI NO: 3688193 NR Description: MAP3K alpha 1 protein kinase [Brassica napus]
  misc_feature (149)..(604): Homolog of NCBI NO: 6979343 NR Description: similar to mitogen-activated protein kinases
  misc_feature (42)..(112): Homolog of NCBI NO: 6979343 NR Description: similar to mitogen-activated protein kinases
  misc_feature (110)..(604): Homolog of NCBI NO: 38344069 NR Description: OSJNBa0006B20.13 [Oryza sativa (japonica
  misc_feature (93)..(606): Homolog of NCBI NO: 38345839 NR Description: OSJNBa0084K11.3 [Oryza sativa (japonica
  misc_feature (57)..(543): Homolog of NCBI NO: 15222512 NR Description: putative protein kinase; protein id: At1g63700.1
  misc_feature (57)..(543): Homolog of NCBI NO: 38049268 NR Description: YDA [Arabidopsis thaliana]
  misc_feature (53)..(480): Homolog of NCBI NO: 18425121 NR Description: MAP protein kinase; protein id: At5g66850.1, by cDNA: gi_13430659, supported by cDNA: gi_15982851 [Arabidopsis >gi|13430660|gb|AAK25952.1|AF360242_1 putative MAP protein kinase
MPTWWGRKSCKNKDDNHRGIISTDRDIKSSAVVVDPPLTPTRGGTPRCSREFAGASSAFSGFDSDSTEKKGHPLPRPLLSPVSIHHQDHVSGSTSGSTSVSSVSSSGSADDQSQLVASRGRGDVKFNVAAAPRSPERVSPKAATITTRPTSPRHQRLSGVVSLESSTGRNDDGRSSSECHPLPRPPTSPTSPSAVHGSRIGGGYETSPSGFSTWKKGKFLGSGTFGQVYLGFNSEKGKMCAIKEVKVISDDQTSKECLKQLNQEINLLNQLCHPNIVQYYGSELSEETLSVYLEYVSGGSIHKLLKDYGSFTEPVIQNYTRQILAGLAYLHGRNTVHRDIKGANILVDPNGEIKLADFGMAKHVTAFSTMLSFKGSPYWMAPEVVMSQNGYTHAVDIWSLGCTILEMATSKPPWSQFEGVAAIFKIGNSKDTPEIPDHLSNDAKNFIRLCLQRNPTVRPTASQLLEHPFLRNTTRVASTSLPKDFPPRSYDGNFSLPTREPYPGRLSHDNYAKQPLSRTIKSPSRENVRAITSLPVSPCSSPLRQLGPAYKSCFLSPPHPSYAFPGQDSGYNLAEFAASPFRMKKDAMMEPSSFRTQTPNSPLRSRLV

SEQ ID NO: 81904 - protein, 370 aa, Arabidopsis thaliana
  peptide (1)..(370): Ceres Seq. ID no. 12661962
  misc_feature (1)..(232): Pfam Name: Protein kinase domain Pfam Description: Protein kinase domain
  misc_feature (1)..(108): Homolog of NCBI NO: 11358501 NR Description: MAP3K alpha protein kinase (EC 2.7.1.-) - Arabidopsis thaliana >gi|3688191|emb|CAA08994.1| MAP3K alpha
  misc_feature (135)..(370): Homolog of NCBI NO: 11358501 NR Description: MAP3K alpha protein kinase (EC 2.7.1.-) - Arabidopsis thaliana >gi|3688191|emb|CAA08994.1| MAP3K alpha
  misc_feature (1)..(370): Homolog of NCBI NO: 3688193 NR Description: MAP3K alpha 1 protein kinase [Brassica napus]
  misc_feature (1)..(366): Homolog of NCBI NO: 6979343 NR Description: similar to mitogen-activated protein kinases
  misc_feature (1)..(366): Homolog of NCBI NO: 38344069 NR Description: OSJNBa0006B20.13 [Oryza sativa (japonica
  misc_feature (1)..(368): Homolog of NCBI NO: 38345839 NR Description: OSJNBa0084K11.3 [Oryza sativa (japonica
  misc_feature (1)..(305): Homolog of NCBI NO: 15222512 NR Description: putative protein kinase; protein id: At1g63700.1
  misc_feature (1)..(305): Homolog of NCBI NO: 38049268 NR Description: YDA [Arabidopsis thaliana]
  misc_feature (1)..(242): Homolog of NCBI NO: 18425121 NR Description: MAP protein kinase; protein id: At5g66850.1, by cDNA: gi_13430659, supported by cDNA: gi_15982851 [Arabidopsis >gi|13430660|gb|AAK25952.1|AF360242_1 putative MAP protein kinase
  misc_feature (1)..(242): Homolog of NCBI NO: 15982852 NR Description: AT5g66850/MUD21_11 [Arabidopsis thaliana]
MCAIKEVKVISDDQTSKECLKQLNQEINLLNQLCHPNIVQYYGSELSEETLSVYLEYVSGGSIHKLLKDYGSFTEPVIQNYTRQILAGLAYLHGRNTVHRDIKGANILVDPNGEIKLADFGMAKHVTAFSTMLSFKGSPYWMAPEVVMSQNGYTHAVDIWSLGCTILEMATSKPPWSQFEGVAAIFKIGNSKDTPEIPDHLSNDAKNFIRLCLQRNPTVRPTASQLLEHPFLRNTTRVASTSLPKDFPPRSYDGNFSLPTREPYPGRLSHDNYAKQPLSRTIKSPSRENVRAITSLPVSPCSSPLRQLGPAYKSCFLSPPHPSYAFPGQDSGYNLAEFAASPFRMKKDAMMEPSSFRTQTPNSPLRSRLV

SEQ ID NO: 81905 - DNA, 1799 bp, Arabidopsis thaliana
  misc_feature (1)..(1799): Ceres Seq. ID no. 12661980
  misc_feature: MA Experiment ID: 108463 Result: Up-regulated in Transcription
  misc_feature: MA Experiment 108463 PARAMETER Experiment Name: At_Germinating_Seeds_cDNA_P Parameter: Age (day) Value: 3 vs. 0
  misc_feature: MA Experiment 108463 PARAMETER Experiment Name: At_Germinating_Seeds_cDNA_P Parameter: Tissue Value: Germinating Seeds
  misc_feature: MA Experiment ID: 108473 Result: Up-regulated in Transcription
  misc_feature: MA Experiment 108473 PARAMETER Experiment Name: At_Drought_Flowers_cDNA_P Parameter: Timepoint (hr) Value: 7 d
  misc_feature: MA Experiment 108473 PARAMETER Experiment Name: At_Drought_Flowers_cDNA_P Parameter: Tissue Value: Flower
  misc_feature: MA Experiment 108473 PARAMETER Experiment Name: At_Drought_Flowers_cDNA_P Parameter: Treatment Value: Drought vs. No Drought
  misc_feature: MA Experiment ID: 108488 Result: Down-regulated in Transcription
  misc_feature: MA Experiment ID: 108561 Result: Up-regulated in Transcription
  misc_feature: MA Experiment 108561 PARAMETER Experiment Name: At_100uM_ABA_cDNA_P Parameter: Timepoint (hr) Value: 6
  misc_feature: MA Experiment 108561 PARAMETER Experiment Name: At_100uM_ABA_cDNA_P Parameter: Tissue Value: Aerial
  misc_feature: MA Experiment 108561 PARAMETER Experiment Name: At_100uM_ABA_cDNA_P Parameter: Treatment Value: 100uM ABA vs. No Treatment
  misc_feature: MA Experiment ID: 108572 Result: Up-regulated in Transcription
  misc_feature: MA Experiment 108572 PARAMETER Experiment Name: At_Drought_cDNA_P Parameter: Timepoint (hr) Value: 1
  misc_feature: MA Experiment 108572 PARAMETER Experiment Name: At_Drought_cDNA_P Parameter: Tissue Value: Aerial
  misc_feature: MA Experiment 108572 PARAMETER Experiment Name: At_Drought_cDNA_P Parameter: Treatment Value: Drought vs. No Drought
  misc_feature: MA Experiment ID: 108573 Result: Up-regulated in Transcription
  misc_feature: MA Experiment 108573 PARAMETER Experiment Name: At_Drought_cDNA_P Parameter: Timepoint (hr) Value: 6
  misc_feature: MA Experiment 108573 PARAMETER Experiment Name: At_Drought_cDNA_P Parameter: Tissue Value: Aerial
  misc_feature: MA Experiment 108573 PARAMETER Experiment Name: At_Drought_cDNA_P Parameter: Treatment Value: Drought vs. No Drought
  misc_feature: MA Experiment ID: 108579 Result: Down-regulated in Transcription
  misc_feature: MA Experiment 108579 PARAMETER Experiment Name: At_4deg_Cold_cDNA_P Parameter: Temperature (deg C) Value: 4 vs. 22
  misc_feature: MA Experiment 108579 PARAMETER Experiment Name: At_4deg_Cold_cDNA_P Parameter: Timepoint (hr) Value: 6
  misc_feature: MA Experiment 108579 PARAMETER Experiment Name: At_4deg_Cold_cDNA_P Parameter: Tissue Value: Aerial
  misc_feature: MA Experiment ID: 108585 Result: Up-regulated in Transcription
  misc_feature: MA Experiment 108585 PARAMETER Experiment Name: At_5mM_NaNP_cDNA_P Parameter: Timepoint (hr) Value: 6
  misc_feature: MA Experiment 108585 PARAMETER Experiment Name: At_5mM_NaNP_cDNA_P Parameter: Tissue Value: Aerial
  misc_feature: MA Experiment 108585 PARAMETER Experiment Name: At_5mM_NaNP_cDNA_P Parameter: Treatment Value: null
  misc_feature: MA Experiment ID: 108605 Result: Up-regulated in Transcription
  misc_feature: MA Experiment 108605 PARAMETER Experiment Name: At_100uM_ABA_cDNA_P Parameter: Timepoint (hr) Value: 6
  misc_feature: MA Experiment 108605 PARAMETER Experiment Name: At_100uM_ABA_cDNA_P Parameter: Tissue Value: Aerial
  misc_feature: MA Experiment 108605 PARAMETER Experiment Name: At_100uM_ABA_cDNA_P Parameter: Treatment Value: 100uM ABA vs. No Treatment
  misc_feature: MA Experiment ID: 108607 Result: Up-regulated in Transcription
  misc_feature: MA Experiment 108607 PARAMETER Experiment Name: At_100uM_ABA_cDNA_P Parameter: Timepoint (hr) Value: 4
  misc_feature: MA Experiment 108607 PARAMETER Experiment Name: At_100uM_ABA_cDNA_P Parameter: Tissue Value: Aerial
  misc_feature: MA Experiment 108607 PARAMETER Experiment Name: At_100uM_ABA_cDNA_P Parameter: Treatment Value: 100uM ABA vs. No Treatment
  misc_feature: MA Experiment ID: 108608 Result: Up-regulated in Transcription
  misc_feature: MA Experiment 108608 PARAMETER Experiment Name: At_100uM_ABA_cDNA_P Parameter: Timepoint (hr) Value: 1
  misc_feature: MA Experiment 108608 PARAMETER Experiment Name: At_100uM_ABA_cDNA_P Parameter: Tissue Value: Aerial
  misc_feature: MA Experiment 108608 PARAMETER Experiment Name: At_100uM_ABA_cDNA_P Parameter: Treatment Value: 100uM ABA vs. No Treatment
  misc_feature: MA Experiment ID: 108609 Result: Up-regulated in Transcription
  misc_feature: MA Experiment 108609 PARAMETER Experiment Name: At_100uM_ABA_cDNA_P Parameter: Timepoint (hr) Value: 24
  misc_feature: MA Experiment 108609 PARAMETER Experiment Name: At_100uM_ABA_cDNA_P Parameter: Tissue Value: Aerial
  misc_feature: MA Experiment 108609 PARAMETER Experiment Name: At_100uM_ABA_cDNA_P Parameter: Treatment Value: 100uM ABA vs. No Treatment
  misc_feature: MA Experiment ID: 108667 Result: Up-regulated in Transcription
  misc_feature: MA Experiment 108667 PARAMETER Experiment Name: At_2mM_SA_cDNA_P Parameter: Plant Line Value: WS
  misc_feature: MA Experiment 108667 PARAMETER Experiment Name: At_2mM_SA_cDNA_P Parameter: Timepoint (hr) Value: 1
  misc_feature: MA Experiment 108667 PARAMETER Experiment Name: At_2mM_SA_cDNA_P Parameter: Treatment Value: 2mM SA vs. No Treatment
  misc_feature: MA Experiment ID: 108668 Result: Up-regulated in Transcription
  misc_feature: MA Experiment 108668 PARAMETER Experiment Name: At_2mM_SA_cDNA_P Parameter: Plant Line Value: WS
  misc_feature: MA Experiment 108668 PARAMETER Experiment Name: At_2mM_SA_cDNA_P Parameter: Timepoint (hr) Value: 6
  misc_feature: MA Experiment 108668 PARAMETER Experiment Name: At_2mM_SA_cDNA_P Parameter: Treatment Value: 2mM SA vs. No Treatment
  misc_feature: MA Experiment ID: 20000070 Result: Up-regulated in Transcription
  misc_feature: MA Experiment 20000070 PARAMETER Experiment Name: At_100uM_ABA_Mutants_cDNA_P Parameter: Plant Line Value: CS24
  misc_feature: MA Experiment 20000070 PARAMETER Experiment Name: At_100uM_ABA_Mutants_cDNA_P Parameter: Timepoint (hr) Value: 6
  misc_feature: MA Experiment 20000070 PARAMETER Experiment Name: At_100uM_ABA_Mutants_cDNA_P Parameter: Tissue Value: Aerial
  misc_feature: MA Experiment 20000070 PARAMETER Experiment Name: At_100uM_ABA_Mutants_cDNA_P Parameter: Treatment Value: 100uM ABA vs. No Treatment
  misc_feature: MA Experiment ID: 20000071 Result: Up-regulated in Transcription
  misc_feature: MA Experiment 20000071 PARAMETER Experiment Name: At_100uM_ABA_Mutants_cDNA_P Parameter: Plant Line Value: CS8104
  misc_feature: MA Experiment 20000071 PARAMETER Experiment Name: At_100uM_ABA_Mutants_cDNA_P Parameter: Timepoint (hr) Value: 6
  misc_feature: MA Experiment 20000071 PARAMETER Experiment Name: At_100uM_ABA_Mutants_cDNA_P Parameter: Tissue Value: Aerial
  misc_feature: MA Experiment 20000071 PARAMETER Experiment Name: At_100uM_ABA_Mutants_cDNA_P Parameter: Treatment Value: 100uM ABA vs. No Treatment
  misc_feature: MA Experiment ID: 20000087 Result: Up-regulated in Transcription
  misc_feature: MA Experiment 20000087 PARAMETER Experiment Name: At_100uM_ABA_Mutants_cDNA_P Parameter: Plant Line Value: WS
  misc_feature: MA Experiment 20000087 PARAMETER Experiment Name: At_100uM_ABA_Mutants_cDNA_P Parameter: Timepoint (hr) Value: 6
  misc_feature: MA Experiment 20000087 PARAMETER Experiment Name: At_100uM_ABA_Mutants_cDNA_P Parameter: Tissue Value: Aerial
  misc_feature: MA Experiment 20000087 PARAMETER Experiment Name: At_100uM_ABA_Mutants_cDNA_P Parameter: Treatment Value: 100uM ABA vs. No Treatment
  misc_feature: MA Experiment ID: 20000088 Result: Up-regulated in Transcription
  misc_feature: MA Experiment 20000088 PARAMETER Experiment Name: At_100uM_ABA_Mutants_cDNA_P Parameter: Plant Line Value: Landsberg
  misc_feature: MA Experiment 20000088 PARAMETER Experiment Name: At_100uM_ABA_Mutants_cDNA_P Parameter: Timepoint (hr) Value: 6
  misc_feature: MA Experiment 20000088 PARAMETER Experiment Name: At_100uM_ABA_Mutants_cDNA_P Parameter: Tissue Value: Aerial
  misc_feature: MA Experiment 20000088 PARAMETER Experiment Name: At_100uM_ABA_Mutants_cDNA_P Parameter: Treatment Value: 100uM ABA vs. No Treatment
  misc_feature: MA Experiment ID: 20000089 Result: Up-regulated in Transcription
  misc_feature: MA Experiment ID: 20000117 Result: Up-regulated in Transcription
  misc_feature: MA Experiment 20000117 PARAMETER Experiment Name: At_100uM_ABA_Mutants_cDNA_P Parameter: Plant Line Value: Columbia
  misc_feature: MA Experiment 20000117 PARAMETER Experiment Name: At_100uM_ABA_Mutants_cDNA_P Parameter: Timepoint (hr) Value: 6
  misc_feature: MA Experiment 20000117 PARAMETER Experiment Name: At_100uM_ABA_Mutants_cDNA_P Parameter: Tissue Value: Aerial
  misc_feature: MA Experiment 20000117 PARAMETER Experiment Name: At_100uM_ABA_Mutants_cDNA_P Parameter: Treatment Value: 100uM ABA vs. No Treatment
  misc_feature: MA Experiment ID: 20000166 Result: Up-regulated in Transcription
  misc_feature: MA Experiment 20000166 PARAMETER Experiment Name: At_100uM_ABA_P Parameter: Age (day) Value: 14
  misc_feature: MA Experiment 20000166 PARAMETER Experiment Name: At_100uM_ABA_P Parameter: Organism Value: A. thaliana
  misc_feature: MA Experiment 20000166 PARAMETER Experiment Name: At_100uM_ABA_P Parameter: Plant Line Value: WS
  misc_feature: MA Experiment 20000166 PARAMETER Experiment Name: At_100uM_ABA_P Parameter: Timepoint (hr) Value: 1
  misc_feature: MA Experiment 20000166 PARAMETER Experiment Name: At_100uM_ABA_P Parameter: Tissue Value: Aerial
  misc_feature: MA Experiment 20000166 PARAMETER Experiment Name: At_100uM_ABA_P Parameter: Treatment Value: 100uM ABA vs. No Treatment
  misc_feature: MA Experiment ID: 20000169 Result: Up-regulated in Transcription
  misc_feature: MA Experiment 20000169 PARAMETER Experiment Name: At_100uM_ABA_P Parameter: Age (day) Value: 14
  misc_feature: MA Experiment 20000169 PARAMETER Experiment Name: At_100uM_ABA_P Parameter: Organism Value: A. thaliana
  misc_feature: MA Experiment 20000169 PARAMETER Experiment Name: At_100uM_ABA_P Parameter: Plant Line Value: WS
  misc_feature: MA Experiment 20000169 PARAMETER Experiment Name: At_100uM_ABA_P Parameter: Timepoint (hr) Value: 6
  misc_feature: MA Experiment 20000169 PARAMETER Experiment Name: At_100uM_ABA_P Parameter: Tissue Value: Aerial
  misc_feature: MA Experiment 20000169 PARAMETER Experiment Name: At_100uM_ABA_P Parameter: Treatment Value: 100uM ABA vs. No Treatment
  misc_feature: MA Experiment ID: 20000182 Result: Up-regulated in Transcription
  misc_feature: MA Experiment 20000182 PARAMETER Experiment Name: At_2mM_SA_P Parameter: Age (day) Value: 14
  misc_feature: MA Experiment 20000182 PARAMETER Experiment Name: At_2mM_SA_P Parameter: Organism Value: A. thaliana
  misc_feature: MA Experiment 20000182 PARAMETER Experiment Name: At_2mM_SA_P Parameter: Plant Line Value: WS
  misc_feature: MA Experiment 20000182 PARAMETER Experiment Name: At_2mM_SA_P Parameter: Timepoint (hr) Value: 6
  misc_feature: MA Experiment 20000182 PARAMETER Experiment Name: At_2mM_SA_P Parameter: Tissue Value: Aerial
  misc_feature: MA Experiment 20000182 PARAMETER Experiment Name: At_2mM_SA_P Parameter: Treatment Value: 2mM SA vs. No Treatment
  misc_feature: MA Experiment ID: 20000184 Result: Down-regulated in Transcription
  misc_feature: MA Experiment 20000184 PARAMETER Experiment Name: At_Shoots__P Parameter: Age (day) Value: 7
  misc_feature: MA Experiment 20000184 PARAMETER Experiment Name: At_Shoots__P Parameter: Tissue Value: Shoots vs. Whole Plant
  misc_feature: MA Experiment ID: 20000213 Result: Down-regulated in Transcription
  misc_feature: MA Experiment 20000213 PARAMETER Experiment Name: At_4deg_Cold_P Parameter: Timepoint (hr) Value: 2
  misc_feature: MA Experiment ID: 20000234 Result: Down-regulated in Transcription
  misc_feature: MA Experiment 20000234 PARAMETER Experiment Name: At_Siliques_P Parameter: Age (day) Value: 21
  misc_feature: MA Experiment 20000234 PARAMETER Experiment Name: At_Siliques_P Parameter: Organism Value: A. thaliana
  misc_feature: MA Experiment 20000234 PARAMETER Experiment Name: At_Siliques_P Parameter: Plant Line Value: WS
  misc_feature: MA Experiment 20000234 PARAMETER Experiment Name: At_Siliques_P Parameter: Tissue Value: Less Than 5mm Siliques vs. Whole Plant
  misc_feature: MA Experiment ID: 20000267 Result: Up-regulated in Transcription
  misc_feature: MA Experiment 20000267 PARAMETER Experiment Name: At_Drought_P Parameter: Age (day) Value: 7
  misc_feature: MA Experiment 20000267 PARAMETER Experiment Name: At_Drought_P Parameter: Organism Value: A. thaliana
  misc_feature: MA Experiment 20000267 PARAMETER Experiment Name: At_Drought_P Parameter: Plant Line Value: WS
  misc_feature: MA Experiment 20000267 PARAMETER Experiment Name: At_Drought_P Parameter: Timepoint (hr) Value: 6
  misc_feature: MA Experiment 20000267 PARAMETER Experiment Name: At_Drought_P Parameter: Tissue Value: Whole Plant
  misc_feature: MA Experiment 20000267 PARAMETER Experiment Name: At_Drought_P Parameter: Treatment Value: Drought vs. No Drought
  misc_feature: MA Experiment ID: 20000268 Result: Up-regulated in Transcription
  misc_feature: MA Experiment 20000268 PARAMETER Experiment Name: At_100mM_NaCl__P Parameter: Age (day) Value: 14
  misc_feature: MA Experiment 20000268 PARAMETER Experiment Name: At_100mM_NaCl__P Parameter: Organism Value: A. thaliana
  misc_feature: MA Experiment 20000268 PARAMETER Experiment Name: At_100mM_NaCl__P Parameter: Plant Line Value: WS
  misc_feature: MA Experiment 20000268 PARAMETER Experiment Name: At_100mM_NaCl__P Parameter: Timepoint (hr) Value: 6
  misc_feature: MA Experiment 20000268 PARAMETER Experiment Name: At_100mM_NaCl__P Parameter: Tissue Value: Whole Plant
  misc_feature: MA Experiment 20000268 PARAMETER Experiment Name: At_100mM_NaCl__P Parameter: Treatment Value: 100mM NaCl vs. No Treatment
  misc_feature: MA Experiment ID: 20000436 Result: Up-regulated in Transcription
  misc_feature: MA Experiment 20000436 PARAMETER Experiment Name: At_Drought_P Parameter: Age (day) Value: 7
  misc_feature: MA Experiment 20000436 PARAMETER Experiment Name: At_Drought_P Parameter: Organism Value: A. thaliana
  misc_feature: MA Experiment 20000436 PARAMETER Experiment Name: At_Drought_P Parameter: Plant Line Value: WS
  misc_feature: MA Experiment 20000436 PARAMETER Experiment Name: At_Drought_P Parameter: Timepoint (hr) Value: 12
  misc_feature: MA Experiment 20000436 PARAMETER Experiment Name: At_Drought_P Parameter: Tissue Value: Whole Plant
  misc_feature: MA Experiment 20000436 PARAMETER Experiment Name: At_Drought_P Parameter: Treatment Value: Drought vs. No Drought
  misc_feature: MA Experiment ID: 20000437 Result: Up-regulated in Transcription
  misc_feature: MA Experiment 20000437 PARAMETER Experiment Name: At_Drought_P Parameter: Age (day) Value: 8
  misc_feature: MA Experiment 20000437 PARAMETER Experiment Name: At_Drought_P Parameter: Organism Value: A. thaliana
  misc_feature: MA Experiment 20000437 PARAMETER Experiment Name: At_Drought_P Parameter: Plant Line Value: WS
  misc_feature: MA Experiment 20000437 PARAMETER Experiment Name: At_Drought_P Parameter: Timepoint (hr) Value: 24
  misc_feature: MA Experiment 20000437 PARAMETER Experiment Name: At_Drought_P Parameter: Tissue Value: Whole Plant
  misc_feature: MA Experiment 20000437 PARAMETER Experiment Name: At_Drought_P Parameter: Treatment Value: Drought vs. No Drought
  misc_feature: MA Experiment ID: 20000438 Result: Down-regulated in Transcription
  misc_feature: MA Experiment 20000438 PARAMETER Experiment Name: At_Shoots__P Parameter: Age (day) Value: 14
  misc_feature: MA Experiment 20000438 PARAMETER Experiment Name: At_Shoots__P Parameter: Tissue Value: Shoots vs. Whole Plant
  misc_feature: MA Experiment ID: 20000453 Result: Up-regulated in Transcription
  misc_feature: MA Experiment 20000453 PARAMETER Experiment Name: At_100uM_ABA_P Parameter: Age (day) Value: 15
  misc_feature: MA Experiment 20000453 PARAMETER Experiment Name: At_100uM_ABA_P Parameter: Organism Value: A. thaliana
  misc_feature: MA Experiment 20000453 PARAMETER Experiment Name: At_100uM_ABA_P Parameter: Plant Line Value: WS
  misc_feature: MA Experiment 20000453 PARAMETER Experiment Name: At_100uM_ABA_P Parameter: Timepoint (hr) Value: 24
  misc_feature: MA Experiment 20000453 PARAMETER Experiment Name: At_100uM_ABA_P Parameter: Tissue Value: Aerial
  misc_feature: MA Experiment 20000453 PARAMETER Experiment Name: At_100uM_ABA_P Parameter: Treatment Value: 100uM ABA vs. No Treatment
  misc_feature: MA Experiment ID: 20000455 Result: Up-regulated in Transcription
  misc_feature: MA Experiment 20000455 PARAMETER Experiment Name: At_100uM_ABA_P Parameter: Age (day) Value: 16
  misc_feature: MA Experiment 20000455 PARAMETER Experiment Name: At_100uM_ABA_P Parameter: Organism Value: A. thaliana
  misc_feature: MA Experiment 20000455 PARAMETER Experiment Name: At_100uM_ABA_P Parameter: Plant Line Value: WS
  misc_feature: MA Experiment 20000455 PARAMETER Experiment Name: At_100uM_ABA_P Parameter: Timepoint (hr) Value: 48
  misc_feature: MA Experiment 20000455 PARAMETER Experiment Name: At_100uM_ABA_P Parameter: Tissue Value: Aerial
  misc_feature: MA Experiment 20000455 PARAMETER Experiment Name: At_100uM_ABA_P Parameter: Treatment Value: 100uM ABA vs. No Treatment
  misc_feature: MA Experiment ID: 20000573 Result: Up-regulated in Transcription
  misc_feature: MA Experiment 20000573 PARAMETER Experiment Name: At_100uM_ABA_Mutants__P Parameter: Organism Value: A. thaliana
  misc_feature: MA Experiment 20000573 PARAMETER Experiment Name: At_100uM_ABA_Mutants__P Parameter: Plant Line Value: CS22 vs. Ler wt
  misc_feature: MA Experiment 20000573 PARAMETER Experiment Name: At_100uM_ABA_Mutants__P Parameter: Timepoint (hr) Value: N/A
  misc_feature: MA Experiment 20000573 PARAMETER Experiment Name: At_100uM_ABA_Mutants__P Parameter: Tissue Value: Whole Plant
  misc_feature: MA Experiment 20000573 PARAMETER Experiment Name: At_100uM_ABA_Mutants__P Parameter: Treatment Value: None
  misc_feature: MA Experiment ID: 20000574 Result: Up-regulated in Transcription
  misc_feature: MA Experiment 20000574 PARAMETER Experiment Name: At_100uM_ABA_Mutants__P Parameter: Organism Value: A. thaliana
  misc_feature: MA Experiment 20000574 PARAMETER Experiment Name: At_100uM_ABA_Mutants__P Parameter: Plant Line Value: CS23 vs. Ler wt
  misc_feature: MA Experiment 20000574 PARAMETER Experiment Name: At_100uM_ABA_Mutants__P Parameter: Timepoint (hr) Value: N/A
  misc_feature: MA Experiment 20000574 PARAMETER Experiment Name: At_100uM_ABA_Mutants__P Parameter: Tissue Value: Whole Plant
  misc_feature: MA Experiment 20000574 PARAMETER Experiment Name: At_100uM_ABA_Mutants__P Parameter: Treatment Value: None
  misc_feature: MA Experiment ID: 20000794 Result: Up-regulated in Transcription
  misc_feature: MA Experiment 20000794 PARAMETER Experiment Name: At_Petals_P Parameter: Age (day) Value: 23-25 days
  misc_feature: MA Experiment 20000794 PARAMETER Experiment Name: At_Petals_P Parameter: Plant Line Value: WS
  misc_feature: MA Experiment 20000794 PARAMETER Experiment Name: At_Petals_P Parameter: Tissue Value: Petals vs. Whole plant
  misc_feature: MA Experiment ID: 20001248 Result: Up-regulated in Transcription
  misc_feature: MA Experiment 20001248 PARAMETER Experiment Name: At_Far-red-induction_P Parameter: Age (day) Value: 7
  misc_feature: MA Experiment 20001248 PARAMETER Experiment Name: At_Far-red-induction_P Parameter: Light Value: Far-red vs. White
  misc_feature: MA Experiment 20001248 PARAMETER Experiment Name: At_Far-red-induction_P Parameter: Organism Value: A. thaliana
  misc_feature: MA Experiment 20001248 PARAMETER Experiment Name: At_Far-red-induction_P Parameter: Plant Line Value: Columbia
  misc_feature: MA Experiment 20001248 PARAMETER Experiment Name: At_Far-red-induction_P Parameter: Timepoint (hr) Value: 4
  misc_feature: MA Experiment 20001248 PARAMETER Experiment Name: At_Far-red-induction_P Parameter: Tissue Value: Whole Plant
  misc_feature: MA Experiment ID: 20001450 Result: Up-regulated in Transcription
  misc_feature: MA Experiment 20001450 PARAMETER Experiment Name: At_Far-red-induction_P Parameter: Age (day) Value: 7
  misc_feature: MA Experiment 20001450 PARAMETER Experiment Name: At_Far-red-induction_P Parameter: Light Value: Far-red vs. White
  misc_feature: MA Experiment 20001450 PARAMETER Experiment Name: At_Far-red-induction_P Parameter: Organism Value: A. thaliana
  misc_feature: MA Experiment 20001450 PARAMETER Experiment Name: At_Far-red-induction_P Parameter: Plant Line Value: Columbia
  misc_feature: MA Experiment 20001450 PARAMETER Experiment Name: At_Far-red-induction_P Parameter: Timepoint (hr) Value: 8
  misc_feature: MA Experiment 20001450 PARAMETER Experiment Name: At_Far-red-induction_P Parameter: Tissue Value: Whole Plant
  misc_feature: MA Experiment ID: 20001451 Result: Up-regulated in Transcription
  misc_feature: MA Experiment 20001451 PARAMETER Experiment Name: At_Far-red-induction_P Parameter: Age (day) Value: 7
  misc_feature: MA Experiment 20001451 PARAMETER Experiment Name: At_Far-red-induction_P Parameter: Light Value: Far-red vs. White
  misc_feature: MA Experiment 20001451 PARAMETER Experiment Name: At_Far-red-induction_P Parameter: Organism Value: A. thaliana
  misc_feature: MA Experiment 20001451 PARAMETER Experiment Name: At_Far-red-induction_P Parameter: Plant Line Value: Columbia
  misc_feature: MA Experiment 20001451 PARAMETER Experiment Name: At_Far-red-induction_P Parameter: Timepoint (hr) Value: 24
  misc_feature: MA Experiment 20001451 PARAMETER Experiment Name: At_Far-red-induction_P Parameter: Tissue Value: Whole Plant
  misc_feature: MA Experiment ID: 20001554 Result: Up-regulated in Transcription
  misc_feature: MA Experiment 20001554 PARAMETER Experiment Name: At_Drought_Soil_Dry_P Parameter: Age (day) Value: 21
  misc_feature: MA Experiment 20001554 PARAMETER Experiment Name: At_Drought_Soil_Dry_P Parameter: Organism Value: A. thaliana
  misc_feature: MA Experiment 20001554 PARAMETER Experiment Name: At_Drought_Soil_Dry_P Parameter: Plant Line Value: WS
  misc_feature: MA Experiment 20001554 PARAMETER Experiment Name: At_Drought_Soil_Dry_P Parameter: Post Timepoint (hr) Value: None
  misc_feature: MA Experiment 20001554 PARAMETER Experiment Name: At_Drought_Soil_Dry_P Parameter: Post-Treatment Value: None
  misc_feature: MA Experiment 20001554 PARAMETER Experiment Name: At_Drought_Soil_Dry_P Parameter: Timepoint (day) Value: 7
  misc_feature: MA Experiment 20001554 PARAMETER Experiment Name: At_Drought_Soil_Dry_P Parameter: Treatment Value: Drought vs. No Drought
  misc_feature: MA Experiment ID: 20001559 Result: Up-regulated in Transcription
  misc_feature: MA Experiment 20001559 PARAMETER Experiment Name: At_Drought_Soil_Dry_P Parameter: Age (day) Value: 28
  misc_feature: MA Experiment 20001559 PARAMETER Experiment Name: At_Drought_Soil_Dry_P Parameter: Organism Value: A. thaliana
  misc_feature: MA Experiment 20001559 PARAMETER Experiment Name: At_Drought_Soil_Dry_P Parameter: Plant Line Value: WS
  misc_feature: MA Experiment 20001559 PARAMETER Experiment Name: At_Drought_Soil_Dry_P Parameter: Post Timepoint (hr) Value: 29
  misc_feature: MA Experiment 20001559 PARAMETER Experiment Name: At_Drought_Soil_Dry_P Parameter: Post-Treatment Value: Re-Water vs. No Drought
  misc_feature: MA Experiment 20001559 PARAMETER Experiment Name: At_Drought_Soil_Dry_P Parameter: Timepoint (day) Value: 14
  misc_feature: MA Experiment 20001559 PARAMETER Experiment Name: At_Drought_Soil_Dry_P Parameter: Treatment Value: Drought vs. No Drought
  misc_feature: MA Experiment ID: 20001757 Result: Down-regulated in Transcription
  misc_feature: MA Experiment 20001757 PARAMETER Experiment Name: At_50mM_NH4NO3_L-to-H_P Parameter: Timepoint (hr) Value: 6
  misc_feature: MA Experiment 20001757 PARAMETER Experiment Name: At_50mM_NH4NO3_L-to-H_P Parameter: Tissue Value: Leaf
  misc_feature: MA Experiment 20001757 PARAMETER Experiment Name: At_50mM_NH4NO3_L-to-H_P Parameter: Treatment Value: 50mM NH4NO3 vs 100mM Mannitol
  misc_feature: MA Experiment ID: 20001904 Result: Up-regulated in Transcription
  misc_feature: MA Experiment 20001904 PARAMETER Experiment Name: At_Drought_Reproduction_P Parameter: Age (day) Value: 37
  misc_feature: MA Experiment 20001904 PARAMETER Experiment Name: At_Drought_Reproduction_P Parameter: Organism Value: A. thaliana
  misc_feature: MA Experiment 20001904 PARAMETER Experiment Name: At_Drought_Reproduction_P Parameter: Plant Line Value: WS
  misc_feature: MA Experiment 20001904 PARAMETER Experiment Name: At_Drought_Reproduction_P Parameter: Timepoint (day) Value: 7
  misc_feature: MA Experiment 20001904 PARAMETER Experiment Name: At_Drought_Reproduction_P Parameter: Tissue Value: Rosettes
  misc_feature: MA Experiment 20001904 PARAMETER Experiment Name: At_Drought_Reproduction_P Parameter: Treatment Value: Drought vs. No Drought
  misc_feature: MA Experiment ID: 20001905 Result: Up-regulated in Transcription
  misc_feature: MA Experiment 20001905 PARAMETER Experiment Name: At_Drought_Reproduction_P Parameter: Age (day) Value: 40
  misc_feature: MA Experiment 20001905 PARAMETER Experiment Name: At_Drought_Reproduction_P Parameter: Organism Value: A. thaliana
  misc_feature: MA Experiment 20001905 PARAMETER Experiment Name: At_Drought_Reproduction_P Parameter: Plant Line Value: WS
  misc_feature: MA Experiment 20001905 PARAMETER Experiment Name: At_Drought_Reproduction_P Parameter: Timepoint (day) Value: 10
  misc_feature: MA Experiment 20001905 PARAMETER Experiment Name: At_Drought_Reproduction_P Parameter: Tissue Value: Rosettes
  misc_feature: MA Experiment 20001905 PARAMETER Experiment Name: At_Drought_Reproduction_P Parameter: Treatment Value: Drought vs. No Drought
  misc_feature: MA Experiment ID: 20001906 Result: Up-regulated in Transcription
  misc_feature: MA Experiment 20001906 PARAMETER Experiment Name: At_Drought_Reproduction_P Parameter: Age (day) Value: 35
  misc_feature: MA Experiment 20001906 PARAMETER Experiment Name: At_Drought_Reproduction_P Parameter: Organism Value: A. thaliana
  misc_feature: MA Experiment 20001906 PARAMETER Experiment Name: At_Drought_Reproduction_P Parameter: Plant Line Value: WS
  misc_feature: MA Experiment 20001906 PARAMETER Experiment Name: At_Drought_Reproduction_P Parameter: Timepoint (day) Value: 5
  misc_feature: MA Experiment 20001906 PARAMETER Experiment Name: At_Drought_Reproduction_P Parameter: Tissue Value: Siliques
  misc_feature: MA Experiment 20001906 PARAMETER Experiment Name: At_Drought_Reproduction_P Parameter: Treatment Value: Drought vs. No Drought
  misc_feature: MA Experiment ID: 20001911 Result: Up-regulated in Transcription
  misc_feature: MA Experiment 20001911 PARAMETER Experiment Name: At_Drought_Reproduction_P Parameter: Age (day) Value: 40
  misc_feature: MA Experiment 20001911 PARAMETER Experiment Name: At_Drought_Reproduction_P Parameter: Organism Value: A. thaliana
  misc_feature: MA Experiment 20001911 PARAMETER Experiment Name: At_Drought_Reproduction_P Parameter: Plant Line Value: WS
  misc_feature: MA Experiment 20001911 PARAMETER Experiment Name: At_Drought_Reproduction_P Parameter: Timepoint (day) Value: 10
  misc_feature: MA Experiment 20001911 PARAMETER Experiment Name: At_Drought_Reproduction_P Parameter: Tissue Value: Flowers
  misc_feature: MA Experiment 20001911 PARAMETER Experiment Name: At_Drought_Reproduction_P Parameter: Treatment Value: Drought vs. No Drought
aaccattaggtgatttttttctctgatcttcgagttctgataattgctcttttttctctggctttgttatcgataatttctctggattttctttctggggtgaatttttgcgcagagatgggttcggcgaacaacgagtacgagtttctgagtgagattgggctgacttctcacaacttgggatcttacgttgctggcaaatggcaagccaacggacctcttgtttcaactctcaatcctgctaacaatcagccaattgctcaagttgtggaagcttctctagaggattacgagcaaggtttgaaagcttgcgaggaagcagctaaaatatggatgcaggttacggctcctaagagaggtgatatcgtcagacagattggggatgcactaagatccaaacttgactatcttggtcgtcttctttctcttgaaatgggaaagatccttgctgaaggtattggagaagttcaggaagtaattgacatgtgtgattttgctgttggtttgagccgacaactcaatggatcggttataccttcagaacgccctaaccacatgatgttggagatgtggaatcctcttggcattgttggtgttatcacagcgtttaattttccctgtgcagttcttggttggaatgcttgtattgctcttgtctgtggaaactgtgtagtctggaaaggtgctccaactacaccgttaataactatcgcaatgaccaagctagtagctgaagttttagagaaaaacaacttacccggtgccatttttacggccatgtgtggtggtgctgaaattggtgaagcaatagccaaagacacacgcattcccttagtatcctttactggaagctccagggtgggctcaatggtacaacaaacagtgaatgcgagatctgggaaaactttgcttgagttgagtggaaacaatgcaatcatagtcatggacgatgctgatatacagttagcggctcgatctgttctattcgctgcggttggaactgctggtcaacgttgcacaacttgccgtaggctgcttttgcatgagagtgtctatgacaaagtactcgagcaactgcttacctcatacaaacaagtcaaaatcggcaatcctcttgagaaagggacattgttaggaccattacatactcctgaatcaaaaaagaactttgagaaaggaattgaagtcatcaaatcccagggtggtaaaatactaacgggaggtaaagcagtcgaaggtgaaggaaactttgtggagcctacgataatcgagatatcagcagatgctgctgtcgtcaaagaagagctatttgctccggttctatatgttctaaagtttaagtcatttggagaggctgttgcgataaacaactcggttcctcaaggtctaagcagctcgatattcactcggaaccctgaaaacatcttcaggtggatcggaccactgggaagtgactgtggcattgtgaatgtgaacataccgacgaatggagctgagattggtggagcttttggaggcgagaaagcgactggtggtggtcgtgaagctggaagcgactcatggaaacagtacatgcgtcgatcgacttgtaccatcaactatggaaacgagttacctctagcgcaaggaattaacttcggttagatttttcagagatttactcgttaattaataatgttatgttggttcgatttcgatacttgtattgtatgccttgttctctccaagcctttgacttaagatgattacgcttttaatatatataaaaaaatattgaatatattttgattgttaatttg

SEQ ID NO: 81906 - protein, 508 aa, Arabidopsis thaliana; identical to SEQ ID NO: 24267
  peptide (1)..(508): Ceres Seq. ID no. 12661981
  misc_feature (1)..(508): Homolog of NCBI NO: 15221042 NR Description: aldehyde dehydrogenase homolog, putative; protein At1g54100.1, supported by cDNA: gi_14190390, supported by cDNA: supported by cDNA: gi_20259465, supported by cDNA: gi_20857327
  misc_feature (1)..(490): Homolog of NCBI NO: 25090053 NR Description: Aldehyde dehydrogenase family 7 member A1
  misc_feature (1)..(508): Homolog of NCBI NO: 118514 NR Description: Aldehyde dehydrogenase family 7 member A1 protein 26G) (Antiquitin 1) >gi|100051|pir||S11863 aldehyde
  misc_feature (1)..(508): Homolog of NCBI NO: 25090068 NR Description: Aldehyde dehydrogenase family 7 member A1
  misc_feature (1)..(508): Homolog of NCBI NO: 11995457 NR Description: aldehyde dehydrogenase [Oryza sativa]

SEQ ID NO: 81907 - protein, 436 aa, Arabidopsis thaliana; identical to SEQ ID NO: 24268
  peptide (1)..(436): Ceres Seq. ID no. 12661982
  misc_feature (1)..(436): Homolog of NCBI NO: 15221042 NR Description: aldehyde dehydrogenase homolog, putative; protein At1g54100.1, supported by cDNA: gi_14190390, supported by cDNA: supported by cDNA: gi_20259465, supported by cDNA: gi_20857327
  misc_feature (1)..(418): Homolog of NCBI NO: 25090053 NR Description: Aldehyde dehydrogenase family 7 member A1
  misc_feature (1)..(436): Homolog of NCBI NO: 118514 NR Description: Aldehyde dehydrogenase family 7 member A1 protein 26G) (Antiquitin 1) >gi|100051|pir||S11863 aldehyde
  misc_feature (1)..(436): Homolog of NCBI NO: 25090068 NR Description: Aldehyde dehydrogenase family 7 member A1
  misc_feature (1)..(436): Homolog of NCBI NO: 11995457 NR Description: aldehyde dehydrogenase [Oryza sativa]

SEQ ID NO: 81908 - protein, 403 aa, Arabidopsis thaliana; identical to SEQ ID NO: 25418
  peptide (1)..(403): Ceres Seq. ID no. 12661983
  misc_feature (1)..(403): Homolog of NCBI NO: 15221042 NR Description: aldehyde dehydrogenase homolog, putative; protein At1g54100.1, supported by cDNA: gi_14190390, supported by cDNA: supported by cDNA: gi_20259465, supported by cDNA: gi_20857327
  misc_feature (1)..(385): Homolog of NCBI NO: 25090053 NR Description: Aldehyde dehydrogenase family 7 member A1
  misc_feature (1)..(403): Homolog of NCBI NO: 118514 NR Description: Aldehyde dehydrogenase family 7 member A1 protein 26G) (Antiquitin 1) >gi|100051|pir||S11863 aldehyde
  misc_feature (1)..(403): Homolog of NCBI NO: 25090068 NR Description: Aldehyde dehydrogenase family 7 member A1
  misc_feature (1)..(403): Homolog of NCBI NO: 11995457 NR Description: aldehyde dehydrogenase [Oryza sativa]

SEQ ID NO: 81909 - DNA, 731 bp, Arabidopsis thaliana
  misc_feature (1)..(731): Ceres Seq. ID no. 12661984
  misc_feature: MA Experiment ID: 20000166 Result: Up-regulated in Transcription
  misc_feature: MA Experiment 20000166 PARAMETER Experiment Name: At_100uM_ABA_P Parameter: Age (day) Value: 14
  misc_feature: MA Experiment 20000166 PARAMETER Experiment Name: At_100uM_ABA_P Parameter: Organism Value: A. thaliana
  misc_feature: MA Experiment 20000166 PARAMETER Experiment Name: At_100uM_ABA_P Parameter: Plant Line Value: WS
  misc_feature: MA Experiment 20000166 PARAMETER Experiment Name: At_100uM_ABA_P Parameter: Timepoint (hr) Value: 1
  misc_feature: MA Experiment 20000166 PARAMETER Experiment Name: At_100uM_ABA_P Parameter: Tissue Value: Aerial
  misc_feature: MA Experiment 20000166 PARAMETER Experiment Name: At_100uM_ABA_P Parameter: Treatment Value: 100uM ABA vs. No Treatment
  misc_feature: MA Experiment ID: 20000169 Result: Up-regulated in Transcription
  misc_feature: MA Experiment 20000169 PARAMETER Experiment Name: At_100uM_ABA_P Parameter: Age (day) Value: 14
  misc_feature: MA Experiment 20000169 PARAMETER Experiment Name: At_100uM_ABA_P Parameter: Organism Value: A. thaliana
  misc_feature: MA Experiment 20000169 PARAMETER Experiment Name: At_100uM_ABA_P Parameter: Plant Line Value: WS
  misc_feature: MA Experiment 20000169 PARAMETER Experiment Name: At_100uM_ABA_P Parameter: Timepoint (hr) Value: 6
  misc_feature: MA Experiment 20000169 PARAMETER Experiment Name: At_100uM_ABA_P Parameter: Tissue Value: Aerial
  misc_feature: MA Experiment 20000169 PARAMETER Experiment Name: At_100uM_ABA_P Parameter: Treatment Value: 100uM ABA vs. No Treatment
  misc_feature: MA Experiment ID: 20000182 Result: Up-regulated in Transcription
  misc_feature: MA Experiment 20000182 PARAMETER Experiment Name: At_2mM_SA_P Parameter: Age (day) Value: 14
  misc_feature: MA Experiment 20000182 PARAMETER Experiment Name: At_2mM_SA_P Parameter: Organism Value: A. thaliana
  misc_feature: MA Experiment 20000182 PARAMETER Experiment Name: At_2mM_SA_P Parameter: Plant Line Value: WS
  misc_feature: MA Experiment 20000182 PARAMETER Experiment Name: At_2mM_SA_P Parameter: Timepoint (hr) Value: 6
  misc_feature: MA Experiment 20000182 PARAMETER Experiment Name: At_2mM_SA_P Parameter: Tissue Value: Aerial
  misc_feature: MA Experiment 20000182 PARAMETER Experiment Name: At_2mM_SA_P Parameter: Treatment Value: 2mM SA vs. No Treatment
  misc_feature: MA Experiment ID: 20000184 Result: Down-regulated in Transcription
  misc_feature: MA Experiment 20000184 PARAMETER Experiment Name: At_Shoots__P Parameter: Age (day) Value: 7
  misc_feature: MA Experiment 20000184 PARAMETER Experiment Name: At_Shoots__P Parameter: Tissue Value: Shoots vs. Whole Plant
  misc_feature: MA Experiment ID: 20000213 Result: Down-regulated in Transcription
  misc_feature: MA Experiment 20000213 PARAMETER Experiment Name: At_4deg_Cold_P Parameter: Timepoint (hr) Value: 2
  misc_feature: MA Experiment ID: 20000234 Result: Down-regulated in Transcription
  misc_feature: MA Experiment 20000234 PARAMETER Experiment Name: At_Siliques_P Parameter: Age (day) Value: 21
  misc_feature: MA Experiment 20000234 PARAMETER Experiment Name: At_Siliques_P Parameter: Organism Value: A. thaliana
  misc_feature: MA Experiment 20000234 PARAMETER Experiment Name: At_Siliques_P Parameter: Plant Line Value: WS
  misc_feature: MA Experiment 20000234 PARAMETER Experiment Name: At_Siliques_P Parameter: Tissue Value: Less Than 5mm Siliques vs. Whole Plant
  misc_feature: MA Experiment ID: 20000267 Result: Up-regulated in Transcription
  misc_feature: MA Experiment 20000267 PARAMETER Experiment Name: At_Drought_P Parameter: Age (day) Value: 7
  misc_feature: MA Experiment 20000267 PARAMETER Experiment Name: At_Drought_P Parameter: Organism Value: A. thaliana
  misc_feature: MA Experiment 20000267 PARAMETER Experiment Name: At_Drought_P Parameter: Plant Line Value: WS
  misc_feature: MA Experiment 20000267 PARAMETER Experiment Name: At_Drought_P Parameter: Timepoint (hr) Value: 6
  misc_feature: MA Experiment 20000267 PARAMETER Experiment Name: At_Drought_P Parameter: Tissue Value: Whole Plant
  misc_feature: MA Experiment 20000267 PARAMETER Experiment Name: At_Drought_P Parameter: Treatment Value: Drought vs. No Drought
  misc_feature: MA Experiment ID: 20000268 Result: Up-regulated in Transcription
  misc_feature: MA Experiment 20000268 PARAMETER Experiment Name: At_100mM_NaCl__P Parameter: Age (day) Value: 14
  misc_feature: MA Experiment 20000268 PARAMETER Experiment Name: At_100mM_NaCl__P Parameter: Organism Value: A. thaliana
  misc_feature: MA Experiment 20000268 PARAMETER Experiment Name: At_100mM_NaCl__P Parameter: Plant Line Value: WS
  misc_feature: MA Experiment 20000268 PARAMETER Experiment Name: At_100mM_NaCl__P Parameter: Timepoint (hr) Value: 6
  misc_feature: MA Experiment 20000268 PARAMETER Experiment Name: At_100mM_NaCl__P Parameter: Tissue Value: Whole Plant
  misc_feature: MA Experiment 20000268 PARAMETER Experiment Name: At_100mM_NaCl__P Parameter: Treatment Value: 100mM NaCl vs. No Treatment
  misc_feature: MA Experiment ID: 20000436 Result: Up-regulated in Transcription
  misc_feature: MA Experiment 20000436 PARAMETER Experiment Name: At_Drought_P Parameter: Age (day) Value: 7
  misc_feature: MA Experiment 20000436 PARAMETER Experiment Name: At_Drought_P Parameter: Organism Value: A. thaliana
  misc_feature: MA Experiment 20000436 PARAMETER Experiment Name: At_Drought_P Parameter: Plant Line Value: WS
  misc_feature: MA Experiment 20000436 PARAMETER Experiment Name: At_Drought_P Parameter: Timepoint (hr) Value: 12
  misc_feature: MA Experiment 20000436 PARAMETER Experiment Name: At_Drought_P Parameter: Tissue Value: Whole Plant
  misc_feature: MA Experiment 20000436 PARAMETER Experiment Name: At_Drought_P Parameter: Treatment Value: Drought vs. No Drought
  misc_feature: MA Experiment ID: 20000437 Result: Up-regulated in Transcription
  misc_feature: MA Experiment 20000437 PARAMETER Experiment Name: At_Drought_P Parameter: Age (day) Value: 8
  misc_feature: MA Experiment 20000437 PARAMETER Experiment Name: At_Drought_P Parameter: Organism Value: A. thaliana
  misc_feature: MA Experiment 20000437 PARAMETER Experiment Name: At_Drought_P Parameter: Plant Line Value: WS
  misc_feature: MA Experiment 20000437 PARAMETER Experiment Name: At_Drought_P Parameter: Timepoint (hr) Value: 24
  misc_feature: MA Experiment 20000437 PARAMETER Experiment Name: At_Drought_P Parameter: Tissue Value: Whole Plant
  misc_feature: MA Experiment 20000437 PARAMETER Experiment Name: At_Drought_P Parameter: Treatment Value: Drought vs. No Drought
  misc_feature: MA Experiment ID: 20000438 Result: Down-regulated in Transcription
  misc_feature: MA Experiment 20000438 PARAMETER Experiment Name: At_Shoots__P Parameter: Age (day) Value: 14
  misc_feature: MA Experiment 20000438 PARAMETER Experiment Name: At_Shoots__P Parameter: Tissue Value: Shoots vs. Whole Plant
  misc_feature: MA Experiment ID: 20000453 Result: Up-regulated in Transcription
  misc_feature: MA Experiment 20000453 PARAMETER Experiment Name: At_100uM_ABA_P Parameter: Age (day) Value: 15
  misc_feature: MA Experiment 20000453 PARAMETER Experiment Name: At_100uM_ABA_P Parameter: Organism Value: A. thaliana
  misc_feature: MA Experiment 20000453 PARAMETER Experiment Name: At_100uM_ABA_P Parameter: Plant Line Value: WS
  misc_feature: MA Experiment 20000453 PARAMETER Experiment Name: At_100uM_ABA_P Parameter: Timepoint (hr) Value: 24
  misc_feature: MA Experiment 20000453 PARAMETER Experiment Name: At_100uM_ABA_P Parameter: Tissue Value: Aerial
  misc_feature: MA Experiment 20000453 PARAMETER Experiment Name: At_100uM_ABA_P Parameter: Treatment Value: 100uM ABA vs. No Treatment
  misc_feature: MA Experiment ID: 20000455 Result: Up-regulated in Transcription
  misc_feature: MA Experiment 20000455 PARAMETER Experiment Name: At_100uM_ABA_P Parameter: Age (day) Value: 16
  misc_feature: MA Experiment 20000455 PARAMETER Experiment Name: At_100uM_ABA_P Parameter: Organism Value: A. thaliana
  misc_feature: MA Experiment 20000455 PARAMETER Experiment Name: At_100uM_ABA_P Parameter: Plant Line Value: WS
  misc_feature: MA Experiment 20000455 PARAMETER Experiment Name: At_100uM_ABA_P Parameter: Timepoint (hr) Value: 48
  misc_feature: MA Experiment 20000455 PARAMETER Experiment Name: At_100uM_ABA_P Parameter: Tissue Value: Aerial
  misc_feature: MA Experiment 20000455 PARAMETER Experiment Name: At_100uM_ABA_P Parameter: Treatment Value: 100uM ABA vs. No Treatment
  misc_feature: MA Experiment ID: 20000573 Result: Up-regulated in Transcription
  misc_feature: MA Experiment 20000573 PARAMETER Experiment Name: At_100uM_ABA_Mutants__P Parameter: Organism Value: A. thaliana
  misc_feature: MA Experiment 20000573 PARAMETER Experiment Name: At_100uM_ABA_Mutants__P Parameter: Plant Line Value: CS22 vs. Ler wt
  misc_feature: MA Experiment 20000573 PARAMETER Experiment Name: At_100uM_ABA_Mutants__P Parameter: Timepoint (hr) Value: N/A
  misc_feature: MA Experiment 20000573 PARAMETER Experiment Name: At_100uM_ABA_Mutants__P Parameter: Tissue Value: Whole Plant
  misc_feature: MA Experiment 20000573 PARAMETER Experiment Name: At_100uM_ABA_Mutants__P Parameter: Treatment Value: None
  misc_feature: MA Experiment ID: 20000574 Result: Up-regulated in Transcription
  misc_feature: MA Experiment 20000574 PARAMETER Experiment Name: At_100uM_ABA_Mutants__P Parameter: Organism Value: A. thaliana
  misc_feature: MA Experiment 20000574 PARAMETER Experiment Name: At_100uM_ABA_Mutants__P Parameter: Plant Line Value: CS23 vs. Ler wt
  misc_feature: MA Experiment 20000574 PARAMETER Experiment Name: At_100uM_ABA_Mutants__P Parameter: Timepoint (hr) Value: N/A
  misc_feature: MA Experiment 20000574 PARAMETER Experiment Name: At_100uM_ABA_Mutants__P Parameter: Tissue Value: Whole Plant
  misc_feature: MA Experiment 20000574 PARAMETER Experiment Name: At_100uM_ABA_Mutants__P Parameter: Treatment Value: None
  misc_feature: MA Experiment ID: 20000794 Result: Up-regulated in Transcription
  misc_feature: MA Experiment 20000794 PARAMETER Experiment Name: At_Petals_P Parameter: Age (day) Value: 23-25 days
  misc_feature: MA Experiment 20000794 PARAMETER Experiment Name: At_Petals_P Parameter: Plant Line Value: WS
  misc_feature: MA Experiment 20000794 PARAMETER Experiment Name: At_Petals_P Parameter: Tissue Value: Petals vs. Whole plant
  misc_feature: MA Experiment ID: 20001248 Result: Up-regulated in Transcription
  misc_feature: MA Experiment 20001248 PARAMETER Experiment Name: At_Far-red-induction_P Parameter: Age (day) Value: 7
  misc_feature: MA Experiment 20001248 PARAMETER Experiment Name: At_Far-red-induction_P Parameter: Light Value: Far-red vs. White
  misc_feature: MA Experiment 20001248 PARAMETER Experiment Name: At_Far-red-induction_P Parameter: Organism Value: A. thaliana
  misc_feature: MA Experiment 20001248 PARAMETER Experiment Name: At_Far-red-induction_P Parameter: Plant Line Value: Columbia
  misc_feature: MA Experiment 20001248 PARAMETER Experiment Name: At_Far-red-induction_P Parameter: Timepoint (hr) Value: 4
  misc_feature: MA Experiment 20001248 PARAMETER Experiment Name: At_Far-red-induction_P Parameter: Tissue Value: Whole Plant
  misc_feature: MA Experiment ID: 20001450 Result: Up-regulated in Transcription
  misc_feature: MA Experiment 20001450 PARAMETER Experiment Name: At_Far-red-induction_P Parameter: Age (day) Value: 7
  misc_feature: MA Experiment 20001450 PARAMETER Experiment Name: At_Far-red-induction_P Parameter: Light Value: Far-red vs. White
  misc_feature: MA Experiment 20001450 PARAMETER Experiment Name: At_Far-red-induction_P Parameter: Organism Value: A. thaliana
  misc_feature: MA Experiment 20001450 PARAMETER Experiment Name: At_Far-red-induction_P Parameter: Plant Line Value: Columbia
  misc_feature: MA Experiment 20001450 PARAMETER Experiment Name: At_Far-red-induction_P Parameter: Timepoint (hr) Value: 8
  misc_feature: MA Experiment 20001450 PARAMETER Experiment Name: At_Far-red-induction_P Parameter: Tissue Value: Whole Plant
  misc_feature: MA Experiment ID: 20001451 Result: Up-regulated in Transcription
  misc_feature: MA Experiment 20001451 PARAMETER Experiment Name: At_Far-red-induction_P Parameter: Age (day) Value: 7
  misc_feature: MA Experiment 20001451 PARAMETER Experiment Name: At_Far-red-induction_P Parameter: Light Value: Far-red vs. White
  misc_feature: MA Experiment 20001451 PARAMETER Experiment Name: At_Far-red-induction_P Parameter: Organism Value: A. thaliana
  misc_feature: MA Experiment 20001451 PARAMETER Experiment Name: At_Far-red-induction_P Parameter: Plant Line Value: Columbia
  misc_feature: MA Experiment 20001451 PARAMETER Experiment Name: At_Far-red-induction_P Parameter: Timepoint (hr) Value: 24
  misc_feature: MA Experiment 20001451 PARAMETER Experiment Name: At_Far-red-induction_P Parameter: Tissue Value: Whole Plant
  misc_feature: MA Experiment ID: 20001554 Result: Up-regulated in Transcription
  misc_feature: MA Experiment 20001554 PARAMETER Experiment Name: At_Drought_Soil_Dry_P Parameter: Age (day) Value: 21
  misc_feature: MA Experiment 20001554 PARAMETER Experiment Name: At_Drought_Soil_Dry_P Parameter: Organism Value: A. thaliana
  misc_feature: MA Experiment 20001554 PARAMETER Experiment Name: At_Drought_Soil_Dry_P Parameter: Plant Line Value: WS
  misc_feature: MA Experiment 20001554 PARAMETER Experiment Name: At_Drought_Soil_Dry_P Parameter: Post Timepoint (hr) Value: None
  misc_feature: MA Experiment 20001554 PARAMETER Experiment Name: At_Drought_Soil_Dry_P Parameter: Post-Treatment Value: None
  misc_feature: MA Experiment 20001554 PARAMETER Experiment Name: At_Drought_Soil_Dry_P Parameter: Timepoint (day) Value: 7
  misc_feature: MA Experiment 20001554 PARAMETER Experiment Name: At_Drought_Soil_Dry_P Parameter: Treatment Value: Drought vs. No Drought
  misc_feature: MA Experiment ID: 20001559 Result: Up-regulated in Transcription
  misc_feature: MA Experiment 20001559 PARAMETER Experiment Name: At_Drought_Soil_Dry_P Parameter: Age (day) Value: 28
  misc_feature: MA Experiment 20001559 PARAMETER Experiment Name: At_Drought_Soil_Dry_P Parameter: Organism Value: A. thaliana
  misc_feature: MA Experiment 20001559 PARAMETER Experiment Name: At_Drought_Soil_Dry_P Parameter: Plant Line Value: WS
  misc_feature: MA Experiment 20001559 PARAMETER Experiment Name: At_Drought_Soil_Dry_P Parameter: Post Timepoint (hr) Value: 29
  misc_feature: MA Experiment 20001559 PARAMETER Experiment Name: At_Drought_Soil_Dry_P Parameter: Post-Treatment Value: Re-Water vs. No Drought
  misc_feature: MA Experiment 20001559 PARAMETER Experiment Name: At_Drought_Soil_Dry_P Parameter: Timepoint (day) Value: 14
  misc_feature: MA Experiment 20001559 PARAMETER Experiment Name: At_Drought_Soil_Dry_P Parameter: Treatment Value: Drought vs. No Drought
  misc_feature: MA Experiment ID: 20001757 Result: Down-regulated in Transcription
  misc_feature: MA Experiment 20001757 PARAMETER Experiment Name: At_50mM_NH4NO3_L-to-H_P Parameter: Timepoint (hr) Value: 6
  misc_feature: MA Experiment 20001757 PARAMETER Experiment Name: At_50mM_NH4NO3_L-to-H_P Parameter: Tissue Value: Leaf
  misc_feature: MA Experiment 20001757 PARAMETER Experiment Name: At_50mM_NH4NO3_L-to-H_P Parameter: Treatment Value: 50mM NH4NO3 vs 100mM Mannitol
  misc_feature: MA Experiment ID: 20001904 Result: Up-regulated in Transcription
  misc_feature: MA Experiment 20001904 PARAMETER Experiment Name: At_Drought_Reproduction_P Parameter: Age (day) Value: 37
  misc_feature: MA Experiment 20001904 PARAMETER Experiment Name: At_Drought_Reproduction_P Parameter: Organism Value: A. thaliana
  misc_feature: MA Experiment 20001904 PARAMETER Experiment Name: At_Drought_Reproduction_P Parameter: Plant Line Value: WS
  misc_feature: MA Experiment 20001904 PARAMETER Experiment Name: At_Drought_Reproduction_P Parameter: Timepoint (day) Value: 7
  misc_feature: MA Experiment 20001904 PARAMETER Experiment Name: At_Drought_Reproduction_P Parameter: Tissue Value: Rosettes
  misc_feature: MA Experiment 20001904 PARAMETER Experiment Name: At_Drought_Reproduction_P Parameter: Treatment Value: Drought vs. No Drought
  misc_feature: MA Experiment ID: 20001905 Result: Up-regulated in Transcription
  misc_feature: MA Experiment 20001905 PARAMETER Experiment Name: At_Drought_Reproduction_P Parameter: Age (day) Value: 40
  misc_feature: MA Experiment 20001905 PARAMETER Experiment Name: At_Drought_Reproduction_P Parameter: Organism Value: A. thaliana
  misc_feature: MA Experiment 20001905 PARAMETER Experiment Name: At_Drought_Reproduction_P Parameter: Plant Line Value: WS
  misc_feature: MA Experiment 20001905 PARAMETER Experiment Name: At_Drought_Reproduction_P Parameter: Timepoint (day) Value: 10
  misc_feature: MA Experiment 20001905 PARAMETER Experiment Name: At_Drought_Reproduction_P Parameter: Tissue Value: Rosettes
  misc_feature: MA Experiment 20001905 PARAMETER Experiment Name: At_Drought_Reproduction_P Parameter: Treatment Value: Drought vs. No Drought
  misc_feature: MA Experiment ID: 20001906 Result: Up-regulated in Transcription
  misc_feature: MA Experiment 20001906 PARAMETER Experiment Name: At_Drought_Reproduction_P Parameter: Age (day) Value: 35
  misc_feature: MA Experiment 20001906 PARAMETER Experiment Name: At_Drought_Reproduction_P Parameter: Organism Value: A. thaliana
  misc_feature: MA Experiment 20001906 PARAMETER Experiment Name: At_Drought_Reproduction_P Parameter: Plant Line Value: WS
  misc_feature: MA Experiment 20001906 PARAMETER Experiment Name: At_Drought_Reproduction_P Parameter: Timepoint (day) Value: 5
  misc_feature: MA Experiment 20001906 PARAMETER Experiment Name: At_Drought_Reproduction_P Parameter: Tissue Value: Siliques
  misc_feature: MA Experiment 20001906 PARAMETER Experiment Name: At_Drought_Reproduction_P Parameter: Treatment Value: Drought vs. No Drought
  misc_feature: MA Experiment ID: 20001911 Result: Up-regulated in Transcription
  misc_feature: MA Experiment 20001911 PARAMETER Experiment Name: At_Drought_Reproduction_P Parameter: Age (day) Value: 40
  misc_feature: MA Experiment 20001911 PARAMETER Experiment Name: At_Drought_Reproduction_P Parameter: Organism Value: A. thaliana
  misc_feature: MA Experiment 20001911 PARAMETER Experiment Name: At_Drought_Reproduction_P Parameter: Plant Line Value: WS
  misc_feature: MA Experiment 20001911 PARAMETER Experiment Name: At_Drought_Reproduction_P Parameter: Timepoint (day) Value: 10
  misc_feature: MA Experiment 20001911 PARAMETER Experiment Name: At_Drought_Reproduction_P Parameter: Tissue Value: Flowers
  misc_feature: MA Experiment 20001911 PARAMETER Experiment Name: At_Drought_Reproduction_P Parameter: Treatment Value: Drought vs. No Drought
ctcgagcaactgcttacctcatacaaacaagtcaaaatcggcaatcctcttgagaaagggacattgttaggaccattacatactcctgaatcaaaaaagaactttgagaaaggaattgaagtcatcaaatcccagggtggtaaaatactaacgggaggtaaagcagtcgaaggtgaaggaaactttgtggagcctacgataatcgagatatcagcagatgctgctgtcgtcaaagaagagctatttgctccggttctatatgttctaaagtttaagtcatttggagaggctgttgcgataaacaactcggttcctcaaggtctaagcagctcgatattcactcggaaccctgaaaacatcttcaggtggatcggaccactgggaagtgactgtggcattgtgaatgtgaacataccgacgaatggagctgagattggtggagcttttggaggcgagaaagcgactggtggtggtcgtgaagctggaagcgactcatggaaacagtacatgcgtcgatcgacttgtaccatcaactatggaaacgagttacctctagcgcaaggaattaacttcggttagatttttcagagatttactcgttaattaataatgttatgttggttcgatttcgatacttgtattgtatgccttgttctctccaagcctttgacttaagatgattacgcttttaatatatataaaaaaatattgaatatattttgattgttaat

SEQ ID NO: 81910 - protein, 192 aa, Arabidopsis thaliana
  peptide (1)..(192): Ceres Seq. ID no. 12661985
  misc_feature (1)..(192): Homolog of NCBI NO: 15221042 NR Description: aldehyde dehydrogenase homolog, putative; protein At1g54100.1, supported by cDNA: gi_14190390, supported by cDNA: supported by cDNA: gi_20259465, supported by cDNA: gi_20857327
  misc_feature (1)..(174): Homolog of NCBI NO: 25090053 NR Description: Aldehyde dehydrogenase family 7 member A1
  misc_feature (1)..(192): Homolog of NCBI NO: 118514 NR Description: Aldehyde dehydrogenase family 7 member A1 protein 26G) (Antiquitin 1) >gi|100051|pir||S11863 aldehyde
LEQLLTSYKQVKIGNPLEKGTLLGPLHTPESKKNFEKGIEVIKSQGGKILTGGKAVEGEGNFVEPTIIEISADAAVVKEELFAPVLYVLKFKSFGEAVAINNSVPQGLSSSIFTRNPENIFRWIGPLGSDCGIVNVNIPTNGAEIGGAFGGEKATGGGREAGSDSWKQYMRRSTCTINYGNELPLAQGINFG

SEQ ID NO: 81911 - DNA, 771 bp, Arabidopsis thaliana
  misc_feature (1)..(771): Ceres Seq. ID no. 12662002
  misc_feature: MA Experiment ID: 20000171 Result: Up-regulated in Transcription
  misc_feature: MA Experiment 20000171 PARAMETER Experiment Name: At_42deg_Heat_P Parameter: Age (day) Value: 14
  misc_feature: MA Experiment 20000171 PARAMETER Experiment Name: At_42deg_Heat_P Parameter: Organism Value: A. thaliana
  misc_feature: MA Experiment 20000171 PARAMETER Experiment Name: At_42deg_Heat_P Parameter: Plant Line Value: WS
  misc_feature: MA Experiment 20000171 PARAMETER Experiment Name: At_42deg_Heat_P Parameter: Temperature (deg C) Value: 42 vs. 22
  misc_feature: MA Experiment 20000171 PARAMETER Experiment Name: At_42deg_Heat_P Parameter: Timepoint (hr) Value: 1
  misc_feature: MA Experiment 20000171 PARAMETER Experiment Name: At_42deg_Heat_P Parameter: Tissue Value: Aerial
  misc_feature: MA Experiment ID: 20000184 Result: Up-regulated in Transcription
  misc_feature: MA Experiment 20000184 PARAMETER Experiment Name: At_Shoots__P Parameter: Age (day) Value: 7
  misc_feature: MA Experiment 20000184 PARAMETER Experiment Name: At_Shoots__P Parameter: Tissue Value: Shoots vs. Whole Plant
  misc_feature: MA Experiment ID: 20000185 Result: Up-regulated in Transcription
  misc_feature: MA Experiment 20000185 PARAMETER Experiment Name: At_Roots__P Parameter: Age (day) Value: 7 vs. 21
  misc_feature: MA Experiment 20000185 PARAMETER Experiment Name: At_Roots__P Parameter: Organism Value: A. thaliana
  misc_feature: MA Experiment 20000185 PARAMETER Experiment Name: At_Roots__P Parameter: Tissue Value: Roots vs. Whole Plant
  misc_feature: MA Experiment ID: 20000227 Result: Down-regulated in Transcription
  misc_feature: MA Experiment 20000227 PARAMETER Experiment Name: At_Root-Tips-vs-Tops_P Parameter: Tissue Value: Root Tips vs. Root Tops
  misc_feature: MA Experiment ID: 20000439 Result: Up-regulated in Transcription
  misc_feature: MA Experiment 20000439 PARAMETER Experiment Name: At_Roots__P Parameter: Age (day) Value: 14 vs. 21
  misc_feature: MA Experiment 20000439 PARAMETER Experiment Name: At_Roots__P Parameter: Organism Value: A. thaliana
  misc_feature: MA Experiment 20000439 PARAMETER Experiment Name: At_Roots__P Parameter: Tissue Value: Roots vs. Whole Plant
  misc_feature: MA Experiment ID: 20000527 Result: Down-regulated in Transcription
  misc_feature: MA Experiment 20000527 PARAMETER Experiment Name: At_10percent_PEG_P Parameter: Age (day) Value: 20
  misc_feature: MA Experiment 20000527 PARAMETER Experiment Name: At_10percent_PEG_P Parameter: Organism Value: A. thaliana
  misc_feature: MA Experiment 20000527 PARAMETER Experiment Name: At_10percent_PEG_P Parameter: Plant Line Value: WS
  misc_feature: MA Experiment 20000527 PARAMETER Experiment Name: At_10percent_PEG_P Parameter: Timepoint (day) Value: 20
  misc_feature: MA Experiment 20000527 PARAMETER Experiment Name: At_10percent_PEG_P Parameter: Tissue Value: Whole Plant
  misc_feature: MA Experiment 20000527 PARAMETER Experiment Name: At_10percent_PEG_P Parameter: Treatment Value: 10percent PEG vs. No Treatment
atgggaaaacaaatcaacatagagagtagtgctactcatcatcaagacaatattgtttccgttataacagccacgatatcctcctcctccgtcgtaacgtcttcgtcagactcttggtctacctccaaaagatcgttagtgcaagacaatgactccggagggaaacggcggaagagcaacgttagtgatgataacaagaatccgacgtcgtatagaggagtgaggatgaggagttggggaaaatgggtgtcggagattagagagccgaggaagaaatcaagaatatggcttggcacttatccaacggcagagatggcagctcgtgctcatgatgtggcggctttagctattaaaggcaactccggttttcttaatttccctgaattatccggtttgcttcctcgtccggttagctgctctcctaaggatatacaagctgcagctaccaaagccgccgaagcaaccacgtggcacaaaccggttatcgataagaaattagctgatgagctaagccactctgagttgttgtctaccgctcagtcttcgacttctagtagtttcgtgttttcttcggacacgtcggagacttctagtacggacaaggaaagcaacgaagagacggtgtttgatttgccggaccttttcacggacgggcttatgaacccaaacgatgcgttttgtttatgcaacggcacctttacgtggcagctttacggagaggaggatgtagggttcaggtttgaagagccgtttaattggcaaaatgactaa

SEQ ID NO: 81912 - protein, 256 aa, Arabidopsis thaliana
  peptide (1)..(256): Ceres Seq. ID no. 12662003
  misc_feature (68)..(132): Pfam Name: AP2 domain Pfam Description: AP2 domain
  misc_feature (1)..(256): Homolog of NCBI NO: 15232340 NR Description: transcription factor - like protein; protein id:
  misc_feature (6)..(251): Homolog of NCBI NO: 21592664 NR Description: putative AP2 domain transcription factor
  misc_feature (6)..(251): Homolog of NCBI NO: 15225381 NR Description: putative AP2 domain transcription factor; protein
  misc_feature (24)..(253): Homolog of NCBI NO: 38605848 NR Description: OSJNBb0034G17.6 [Oryza sativa (japonica
  misc_feature (50)..(256): Homolog of NCBI NO: 15233928 NR Description: transcription factor TINY, putative; protein id:
  misc_feature (55)..(217): Homolog of NCBI NO: 37536842 NR Description: putative DNA binding protein [Oryza sativa
  misc_feature (31)..(235): Homolog of NCBI NO: 15239501 NR Description: transcription factor TINY; protein id: At5g25810.1
  misc_feature (30)..(217): Homolog of NCBI NO: 14140155 NR Description: putative AP2 domain transcription factor [Oryza
  misc_feature (24)..(254): Homolog of NCBI NO: 14140163 NR Description: putative AP2 domain containing protein [Oryza
  misc_feature (29)..(214): Homolog of NCBI NO: 15239113 NR Description: transcription factor TINY, putative; protein id: [Arabidopsis thaliana] >gi|11282310|pir||T48518 transcription
MGKQINIESSATHHQDNIVSVITATISSSSVVTSSSDSWSTSKRSLVQDNDSGGKRRKSNVSDDNKNPTSYRGVRMRSWGKWVSEIREPRKKSRIWLGTYPTAEMAARAHDVAALAIKGNSGFLNFPELSGLLPRPVSCSPKDIQAAATKAAEATTWHKPVIDKKLADELSHSELLSTAQSSTSSSFVFSSDTSETSSTDKESNEETVFDLPDLFTDGLMNPNDAFCLCNGTFTWQLYGEEDVGFRFEEPFNWQND

SEQ ID NO: 81913 - protein, 181 aa, Arabidopsis thaliana
  peptide (1)..(181): Ceres Seq. ID no. 12662004
  misc_feature (1)..(57): Pfam Name: AP2 domain Pfam Description: AP2 domain
  misc_feature (1)..(181): Homolog of NCBI NO: 15232340 NR Description: transcription factor - like protein; protein id:
  misc_feature (1)..(176): Homolog of NCBI NO: 21592664 NR Description: putative AP2 domain transcription factor
  misc_feature (1)..(176): Homolog of NCBI NO: 15225381 NR Description: putative AP2 domain transcription factor; protein
  misc_feature (1)..(178): Homolog of NCBI NO: 38605848 NR Description: OSJNBb0034G17.6 [Oryza sativa (japonica
  misc_feature (1)..(181): Homolog of NCBI NO: 15233928 NR Description: transcription factor TINY, putative; protein id:
  misc_feature (1)..(142): Homolog of NCBI NO: 37536842 NR Description: putative DNA binding protein [Oryza sativa
  misc_feature (1)..(160): Homolog of NCBI NO: 15239501 NR Description: transcription factor TINY; protein id: At5g25810.1
  misc_feature (1)..(142): Homolog of NCBI NO: 14140155 NR Description: putative AP2 domain transcription factor [Oryza
  misc_feature (1)..(179): Homolog of NCBI NO: 14140163 NR Description: putative AP2 domain containing protein [Oryza
  misc_feature (1)..(139): Homolog of NCBI NO: 15239113 NR Description: transcription factor TINY, putative; protein id: [Arabidopsis thaliana] >gi|11282310|pir||T48518 transcription
MRSWGKWVSEIREPRKKSRIWLGTYPTAEMAARAHDVAALAIKGNSGFLNFPELSGLLPRPVSCSPKDIQAAATKAAEATTWHKPVIDKKLADELSHSELLSTAQSSTSSSFVFSSDTSETSSTDKESNEETVFDLPDLFTDGLMNPNDAFCLCNGTFTWQLYGEEDVGFRFEEPFNWQND

SEQ ID NO: 81914 - protein, 152 aa, Arabidopsis thaliana
  peptide (1)..(152): Ceres Seq. ID no. 12662005
  misc_feature (1)..(152): Homolog of NCBI NO: 15232340 NR Description: transcription factor - like protein; protein id:
  misc_feature (1)..(147): Homolog of NCBI NO: 21592664 NR Description: putative AP2 domain transcription factor
  misc_feature (1)..(147): Homolog of NCBI NO: 15225381 NR Description: putative AP2 domain transcription factor; protein
  misc_feature (1)..(149): Homolog of NCBI NO: 38605848 NR Description: OSJNBb0034G17.6 [Oryza sativa (japonica
  misc_feature (1)..(152): Homolog of NCBI NO: 15233928 NR Description: transcription factor TINY, putative; protein id:
  misc_feature (1)..(113): Homolog of NCBI NO: 37536842 NR Description: putative DNA binding protein [Oryza sativa
  misc_feature (1)..(131): Homolog of NCBI NO: 15239501 NR Description: transcription factor TINY; protein id: At5g25810.1
  misc_feature (1)..(113): Homolog of NCBI NO: 14140155 NR Description: putative AP2 domain transcription factor [Oryza
  misc_feature (1)..(150): Homolog of NCBI NO: 14140163 NR Description: putative AP2 domain containing protein [Oryza
  misc_feature (1)..(110): Homolog of NCBI NO: 15239113 NR Description: transcription factor TINY, putative; protein id: [Arabidopsis thaliana] >gi|11282310|pir||T48518 transcription
MAARAHDVAALAIKGNSGFLNFPELSGLLPRPVSCSPKDIQAAATKAAEATTWHKPVIDKKLADELSHSELLSTAQSSTSSSFVFSSDTSETSSTDKESNEETVFDLPDLFTDGLMNPNDAFCLCNGTFTWQLYGEEDVGFRFEEPFNWQND

SEQ ID NO: 81915 - DNA, 1491 bp, Arabidopsis thaliana
  misc_feature (1)..(1491): Ceres Seq. ID no. 12662034
  misc_feature: MA Experiment ID: 20000171 Result: Up-regulated in Transcription
  misc_feature: MA Experiment 20000171 PARAMETER Experiment Name: At_42deg_Heat_P Parameter: Age (day) Value: 14
  misc_feature: MA Experiment 20000171 PARAMETER Experiment Name: At_42deg_Heat_P Parameter: Organism Value: A. thaliana
  misc_feature: MA Experiment 20000171 PARAMETER Experiment Name: At_42deg_Heat_P Parameter: Plant Line Value: WS
  misc_feature: MA Experiment 20000171 PARAMETER Experiment Name: At_42deg_Heat_P Parameter: Temperature (deg C) Value: 42 vs. 22
  misc_feature: MA Experiment 20000171 PARAMETER Experiment Name: At_42deg_Heat_P Parameter: Timepoint (hr) Value: 1
  misc_feature: MA Experiment 20000171 PARAMETER Experiment Name: At_42deg_Heat_P Parameter: Tissue Value: Aerial
  misc_feature: MA Experiment ID: 20000173 Result: Up-regulated in Transcription
  misc_feature: MA Experiment 20000173 PARAMETER Experiment Name: At_42deg_Heat_P Parameter: Age (day) Value: 14
  misc_feature: MA Experiment 20000173 PARAMETER Experiment Name: At_42deg_Heat_P Parameter: Organism Value: A. thaliana
  misc_feature: MA Experiment 20000173 PARAMETER Experiment Name: At_42deg_Heat_P Parameter: Plant Line Value: WS
  misc_feature: MA Experiment 20000173 PARAMETER Experiment Name: At_42deg_Heat_P Parameter: Temperature (deg C) Value: 42 vs. 22
  misc_feature: MA Experiment 20000173 PARAMETER Experiment Name: At_42deg_Heat_P Parameter: Timepoint (hr) Value: 6
  misc_feature: MA Experiment 20000173 PARAMETER Experiment Name: At_42deg_Heat_P Parameter: Tissue Value: Aerial
  misc_feature: MA Experiment ID: 20001457 Result: Down-regulated in Transcription
  misc_feature: MA Experiment 20001457 PARAMETER Experiment Name: At_50mM_NH4NO3_L-to-H_P Parameter: Age (day) Value: Undefined
  misc_feature: MA Experiment 20001457 PARAMETER Experiment Name: At_50mM_NH4NO3_L-to-H_P Parameter: Organism Value: Undefined
  misc_feature: MA Experiment 20001457 PARAMETER Experiment Name: At_50mM_NH4NO3_L-to-H_P Parameter: Plant Line Value: Undefined
  misc_feature: MA Experiment 20001457 PARAMETER Experiment Name: At_50mM_NH4NO3_L-to-H_P Parameter: Timepoint (hr) Value: 0.5
  misc_feature: MA Experiment 20001457 PARAMETER Experiment Name: At_50mM_NH4NO3_L-to-H_P Parameter: Tissue Value: Siliques
  misc_feature: MA Experiment 20001457 PARAMETER Experiment Name: At_50mM_NH4NO3_L-to-H_P Parameter: Treatment Value: 50mM NH4NO3 vs. 100mM Manitol
atgtccacgtttgtaaaagtcaccgacttaatcactatcatgttctttctagccattgctgccgtcataaccgcctcaaacacagccgagttggatgtacttgaaatggctagaactgctgtggttgaagccaagactagttttgggtcaatggctgtgactgaggcaactagtgaagttgctggtagttattataaattggggttaagtgaatgcgagaagctctacgatgagagtgaagctaggctatcgaaactggtcgtagatcatgagaatttcaccgttgaagatgttagaacgtggctaagtggcgtgcttgcgaatcatcacacttgtttagacggtttaattcagcaacgtcaaggtcataagcctttggtccatagcaacgtcacgttcgtgctccatgaagctttggctttctacaaaaagtctagagcgagacagggccatggaccaacgagaccaaaacatagaccaacgagaccaaatcatggaccaggaagatcacaccatggaccatcaagaccaaaccaaaacggtggaatgttagtgtcatggaatccaacaagttcaagggcagatttcgtggtggctcgggacggttcggcgactcatcggacgataaaccaagcattagccgccgtttcaagaatgggtaaaagtcggttgaatagagtgataatatacataaaagctggtgtttataacgaaaaaatcgaaatagatagacacatgaaaaacatcatgctagttggtgatggtatggaccgtacaattgtcaccaataaccgaaacgtcccggacggttccacgacttatggatcagcgacattcggagtgtccggggatggattttgggcacgggacataacgttcgagaatactgcaggaccacataaacatcaagctgtggcgttgagagtgagctcagacttgtctttattctatcggtgtagtttcaaaggatatcaagatactcttttcacgcactcacttcgtcaattctaccgcgattgtcatatttatggtacgattgatttcatatttggagatgcggcagctgtttttcagaactgtgatatatttgtgaggcggcctatggatcatcaaggcaacatgatcacagctcaaggaagagacgacccacatacaaattcagaattcgaagcagttaaaggccggtttaagagctacttgggccggccatggaagaagtactcacggacagtgtttctcaaaacagatatcgacgagttgattgacccgagagggtggagagaatggagtggcagttatgctttgtcgacgttgtattacggcgagtttatgaacaccggagctggagcagggactggtagaagggtgaactggccgggatttcacgtcctacgcggtgaggaagaggcttctccgtttaccgtcagccgattcatacaaggagattcttggatccctatcaccggtgtgccgttttcagctggggtttga

SEQ ID NO: 81916 - protein, 496 aa, Arabidopsis thaliana
  peptide (1)..(496): Ceres Seq. ID no. 12662035
  misc_feature (195)..(482): Pfam Name: Pectinesterase Pfam Description: Pectinesterase
  misc_feature (1)..(496): Homolog of NCBI NO: 11279194 NR Description: pectinesterase-like protein - Arabidopsis thaliana
  misc_feature (1)..(496): Homolog of NCBI NO: 30695263 NR Description: pectinesterase family [Arabidopsis thaliana]
  misc_feature (1)..(496): Homolog of NCBI NO: 29824409 NR Description: putative pectinesterase [Arabidopsis thaliana]
  misc_feature (66)..(496): Homolog of NCBI NO: 34393863 NR Description: putative pectinesterase [Oryza sativa (japonica
  misc_feature (164)..(496): Homolog of NCBI NO: 18406733 NR Description: pectinesterase family; protein id: At2g45220.1, by cDNA: gi_13605695 [Arabidopsis thaliana] At2g45220/F4L23.27 [Arabidopsis thaliana]
  misc_feature (164)..(496): Homolog of NCBI NO: 25313433 NR Description: probable pectinesterase [imported] - Arabidopsis
  misc_feature (66)..(143): Homolog of NCBI NO: 18406733 NR Description: pectinesterase family; protein id: At2g45220.1, by cDNA: gi_13605695 [Arabidopsis thaliana] At2g45220/F4L23.27 [Arabidopsis thaliana]
  misc_feature (66)..(143): Homolog of NCBI NO: 25313433 NR Description: probable pectinesterase [imported] - Arabidopsis
  misc_feature (184)..(496): Homolog of NCBI NO: 15220671 NR Description: pectinesterase family; protein id: At1g23200.1, by cDNA: gi_17529057, supported by cDNA: gi_20259096 [Arabidopsis
  misc_feature (23)..(492): Homolog of NCBI NO: 14334992 NR Description: At1g11580/T23J18_33 [Arabidopsis thaliana]
MSTFVKVTDLITIMFFLAIAAVITASNTAELDVLEMARTAVVEAKTSFGSMAVTEATSEVAGSYYKLGLSECEKLYDESEARLSKLVVDHENFTVEDVRTWLSGVLANHHTCLDGLIQQRQGHKPLVHSNVTFVLHEALAFYKKSRARQGHGPTRPKHRPTRPNHGPGRSHHGPSRPNQNGGMLVSWNPTSSRADFVVARDGSATHRTINQALAAVSRMGKSRLNRVIIYIKAGVYNEKIEIDRHMKNIMLVGDGMDRTIVTNNRNVPDGSTTYGSATFGVSGDGFWARDITFENTAGPHKHQAVALRVSSDLSLFYRCSFKGYQDTLFTHSLRQFYRDCHIYGTIDFIFGDAAAVFQNCDIFVRRPMDHQGNMITAQGRDDPHTNSEFEAVKGRFKSYLGRPWKKYSRTVFLKTDIDELIDPRGWREWSGSYALSTLYYGEFMNTGAGAGTGRRVNWPGFHVLRGEEEASPFTVSRFIQGDSWIPITGVPFSAGV

SEQ ID NO: 81917 - protein, 483 aa, Arabidopsis thaliana
  peptide (1)..(483): Ceres Seq. ID no. 12662036
  misc_feature (182)..(469): Pfam Name: Pectinesterase Pfam Description: Pectinesterase
  misc_feature (1)..(483): Homolog of NCBI NO: 11279194 NR Description: pectinesterase-like protein - Arabidopsis thaliana
  misc_feature (1)..(483): Homolog of NCBI NO: 30695263 NR Description: pectinesterase family [Arabidopsis thaliana]
  misc_feature (1)..(483): Homolog of NCBI NO: 29824409 NR Description: putative pectinesterase [Arabidopsis thaliana]
  misc_feature (53)..(483): Homolog of NCBI NO: 34393863 NR Description: putative pectinesterase [Oryza sativa (japonica
  misc_feature (151)..(483): Homolog of NCBI NO: 18406733 NR Description: pectinesterase family; protein id: At2g45220.1, by cDNA: gi_13605695 [Arabidopsis thaliana] At2g45220/F4L23.27 [Arabidopsis thaliana]
  misc_feature (151)..(483): Homolog of NCBI NO: 25313433 NR Description: probable pectinesterase [imported] - Arabidopsis
  misc_feature (53)..(130): Homolog of NCBI NO: 18406733 NR Description: pectinesterase family; protein id: At2g45220.1, by cDNA: gi_13605695 [Arabidopsis thaliana] At2g45220/F4L23.27 [Arabidopsis thaliana]
  misc_feature (53)..(130): Homolog of NCBI NO: 25313433 NR Description: probable pectinesterase [imported] - Arabidopsis
  misc_feature (171)..(483): Homolog of NCBI NO: 15220671 NR Description: pectinesterase family; protein id: At1g23200.1, by cDNA: gi_17529057, supported by cDNA: gi_20259096 [Arabidopsis
  misc_feature (10)..(479): Homolog of NCBI NO: 14334992 NR Description: At1g11580/T23J18_33 [Arabidopsis thaliana]
MFFLAIAAVITASNTAELDVLEMARTAVVEAKTSFGSMAVTEATSEVAGSYYKLGLSECEKLYDESEARLSKLVVDHENFTVEDVRTWLSGVLANHHTCLDGLIQQRQGHKPLVHSNVTFVLHEALAFYKKSRARQGHGPTRPKHRPTRPNHGPGRSHHGPSRPNQNGGMLVSWNPTSSRADFVVARDGSATHRTINQALAAVSRMGKSRLNRVIIYIKAGVYNEKIEIDRHMKNIMLVGDGMDRTIVTNNRNVPDGSTTYGSATFGVSGDGFWARDITFENTAGPHKHQAVALRVSSDLSLFYRCSFKGYQDTLFTHSLRQFYRDCHIYGTIDFIFGDAAAVFQNCDIFVRRPMDHQGNMITAQGRDDPHTNSEFEAVKGRFKSYLGRPWKKYSRTVFLKTDIDELIDPRGWREWSGSYALSTLYYGEFMNTGAGAGTGRRVNWPGFHVLRGEEEASPFTVSRFIQGDSWIPITGVPFSAGV

SEQ ID NO: 81918 - protein, 461 aa, Arabidopsis thaliana
  peptide (1)..(461): Ceres Seq. ID no. 12662037
  misc_feature (160)..(447): Pfam Name: Pectinesterase Pfam Description: Pectinesterase
  misc_feature (1)..(461): Homolog of NCBI NO: 11279194 NR Description: pectinesterase-like protein - Arabidopsis thaliana
  misc_feature (1)..(461): Homolog of NCBI NO: 30695263 NR Description: pectinesterase family [Arabidopsis thaliana]
  misc_feature (1)..(461): Homolog of NCBI NO: 29824409 NR Description: putative pectinesterase [Arabidopsis thaliana]
  misc_feature (31)..(461): Homolog of NCBI NO: 34393863 NR Description: putative pectinesterase [Oryza sativa (japonica
  misc_feature (129)..(461): Homolog of NCBI NO: 18406733 NR Description: pectinesterase family; protein id: At2g45220.1, by cDNA: gi_13605695 [Arabidopsis thaliana] At2g45220/F4L23.27 [Arabidopsis thaliana]
  misc_feature (129)..(461): Homolog of NCBI NO: 25313433 NR Description: probable pectinesterase [imported] - Arabidopsis
  misc_feature (31)..(108): Homolog of NCBI NO: 18406733 NR Description: pectinesterase family; protein id: At2g45220.1, by cDNA: gi_13605695 [Arabidopsis thaliana] At2g45220/F4L23.27 [Arabidopsis thaliana]
  misc_feature (31)..(108): Homolog of NCBI NO: 25313433 NR Description: probable pectinesterase [imported] - Arabidopsis
  misc_feature (149)..(461): Homolog of NCBI NO: 15220671 NR Description: pectinesterase family; protein id: At1g23200.1, by cDNA: gi_17529057, supported by cDNA: gi_20259096 [Arabidopsis
  misc_feature (1)..(457): Homolog of NCBI NO: 14334992 NR Description: At1g11580/T23J18_33 [Arabidopsis thaliana]
MARTAVVEAKTSFGSMAVTEATSEVAGSYYKLGLSECEKLYDESEARLSKLVVDHENFTVEDVRTWLSGVLANHHTCLDGLIQQRQGHKPLVHSNVTFVLHEALAFYKKSRARQGHGPTRPKHRPTRPNHGPGRSHHGPSRPNQNGGMLVSWNPTSSRADFVVARDGSATHRTINQALAAVSRMGKSRLNRVIIYIKAGVYNEKIEIDRHMKNIMLVGDGMDRTIVTNNRNVPDGSTTYGSATFGVSGDGFWARDITFENTAGPHKHQAVALRVSSDLSLFYRCSFKGYQDTLFTHSLRQFYRDCHIYGTIDFIFGDAAAVFQNCDIFVRRPMDHQGNMITAQGRDDPHTNSEFEAVKGRFKSYLGRPWKKYSRTVFLKTDIDELIDPRGWREWSGSYALSTLYYGEFMNTGAGAGTGRRVNWPGFHVLRGEEEASPFTVSRFIQGDSWIPITGVPFSAGV

SEQ ID NO: 81919 - DNA, 3114 bp, Arabidopsis thaliana
  misc_feature (1)..(3114): Ceres Seq. ID no. 12662074
  misc_feature: MA Experiment ID: 20000307 Result: Down-regulated in Transcription
  misc_feature: MA Experiment 20000307 PARAMETER Experiment Name: At_Germinating_Seeds_Sub_P Parameter: Age (hr) Value: 24 vs. 0
  misc_feature: MA Experiment 20000307 PARAMETER Experiment Name: At_Germinating_Seeds_Sub_P Parameter: Organism Value: A. thaliana
  misc_feature: MA Experiment 20000307 PARAMETER Experiment Name: At_Germinating_Seeds_Sub_P Parameter: Plant Line Value: WS
  misc_feature: MA Experiment 20000307 PARAMETER Experiment Name: At_Germinating_Seeds_Sub_P Parameter: Tissue Value: Germinating Seeds
  misc_feature: MA Experiment ID: 20000355 Result: Down-regulated in Transcription
  misc_feature: MA Experiment 20000355 PARAMETER Experiment Name: At_Siliques_Sub_P Parameter: Age (day) Value: 21
  misc_feature: MA Experiment 20000355 PARAMETER Experiment Name: At_Siliques_Sub_P Parameter: Organism Value: A. thaliana
  misc_feature: MA Experiment 20000355 PARAMETER Experiment Name: At_Siliques_Sub_P Parameter: Plant Line Value: WS
  misc_feature: MA Experiment 20000355 PARAMETER Experiment Name: At_Siliques_Sub_P Parameter: Tissue Value: Less Than 5mm Siliques vs. Whole Plant
atgagcgtagatgttcagagaatcactgacttcatttggtatgtaaacagcatatggatgttacctatacagattttctcagcgatttatatcttgcaaaaacatctgggacttggagctttagctgcattggtcacaactttaatggtgatggcttgcaactacccattgacaaggcttcagagaaactaccaatcagatatcatgaatgccaaagatgatagaatgaaagcaacttcagagattcttaaaaacatgaagattctgaagcttcaagcatgggataaccagtttctcaacaaggttaaaacattaagaaagaaagagtatgattgtttatggaagtctttgaggttacaagatttcacaactttcatactttggggagctccttcattgatctctgtggtgacttttgttacttgtatgttaatgggagtgaagctaacagctggagcagtcttatctgctcttgcaacgtttcaaatgttacaaagtccgattttcggtttacctgatctcctctcagcgcttgttcagagcaaggtttctgcagatagaatagcttcttacttgcaacaaagcgagactcagaaagatgcagttgagtattgctcaaatgatcatacagaatttagtgttgaaatagaaaatggagcatttagttgggaacctgagtcaagcagaccaactcttgatgacatcgaactgaaagtaaaaagcggaatgaaagtggcgatctgcggagctgtaggatcaggaaaatcaagcttaccctcttcaatcttaggggagattcagaagctgaagggaacagtcagagtcagtggtaaacaagcttatgttccacaatcaccatggatactaagcgggactataagagataacattttgtttggaagcatttatgaaagcgaaaagtatgagagaactgttaaagcatgtgctttgataaaggactttgagcttttctcgaatggagacttgacagagattggagagagagggataaacatgagtggaggtcagaagcaaaggatacagattgctcgagcggtatatcagaacgctgatatatatctacttgatgatccttttagcgccgttgatgctcatacaggaagagaactctttgaagattgcttaatggggatactgaaagacaaaactgtactttacgttacccatcaagtcgagtttcttccagcagcagatctaatcctggtgatgcaaaacggaagagtgatgcaagcaggaaagtttgaagagcttctaaagcaaaacataggttttgaagttcttactcagtgtgactcagagcataacatttcaacagagaataaaaagaaagaagcaaagctagtgcaagatgaagaaacagagaaaggagtaattggcaaagaagtttacttgacatatttaacaacggtaaaaggcggattgcttgtgccattcataatattggctcagtcttgcttccaaatgctacagattgctagcaattactggatggcatggactgctcctccaactgctgaatccataccaaagttaggaatgggtcggattttacttgtttatgcacttcttgctgcaggaagttcactttgtgttttagcacggactattctagtcgcgataggtggactttcaacagcagagacgttcttctcaaggatgctctgcagcattttcagagctccaatgtcatatttcgattcaactccaacaggaagaatcttgaacagggcatccacagatcaaagtgtcctggatttggaaatggcagtcaaactaggttggtgtgctttctcgatcattcagattgttggaaccatcttcgtcatgtcgcaagttgcttggcaaagatattacacaccaacagagagagaactgtcacgcatgtcaggagtagaaagagctccaatcctccaccatttcgctgaatcgcttgctggtgcaacaacaatacgtgcttttgatcaacgagatcgcttcattagctcaaaccttgttctaatagatagccactcaaggccatggttccatgttgcatcagcaatggagtggctttccttcaggttgaatttgctgtctcattttgtctttgctttttccttggtgttacttgtgactctccctgaaggtgtcatcaatccaagtattgctggtcttggggtcacatatggcttaagtctgaatgttctacaagccacagtgatatggaatatatgcaatgcagaaaacaagatgatttctgtagaaagaattcttcagcactctaagatccccagtgaagcacctctagtaattgatgatcagagacctcttgataactggccaaatgtaggatcaatcgtcttcagagacctacaggtccgttatgcagaacatttcccagctgtcttgaagaacatcacttgtgcgtttccaggaggaaaaaagattggagtagtaggaagaacaggaagcggcaaatcaactttaattcaggcattgtttaggattgtagagccaagtcatggaaccatagttattgataatgtggatataaccaagataggtctacatgacctgagatcaaggcttgggattattcctcaagataatgcactatttgatggaacaatcagattgaatctagatcctctagctcagtatactgatcgcgaaatatgggaggctcttgataaatgtcaactgggagatgttattcgtgcaaaggatgagaagctggatgctacagtggttgaaaatggagaaaattggagcgtaggacaaagacagttagtctgtcttgggagggtgttgttgaagaaaagcaacattctggtgcttgatgaagccactgcttcagttgattctgcaactgatggtgtaatacaaaagatcatcaatcaagagtttaaagatcggacagtggtgactattgcacacagaatccacacagtgatagagagtgatcttgttctggttctgagtgatggacgaatcgcagagtttgattcacctgcaaaactgctacagagagaagattctttcttctccaaactcataaaagagtattcgctgagatctaatcactttgccggctcgaatgatcttctcagctaa

SEQ ID NO: 81920 - protein, 1037 aa, Arabidopsis thaliana
  peptide (1)..(1037): Ceres Seq. ID no. 12662075
  misc_feature (480)..(741): Pfam Name: ABC transporter transmembrane region Pfam Description: ABC transporter transmembrane region
  misc_feature (448)..(1026): Homolog of NCBI NO: 7485868 NR Description: hypothetical protein F20D22.11 - Arabidopsis
  misc_feature (448)..(1026): Homolog of NCBI NO: 15219648 NR Description: ABC transporter family protein; protein id: supported by cDNA: gi_10197657 [Arabidopsis thaliana]
  misc_feature (1)..(440): Homolog of NCBI NO: 7485868 NR Description: hypothetical protein F20D22.11 - Arabidopsis
  misc_feature (1)..(440): Homolog of NCBI NO: 15219648 NR Description: ABC transporter family protein; protein id: supported by cDNA: gi_10197657 [Arabidopsis thaliana]
  misc_feature (432)..(1026): Homolog of NCBI NO: 30682479 NR Description: ABC transporter protein MRP8 [Arabidopsis
  misc_feature (1)..(461): Homolog of NCBI NO: 30682479 NR Description: ABC transporter protein MRP8 [Arabidopsis
  misc_feature (432)..(1026): Homolog of NCBI NO: 18031899 NR Description: ATP-binding cassette transporter MRP6
  misc_feature (1)..(461): Homolog of NCBI NO: 18031899 NR Description: ATP-binding cassette transporter MRP6
  misc_feature (451)..(1027): Homolog of NCBI NO: 30682486 NR Description: ABC transporter family protein [Arabidopsis
  misc_feature (1)..(462): Homolog of NCBI NO: 30682486 NR Description: ABC transporter family protein [Arabidopsis
MSVDVQRITDFIWYVNSIWMLPIQIFSAIYILQKHLGLGALAALVTTLMVMACNYPLTRLQRNYQSDIMNAKDDRMKATSEILKNMKILKLQAWDNQFLNKVKTLRKKEYDCLWKSLRLQDFTTFILWGAPSLISVVTFVTCMLMGVKLTAGAVLSALATFQMLQSPIFGLPDLLSALVQSKVSADRIASYLQQSETQKDAVEYCSNDHTEFSVEIENGAFSWEPESSRPTLDDIELKVKSGMKVAICGAVGSGKSSLPSSILGEIQKLKGTVRVSGKQAYVPQSPWILSGTIRDNILFGSIYESEKYERTVKACALIKDFELFSNGDLTEIGERGINMSGGQKQRIQIARAVYQNADIYLLDDPFSAVDAHTGRELFEDCLMGILKDKTVLYVTHQVEFLPAADLILVMQNGRVMQAGKFEELLKQNIGFEVLTQCDSEHNISTENKKKEAKLVQDEETEKGVIGKEVYLTYLTTVKGGLLVPFIILAQSCFQMLQIASNYWMAWTAPPTAESIPKLGMGRILLVYALLAAGSSLCVLARTILVAIGGLSTAETFFSRMLCSIFRAPMSYFDSTPTGRILNRASTDQSVLDLEMAVKLGWCAFSIIQIVGTIFVMSQVAWQRYYTPTERELSRMSGVERAPILHHFAESLAGATTIRAFDQRDRFISSNLVLIDSHSRPWFHVASAMEWLSFRLNLLSHFVFAFSLVLLVTLPEGVINPSIAGLGVTYGLSLNVLQATVIWNICNAENKMISVERILQHSKIPSEAPLVIDDQRPLDNWPNVGSIVFRDLQVRYAEHFPAVLKNITCAFPGGKKIGVVGRTGSGKSTLIQALFRIVEPSHGTIVIDNVDITKIGLHDLRSRLGIIPQDNALFDGTIRLNLDPLAQYTDREIWEALDKCQLGDVIRAKDEKLDATVVENGENWSVGQRQLVCLGRVLLKKSNILVLDEATASVDSATDGVIQKIINQEFKDRTVVTIAHRIHTVIESDLVLVLSDGRIAEFDSPAKLLQREDSFFSKLIKEYSLRSNHFAGSNDLLS

SEQ ID NO: 81921 - protein, 1018 aa, Arabidopsis thaliana
  peptide (1)..(1018): Ceres Seq. ID no. 12662076
  misc_feature (461)..(722): Pfam Name: ABC transporter transmembrane region Pfam Description: ABC transporter transmembrane region
  misc_feature (429)..(1007): Homolog of NCBI NO: 7485868 NR Description: hypothetical protein F20D22.11 - Arabidopsis
  misc_feature (429)..(1007): Homolog of NCBI NO: 15219648 NR Description: ABC transporter family protein; protein id: supported by cDNA: gi_10197657 [Arabidopsis thaliana]
  misc_feature (1)..(421): Homolog of NCBI NO: 7485868 NR Description: hypothetical protein F20D22.11 - Arabidopsis
  misc_feature (1)..(421): Homolog of NCBI NO: 15219648 NR Description: ABC transporter family protein; protein id: supported by cDNA: gi_10197657 [Arabidopsis thaliana]
  misc_feature (413)..(1007): Homolog of NCBI NO: 30682479 NR Description: ABC transporter protein MRP8 [Arabidopsis
  misc_feature (1)..(442): Homolog of NCBI NO: 30682479 NR Description: ABC transporter protein MRP8 [Arabidopsis
  misc_feature (413)..(1007): Homolog of NCBI NO: 18031899 NR Description: ATP-binding cassette transporter MRP6
  misc_feature (1)..(442): Homolog of NCBI NO: 18031899 NR Description: ATP-binding cassette transporter MRP6
  misc_feature (432)..(1008): Homolog of NCBI NO: 30682486 NR Description: ABC transporter family protein [Arabidopsis
  misc_feature (1)..(443): Homolog of NCBI NO: 30682486 NR Description: ABC transporter family protein [Arabidopsis
MLPIQIFSAIYILQKHLGLGALAALVTTLMVMACNYPLTRLQRNYQSDIMNAKDDRMKATSEILKNMKILKLQAWDNQFLNKVKTLRKKEYDCLWKSLRLQDFTTFILWGAPSLISVVTFVTCMLMGVKLTAGAVLSALATFQMLQSPIFGLPDLLSALVQSKVSADRIASYLQQSETQKDAVEYCSNDHTEFSVEIENGAFSWEPESSRPTLDDIELKVKSGMKVAICGAVGSGKSSLPSSILGEIQKLKGTVRVSGKQAYVPQSPWILSGTIRDNILFGSIYESEKYERTVKACALIKDFELFSNGDLTEIGERGINMSGGQKQRIQIARAVYQNADIYLLDDPFSAVDAHTGRELFEDCLMGILKDKTVLYVTHQVEFLPAADLILVMQNGRVMQAGKFEELLKQNIGFEVLTQCDSEHNISTENKKKEAKLVQDEETEKGVIGKEVYLTYLTTVKGGLLVPFIILAQSCFQMLQIASNYWMAWTAPPTAESIPKLGMGRILLVYALLAAGSSLCVLARTILVAIGGLSTAETFFSRMLCSIFRAPMSYFDSTPTGRILNRASTDQSVLDLEMAVKLGWCAFSIIQIVGTIFVMSQVAWQRYYTPTERELSRMSGVERAPILHHFAESLAGATTIRAFDQRDRFISSNLVLIDSHSRPWFHVASAMEWLSFRLNLLSHFVFAFSLVLLVTLPEGVINPSIAGLGVTYGLSLNVLQATVIWNICNAENKMISVERILQHSKIPSEAPLVIDDQRPLDNWPNVGSIVFRDLQVRYAEHFPAVLKNITCAFPGGKKIGVVGRTGSGKSTLIQALFRIVEPSHGTIVIDNVDITKIGLHDLRSRLGIIPQDNALFDGTIRLNLDPLAQYTDREIWEALDKCQLGDVIRAKDEKLDATVVENGENWSVGQRQLVCLGRVLLKKSNILVLDEATASVDSATDGVIQKIINQEFKDRTVVTIAHRIHTVIESDLVLVLSDGRIAEFDSPAKLLQREDSFFSKLIKEYSLRSNHFAGSNDLLS

SEQ ID NO: 81922 - protein, 989 aa, Arabidopsis thaliana
  peptide (1)..(989): Ceres Seq. ID no. 12662077
  misc_feature (432)..(693): Pfam Name: ABC transporter transmembrane region Pfam Description: ABC transporter transmembrane region
  misc_feature (400)..(978): Homolog of NCBI NO: 7485868 NR Description: hypothetical protein F20D22.11 - Arabidopsis
  misc_feature (400)..(978): Homolog of NCBI NO: 15219648 NR Description: ABC transporter family protein; protein id: supported by cDNA: gi_10197657 [Arabidopsis thaliana]
  misc_feature (1)..(392): Homolog of NCBI NO: 7485868 NR Description: hypothetical protein F20D22.11 - Arabidopsis
  misc_feature (1)..(392): Homolog of NCBI NO: 15219648 NR Description: ABC transporter family protein; protein id: supported by cDNA: gi_10197657 [Arabidopsis thaliana]
  misc_feature (384)..(978): Homolog of NCBI NO: 30682479 NR Description: ABC transporter protein MRP8 [Arabidopsis
  misc_feature (1)..(413): Homolog of NCBI NO: 30682479 NR Description: ABC transporter protein MRP8 [Arabidopsis
  misc_feature (384)..(978): Homolog of NCBI NO: 18031899 NR Description: ATP-binding cassette transporter MRP6
  misc_feature (1)..(413): Homolog of NCBI NO: 18031899 NR Description: ATP-binding cassette transporter MRP6
  misc_feature (403)..(979): Homolog of NCBI NO: 30682486 NR Description: ABC transporter family protein [Arabidopsis
  misc_feature (1)..(414): Homolog of NCBI NO: 30682486 NR Description: ABC transporter family protein [Arabidopsis
MVMACNYPLTRLQRNYQSDIMNAKDDRMKATSEILKNMKILKLQAWDNQFLNKVKTLRKKEYDCLWKSLRLQDFTTFILWGAPSLISVVTFVTCMLMGVKLTAGAVLSALATFQMLQSPIFGLPDLLSALVQSKVSADRIASYLQQSETQKDAVEYCSNDHTEFSVEIENGAFSWEPESSRPTLDDIELKVKSGMKVAICGAVGSGKSSLPSSILGEIQKLKGTVRVSGKQAYVPQSPWILSGTIRDNILFGSIYESEKYERTVKACALIKDFELFSNGDLTEIGERGINMSGGQKQRIQIARAVYQNADIYLLDDPFSAVDAHTGRELFEDCLMGILKDKTVLYVTHQVEFLPAADLILVMQNGRVMQAGKFEELLKQNIGFEVLTQCDSEHNISTENKKKEAKLVQDEETEKGVIGKEVYLTYLTTVKGGLLVPFIILAQSCFQMLQIASNYWMAWTAPPTAESIPKLGMGRILLVYALLAAGSSLCVLARTILVAIGGLSTAETFFSRMLCSIFRAPMSYFDSTPTGRILNRASTDQSVLDLEMAVKLGWCAFSIIQIVGTIFVMSQVAWQRYYTPTERELSRMSGVERAPILHHFAESLAGATTIRAFDQRDRFISSNLVLIDSHSRPWFHVASAMEWLSFRLNLLSHFVFAFSLVLLVTLPEGVINPSIAGLGVTYGLSLNVLQATVIWNICNAENKMISVERILQHSKIPSEAPLVIDDQRPLDNWPNVGSIVFRDLQVRYAEHFPAVLKNITCAFPGGKKIGVVGRTGSGKSTLIQALFRIVEPSHGTIVIDNVDITKIGLHDLRSRLGIIPQDNALFDGTIRLNLDPLAQYTDREIWEALDKCQLGDVIRAKDEKLDATVVENGENWSVGQRQLVCLGRVLLKKSNILVLDEATASVDSATDGVIQKIINQEFKDRTVVTIAHRIHTVIESDLVLVLSDGRIAEFDSPAKLLQREDSFFSKLIKEYSLRSNHFAGSNDLLS

SEQ ID NO: 81923 - DNA, 1031 bp, Arabidopsis thaliana
  misc_feature (1)..(1031): Ceres Seq. ID no. 12662104
  misc_feature: MA Experiment ID: 20000180 Result: Up-regulated in Transcription
  misc_feature: MA Experiment 20000180 PARAMETER Experiment Name: At_Germinating_Seeds_P Parameter: Age (hr) Value: 24 vs. 0
  misc_feature: MA Experiment 20000180 PARAMETER Experiment Name: At_Germinating_Seeds_P Parameter: Tissue Value: Germinating Seeds
  misc_feature: MA Experiment ID: 20000185 Result: Up-regulated in Transcription
  misc_feature: MA Experiment 20000185 PARAMETER Experiment Name: At_Roots__P Parameter: Age (day) Value: 7 vs. 21
  misc_feature: MA Experiment 20000185 PARAMETER Experiment Name: At_Roots__P Parameter: Organism Value: A. thaliana
  misc_feature: MA Experiment 20000185 PARAMETER Experiment Name: At_Roots__P Parameter: Tissue Value: Roots vs. Whole Plant
  misc_feature: MA Experiment ID: 20000227 Result: Down-regulated in Transcription
  misc_feature: MA Experiment 20000227 PARAMETER Experiment Name: At_Root-Tips-vs-Tops_P Parameter: Tissue Value: Root Tips vs. Root Tops
  misc_feature: MA Experiment ID: 20000264 Result: Up-regulated in Transcription
  misc_feature: MA Experiment 20000264 PARAMETER Experiment Name: At_Open_Flower_P Parameter: Age (day) Value: 21
  misc_feature: MA Experiment 20000264 PARAMETER Experiment Name: At_Open_Flower_P Parameter: Plant Line Value: WS
  misc_feature: MA Experiment 20000264 PARAMETER Experiment Name: At_Open_Flower_P Parameter: Tissue Value: Open Flower vs. Whole Plant
  misc_feature: MA Experiment ID: 20000438 Result: Up-regulated in Transcription
  misc_feature: MA Experiment 20000438 PARAMETER Experiment Name: At_Shoots__P Parameter: Age (day) Value: 14
  misc_feature: MA Experiment 20000438 PARAMETER Experiment Name: At_Shoots__P Parameter: Tissue Value: Shoots vs. Whole Plant
  misc_feature: MA Experiment ID: 20000573 Result: Down-regulated in Transcription
  misc_feature: MA Experiment 20000573 PARAMETER Experiment Name: At_100uM_ABA_Mutants__P Parameter: Organism Value: A. thaliana
  misc_feature: MA Experiment 20000573 PARAMETER Experiment Name: At_100uM_ABA_Mutants__P Parameter: Plant Line Value: CS22 vs. Ler wt
  misc_feature: MA Experiment 20000573 PARAMETER Experiment Name: At_100uM_ABA_Mutants__P Parameter: Timepoint (hr) Value: N/A
  misc_feature: MA Experiment 20000573 PARAMETER Experiment Name: At_100uM_ABA_Mutants__P Parameter: Tissue Value: Whole Plant
  misc_feature: MA Experiment 20000573 PARAMETER Experiment Name: At_100uM_ABA_Mutants__P Parameter: Treatment Value: None
  misc_feature: MA Experiment ID: 20000574 Result: Down-regulated in Transcription
  misc_feature: MA Experiment 20000574 PARAMETER Experiment Name: At_100uM_ABA_Mutants__P Parameter: Organism Value: A. thaliana
  misc_feature: MA Experiment 20000574 PARAMETER Experiment Name: At_100uM_ABA_Mutants__P Parameter: Plant Line Value: CS23 vs. Ler wt
  misc_feature: MA Experiment 20000574 PARAMETER Experiment Name: At_100uM_ABA_Mutants__P Parameter: Timepoint (hr) Value: N/A
  misc_feature: MA Experiment 20000574 PARAMETER Experiment Name: At_100uM_ABA_Mutants__P Parameter: Tissue Value: Whole Plant
  misc_feature: MA Experiment 20000574 PARAMETER Experiment Name: At_100uM_ABA_Mutants__P Parameter: Treatment Value: None
  misc_feature: MA Experiment ID: 20000794 Result: Up-regulated in Transcription
  misc_feature: MA Experiment 20000794 PARAMETER Experiment Name: At_Petals_P Parameter: Age (day) Value: 23-25 days
  misc_feature: MA Experiment 20000794 PARAMETER Experiment Name: At_Petals_P Parameter: Plant Line Value: WS
  misc_feature: MA Experiment 20000794 PARAMETER Experiment Name: At_Petals_P Parameter: Tissue Value: Petals vs. Whole plant
  misc_feature: MA Experiment ID: 20001247 Result: Down-regulated in Transcription
  misc_feature: MA Experiment 20001247 PARAMETER Experiment Name: At_Far-red-induction_P Parameter: Age (day) Value: 7
  misc_feature: MA Experiment 20001247 PARAMETER Experiment Name: At_Far-red-induction_P Parameter: Light Value: Far-red vs. White
  misc_feature: MA Experiment 20001247 PARAMETER Experiment Name: At_Far-red-induction_P Parameter: Organism Value: A. thaliana
  misc_feature: MA Experiment 20001247 PARAMETER Experiment Name: At_Far-red-induction_P Parameter: Plant Line Value: Columbia
  misc_feature: MA Experiment 20001247 PARAMETER Experiment Name: At_Far-red-induction_P Parameter: Timepoint (hr) Value: 1
  misc_feature: MA Experiment 20001247 PARAMETER Experiment Name: At_Far-red-induction_P Parameter: Tissue Value: Whole Plant
  misc_feature: MA Experiment ID: 20001248 Result: Down-regulated in Transcription
  misc_feature: MA Experiment 20001248 PARAMETER Experiment Name: At_Far-red-induction_P Parameter: Age (day) Value: 7
  misc_feature: MA Experiment 20001248 PARAMETER Experiment Name: At_Far-red-induction_P Parameter: Light Value: Far-red vs. White
  misc_feature: MA Experiment 20001248 PARAMETER Experiment Name: At_Far-red-induction_P Parameter: Organism Value: A. thaliana
  misc_feature: MA Experiment 20001248 PARAMETER Experiment Name: At_Far-red-induction_P Parameter: Plant Line Value: Columbia
  misc_feature: MA Experiment 20001248 PARAMETER Experiment Name: At_Far-red-induction_P Parameter: Timepoint (hr) Value: 4
  misc_feature: MA Experiment 20001248 PARAMETER Experiment Name: At_Far-red-induction_P Parameter: Tissue Value: Whole Plant
  misc_feature: MA Experiment ID: 20001450 Result: Down-regulated in Transcription
  misc_feature: MA Experiment 20001450 PARAMETER Experiment Name: At_Far-red-induction_P Parameter: Age (day) Value: 7
  misc_feature: MA Experiment 20001450 PARAMETER Experiment Name: At_Far-red-induction_P Parameter: Light Value: Far-red vs. White
  misc_feature: MA Experiment 20001450 PARAMETER Experiment Name: At_Far-red-induction_P Parameter: Organism Value: A. thaliana
  misc_feature: MA Experiment 20001450 PARAMETER Experiment Name: At_Far-red-induction_P Parameter: Plant Line Value: Columbia
  misc_feature: MA Experiment 20001450 PARAMETER Experiment Name: At_Far-red-induction_P Parameter: Timepoint (hr) Value: 8
  misc_feature: MA Experiment 20001450 PARAMETER Experiment Name: At_Far-red-induction_P Parameter: Tissue Value: Whole Plant
  misc_feature: MA Experiment ID: 20001906 Result: Up-regulated in Transcription
  misc_feature: MA Experiment 20001906 PARAMETER Experiment Name: At_Drought_Reproduction_P Parameter: Age (day) Value: 35
  misc_feature: MA Experiment 20001906 PARAMETER Experiment Name: At_Drought_Reproduction_P Parameter: Organism Value: A. thaliana
  misc_feature: MA Experiment 20001906 PARAMETER Experiment Name: At_Drought_Reproduction_P Parameter: Plant Line Value: WS
  misc_feature: MA Experiment 20001906 PARAMETER Experiment Name: At_Drought_Reproduction_P Parameter: Timepoint (day) Value: 5
  misc_feature: MA Experiment 20001906 PARAMETER Experiment Name: At_Drought_Reproduction_P Parameter: Tissue Value: Siliques
  misc_feature: MA Experiment 20001906 PARAMETER Experiment Name: At_Drought_Reproduction_P Parameter: Treatment Value: Drought vs. No Drought
  misc_feature: MA Experiment ID: 20001908 Result: Up-regulated in Transcription
  misc_feature: MA Experiment 20001908 PARAMETER Experiment Name: At_Drought_Reproduction_P Parameter: Age (day) Value: 40
  misc_feature: MA Experiment 20001908 PARAMETER Experiment Name: At_Drought_Reproduction_P Parameter: Organism Value: A. thaliana
  misc_feature: MA Experiment 20001908 PARAMETER Experiment Name: At_Drought_Reproduction_P Parameter: Plant Line Value: WS
  misc_feature: MA Experiment 20001908 PARAMETER Experiment Name: At_Drought_Reproduction_P Parameter: Timepoint (day) Value: 10
  misc_feature: MA Experiment 20001908 PARAMETER Experiment Name: At_Drought_Reproduction_P Parameter: Tissue Value: Siliques
  misc_feature: MA Experiment 20001908 PARAMETER Experiment Name: At_Drought_Reproduction_P Parameter: Treatment Value: Drought vs. No Drought
attctttgtctaaaacccagaaataaaaaggttcgaaaatggcagaggaaactccaagatatgctgtagttactggagcaaacagagggattggatttgagatatgcagacaattagctagtgaagggattagagttgttttgacctctagagacgaaaacagaggacttgaagctgttgagacactgaagaaagagcttgagatttctgatcaaagccttctttttcatcagcttgatgtcgctgatcctgctagtatcacatctcttgctgagtttgtgaaaacccaatttgggaaactcgatatcttggtcaataatgcagggattggtggtataatcactgatgctgaagctttaagagctggggcagggaaagaaggtttcaagtgggatgaaatcatcacggagacttatgagttaactgaagaatgcatcaagataaactactatggaccaaagagaatgtgtgaggcgtttattcctcttttgaagttatctgattcaccaagaatcgtcaatgtatcatcctccatgggtcaactaaagaatgtactaaacgaatgggcaaaaggaatcctgagcgacgcagagaatctcactgaggaaagaatcgaccaagtgatcaaccaacttctcaatgatttcaaagaaggtacagttaaggaaaaaaactgggctaaatttatgtcggcttatgtggtttcaaaggcaagtttgaatggttacacgagggtcctggcgaagaaacatcccgagtttcgcgtaaacgctgtgtgtcctggatttgttaagacagatatgaacttcaagactggagtcttgtctgtggaagaaggagcttcaagtcctgtgaggttggctttacttccgcatcaagaaactccttctggttgtttctttagtcgcaagcaagtttcagaattctgaatcttcttttgtgtgagaataataagccaaaaatgtagtaatttaatgagaggattatcgtttgaatgtcgaacatatactcttagataaacaaaaactttt

SEQ ID NO: 81924 - protein, 296 aa, Arabidopsis thaliana
  peptide (1)..(296): Ceres Seq. ID no. 12662105
  misc_feature (1)..(296): Homolog of NCBI NO: 15233062 NR Description: putative protein; protein id: At3g61220.1, by cDNA: gi_15028054, supported by cDNA: gi_20259056 [Arabidopsis
  misc_feature (1)..(296): Homolog of NCBI NO: 15224100 NR Description: putative carbonyl reductase; protein id: [Arabidopsis thaliana] >gi|25412197|pir||F84633 probable carbonyl
  misc_feature (6)..(296): Homolog of NCBI NO: 18378884 NR Description: carbonyl reductase, putative; protein id: [Arabidopsis thaliana] >gi|13878161|gb|AAK44158.1|AF370343_1 carbonyl reductase [Arabidopsis thaliana]
  misc_feature (7)..(296): Homolog of NCBI NO: 25518668 NR Description: hypothetical protein T1N6.22 - Arabidopsis
  misc_feature (89)..(290): Homolog of NCBI NO: 34559416 NR Description: (-)-isopiperitenone reductase [Mentha x piperita]
  misc_feature (4)..(100): Homolog of NCBI NO: 34559416 NR Description: (-)-isopiperitenone reductase [Mentha x piperita]
  misc_feature (7)..(296): Homolog of NCBI NO: 38346767 NR Description: OSJNBa0081C01.18 [Oryza sativa (japonica
  misc_feature (3)..(295): Homolog of NCBI NO: 33146492 NR Description: carbonyl reductase -like protein [Oryza sativa
  misc_feature (5)..(296): Homolog of NCBI NO: 38346769 NR Description: OSJNBa0081C01.20 [Oryza sativa (japonica
  misc_feature (7)..(296): Homolog of NCBI NO: 38346772 NR Description: OSJNBa0081C01.23 [Oryza sativa (japonica
MAEETPRYAVVTGANRGIGFEICRQLASEGIRVVLTSRDENRGLEAVETLKKELEISDQSLLFHQLDVADPASITSLAEFVKTQFGKLDILVNNAGIGGIITDAEALRAGAGKEGFKWDEIITETYELTEECIKINYYGPKRMCEAFIPLLKLSDSPRIVNVSSSMGQLKNVLNEWAKGILSDAENLTEERIDQVINQLLNDFKEGTVKEKNWAKFMSAYVVSKASLNGYTRVLAKKHPEFRVNAVCPGFVKTDMNFKTGVLSVEEGASSPVRLALLPHQETPSGCFFSRKQVSEF

SEQ ID NO: 81925 - protein, 154 aa, Arabidopsis thaliana
  peptide (1)..(154): Ceres Seq. ID no. 12662106
  misc_feature (1)..(154): Homolog of NCBI NO: 15233062 NR Description: putative protein; protein id: At3g61220.1, by cDNA: gi_15028054, supported by cDNA: gi_20259056 [Arabidopsis
  misc_feature (1)..(154): Homolog of NCBI NO: 15224100 NR Description: putative carbonyl reductase; protein id: [Arabidopsis thaliana] >gi|25412197|pir||F84633 probable carbonyl
  misc_feature (1)..(154): Homolog of NCBI NO: 18378884 NR Description: carbonyl reductase, putative; protein id: [Arabidopsis thaliana] >gi|13878161|gb|AAK44158.1|AF370343_1 carbonyl reductase [Arabidopsis thaliana]
  misc_feature (1)..(154): Homolog of NCBI NO: 25518668 NR Description: hypothetical protein T1N6.22 - Arabidopsis
  misc_feature (1)..(148): Homolog of NCBI NO: 34559416 NR Description: (-)-isopiperitenone reductase [Mentha x piperita]
  misc_feature (1)..(154): Homolog of NCBI NO: 38346767 NR Description: OSJNBa0081C01.18 [Oryza sativa (japonica
  misc_feature (1)..(153): Homolog of NCBI NO: 33146492 NR Description: carbonyl reductase -like protein [Oryza sativa
  misc_feature (1)..(154): Homolog of NCBI NO: 38346769 NR Description: OSJNBa0081C01.20 [Oryza sativa (japonica
  misc_feature (1)..(154): Homolog of NCBI NO: 38346772 NR Description: OSJNBa0081C01.23 [Oryza sativa (japonica
  misc_feature (1)..(154): Homolog of NCBI NO: 38346774 NR Description: OSJNBa0081C01.25 [Oryza sativa (japonica
MCEAFIPLLKLSDSPRIVNVSSSMGQLKNVLNEWAKGILSDAENLTEERIDQVINQLLNDFKEGTVKEKNWAKFMSAYVVSKASLNGYTRVLAKKHPEFRVNAVCPGFVKTDMNFKTGVLSVEEGASSPVRLALLPHQETPSGCFFSRKQVSEF

SEQ ID NO: 81926 - DNA, 1047 bp, Arabidopsis thaliana
  misc_feature (1)..(1047): Ceres Seq. ID no. 12662115
  misc_feature: MA Experiment ID: 20000179 Result: Up-regulated in Transcription
  misc_feature: MA Experiment 20000179 PARAMETER Experiment Name: At_Germinating_Seeds_P Parameter: Age (hr) Value: 6 vs. 0
  misc_feature: MA Experiment 20000179 PARAMETER Experiment Name: At_Germinating_Seeds_P Parameter: Tissue Value: Germinating Seeds
  misc_feature: MA Experiment ID: 20000185 Result: Down-regulated in Transcription
  misc_feature: MA Experiment 20000185 PARAMETER Experiment Name: At_Roots__P Parameter: Age (day) Value: 7 vs. 21
  misc_feature: MA Experiment 20000185 PARAMETER Experiment Name: At_Roots__P Parameter: Organism Value: A. thaliana
  misc_feature: MA Experiment 20000185 PARAMETER Experiment Name: At_Roots__P Parameter: Tissue Value: Roots vs. Whole Plant
  misc_feature: MA Experiment ID: 20000439 Result: Down-regulated in Transcription
  misc_feature: MA Experiment 20000439 PARAMETER Experiment Name: At_Roots__P Parameter: Age (day) Value: 14 vs. 21
  misc_feature: MA Experiment 20000439 PARAMETER Experiment Name: At_Roots__P Parameter: Organism Value: A. thaliana
  misc_feature: MA Experiment 20000439 PARAMETER Experiment Name: At_Roots__P Parameter: Tissue Value: Roots vs. Whole Plant
  misc_feature: MA Experiment ID: 20001247 Result: Up-regulated in Transcription
  misc_feature: MA Experiment 20001247 PARAMETER Experiment Name: At_Far-red-induction_P Parameter: Age (day) Value: 7
  misc_feature: MA Experiment 20001247 PARAMETER Experiment Name: At_Far-red-induction_P Parameter: Light Value: Far-red vs. White
  misc_feature: MA Experiment 20001247 PARAMETER Experiment Name: At_Far-red-induction_P Parameter: Organism Value: A. thaliana
  misc_feature: MA Experiment 20001247 PARAMETER Experiment Name: At_Far-red-induction_P Parameter: Plant Line Value: Columbia
  misc_feature: MA Experiment 20001247 PARAMETER Experiment Name: At_Far-red-induction_P Parameter: Timepoint (hr) Value: 1
  misc_feature: MA Experiment 20001247 PARAMETER Experiment Name: At_Far-red-induction_P Parameter: Tissue Value: Whole Plant
  misc_feature: MA Experiment ID: 20001905 Result: Down-regulated in Transcription
  misc_feature: MA Experiment 20001905 PARAMETER Experiment Name: At_Drought_Reproduction_P Parameter: Age (day) Value: 40
  misc_feature: MA Experiment 20001905 PARAMETER Experiment Name: At_Drought_Reproduction_P Parameter: Organism Value: A. thaliana
  misc_feature: MA Experiment 20001905 PARAMETER Experiment Name: At_Drought_Reproduction_P Parameter: Plant Line Value: WS
  misc_feature: MA Experiment 20001905 PARAMETER Experiment Name: At_Drought_Reproduction_P Parameter: Timepoint (day) Value: 10
  misc_feature: MA Experiment 20001905 PARAMETER Experiment Name: At_Drought_Reproduction_P Parameter: Tissue Value: Rosettes
  misc_feature: MA Experiment 20001905 PARAMETER Experiment Name: At_Drought_Reproduction_P Parameter: Treatment Value: Drought vs. No Drought
atggcgttatccgggtcgggttcttactatatccaaagaggaatccccggttctggtcctcctcctcctcaaactcaaccaacgtttcacggatcacaaggatttcatcatttcaccaattccatctctccttttgggtcaaacccaaacccaaatccaaaccctggaggtgtctctactggattcgtgtctcctcctttacccgttgactcttctccggctgattcgtcagcggcggcggcgggagctttggttgctcctccttcaggtgacacgtctgtgaagcggaagagaggacggcctagaaaatatggacaagatggtggttctgtttcgttggcattgtctccttctatctccaacgtttccccgaactctaacaaacgtggccgtggaagacctcctggctccggcaagaagcaacggctatcttccattggtgaaatgatgccttcatcaactgggatgagcttcacaccgcatgtaatcgtagtttccattggtgaagacattgcttcaaaggttatatcgttctcgcatcaaggtccacgagcgatatgtgtcttatccgcaagtggtgctgtctctactgcaactcttcttcagccagcaccttctcatggaactattatatacgagggtctattcgagctcatatctctctcaacttcttatctgaacacaactgacaatgactacccaaaccgcactggaagtctagcggtctcacttgctagccccgatggtcgtgtcattggtggtggaattggaggtcctctaatagcagcaagccaagtccaggtcattgttggcagcttcatttgggcaattccgaaagggaagattaaaaaacgtgaagaaacttctgaagatgtccaagatactgatgctttggaaaacaacaacgataacacagcagcaacgtcacctcctgttcctcagcaaagtcagaacattgttcagactcctgtaggcatttggtcaactggttcaaggtcaatggatatgcatcacccccatatggacattgatctaatgcgtggatga

SEQ ID NO: 81927 - protein, 348 aa, Arabidopsis thaliana; identical to SEQ ID NO: 47287
  peptide (1)..(348): Ceres Seq. ID no. 12662116
  misc_feature (1)..(348): Homolog of NCBI NO: 11281387 NR Description: probable DNA-binding protein - Arabidopsis
  misc_feature (1)..(348): Homolog of NCBI NO: 30695388 NR Description: DNA-binding protein -related [Arabidopsis
  misc_feature (1)..(348): Homolog of NCBI NO: 15225902 NR Description: putative AT-hook DNA-binding protein; protein id: supported by cDNA: gi_14194130, supported by cDNA: gi_16323337, by cDNA: gi_17065245 [Arabidopsis thaliana]
  misc_feature (1)..(348): Homolog of NCBI NO: 7488825 NR Description: probable DNA-binding protein - garden pea
  misc_feature (1)..(336): Homolog of NCBI NO: 2213534 NR Description: DNA-binding PD1-like protein [Pisum sativum]
  misc_feature (1)..(348): Homolog of NCBI NO: 30696854 NR Description: DNA-binding protein -related [Arabidopsis
  misc_feature (1)..(348): Homolog of NCBI NO: 17979309 NR Description: putative DNA-binding protein [Arabidopsis
  misc_feature (1)..(348): Homolog of NCBI NO: 22330402 NR Description: DNA-binding protein, putative; protein id: supported by cDNA: gi_17979308, supported by cDNA: gi_20466008
  misc_feature (9)..(348): Homolog of NCBI NO: 6633838 NR Description: F2K11.15 [Arabidopsis thaliana]
  misc_feature (17)..(339): Homolog of NCBI NO: 38346715 NR Description: OSJNBa0086O06.13 [Oryza sativa (japonica

SEQ ID NO: 81928 - protein, 200 aa, Arabidopsis thaliana; identical to SEQ ID NO: 47288
  peptide (1)..(200): Ceres Seq. ID no. 12662117
  misc_feature (1)..(200): Homolog of NCBI NO: 11281387 NR Description: probable DNA-binding protein - Arabidopsis
  misc_feature (1)..(200): Homolog of NCBI NO: 30695388 NR Description: DNA-binding protein -related [Arabidopsis
  misc_feature (1)..(200): Homolog of NCBI NO: 15225902 NR Description: putative AT-hook DNA-binding protein; protein id: supported by cDNA: gi_14194130, supported by cDNA: gi_16323337, by cDNA: gi_17065245 [Arabidopsis thaliana]
  misc_feature (1)..(200): Homolog of NCBI NO: 7488825 NR Description: probable DNA-binding protein - garden pea
  misc_feature (1)..(188): Homolog of NCBI NO: 2213534 NR Description: DNA-binding PD1-like protein [Pisum sativum]
  misc_feature (1)..(200): Homolog of NCBI NO: 30696854 NR Description: DNA-binding protein -related [Arabidopsis
  misc_feature (1)..(200): Homolog of NCBI NO: 17979309 NR Description: putative DNA-binding protein [Arabidopsis
  misc_feature (1)..(200): Homolog of NCBI NO: 22330402 NR Description: DNA-binding protein, putative; protein id: supported by cDNA: gi_17979308, supported by cDNA: gi_20466008
  misc_feature (1)..(200): Homolog of NCBI NO: 6633838 NR Description: F2K11.15 [Arabidopsis thaliana]
  misc_feature (1)..(191): Homolog of NCBI NO: 38346715 NR Description: OSJNBa0086O06.13 [Oryza sativa (japonica

SEQ ID NO: 81929 - protein, 199 aa, Arabidopsis thaliana
  peptide (1)..(199): Ceres Seq. ID no. 12662118
  misc_feature (1)..(199): Homolog of NCBI NO: 11281387 NR Description: probable DNA-binding protein - Arabidopsis
  misc_feature (1)..(199): Homolog of NCBI NO: 30695388 NR Description: DNA-binding protein -related [Arabidopsis
  misc_feature (1)..(199): Homolog of NCBI NO: 15225902 NR Description: putative AT-hook DNA-binding protein; protein id: supported by cDNA: gi_14194130, supported by cDNA: gi_16323337, by cDNA: gi_17065245 [Arabidopsis thaliana]
  misc_feature (1)..(199): Homolog of NCBI NO: 7488825 NR Description: probable DNA-binding protein - garden pea
  misc_feature (1)..(187): Homolog of NCBI NO: 2213534 NR Description: DNA-binding PD1-like protein [Pisum sativum]
  misc_feature (1)..(199): Homolog of NCBI NO: 30696854 NR Description: DNA-binding protein -related [Arabidopsis
  misc_feature (1)..(199): Homolog of NCBI NO: 17979309 NR Description: putative DNA-binding protein [Arabidopsis
  misc_feature (1)..(199): Homolog of NCBI NO: 22330402 NR Description: DNA-binding protein, putative; protein id: supported by cDNA: gi_17979308, supported by cDNA: gi_20466008
  misc_feature (1)..(199): Homolog of NCBI NO: 6633838 NR Description: F2K11.15 [Arabidopsis thaliana]
  misc_feature (1)..(190): Homolog of NCBI NO: 38346715 NR Description: OSJNBa0086O06.13 [Oryza sativa (japonica
MPSSTGMSFTPHVIVVSIGEDIASKVISFSHQGPRAICVLSASGAVSTATLLQPAPSHGTIIYEGLFELISLSTSYLNTTDNDYPNRTGSLAVSLASPDGRVIGGGIGGPLIAASQVQVIVGSFIWAIPKGKIKKREETSEDVQDTDALENNNDNTAATSPPVPQQSQNIVQTPVGIWSTGSRSMDMHHPHMDIDLMRG

SEQ ID NO: 81930 - DNA, 1113 bp, Arabidopsis thaliana
  misc_feature (1)..(1113): Ceres Seq. ID no. 12662146
  misc_feature: MA Experiment ID: 20000227 Result: Down-regulated in Transcription
  misc_feature: MA Experiment 20000227 PARAMETER Experiment Name: At_Root-Tips-vs-Tops_P Parameter: Tissue Value: Root Tips vs. Root Tops
  misc_feature: MA Experiment ID: 20000269 Result: Up-regulated in Transcription
  misc_feature: MA Experiment 20000269 PARAMETER Experiment Name: At_1mM_KNO3_L-vs-H_Roots_P Parameter: Age (day) Value: 7,10,12
  misc_feature: MA Experiment 20000269 PARAMETER Experiment Name: At_1mM_KNO3_L-vs-H_Roots_P Parameter: Organism Value: A. thaliana
  misc_feature: MA Experiment 20000269 PARAMETER Experiment Name: At_1mM_KNO3_L-vs-H_Roots_P Parameter: Plant Line Value: WS
  misc_feature: MA Experiment 20000269 PARAMETER Experiment Name: At_1mM_KNO3_L-vs-H_Roots_P Parameter: Timepoint (day) Value: 7,10,12
  misc_feature: MA Experiment 20000269 PARAMETER Experiment Name: At_1mM_KNO3_L-vs-H_Roots_P Parameter: Tissue Value: Roots
  misc_feature: MA Experiment 20000269 PARAMETER Experiment Name: At_1mM_KNO3_L-vs-H_Roots_P Parameter: Treatment Value: 1mM KNO3 vs. 50mM KNO3
atggattcaacagccaccgttgcaagtgatcgtcttagtcaactaaactctttcgaggagactatgacaggcgtgaaaggccttgttgattccggaatcaaagaggttccagctatgttccgtgagcctccagctattttagcaagccgaaaaccaccactagctttgcagttcacgatcccaaccatcgatctgaacggaggagtagtgtactacaagaatcaagattcagttacacggagaagcatggttgagaagataggagatgcagcggagaaatggggtttcttccaggtggttaaccacgggatcccgctcgacgtgctggagaaggtgaaagaagggattcgcgcgtttcacgagcaggatgctgaattgaagaaacggttctactctcgtgatcacactcgaaaaatggtttactatagtaacttggatctcttcaccgctatgaaagcgagttggagagataccatgtgtgcctatatggccccggatcctcccacatcggaggacttgcccgaggtttgtggggagattatgatggagtatgcaaaggaaataatgaatttaggtgaattgatctttgagcttctatcagaggctctagggttgaataattctaatcacctcaaagacatggattgcagcaagtctttggtcttgttcggccagtactatccaccttgtccgcagcctgaccatactttaggcttaagcaagcacaccgatttttcttttctcaccattgttcttcaggggaatctcggtgggcttcaagttctccatgataaacaatattggatcgatattcctcccgtccctggggctcttgtcgttaacctcggagatcttctccagcttataagcaatggcaagttcataagcgtggagcacagggtgatagcaaatagagcggctgaaccgcggatttcagtgccatgtttcttcagcaccgtgatgagggagagccatcgagtatatggacccataaaagagcttctgtcagaacaaaaccctcccaagtatagggacaccaccatctccgagttcgcaagcatgtacgcgtctaaagagatcaatacctctgcgttactccgtttagagatctga

SEQ ID NO: 81931 - protein, 370 aa, Arabidopsis thaliana
  peptide (1)..(370): Ceres Seq. ID no. 12662147
  misc_feature (218)..(319): Pfam Name: 2OG-Fe(II) oxygenase superfamily Pfam Description: 2OG-Fe(II) oxygenase superfamily
  misc_feature (1)..(370): Homolog of NCBI NO: 15233096 NR Description: 1-aminocyclopropane-1-carboxylate oxidase-like
  misc_feature (8)..(370): Homolog of NCBI NO: 15218795 NR Description: putative 1-aminocyclopropane-1-carboxylate
  misc_feature (8)..(370): Homolog of NCBI NO: 30679748 NR Description: 2-oxoglutarate-dependent dioxygenase, putative thaliana] >gi|30102640|gb|AAP21238.1| At1g06620 [Arabidopsis
  misc_feature (8)..(365): Homolog of NCBI NO: 9280671 NR Description: F21B7.3 [Arabidopsis thaliana]
  misc_feature (8)..(370): Homolog of NCBI NO: 15218794 NR Description: putative 1-aminocyclopropane-1-carboxylate protein id: At1g03400.1, supported by cDNA: gi_15146295
  misc_feature (8)..(185): Homolog of NCBI NO: 25406927 NR Description: protein F12K11.6 [imported] - Arabidopsis >gi|6692693|gb|AAF24827.1|AC007592_20 F12K11.6 [Arabidopsis
  misc_feature (179)..(269): Homolog of NCBI NO: 25406927 NR Description: protein F12K11.6 [imported] - Arabidopsis >gi|6692693|gb|AAF24827.1|AC007592_20 F12K11.6 [Arabidopsis
  misc_feature (285)..(370): Homolog of NCBI NO: 25406927 NR Description: protein F12K11.6 [imported] - Arabidopsis >gi|6692693|gb|AAF24827.1|AC007592_20 F12K11.6 [Arabidopsis
  misc_feature (276)..(368): Homolog of NCBI NO: 25406927 NR Description: protein F12K11.6 [imported] - Arabidopsis >gi|6692693|gb|AAF24827.1|AC007592_20 F12K11.6 [Arabidopsis
  misc_feature (287)..(366): Homolog of NCBI NO: 25406927 NR Description: protein F12K11.6 [imported] - Arabidopsis >gi|6692693|gb|AAF24827.1|AC007592_20 F12K11.6 [Arabidopsis
MDSTATVASDRLSQLNSFEETMTGVKGLVDSGIKEVPAMFREPPAILASRKPPLALQFTIPTIDLNGGVVYYKNQDSVTRRSMVEKIGDAAEKWGFFQVVNHGIPLDVLEKVKEGIRAFHEQDAELKKRFYSRDHTRKMVYYSNLDLFTAMKASWRDTMCAYMAPDPPTSEDLPEVCGEIMMEYAKEIMNLGELIFELLSEALGLNNSNHLKDMDCSKSLVLFGQYYPPCPQPDHTLGLSKHTDFSFLTIVLQGNLGGLQVLHDKQYWIDIPPVPGALVVNLGDLLQLISNGKFISVEHRVIANRAAEPRISVPCFFSTVMRESHRVYGPIKELLSEQNPPKYRDTTISEFASMYASKEINTSALLRLEI

SEQ ID NO: 81932 - protein, 349 aa, Arabidopsis thaliana
  peptide (1)..(349): Ceres Seq. ID no. 12662148
  misc_feature (197)..(298): Pfam Name: 2OG-Fe(II) oxygenase superfamily Pfam Description: 2OG-Fe(II) oxygenase superfamily
  misc_feature (1)..(349): Homolog of NCBI NO: 15233096 NR Description: 1-aminocyclopropane-1-carboxylate oxidase-like
  misc_feature (1)..(349): Homolog of NCBI NO: 15218795 NR Description: putative 1-aminocyclopropane-1-carboxylate
  misc_feature (1)..(349): Homolog of NCBI NO: 30679748 NR Description: 2-oxoglutarate-dependent dioxygenase, putative thaliana] >gi|30102640|gb|AAP21238.1| At1g06620 [Arabidopsis
  misc_feature (1)..(344): Homolog of NCBI NO: 9280671 NR Description: F21B7.3 [Arabidopsis thaliana]
  misc_feature (1)..(349): Homolog of NCBI NO: 15218794 NR Description: putative 1-aminocyclopropane-1-carboxylate protein id: At1g03400.1, supported by cDNA: gi_15146295
  misc_feature (1)..(164): Homolog of NCBI NO: 25406927 NR Description: protein F12K11.6 [imported] - Arabidopsis >gi|6692693|gb|AAF24827.1|AC007592_20 F12K11.6 [Arabidopsis
  misc_feature (158)..(248): Homolog of NCBI NO: 25406927 NR Description: protein F12K11.6 [imported] - Arabidopsis >gi|6692693|gb|AAF24827.1|AC007592_20 F12K11.6 [Arabidopsis
  misc_feature (264)..(349): Homolog of NCBI NO: 25406927 NR Description: protein F12K11.6 [imported] - Arabidopsis >gi|6692693|gb|AAF24827.1|AC007592_20 F12K11.6 [Arabidopsis
  misc_feature (255)..(347): Homolog of NCBI NO: 25406927 NR Description: protein F12K11.6 [imported] - Arabidopsis >gi|6692693|gb|AAF24827.1|AC007592_20 F12K11.6 [Arabidopsis
  misc_feature (266)..(345): Homolog of NCBI NO: 25406927 NR Description: protein F12K11.6 [imported] - Arabidopsis >gi|6692693|gb|AAF24827.1|AC007592_20 F12K11.6 [Arabidopsis
MTGVKGLVDSGIKEVPAMFREPPAILASRKPPLALQFTIPTIDLNGGVVYYKNQDSVTRRSMVEKIGDAAEKWGFFQVVNHGIPLDVLEKVKEGIRAFHEQDAELKKRFYSRDHTRKMVYYSNLDLFTAMKASWRDTMCAYMAPDPPTSEDLPEVCGEIMMEYAKEIMNLGELIFELLSEALGLNNSNHLKDMDCSKSLVLFGQYYPPCPQPDHTLGLSKHTDFSFLTIVLQGNLGGLQVLHDKQYWIDIPPVPGALVVNLGDLLQLISNGKFISVEHRVIANRAAEPRISVPCFFSTVMRESHRVYGPIKELLSEQNPPKYRDTTISEFASMYASKEINTSALLRLEI

SEQ ID NO: 81933 - protein, 332 aa, Arabidopsis thaliana
  peptide (1)..(332): Ceres Seq. ID no. 12662149
  misc_feature (180)..(281): Pfam Name: 2OG-Fe(II) oxygenase superfamily Pfam Description: 2OG-Fe(II) oxygenase superfamily
  misc_feature (1)..(332): Homolog of NCBI NO: 15233096 NR Description: 1-aminocyclopropane-1-carboxylate oxidase-like
  misc_feature (1)..(332): Homolog of NCBI NO: 15218795 NR Description: putative 1-aminocyclopropane-1-carboxylate
  misc_feature (1)..(332): Homolog of NCBI NO: 30679748 NR Description: 2-oxoglutarate-dependent dioxygenase, putative thaliana] >gi|30102640|gb|AAP21238.1| At1g06620 [Arabidopsis
  misc_feature (1)..(327): Homolog of NCBI NO: 9280671 NR Description: F21B7.3 [Arabidopsis thaliana]
  misc_feature (1)..(332): Homolog of NCBI NO: 15218794 NR Description: putative 1-aminocyclopropane-1-carboxylate protein id: At1g03400.1, supported by cDNA: gi_15146295
  misc_feature (1)..(147): Homolog of NCBI NO: 25406927 NR Description: protein F12K11.6 [imported] - Arabidopsis >gi|6692693|gb|AAF24827.1|AC007592_20 F12K11.6 [Arabidopsis
  misc_feature (141)..(231): Homolog of NCBI NO: 25406927 NR Description: protein F12K11.6 [imported] - Arabidopsis >gi|6692693|gb|AAF24827.1|AC007592_20 F12K11.6 [Arabidopsis
  misc_feature (247)..(332): Homolog of NCBI NO: 25406927 NR Description: protein F12K11.6 [imported] - Arabidopsis >gi|6692693|gb|AAF24827.1|AC007592_20 F12K11.6 [Arabidopsis
  misc_feature (238)..(330): Homolog of NCBI NO: 25406927 NR Description: protein F12K11.6 [imported] - Arabidopsis >gi|6692693|gb|AAF24827.1|AC007592_20 F12K11.6 [Arabidopsis
  misc_feature (249)..(328): Homolog of NCBI NO: 25406927 NR Description: protein F12K11.6 [imported] - Arabidopsis >gi|6692693|gb|AAF24827.1|AC007592_20 F12K11.6 [Arabidopsis
MFREPPAILASRKPPLALQFTIPTIDLNGGVVYYKNQDSVTRRSMVEKIGDAAEKWGFFQVVNHGIPLDVLEKVKEGIRAFHEQDAELKKRFYSRDHTRKMVYYSNLDLFTAMKASWRDTMCAYMAPDPPTSEDLPEVCGEIMMEYAKEIMNLGELIFELLSEALGLNNSNHLKDMDCSKSLVLFGQYYPPCPQPDHTLGLSKHTDFSFLTIVLQGNLGGLQVLHDKQYWIDIPPVPGALVVNLGDLLQLISNGKFISVEHRVIANRAAEPRISVPCFFSTVMRESHRVYGPIKELLSEQNPPKYRDTTISEFASMYASKEINTSALLRLEI

SEQ ID NO: 81934 - DNA, 1314 bp, Arabidopsis thaliana
  misc_feature (1)..(1314): Ceres Seq. ID no. 12662175
  misc_feature: MA Experiment ID: 20000355 Result: Up-regulated in Transcription
  misc_feature: MA Experiment 20000355 PARAMETER Experiment Name: At_Siliques_Sub_P Parameter: Age (day) Value: 21
  misc_feature: MA Experiment 20000355 PARAMETER Experiment Name: At_Siliques_Sub_P Parameter: Organism Value: A. thaliana
  misc_feature: MA Experiment 20000355 PARAMETER Experiment Name: At_Siliques_Sub_P Parameter: Plant Line Value: WS
  misc_feature: MA Experiment 20000355 PARAMETER Experiment Name: At_Siliques_Sub_P Parameter: Tissue Value: Less Than 5mm Siliques vs. Whole Plant
atggcctctctattctcttcagttctcttgtctctttgtttactctcttcactttttctctcaaatgcaaacgctaagccaaaactaggcttcaccgcggatctaatccaccgtgattctcctaaatcgccgttctataacccgatggaaacctcttcccagcgtctacgaaacgcgatccaccgatccgttaaccgtgttttccatttcactgaaaaggataacacaccacaaccacagattgacctcacctcaaatagcggtgaatatctcatgaacgtatccattggaacacctcctttcccgatcatggccatcgccgacaccggaagtgatctcctctggacgcagtgcgcaccatgcgatgattgttacactcaagttgatcctctctttgaccctaaaacgtcttccacatacaaagacgtttcttgctcctcaagtcaatgtactgccctagaaaatcaagcctcttgttccacaaatgacaacacttgttcttactcattgtcttacggggataactcatacacaaagggtaacatcgccgtggataccttaacgctcggctccagcgatacccgccctatgcagcttaagaatattattatcggttgtggtcacaacaacgctggaacgtttaacaagaaaggctctggaatcgtcggactaggtggtggtccggtttcgcttatcaagcaacttggcgactccatcgacggtaaattctcatactgcttggttcctctaacttccaaaaaggatcaaacgagtaaaatcaacttcggaaccaatgccatcgtgtcgggatcaggagttgtctcaactcctctgatcgcaaaggcgtctcaagagaccttctattacctaaccctaaaatccattagcgtgggaagcaagcaaatccaatactcaggctcagattctgaaagcagcgagggaaacatcatcatcgattcaggcacaactttaacgttattaccgactgaattttactccgagctcgaggatgcggttgcatcctctatcgatgctgagaagaagcaagatccacaaagcggtttgagtctatgttacagtgcaaccggagatctaaaagttccagtcattactatgcattttgatggagccgatgtgaagcttgactcctccaatgcctttgtacaagtctcggaggatttggtttgctttgccttccgcggaagcccgagtttctccatatacggtaatgtggcgcagatgaactttcttgttggatacgacactgtttccaaaacggtgtcatttaagccaacagattgtgcaaagatgtag

SEQ ID NO: 81935 - protein, 437 aa, Arabidopsis thaliana
  peptide (1)..(437): Ceres Seq. ID no. 12662176
  misc_feature (50)..(432): Pfam Name: Eukaryotic aspartyl protease Pfam Description: Eukaryotic aspartyl protease
  misc_feature (1)..(437): Homolog of NCBI NO: 15242803 NR Description: putative protein; protein id: At5g33340.1
  misc_feature (1)..(437): Homolog of NCBI NO: 15217764 NR Description: hypothetical protein; protein id: At1g64830.1
  misc_feature (11)..(435): Homolog of NCBI NO: 15222357 NR Description: chloroplast nucleoid DNA binding protein, protein id: At1g31450.1 [Arabidopsis thaliana]
  misc_feature (6)..(435): Homolog of NCBI NO: 30686482 NR Description: chloroplast nucleoid DNA binding protein -related
  misc_feature (80)..(437): Homolog of NCBI NO: 38344829 NR Description: OSJNBa0064H22.10 [Oryza sativa (japonica
  misc_feature (27)..(437): Homolog of NCBI NO: 30678047 NR Description: chloroplast nucleoid DNA binding protein -related
  misc_feature (30)..(435): Homolog of NCBI NO: 34906140 NR Description: P0509B06.7 [Oryza sativa (japonica
  misc_feature (14)..(435): Homolog of NCBI NO: 15223368 NR Description: chloroplast nucleoid DNA binding protein, protein id: At1g01300.1, supported by cDNA: 7567. [Arabidopsis
  misc_feature (14)..(435): Homolog of NCBI NO: 21594980 NR Description: chloroplast nucleoid DNA binding protein,
  misc_feature (83)..(434): Homolog of NCBI NO: 15228618 NR Description: putative protein; protein id: At3g61820.1, by cDNA: gi_14532549 [Arabidopsis thaliana]
MASLFSSVLLSLCLLSSLFLSNANAKPKLGFTADLIHRDSPKSPFYNPMETSSQRLRNAIHRSVNRVFHFTEKDNTPQPQIDLTSNSGEYLMNVSIGTPPFPIMAIADTGSDLLWTQCAPCDDCYTQVDPLFDPKTSSTYKDVSCSSSQCTALENQASCSTNDNTCSYSLSYGDNSYTKGNIAVDTLTLGSSDTRPMQLKNIIIGCGHNNAGTFNKKGSGIVGLGGGPVSLIKQLGDSIDGKFSYCLVPLTSKKDQTSKINFGTNAIVSGSGVVSTPLIAKASQETFYYLTLKSISVGSKQIQYSGSDSESSEGNIIIDSGTTLTLLPTEFYSELEDAVASSIDAEKKQDPQSGLSLCYSATGDLKVPVITMHFDGADVKLDSSNAFVQVSEDLVCFAFRGSPSFSIYGNVAQMNFLVGYDTVSKTVSFKPTDCAKM

SEQ ID NO: 81936 - protein, 389 aa, Arabidopsis thaliana
  peptide (1)..(389): Ceres Seq. ID no. 12662177
  misc_feature (2)..(384): Pfam Name: Eukaryotic aspartyl protease Pfam Description: Eukaryotic aspartyl protease
  misc_feature (1)..(389): Homolog of NCBI NO: 15242803 NR Description: putative protein; protein id: At5g33340.1
  misc_feature (1)..(389): Homolog of NCBI NO: 15217764 NR Description: hypothetical protein; protein id: At1g64830.1
  misc_feature (1)..(387): Homolog of NCBI NO: 15222357 NR Description: chloroplast nucleoid DNA binding protein, protein id: At1g31450.1 [Arabidopsis thaliana]
  misc_feature (1)..(387): Homolog of NCBI NO: 30686482 NR Description: chloroplast nucleoid DNA binding protein -related
  misc_feature (32)..(389): Homolog of NCBI NO: 38344829 NR Description: OSJNBa0064H22.10 [Oryza sativa (japonica
  misc_feature (1)..(389): Homolog of NCBI NO: 30678047 NR Description: chloroplast nucleoid DNA binding protein -related
  misc_feature (1)..(387): Homolog of NCBI NO: 34906140 NR Description: P0509B06.7 [Oryza sativa (japonica
  misc_feature (1)..(387): Homolog of NCBI NO: 15223368 NR Description: chloroplast nucleoid DNA binding protein, protein id: At1g01300.1, supported by cDNA: 7567. [Arabidopsis
  misc_feature (1)..(387): Homolog of NCBI NO: 21594980 NR Description: chloroplast nucleoid DNA binding protein,
  misc_feature (35)..(386): Homolog of NCBI NO: 15228618 NR Description: putative protein; protein id: At3g61820.1, by cDNA: gi_14532549 [Arabidopsis thaliana]
METSSQRLRNAIHRSVNRVFHFTEKDNTPQPQIDLTSNSGEYLMNVSIGTPPFPIMAIADTGSDLLWTQCAPCDDCYTQVDPLFDPKTSSTYKDVSCSSSQCTALENQASCSTNDNTCSYSLSYGDNSYTKGNIAVDTLTLGSSDTRPMQLKNIIIGCGHNNAGTFNKKGSGIVGLGGGPVSLIKQLGDSIDGKFSYCLVPLTSKKDQTSKINFGTNAIVSGSGVVSTPLIAKASQETFYYLTLKSISVGSKQIQYSGSDSESSEGNIIIDSGTTLTLLPTEFYSELEDAVASSIDAEKKQDPQSGLSLCYSATGDLKVPVITMHFDGADVKLDSSNAFVQVSEDLVCFAFRGSPSFSIYGNVAQMNFLVGYDTVSKTVSFKPTDCAKM

SEQ ID NO: 81937 - protein, 346 aa, Arabidopsis thaliana
  peptide (1)..(346): Ceres Seq. ID no. 12662178
  misc_feature (1)..(341): Pfam Name: Eukaryotic aspartyl protease Pfam Description: Eukaryotic aspartyl protease
  misc_feature (1)..(346): Homolog of NCBI NO: 15242803 NR Description: putative protein; protein id: At5g33340.1
  misc_feature (1)..(346): Homolog of NCBI NO: 15217764 NR Description: hypothetical protein; protein id: At1g64830.1
  misc_feature (1)..(344): Homolog of NCBI NO: 15222357 NR Description: chloroplast nucleoid DNA binding protein, protein id: At1g31450.1 [Arabidopsis thaliana]
  misc_feature (1)..(344): Homolog of NCBI NO: 30686482 NR Description: chloroplast nucleoid DNA binding protein -related
  misc_feature (1)..(346): Homolog of NCBI NO: 38344829 NR Description: OSJNBa0064H22.10 [Oryza sativa (japonica
  misc_feature (1)..(346): Homolog of NCBI NO: 30678047 NR Description: chloroplast nucleoid DNA binding protein -related
  misc_feature (1)..(344): Homolog of NCBI NO: 34906140 NR Description: P0509B06.7 [Oryza sativa (japonica
  misc_feature (1)..(344): Homolog of NCBI NO: 15223368 NR Description: chloroplast nucleoid DNA binding protein, protein id: At1g01300.1, supported by cDNA: 7567. [Arabidopsis
  misc_feature (1)..(344): Homolog of NCBI NO: 21594980 NR Description: chloroplast nucleoid DNA binding protein,
  misc_feature (1)..(343): Homolog of NCBI NO: 15228618 NR Description: putative protein; protein id: At3g61820.1, by cDNA: gi_14532549 [Arabidopsis thaliana]
MNVSIGTPPFPIMAIADTGSDLLWTQCAPCDDCYTQVDPLFDPKTSSTYKDVSCSSSQCTALENQASCSTNDNTCSYSLSYGDNSYTKGNIAVDTLTLGSSDTRPMQLKNIIIGCGHNNAGTFNKKGSGIVGLGGGPVSLIKQLGDSIDGKFSYCLVPLTSKKDQTSKINFGTNAIVSGSGVVSTPLIAKASQETFYYLTLKSISVGSKQIQYSGSDSESSEGNIIIDSGTTLTLLPTEFYSELEDAVASSIDAEKKQDPQSGLSLCYSATGDLKVPVITMHFDGADVKLDSSNAFVQVSEDLVCFAFRGSPSFSIYGNVAQMNFLVGYDTVSKTVSFKPTDCAKM

SEQ ID NO: 81938 - DNA, 970 bp, Arabidopsis thaliana
  misc_feature (1)..(970): Ceres Seq. ID no. 12662411
  misc_feature: MA Experiment ID: 20000234 Result: Up-regulated in Transcription
  misc_feature: MA Experiment 20000234 PARAMETER Experiment Name: At_Siliques_P Parameter: Age (day) Value: 21
  misc_feature: MA Experiment 20000234 PARAMETER Experiment Name: At_Siliques_P Parameter: Organism Value: A. thaliana
  misc_feature: MA Experiment 20000234 PARAMETER Experiment Name: At_Siliques_P Parameter: Plant Line Value: WS
  misc_feature: MA Experiment 20000234 PARAMETER Experiment Name: At_Siliques_P Parameter: Tissue Value: Less Than 5mm Siliques vs. Whole Plant
  misc_feature: MA Experiment ID: 20000235 Result: Up-regulated in Transcription
  misc_feature: MA Experiment 20000235 PARAMETER Experiment Name: At_Siliques_P Parameter: Age (day) Value: 21
  misc_feature: MA Experiment 20000235 PARAMETER Experiment Name: At_Siliques_P Parameter: Organism Value: A. thaliana
  misc_feature: MA Experiment 20000235 PARAMETER Experiment Name: At_Siliques_P Parameter: Plant Line Value: WS
  misc_feature: MA Experiment 20000235 PARAMETER Experiment Name: At_Siliques_P Parameter: Tissue Value: 5-10mm Siliques vs. Whole Plant
  misc_feature: MA Experiment ID: 20000264 Result: Up-regulated in Transcription
  misc_feature: MA Experiment 20000264 PARAMETER Experiment Name: At_Open_Flower_P Parameter: Age (day) Value: 21
  misc_feature: MA Experiment 20000264 PARAMETER Experiment Name: At_Open_Flower_P Parameter: Plant Line Value: WS
  misc_feature: MA Experiment 20000264 PARAMETER Experiment Name: At_Open_Flower_P Parameter: Tissue Value: Open Flower vs. Whole Plant
ttctcaacacaacactaaagacaattgtaccaaccacacaaccacaagagagagaaaagtgagaatgggaaagagagcaactactagtgtgaggagagaagagttaaacagaggagcttggactgatcatgaagacaagatccttagagattacatcaccactcacggcgaaggcaaatggagcactctccctaaccaagctggtctcaagaggtgtggcaaaagctgtagacttcggtggaagaactacctaagaccggggataaagcgcggtaacatctcatctgatgaagaagaactcataatccgtctccataatcttcttggaaacagatggtcgttgatagctgggaggcttccaggccgaacagacaatgaaataaagaatcattggaactcaaacctccgcaaaagacttcccaaaactcaaaccaagcaaccaaaacgtataaaacattcgacgaacaacgagaataatgtatgtgttatacgtacaaaggcgattaggtgctcaaagactcttctcttctcggatctctctcttcagaagaagagtagtactagtccactacctctgaaagaacaagagatggatcaaggtggatcttcgttgatgggagatctcgaattcgatttcgataggatccattcggagtttcacttcccggatttgatggattttgatggtttggactgtggaaacgttacatctcttgtttcatctaacgagattttgggagagttggttcctgctcaaggtaatctcgatctcaatagacctttcacttcttgtcatcatcgtggcgacgatgaagattggctccgagacttcacttgttgagcctatattgcaaaaacctacgttaatacatatttctctatacggacaaaagtatatctgtatttgtctgaacgcttctaattactaacttactaaggagaccaagaaatacaaataattatacgatcc

SEQ ID NO: 81939 - protein, 279 aa, Arabidopsis thaliana
  peptide (1)..(279): Ceres Seq. ID no. 12662412
  misc_feature (37)..(84): Pfam Name: Myb-like DNA-binding domain Pfam Description: Myb-like DNA-binding domain
  misc_feature (22)..(279): Homolog of NCBI NO: 15238535 NR Description: myb family transcription factor; protein id:
  misc_feature (22)..(224): Homolog of NCBI NO: 13346192 NR Description: GHMYB38 [Gossypium hirsutum]
  misc_feature (22)..(175): Homolog of NCBI NO: 13346186 NR Description: GHMYB10 [Gossypium hirsutum]
  misc_feature (22)..(175): Homolog of NCBI NO: 13346190 NR Description: GHMYB36 [Gossypium hirsutum]
  misc_feature (22)..(159): Homolog of NCBI NO: 7446179 NR Description: myb-related protein 3 - rice
  misc_feature (22)..(144): Homolog of NCBI NO: 4138299 NR Description: transcriptional activator [Oryza sativa (indica
  misc_feature (22)..(144): Homolog of NCBI NO: 38707398 NR Description: Myb protein [Oryza sativa (japonica
  misc_feature (22)..(144): Homolog of NCBI NO: 38707410 NR Description: Myb protein [Oryza sativa (indica cultivar-group)]
  misc_feature (22)..(144): Homolog of NCBI NO: 38707418 NR Description: Myb protein [Oryza rufipogon]
  misc_feature (22)..(144): Homolog of NCBI NO: 38707416 NR Description: Myb protein [Oryza rufipogon]
SQHNTKDNCTNHTTTRERKVRMGKRATTSVRREELNRGAWTDHEDKILRDYITTHGEGKWSTLPNQAGLKRCGKSCRLRWKNYLRPGIKRGNISSDEEELIIRLHNLLGNRWSLIAGRLPGRTDNEIKNHWNSNLRKRLPKTQTKQPKRIKHSTNNENNVCVIRTKAIRCSKTLLFSDLSLQKKSSTSPLPLKEQEMDQGGSSLMGDLEFDFDRIHSEFHFPDLMDFDGLDCGNVTSLVSSNEILGELVPAQGNLDLNRPFTSCHHRGDDEDWLRDFTC

SEQ ID NO: 81940 - protein, 258 aa, Arabidopsis thaliana
  peptide (1)..(258): Ceres Seq. ID no. 12662413
  misc_feature (16)..(63): Pfam Name: Myb-like DNA-binding domain Pfam Description: Myb-like DNA-binding domain
  misc_feature (1)..(258): Homolog of NCBI NO: 15238535 NR Description: myb family transcription factor; protein id:
  misc_feature (1)..(203): Homolog of NCBI NO: 13346192 NR Description: GHMYB38 [Gossypium hirsutum]
  misc_feature (1)..(154): Homolog of NCBI NO: 13346186 NR Description: GHMYB10 [Gossypium hirsutum]
  misc_feature (1)..(154): Homolog of NCBI NO: 13346190 NR Description: GHMYB36 [Gossypium hirsutum]
  misc_feature (1)..(138): Homolog of NCBI NO: 7446179 NR Description: myb-related protein 3 - rice
  misc_feature (1)..(123): Homolog of NCBI NO: 4138299 NR Description: transcriptional activator [Oryza sativa (indica
  misc_feature (1)..(123): Homolog of NCBI NO: 38707398 NR Description: Myb protein [Oryza sativa (japonica
  misc_feature (1)..(123): Homolog of NCBI NO: 38707410 NR Description: Myb protein [Oryza sativa (indica cultivar-group)]
  misc_feature (1)..(123): Homolog of NCBI NO: 38707418 NR Description: Myb protein [Oryza rufipogon]
  misc_feature (1)..(123): Homolog of NCBI NO: 38707416 NR Description: Myb protein [Oryza rufipogon]
MGKRATTSVRREELNRGAWTDHEDKILRDYITTHGEGKWSTLPNQAGLKRCGKSCRLRWKNYLRPGIKRGNISSDEEELIIRLHNLLGNRWSLIAGRLPGRTDNEIKNHWNSNLRKRLPKTQTKQPKRIKHSTNNENNVCVIRTKAIRCSKTLLFSDLSLQKKSSTSPLPLKEQEMDQGGSSLMGDLEFDFDRIHSEFHFPDLMDFDGLDCGNVTSLVSSNEILGELVPAQGNLDLNRPFTSCHHRGDDEDWLRDFTC

SEQ ID NO: 81941 - DNA, 1302 bp, Arabidopsis thaliana
  misc_feature (1)..(1302): Ceres Seq. ID no. 12662449
  misc_feature: MA Experiment ID: 20001909 Result: Up-regulated in Transcription
  misc_feature: MA Experiment 20001909 PARAMETER Experiment Name: At_Drought_Reproduction_P Parameter: Age (day) Value: 35
  misc_feature: MA Experiment 20001909 PARAMETER Experiment Name: At_Drought_Reproduction_P Parameter: Organism Value: A. thaliana
  misc_feature: MA Experiment 20001909 PARAMETER Experiment Name: At_Drought_Reproduction_P Parameter: Plant Line Value: WS
  misc_feature: MA Experiment 20001909 PARAMETER Experiment Name: At_Drought_Reproduction_P Parameter: Timepoint (day) Value: 5
  misc_feature: MA Experiment 20001909 PARAMETER Experiment Name: At_Drought_Reproduction_P Parameter: Tissue Value: Flowers
  misc_feature: MA Experiment 20001909 PARAMETER Experiment Name: At_Drought_Reproduction_P Parameter: Treatment Value: Drought vs. No Drought
atggttgttatctcttccaaggaagcagctaaacaagttctaaagtctcgcgatctagagacatgctcccgacctaagctggttgcgaacgggttgtttactcgcaacttcaaagacattgctttcgctcagtatggtgaggactggcgagagatgaaaaagctcgtggggcttgagctcttcaatccaaagaagcacaaatttttcaggtatatcagagaggaagagggtgacttgctggtcaagaaactatccaaatcttctcaaacacaaactttagtggatttgagaaaagcctttttctccttcaccgcgggtatcatatttagagtctcctttggacagaacttccgcgagtgcgatttcatcgatatggacagacttgaagagttggtgcaagagtcagagaccaacgtattcagcttcgcattcactgacttcttcccaacgggtctcggttggcttgtagaccggatctccggtcaacattcgaggatcgagaaagccttttcaaaactcaccaagttctttcaacatgtaatcgatgaggagttgaagattggacaatcccaagatcactcaaacctcgtcagttccatgttggatatgatcaatagatccactgaatacggttctttcaagatcacttctgatcatctcatagcaatgatgacggacatagttttggggggagtgaacgcaggaacaatcacaatgatatggacgatgacagagctaaccagacatccaagagtgatgaagaaactccgagaagagattcgagcaacacttggacccaacaaagagagaatcacagaagaagatctagagaaagttgagtacttgaagttggtgatcaaagaaactttcagattacatccaccaggtcctttcttgctcccaagacaagtaatgtccgacatagagattcaaggctaccacattcccaagaacgcacatatcaagatcagcacttacgccataggacgtgatcccaaatgttggactaatcctgaagaattcaatcctgagaggtttgcaaatacctcaatcaactacaaaggtcagcattacgagcttttaccctttggagccggtcgtaggagctgtcctggtatgactttgggaatcaccattcttgagctaggccttcttaacattctttactacttcgattggagtttacccaatggaatgaccattaaagacattgacatggaagaagatggagctttgaccatcgccaagaaagtccctcttgagctcatacctacgctcccagcatcactatgcattaaataa

SEQ ID NO: 81942 - protein, 433 aa, Arabidopsis thaliana
  peptide (1)..(433): Ceres Seq. ID no. 12662450
  misc_feature (1)..(422): Pfam Name: Cytochrome P450 Pfam Description: Cytochrome P450
  misc_feature (1)..(433): Homolog of NCBI NO: 13878369 NR Description: CYTOCHROME P450 71B8
  misc_feature (1)..(433): Homolog of NCBI NO: 22327366 NR Description: similar to cytochrome p450 family; protein id:
  misc_feature (1)..(427): Homolog of NCBI NO: 15231786 NR Description: cytochrome p450 family; protein id: At3g53300.1, by cDNA: gi_15810490 [Arabidopsis thaliana] Cytochrome P450 71B31 >gi|11249493|pir||T46176 probable
  misc_feature (1)..(427): Homolog of NCBI NO: 15810491 NR Description: putative cytochrome P450 protein [Arabidopsis
  misc_feature (1)..(426): Homolog of NCBI NO: 15231524 NR Description: cytochrome p450 family; protein id: At3g26190.1 thaliana] >gi|13878385|sp|Q9LTM2|C72L_ARATH Cytochrome P450 71B21
  misc_feature (1)..(425): Homolog of NCBI NO: 15231525 NR Description: cytochrome p450 family; protein id: At3g26200.1, by cDNA: gi_13430717 [Arabidopsis thaliana] Cytochrome P450 71B22 >gi|11994439|dbj|BAB02441.1| cytochrome
  misc_feature (1)..(425): Homolog of NCBI NO: 30923413 NR Description: Cytochrome P450 71B38
  misc_feature (1)..(425): Homolog of NCBI NO: 15229913 NR Description: cytochrome p450 family; protein id: At3g44250.1
  misc_feature (1)..(426): Homolog of NCBI NO: 15231782 NR Description: cytochrome P450 monooxygenase; protein id: supported by cDNA: gi_3164131 [Arabidopsis thaliana]
  misc_feature (1)..(426): Homolog of NCBI NO: 15724230 NR Description: AT3g53280/T4D2_200 [Arabidopsis thaliana]
MVVISSKEAAKQVLKSRDLETCSRPKLVANGLFTRNFKDIAFAQYGEDWREMKKLVGLELFNPKKHKFFRYIREEEGDLLVKKLSKSSQTQTLVDLRKAFFSFTAGIIFRVSFGQNFRECDFIDMDRLEELVQESETNVFSFAFTDFFPTGLGWLVDRISGQHSRIEKAFSKLTKFFQHVIDEELKIGQSQDHSNLVSSMLDMINRSTEYGSFKITSDHLIAMMTDIVLGGVNAGTITMIWTMTELTRHPRVMKKLREEIRATLGPNKERITEEDLEKVEYLKLVIKETFRLHPPGPFLLPRQVMSDIEIQGYHIPKNAHIKISTYAIGRDPKCWTNPEEFNPERFANTSINYKGQHYELLPFGAGRRSCPGMTLGITILELGLLNILYYFDWSLPNGMTIKDIDMEEDGALTIAKKVPLELIPTLPASLCIK

SEQ ID NO: 81943 - protein, 382 aa, Arabidopsis thaliana
  peptide (1)..(382): Ceres Seq. ID no. 12662451
  misc_feature (1)..(371): Pfam Name: Cytochrome P450 Pfam Description: Cytochrome P450
  misc_feature (1)..(382): Homolog of NCBI NO: 13878369 NR Description: CYTOCHROME P450 71B8
  misc_feature (1)..(382): Homolog of NCBI NO: 22327366 NR Description: similar to cytochrome p450 family; protein id:
  misc_feature (1)..(376): Homolog of NCBI NO: 15231786 NR Description: cytochrome p450 family; protein id: At3g53300.1, by cDNA: gi_15810490 [Arabidopsis thaliana] Cytochrome P450 71B31 >gi|11249493|pir||T46176 probable
  misc_feature (1)..(376): Homolog of NCBI NO: 15810491 NR Description: putative cytochrome P450 protein [Arabidopsis
  misc_feature (1)..(375): Homolog of NCBI NO: 15231524 NR Description: cytochrome p450 family; protein id: At3g26190.1 thaliana] >gi|13878385|sp|Q9LTM2|C72L_ARATH Cytochrome P450 71B21
  misc_feature (1)..(374): Homolog of NCBI NO: 15231525 NR Description: cytochrome p450 family; protein id: At3g26200.1, by cDNA: gi_13430717 [Arabidopsis thaliana] Cytochrome P450 71B22 >gi|11994439|dbj|BAB02441.1| cytochrome
  misc_feature (1)..(374): Homolog of NCBI NO: 30923413 NR Description: Cytochrome P450 71B38
  misc_feature (1)..(374): Homolog of NCBI NO: 15229913 NR Description: cytochrome p450 family; protein id: At3g44250.1
  misc_feature (1)..(375): Homolog of NCBI NO: 15231782 NR Description: cytochrome P450 monooxygenase; protein id: supported by cDNA: gi_3164131 [Arabidopsis thaliana]
  misc_feature (1)..(375): Homolog of NCBI NO: 15724230 NR Description: AT3g53280/T4D2_200 [Arabidopsis thaliana]
MKKLVGLELFNPKKHKFFRYIREEEGDLLVKKLSKSSQTQTLVDLRKAFFSFTAGIIFRVSFGQNFRECDFIDMDRLEELVQESETNVFSFAFTDFFPTGLGWLVDRISGQHSRIEKAFSKLTKFFQHVIDEELKIGQSQDHSNLVSSMLDMINRSTEYGSFKITSDHLIAMMTDIVLGGVNAGTITMIWTMTELTRHPRVMKKLREEIRATLGPNKERITEEDLEKVEYLKLVIKETFRLHPPGPFLLPRQVMSDIEIQGYHIPKNAHIKISTYAIGRDPKCWTNPEEFNPERFANTSINYKGQHYELLPFGAGRRSCPGMTLGITILELGLLNILYYFDWSLPNGMTIKDIDMEEDGALTIAKKVPLELIPTLPASLCIK

SEQ ID NO: 81944 - protein, 309 aa, Arabidopsis thaliana
  peptide (1)..(309): Ceres Seq. ID no. 12662452
  misc_feature (1)..(298): Pfam Name: Cytochrome P450 Pfam Description: Cytochrome P450
  misc_feature (1)..(309): Homolog of NCBI NO: 13878369 NR Description: CYTOCHROME P450 71B8
  misc_feature (1)..(309): Homolog of NCBI NO: 22327366 NR Description: similar to cytochrome p450 family; protein id:
  misc_feature (1)..(303): Homolog of NCBI NO: 15231786 NR Description: cytochrome p450 family; protein id: At3g53300.1, by cDNA: gi_15810490 [Arabidopsis thaliana] Cytochrome P450 71B31 >gi|11249493|pir||T46176 probable
  misc_feature (1)..(303): Homolog of NCBI NO: 15810491 NR Description: putative cytochrome P450 protein [Arabidopsis
  misc_feature (1)..(302): Homolog of NCBI NO: 15231524 NR Description: cytochrome p450 family; protein id: At3g26190.1 thaliana] >gi|13878385|sp|Q9LTM2|C72L_ARATH Cytochrome P450 71B21
  misc_feature (1)..(301): Homolog of NCBI NO: 15231525 NR Description: cytochrome p450 family; protein id: At3g26200.1, by cDNA: gi_13430717 [Arabidopsis thaliana] Cytochrome P450 71B22 >gi|11994439|dbj|BAB02441.1| cytochrome
  misc_feature (1)..(301): Homolog of NCBI NO: 30923413 NR Description: Cytochrome P450 71B38
  misc_feature (1)..(301): Homolog of NCBI NO: 15229913 NR Description: cytochrome p450 family; protein id: At3g44250.1
  misc_feature (1)..(302): Homolog of NCBI NO: 15231782 NR Description: cytochrome P450 monooxygenase; protein id: supported by cDNA: gi_3164131 [Arabidopsis thaliana]
  misc_feature (1)..(302): Homolog of NCBI NO: 15724230 NR Description: AT3g53280/T4D2_200 [Arabidopsis thaliana]
MDRLEELVQESETNVFSFAFTDFFPTGLGWLVDRISGQHSRIEKAFSKLTKFFQHVIDEELKIGQSQDHSNLVSSMLDMINRSTEYGSFKITSDHLIAMMTDIVLGGVNAGTITMIWTMTELTRHPRVMKKLREEIRATLGPNKERITEEDLEKVEYLKLVIKETFRLHPPGPFLLPRQVMSDIEIQGYHIPKNAHIKISTYAIGRDPKCWTNPEEFNPERFANTSINYKGQHYELLPFGAGRRSCPGMTLGITILELGLLNILYYFDWSLPNGMTIKDIDMEEDGALTIAKKVPLELIPTLPASLCIK

SEQ ID NO: 81945 - DNA, 1290 bp, Arabidopsis thaliana
  misc_feature (1)..(1290): Ceres Seq. ID no. 12662525
  misc_feature: MA Experiment ID: 20000171 Result: Down-regulated in Transcription
  misc_feature: MA Experiment 20000171 PARAMETER Experiment Name: At_42deg_Heat_P Parameter: Age (day) Value: 14
  misc_feature: MA Experiment 20000171 PARAMETER Experiment Name: At_42deg_Heat_P Parameter: Organism Value: A. thaliana
  misc_feature: MA Experiment 20000171 PARAMETER Experiment Name: At_42deg_Heat_P Parameter: Plant Line Value: WS
  misc_feature: MA Experiment 20000171 PARAMETER Experiment Name: At_42deg_Heat_P Parameter: Temperature (deg C) Value: 42 vs. 22
  misc_feature: MA Experiment 20000171 PARAMETER Experiment Name: At_42deg_Heat_P Parameter: Timepoint (hr) Value: 1
  misc_feature: MA Experiment 20000171 PARAMETER Experiment Name: At_42deg_Heat_P Parameter: Tissue Value: Aerial
  misc_feature: MA Experiment ID: 20000173 Result: Down-regulated in Transcription
  misc_feature: MA Experiment 20000173 PARAMETER Experiment Name: At_42deg_Heat_P Parameter: Age (day) Value: 14
  misc_feature: MA Experiment 20000173 PARAMETER Experiment Name: At_42deg_Heat_P Parameter: Organism Value: A. thaliana
  misc_feature: MA Experiment 20000173 PARAMETER Experiment Name: At_42deg_Heat_P Parameter: Plant Line Value: WS
  misc_feature: MA Experiment 20000173 PARAMETER Experiment Name: At_42deg_Heat_P Parameter: Temperature (deg C) Value: 42 vs. 22
  misc_feature: MA Experiment 20000173 PARAMETER Experiment Name: At_42deg_Heat_P Parameter: Timepoint (hr) Value: 6
  misc_feature: MA Experiment 20000173 PARAMETER Experiment Name: At_42deg_Heat_P Parameter: Tissue Value: Aerial
  misc_feature: MA Experiment ID: 20000182 Result: Up-regulated in Transcription
  misc_feature: MA Experiment 20000182 PARAMETER Experiment Name: At_2mM_SA_P Parameter: Age (day) Value: 14
  misc_feature: MA Experiment 20000182 PARAMETER Experiment Name: At_2mM_SA_P Parameter: Organism Value: A. thaliana
  misc_feature: MA Experiment 20000182 PARAMETER Experiment Name: At_2mM_SA_P Parameter: Plant Line Value: WS
  misc_feature: MA Experiment 20000182 PARAMETER Experiment Name: At_2mM_SA_P Parameter: Timepoint (hr) Value: 6
  misc_feature: MA Experiment 20000182 PARAMETER Experiment Name: At_2mM_SA_P Parameter: Tissue Value: Aerial
  misc_feature: MA Experiment 20000182 PARAMETER Experiment Name: At_2mM_SA_P Parameter: Treatment Value: 2mM SA vs. No Treatment
  misc_feature: MA Experiment ID: 20000184 Result: Down-regulated in Transcription
  misc_feature: MA Experiment 20000184 PARAMETER Experiment Name: At_Shoots__P Parameter: Age (day) Value: 7
  misc_feature: MA Experiment 20000184 PARAMETER Experiment Name: At_Shoots__P Parameter: Tissue Value: Shoots vs. Whole Plant
  misc_feature: MA Experiment ID: 20000211 Result: Up-regulated in Transcription
  misc_feature: MA Experiment 20000211 PARAMETER Experiment Name: At_0.001percent_MeJA__P Parameter: Age (day) Value: 14
  misc_feature: MA Experiment 20000211 PARAMETER Experiment Name: At_0.001percent_MeJA__P Parameter: Organism Value: A. thaliana
  misc_feature: MA Experiment 20000211 PARAMETER Experiment Name: At_0.001percent_MeJA__P Parameter: Plant Line Value: WS
  misc_feature: MA Experiment 20000211 PARAMETER Experiment Name: At_0.001percent_MeJA__P Parameter: Timepoint (hr) Value: 1
  misc_feature: MA Experiment 20000211 PARAMETER Experiment Name: At_0.001percent_MeJA__P Parameter: Tissue Value: Aerial
  misc_feature: MA Experiment 20000211 PARAMETER Experiment Name: At_0.001percent_MeJA__P Parameter: Treatment Value: 0.001percent MeJA vs. No Treatment
  misc_feature: MA Experiment ID: 20000234 Result: Down-regulated in Transcription
  misc_feature: MA Experiment 20000234 PARAMETER Experiment Name: At_Siliques_P Parameter: Age (day) Value: 21
  misc_feature: MA Experiment 20000234 PARAMETER Experiment Name: At_Siliques_P Parameter: Organism Value: A. thaliana
  misc_feature: MA Experiment 20000234 PARAMETER Experiment Name: At_Siliques_P Parameter: Plant Line Value: WS
  misc_feature: MA Experiment 20000234 PARAMETER Experiment Name: At_Siliques_P Parameter: Tissue Value: Less Than 5mm Siliques vs. Whole Plant
  misc_feature: MA Experiment ID: 20000265 Result: Down-regulated in Transcription
  misc_feature: MA Experiment 20000265 PARAMETER Experiment Name: At_Open_Flower_P Parameter: Age (day) Value: 21
  misc_feature: MA Experiment 20000265 PARAMETER Experiment Name: At_Open_Flower_P Parameter: Plant Line Value: WS
  misc_feature: MA Experiment 20000265 PARAMETER Experiment Name: At_Open_Flower_P Parameter: Tissue Value: Closed Flower vs. Whole Plant
  misc_feature: MA Experiment ID: 20000438 Result: Down-regulated in Transcription
  misc_feature: MA Experiment 20000438 PARAMETER Experiment Name: At_Shoots__P Parameter: Age (day) Value: 14
  misc_feature: MA Experiment 20000438 PARAMETER Experiment Name: At_Shoots__P Parameter: Tissue Value: Shoots vs. Whole Plant
  misc_feature: MA Experiment ID: 20000439 Result: Down-regulated in Transcription
  misc_feature: MA Experiment 20000439 PARAMETER Experiment Name: At_Roots__P Parameter: Age (day) Value: 14 vs. 21
  misc_feature: MA Experiment 20000439 PARAMETER Experiment Name: At_Roots__P Parameter: Organism Value: A. thaliana
  misc_feature: MA Experiment 20000439 PARAMETER Experiment Name: At_Roots__P Parameter: Tissue Value: Roots vs. Whole Plant
  misc_feature: MA Experiment ID: 20000527 Result: Down-regulated in Transcription
  misc_feature: MA Experiment 20000527 PARAMETER Experiment Name: At_10percent_PEG_P Parameter: Age (day) Value: 20
  misc_feature: MA Experiment 20000527 PARAMETER Experiment Name: At_10percent_PEG_P Parameter: Organism Value: A. thaliana
  misc_feature: MA Experiment 20000527 PARAMETER Experiment Name: At_10percent_PEG_P Parameter: Plant Line Value: WS
  misc_feature: MA Experiment 20000527 PARAMETER Experiment Name: At_10percent_PEG_P Parameter: Timepoint (day) Value: 20
  misc_feature: MA Experiment 20000527 PARAMETER Experiment Name: At_10percent_PEG_P Parameter: Tissue Value: Whole Plant
  misc_feature: MA Experiment 20000527 PARAMETER Experiment Name: At_10percent_PEG_P Parameter: Treatment Value: 10percent PEG vs. No Treatment
  misc_feature: MA Experiment ID: 20000573 Result: Down-regulated in Transcription
  misc_feature: MA Experiment 20000573 PARAMETER Experiment Name: At_100uM_ABA_Mutants__P Parameter: Organism Value: A. thaliana
  misc_feature: MA Experiment 20000573 PARAMETER Experiment Name: At_100uM_ABA_Mutants__P Parameter: Plant Line Value: CS22 vs. Ler wt
  misc_feature: MA Experiment 20000573 PARAMETER Experiment Name: At_100uM_ABA_Mutants__P Parameter: Timepoint (hr) Value: N/A
  misc_feature: MA Experiment 20000573 PARAMETER Experiment Name: At_100uM_ABA_Mutants__P Parameter: Tissue Value: Whole Plant
  misc_feature: MA Experiment 20000573 PARAMETER Experiment Name: At_100uM_ABA_Mutants__P Parameter: Treatment Value: None
  misc_feature: MA Experiment ID: 20000574 Result: Down-regulated in Transcription
  misc_feature: MA Experiment 20000574 PARAMETER Experiment Name: At_100uM_ABA_Mutants__P Parameter: Organism Value: A. thaliana
  misc_feature: MA Experiment 20000574 PARAMETER Experiment Name: At_100uM_ABA_Mutants__P Parameter: Plant Line Value: CS23 vs. Ler wt
  misc_feature: MA Experiment 20000574 PARAMETER Experiment Name: At_100uM_ABA_Mutants__P Parameter: Timepoint (hr) Value: N/A
  misc_feature: MA Experiment 20000574 PARAMETER Experiment Name: At_100uM_ABA_Mutants__P Parameter: Tissue Value: Whole Plant
  misc_feature: MA Experiment 20000574 PARAMETER Experiment Name: At_100uM_ABA_Mutants__P Parameter: Treatment Value: None
  misc_feature: MA Experiment ID: 20001458 Result: Down-regulated in Transcription
  misc_feature: MA Experiment 20001458 PARAMETER Experiment Name: At_50mM_NH4NO3_L-to-H_P Parameter: Age (day) Value: Undefined
  misc_feature: MA Experiment 20001458 PARAMETER Experiment Name: At_50mM_NH4NO3_L-to-H_P Parameter: Organism Value: Undefined
  misc_feature: MA Experiment 20001458 PARAMETER Experiment Name: At_50mM_NH4NO3_L-to-H_P Parameter: Plant Line Value: Undefined
  misc_feature: MA Experiment 20001458 PARAMETER Experiment Name: At_50mM_NH4NO3_L-to-H_P Parameter: Timepoint (hr) Value: 2
  misc_feature: MA Experiment 20001458 PARAMETER Experiment Name: At_50mM_NH4NO3_L-to-H_P Parameter: Tissue Value: Siliques
  misc_feature: MA Experiment 20001458 PARAMETER Experiment Name: At_50mM_NH4NO3_L-to-H_P Parameter: Treatment Value: 50mM NH4NO3 vs. 100mM Manitol
  misc_feature: MA Experiment ID: 20001757 Result: Down-regulated in Transcription
  misc_feature: MA Experiment 20001757 PARAMETER Experiment Name: At_50mM_NH4NO3_L-to-H_P Parameter: Timepoint (hr) Value: 6
  misc_feature: MA Experiment 20001757 PARAMETER Experiment Name: At_50mM_NH4NO3_L-to-H_P Parameter: Tissue Value: Leaf
  misc_feature: MA Experiment 20001757 PARAMETER Experiment Name: At_50mM_NH4NO3_L-to-H_P Parameter: Treatment Value: 50mM NH4NO3 vs 100mM Mannitol
  misc_feature: MA Experiment ID: 20001906 Result: Up-regulated in Transcription
  misc_feature: MA Experiment 20001906 PARAMETER Experiment Name: At_Drought_Reproduction_P Parameter: Age (day) Value: 35
  misc_feature: MA Experiment 20001906 PARAMETER Experiment Name: At_Drought_Reproduction_P Parameter: Organism Value: A. thaliana
  misc_feature: MA Experiment 20001906 PARAMETER Experiment Name: At_Drought_Reproduction_P Parameter: Plant Line Value: WS
  misc_feature: MA Experiment 20001906 PARAMETER Experiment Name: At_Drought_Reproduction_P Parameter: Timepoint (day) Value: 5
  misc_feature: MA Experiment 20001906 PARAMETER Experiment Name: At_Drought_Reproduction_P Parameter: Tissue Value: Siliques
  misc_feature: MA Experiment 20001906 PARAMETER Experiment Name: At_Drought_Reproduction_P Parameter: Treatment Value: Drought vs. No Drought
  misc_feature: MA Experiment ID: 20001910 Result: Up-regulated in Transcription
  misc_feature: MA Experiment 20001910 PARAMETER Experiment Name: At_Drought_Reproduction_P Parameter: Age (day) Value: 37
  misc_feature: MA Experiment 20001910 PARAMETER Experiment Name: At_Drought_Reproduction_P Parameter: Organism Value: A. thaliana
  misc_feature: MA Experiment 20001910 PARAMETER Experiment Name: At_Drought_Reproduction_P Parameter: Plant Line Value: WS
  misc_feature: MA Experiment 20001910 PARAMETER Experiment Name: At_Drought_Reproduction_P Parameter: Timepoint (day) Value: 7
  misc_feature: MA Experiment 20001910 PARAMETER Experiment Name: At_Drought_Reproduction_P Parameter: Tissue Value: Flowers
  misc_feature: MA Experiment 20001910 PARAMETER Experiment Name: At_Drought_Reproduction_P Parameter: Treatment Value: Drought vs. No Drought
atgtccctccgacttggatcccgtctagtctacgtggtgtcgtcacataaggttgcggcagaggagtgctttggcaagaacgacgtcgttctagctaaccggccacaggtgatcatcggaaaacatgttggttataacaatacaaacatgatcgctgcaccttacggtgatcactggcgtaacctccgtcgcctctgcactatcgagatcttttcaacacaccgccttaactgctttctttatgtccgtaccgacgaagtacgtcgccttataagccgcctctctcgtctcgcaggaaccaaaaaaactgttgtggaattgaaaccaatgcttatggacttgacattcaacaacataatgagaatgatgaccggaaaacgatactacggtgaagaaacaaccgatgaggaagaagcaaagcgtgtccgtaagttggtagcagatgttggggctaacacgagttcaggcaacgccgttgactacgtccccatcctcagactgttttcaagttatgaaaatagggttaaaaagttaggagaggagacagataagtttttacaaggtctcattgacgataaacgtgggcaacaagaaaccggtactacaatgatcgatcatttgcttgtcctccaaaaatctgatattgagtattacactgatcaaatcatcaaaggcatcatactgataatggtaatagcagggactaacacatcagcagtcactctagaatgggcactttccaatttgcttaaccatcctgacgtaatatctaaagcgagagacgaaatcgataaccgggttggtttagaccggcttatcgaagaagcagatcttagcgagctaccatatctaaagaacattgtccttgagacccttaggctacacccagctacaccattgctagtcccacacatggcatcagaagattgcaagataggatcctacgatatgccacgtggtacaacgttgttggtgaatgcatgggccatacatagggatccaaacacgtgggatgatccggatagctttaaaccagagcggtttgagaaagaagaggaagcacaaaagcttctggcgtttggattaggtagaagagcgtgtcctggatcgggtctggcccaacgaatcgtgggactagctctcgggtcattgatacaatgctttgaatgggagagagttgggaatgtggaagtggatatgaaggaaggagttgggaatactgtacccaaagcgattcctttgaaagctatttgcaaagctcgtccatttctacataagattatttcctaa

SEQ ID NO: 81946 - protein, 429 aa, Arabidopsis thaliana; identical to SEQ ID NO: 42884
  peptide (1)..(429): Ceres Seq. ID no. 12662526
  misc_feature (1)..(429): Homolog of NCBI NO: 30692923 NR Description: cytochrome P450 91A1 [Arabidopsis thaliana] Cytochrome P450 81D1 >gi|9759034|dbj|BAB09361.1| cytochrome P450 thaliana] >gi|20147351|gb|AAM10388.1| AT5g36220/T30G6_3
  misc_feature (1)..(429): Homolog of NCBI NO: 25282604 NR Description: cytochrome P450 monooxygenase [imported] - thaliana (fragment) >gi|3164142|dbj|BAA28538.1| cytochrome P450
  misc_feature (2)..(429): Homolog of NCBI NO: 15235536 NR Description: cytochrome p450 family; protein id: At4g37370.1, by cDNA: 253698., supported by cDNA: gi_17473897 [Arabidopsis
  misc_feature (2)..(429): Homolog of NCBI NO: 21554381 NR Description: cytochrome P450-like protein [Arabidopsis
  misc_feature (1)..(429): Homolog of NCBI NO: 15235534 NR Description: cytochrome P450 monooxygenase, putative; protein
  misc_feature (1)..(428): Homolog of NCBI NO: 15235535 NR Description: cytochrome p450 family; protein id: At4g37360.1
  misc_feature (3)..(428): Homolog of NCBI NO: 15235533 NR Description: cytochrome p450 family; protein id: At4g37330.1
  misc_feature (2)..(428): Homolog of NCBI NO: 15228472 NR Description: cytochrome p450 family; protein id: At3g28740.1, by cDNA: gi_15292830, supported by cDNA: gi_21280798 [Arabidopsis >gi|11994781|dbj|BAB03171.1| cytochrome P450 [Arabidopsis
  misc_feature (3)..(428): Homolog of NCBI NO: 15235517 NR Description: cytochrome p450 family; protein id: At4g37320.1
  misc_feature (3)..(428): Homolog of NCBI NO: 15227792 NR Description: cytochrome p450, putative; protein id: [Arabidopsis thaliana] >gi|7430669|pir||T00510 probable

SEQ ID NO: 81947 - protein, 380 aa, Arabidopsis thaliana
  peptide (1)..(380): Ceres Seq. ID no. 12662527
  misc_feature (1)..(380): Homolog of NCBI NO: 30692923 NR Description: cytochrome P450 91A1 [Arabidopsis thaliana] Cytochrome P450 81D1 >gi|9759034|dbj|BAB09361.1| cytochrome P450 thaliana] >gi|20147351|gb|AAM10388.1| AT5g36220/T30G6_3
  misc_feature (1)..(380): Homolog of NCBI NO: 25282604 NR Description: cytochrome P450 monooxygenase [imported] - thaliana (fragment) >gi|3164142|dbj|BAA28538.1| cytochrome P450
  misc_feature (1)..(380): Homolog of NCBI NO: 15235536 NR Description: cytochrome p450 family; protein id: At4g37370.1, by cDNA: 253698., supported by cDNA: gi_17473897 [Arabidopsis
  misc_feature (1)..(380): Homolog of NCBI NO: 21554381 NR Description: cytochrome P450-like protein [Arabidopsis
  misc_feature (1)..(380): Homolog of NCBI NO: 15235534 NR Description: cytochrome P450 monooxygenase, putative; protein
  misc_feature (1)..(379): Homolog of NCBI NO: 15235535 NR Description: cytochrome p450 family; protein id: At4g37360.1
  misc_feature (1)..(379): Homolog of NCBI NO: 15235533 NR Description: cytochrome p450 family; protein id: At4g37330.1
  misc_feature (1)..(379): Homolog of NCBI NO: 15228472 NR Description: cytochrome p450 family; protein id: At3g28740.1, by cDNA: gi_15292830, supported by cDNA: gi_21280798 [Arabidopsis >gi|11994781|dbj|BAB03171.1| cytochrome P450 [Arabidopsis
  misc_feature (1)..(379): Homolog of NCBI NO: 15235517 NR Description: cytochrome p450 family; protein id: At4g37320.1
  misc_feature (1)..(379): Homolog of NCBI NO: 15227792 NR Description: cytochrome p450, putative; protein id: [Arabidopsis thaliana] >gi|7430669|pir||T00510 probable
MIAAPYGDHWRNLRRLCTIEIFSTHRLNCFLYVRTDEVRRLISRLSRLAGTKKTVVELKPMLMDLTFNNIMRMMTGKRYYGEETTDEEEAKRVRKLVADVGANTSSGNAVDYVPILRLFSSYENRVKKLGEETDKFLQGLIDDKRGQQETGTTMIDHLLVLQKSDIEYYTDQIIKGIILIMVIAGTNTSAVTLEWALSNLLNHPDVISKARDEIDNRVGLDRLIEEADLSELPYLKNIVLETLRLHPATPLLVPHMASEDCKIGSYDMPRGTTLLVNAWAIHRDPNTWDDPDSFKPERFEKEEEAQKLLAFGLGRRACPGSGLAQRIVGLALGSLIQCFEWERVGNVEVDMKEGVGNTVPKAIPLKAICKARPFLHKIIS

SEQ ID NO: 81948 - protein, 320 aa, Arabidopsis thaliana
  peptide (1)..(320): Ceres Seq. ID no. 12662528
  misc_feature (1)..(320): Homolog of NCBI NO: 30692923 NR Description: cytochrome P450 91A1 [Arabidopsis thaliana] Cytochrome P450 81D1 >gi|9759034|dbj|BAB09361.1| cytochrome P450 thaliana] >gi|20147351|gb|AAM10388.1| AT5g36220/T30G6_3
  misc_feature (1)..(320): Homolog of NCBI NO: 25282604 NR Description: cytochrome P450 monooxygenase [imported] - thaliana (fragment) >gi|3164142|dbj|BAA28538.1| cytochrome P450
  misc_feature (1)..(320): Homolog of NCBI NO: 15235536 NR Description: cytochrome p450 family; protein id: At4g37370.1, by cDNA: 253698., supported by cDNA: gi_17473897 [Arabidopsis
  misc_feature (1)..(320): Homolog of NCBI NO: 21554381 NR Description: cytochrome P450-like protein [Arabidopsis
  misc_feature (1)..(320): Homolog of NCBI NO: 15235534 NR Description: cytochrome P450 monooxygenase, putative; protein
  misc_feature (1)..(319): Homolog of NCBI NO: 15235535 NR Description: cytochrome p450 family; protein id: At4g37360.1
  misc_feature (1)..(319): Homolog of NCBI NO: 15235533 NR Description: cytochrome p450 family; protein id: At4g37330.1
  misc_feature (1)..(319): Homolog of NCBI NO: 15228472 NR Description: cytochrome p450 family; protein id: At3g28740.1, by cDNA: gi_15292830, supported by cDNA: gi_21280798 [Arabidopsis >gi|11994781|dbj|BAB03171.1| cytochrome P450 [Arabidopsis
  misc_feature (1)..(319): Homolog of NCBI NO: 15235517 NR Description: cytochrome p450 family; protein id: At4g37320.1
  misc_feature (1)..(319): Homolog of NCBI NO: 15227792 NR Description: cytochrome p450, putative; protein id: [Arabidopsis thaliana] >gi|7430669|pir||T00510 probable
MLMDLTFNNIMRMMTGKRYYGEETTDEEEAKRVRKLVADVGANTSSGNAVDYVPILRLFSSYENRVKKLGEETDKFLQGLIDDKRGQQETGTTMIDHLLVLQKSDIEYYTDQIIKGIILIMVIAGTNTSAVTLEWALSNLLNHPDVISKARDEIDNRVGLDRLIEEADLSELPYLKNIVLETLRLHPATPLLVPHMASEDCKIGSYDMPRGTTLLVNAWAIHRDPNTWDDPDSFKPERFEKEEEAQKLLAFGLGRRACPGSGLAQRIVGLALGSLIQCFEWERVGNVEVDMKEGVGNTVPKAIPLKAICKARPFLHKIIS

SEQ ID NO: 81949 - DNA, 1011 bp, Arabidopsis thaliana
  misc_feature (1)..(1011): Ceres Seq. ID no. 12662573
  misc_feature: MA Experiment ID: 20000180 Result: Up-regulated in Transcription
  misc_feature: MA Experiment 20000180 PARAMETER Experiment Name: At_Germinating_Seeds_P Parameter: Age (hr) Value: 24 vs. 0
  misc_feature: MA Experiment 20000180 PARAMETER Experiment Name: At_Germinating_Seeds_P Parameter: Tissue Value: Germinating Seeds
  misc_feature: MA Experiment ID: 20000185 Result: Up-regulated in Transcription
  misc_feature: MA Experiment 20000185 PARAMETER Experiment Name: At_Roots__P Parameter: Age (day) Value: 7 vs. 21
  misc_feature: MA Experiment 20000185 PARAMETER Experiment Name: At_Roots__P Parameter: Organism Value: A. thaliana
  misc_feature: MA Experiment 20000185 PARAMETER Experiment Name: At_Roots__P Parameter: Tissue Value: Roots vs. Whole Plant
  misc_feature: MA Experiment ID: 20000264 Result: Up-regulated in Transcription
  misc_feature: MA Experiment 20000264 PARAMETER Experiment Name: At_Open_Flower_P Parameter: Age (day) Value: 21
  misc_feature: MA Experiment 20000264 PARAMETER Experiment Name: At_Open_Flower_P Parameter: Plant Line Value: WS
  misc_feature: MA Experiment 20000264 PARAMETER Experiment Name: At_Open_Flower_P Parameter: Tissue Value: Open Flower vs. Whole Plant
  misc_feature: MA Experiment ID: 20000265 Result: Up-regulated in Transcription
  misc_feature: MA Experiment 20000265 PARAMETER Experiment Name: At_Open_Flower_P Parameter: Age (day) Value: 21
  misc_feature: MA Experiment 20000265 PARAMETER Experiment Name: At_Open_Flower_P Parameter: Plant Line Value: WS
  misc_feature: MA Experiment 20000265 PARAMETER Experiment Name: At_Open_Flower_P Parameter: Tissue Value: Closed Flower vs. Whole Plant
  misc_feature: MA Experiment ID: 20000286 Result: Up-regulated in Transcription
  misc_feature: MA Experiment 20000286 PARAMETER Experiment Name: At_Open_Flower_P Parameter: Age (day) Value: 21
  misc_feature: MA Experiment 20000286 PARAMETER Experiment Name: At_Open_Flower_P Parameter: Plant Line Value: WS
  misc_feature: MA Experiment 20000286 PARAMETER Experiment Name: At_Open_Flower_P Parameter: Tissue Value: Half Open vs. Whole Plant
  misc_feature: MA Experiment ID: 20000438 Result: Down-regulated in Transcription
  misc_feature: MA Experiment 20000438 PARAMETER Experiment Name: At_Shoots__P Parameter: Age (day) Value: 14
  misc_feature: MA Experiment 20000438 PARAMETER Experiment Name: At_Shoots__P Parameter: Tissue Value: Shoots vs. Whole Plant
  misc_feature: MA Experiment ID: 20000496 Result: Up-regulated in Transcription
  misc_feature: MA Experiment 20000496 PARAMETER Experiment Name: At_Guard_Cells_P Parameter: Harvest Date Value: 7/19/2002
  misc_feature: MA Experiment 20000496 PARAMETER Experiment Name: At_Guard_Cells_P Parameter: Organism Value: Canola
  misc_feature: MA Experiment 20000496 PARAMETER Experiment Name: At_Guard_Cells_P Parameter: Tissue Value: Guard Cells vs. Leaves
  misc_feature: MA Experiment ID: 20000794 Result: Up-regulated in Transcription
  misc_feature: MA Experiment 20000794 PARAMETER Experiment Name: At_Petals_P Parameter: Age (day) Value: 23-25 days
  misc_feature: MA Experiment 20000794 PARAMETER Experiment Name: At_Petals_P Parameter: Plant Line Value: WS
  misc_feature: MA Experiment 20000794 PARAMETER Experiment Name: At_Petals_P Parameter: Tissue Value: Petals vs. Whole plant
  misc_feature: MA Experiment ID: 20001910 Result: Up-regulated in Transcription
  misc_feature: MA Experiment 20001910 PARAMETER Experiment Name: At_Drought_Reproduction_P Parameter: Age (day) Value: 37
  misc_feature: MA Experiment 20001910 PARAMETER Experiment Name: At_Drought_Reproduction_P Parameter: Organism Value: A. thaliana
  misc_feature: MA Experiment 20001910 PARAMETER Experiment Name: At_Drought_Reproduction_P Parameter: Plant Line Value: WS
  misc_feature: MA Experiment 20001910 PARAMETER Experiment Name: At_Drought_Reproduction_P Parameter: Timepoint (day) Value: 7
  misc_feature: MA Experiment 20001910 PARAMETER Experiment Name: At_Drought_Reproduction_P Parameter: Tissue Value: Flowers
  misc_feature: MA Experiment 20001910 PARAMETER Experiment Name: At_Drought_Reproduction_P Parameter: Treatment Value: Drought vs. No Drought
atggtggtggattcgtctgcacttaacgtggagaatgattggaaacctgagagaactctagttttactcggtcgaacgggtaatggtaaaagtgcaacgggaaacagcatcctaggtaaaactatgtttcagtcaaaggcaagaggaaaattcattaccaaagaatgtaagctacataaatccaagctaccaaatggtctaaccatcaatgttatcgacactcctggtctgtttagtgcttcctccacaacggatttcaccatcagagaaatcgttagatgcttacttctagctaaaggcggtatcgatgcagtgcttcttgttttctctttaaggaatcggttaacagaagaagaacaatcaacgcttcgtacattaaagatccttttcggaagtcaaatcgttgactatatcatcgttgttttcaccaatgaggatgcacttgagtgtggagaaactctggatgattatttggaagattgtcctgagtttcaggagattctcgaagaatgtgatgatcgtaaagtgttgtttgacaatagttataatgcccccgtgagcaagaaagacagacaagtccatgatcttctcaacctcgttgaacaaatctcaaagaagaacaatggaaaatcttatatggctgacttatcacatgaactaagggagaatgaggccactataaaggaaaagcagaagcagattgaagaaatgaaaggttggtcttcaaaacaagagatatctcaaatgaaaaaggaactagagaaatcgcataacgaaatgcttgaggggataaaagagaagatctctaatcagctgaaggaatcattggaggatgtgaaggagcaattagctaaagcacaagccgagagagaggaaacggagaaaaagatgaatgaaattcagaaactatcttctgatgagatcaggaggctaagagaacaactcaacaaagctgagaaagaaactgcttcgttacgcaccgaactcaacaagaaatgtactgttctttga

SEQ ID NO: 81950 - protein, 336 aa, Arabidopsis thaliana
  peptide (1)..(336): Ceres Seq. ID no. 12662574
  misc_feature (18)..(231): Pfam Name: AIG1 family Pfam Description: AIG1 family
  misc_feature (1)..(336): Homolog of NCBI NO: 15234871 NR Description: AIG1-like protein; protein id: At4g09950.1
  misc_feature (4)..(322): Homolog of NCBI NO: 15234855 NR Description: AIG1-like protein; protein id: At4g09940.1
  misc_feature (2)..(331): Homolog of NCBI NO: 18399081 NR Description: expressed protein; protein id: At1g33970.1,
  misc_feature (10)..(331): Homolog of NCBI NO: 25373414 NR Description: hypothetical protein F12G12.21 - Arabidopsis >gi|10086478|gb|AAG12538.1|AC015446_19 Similar to AIG1 protein thaliana] >gi|10092443|gb|AAG12846.1|AC079286_3 disease
  misc_feature (10)..(331): Homolog of NCBI NO: 24417378 NR Description: unknown [Arabidopsis thaliana]
  misc_feature (15)..(321): Homolog of NCBI NO: 15234852 NR Description: AIG1-like protein; protein id: At4g09930.1
  misc_feature (10)..(326): Homolog of NCBI NO: 4097585 NR Description: NTGP4 [Nicotiana tabacum]
  misc_feature (43)..(331): Homolog of NCBI NO: 12324509 NR Description: AIG1-like protein, 5' partial; 1-1205
  misc_feature (15)..(292): Homolog of NCBI NO: 15220922 NR Description: AIG1-like protein; protein id: At1g33950.1
  misc_feature (14)..(315): Homolog of NCBI NO: 15217717 NR Description: AIG1-like protein; protein id: At1g33890.1
MVVDSSALNVENDWKPERTLVLLGRTGNGKSATGNSILGKTMFQSKARGKFITKECKLHKSKLPNGLTINVIDTPGLFSASSTTDFTIREIVRCLLLAKGGIDAVLLVFSLRNRLTEEEQSTLRTLKILFGSQIVDYIIVVFTNEDALECGETLDDYLEDCPEFQEILEECDDRKVLFDNSYNAPVSKKDRQVHDLLNLVEQISKKNNGKSYMADLSHELRENEATIKEKQKQIEEMKGWSSKQEISQMKKELEKSHNEMLEGIKEKISNQLKESLEDVKEQLAKAQAEREETEKKMNEIQKLSSDEIRRLREQLNKAEKETASLRTELNKKCTVL

SEQ ID NO: 81951 - protein, 295 aa, Arabidopsis thaliana
  peptide (1)..(295): Ceres Seq. ID no. 12662575
  misc_feature (1)..(190): Pfam Name: AIG1 family Pfam Description: AIG1 family
  misc_feature (1)..(295): Homolog of NCBI NO: 15234871 NR Description: AIG1-like protein; protein id: At4g09950.1
  misc_feature (1)..(281): Homolog of NCBI NO: 15234855 NR Description: AIG1-like protein; protein id: At4g09940.1
  misc_feature (1)..(290): Homolog of NCBI NO: 18399081 NR Description: expressed protein; protein id: At1g33970.1,
  misc_feature (1)..(290): Homolog of NCBI NO: 25373414 NR Description: hypothetical protein F12G12.21 - Arabidopsis >gi|10086478|gb|AAG12538.1|AC015446_19 Similar to AIG1 protein thaliana] >gi|10092443|gb|AAG12846.1|AC079286_3 disease
  misc_feature (1)..(290): Homolog of NCBI NO: 24417378 NR Description: unknown [Arabidopsis thaliana]
  misc_feature (1)..(280): Homolog of NCBI NO: 15234852 NR Description: AIG1-like protein; protein id: At4g09930.1
  misc_feature (1)..(285): Homolog of NCBI NO: 4097585 NR Description: NTGP4 [Nicotiana tabacum]
  misc_feature (2)..(290): Homolog of NCBI NO: 12324509 NR Description: AIG1-like protein, 5' partial; 1-1205
  misc_feature (1)..(251): Homolog of NCBI NO: 15220922 NR Description: AIG1-like protein; protein id: At1g33950.1
  misc_feature (1)..(274): Homolog of NCBI NO: 15217717 NR Description: AIG1-like protein; protein id: At1g33890.1
MFQSKARGKFITKECKLHKSKLPNGLTINVIDTPGLFSASSTTDFTIREIVRCLLLAKGGIDAVLLVFSLRNRLTEEEQSTLRTLKILFGSQIVDYIIVVFTNEDALECGETLDDYLEDCPEFQEILEECDDRKVLFDNSYNAPVSKKDRQVHDLLNLVEQISKKNNGKSYMADLSHELRENEATIKEKQKQIEEMKGWSSKQEISQMKKELEKSHNEMLEGIKEKISNQLKESLEDVKEQLAKAQAEREETEKKMNEIQKLSSDEIRRLREQLNKAEKETASLRTELNKKCTVL

SEQ ID NO: 81952 - DNA, 2178 bp, Arabidopsis thaliana
  misc_feature (1)..(2178): Ceres Seq. ID no. 12662591
  misc_feature: MA Experiment ID: 20000180 Result: Down-regulated in Transcription
  misc_feature: MA Experiment 20000180 PARAMETER Experiment Name: At_Germinating_Seeds_P Parameter: Age (hr) Value: 24 vs. 0
  misc_feature: MA Experiment 20000180 PARAMETER Experiment Name: At_Germinating_Seeds_P Parameter: Tissue Value: Germinating Seeds
atgacggaggaagattttgttgttatctctacgccgcctgtcgatctcaagcgaaagctcgacgaagttgagcttaatggaaatatcgtggatgatagcaatcaaacatctgattcttctcaggctaaacgagcgaagctagaagatgaagctcaagatggtttagattatgggaatacacaagaaaatgggtcttcaatggaggtaaaagaggaagaacagcttcaggaacctaaggaagagaatcaagattctgtaccacttgttgaggaagttcaggatcctattcatgctgatgagtctgaaaataagatttgtagtgtagatcagccaacagatgatcaggttaagcctgaggataaccaacaaggttgtattgaggatgtcaatggtggtgaacatcagaaggtgattgatgacgatagtaaggaagtgaatgatggtagttctcaagagaatggtaaagaagaaaataaggaagtggatggtgaaaaatctcagaaggaggttgatggcacacagtcgacaactcgtaggatagatgtcccaagttcaaaggtaggtgtgttgattggtaaaggtggggagactatacggtatcttcagtttaactctggtgccaaaatccaaattttgagggattcagaagctgatccgagctcagcgttaagaccagtggagataattggaagtgttgcatgcattgaaagtgctgagaagcttatcagtgcagtcatagcagaggctgaagcaggaggttcacctgccctagttgctaggggccatccttccactcatgcgatagggatcccagaacagatagagattaaagttccaaatgataaggttggtctgattattggccgaggtggcgagacaatcaagaatatgcagacaaggtcaggagcacgtactcagttaataccacaacatgcagaaggtgatggattgaaggagaggactgtccgtatatctggagataagatgcagattgatatagcaactgacatgataaaagatgttatgaaccagaatgcaaggccatcatcctattccggtggctataatcagcctgcctaccgtccccaagggccaggcggtccacctcaatggggttcacgaggtcctcatgctccccatccctatgattaccaccctcgtggaccatattcatctcaaggttcatattacaattctcccggtttcggtggctatcctccacagcatatgcctcctagaggtggatatggtactgattgggaccaaagacctccgtattctggtccgtacaattattatggaagacaaggagctcaaagcgctggcccagttccacctccttctggccctgtaccctcccctgcctttggtggtccccctctttcgcaggtaagttatggttacggtcagagccatggcccagagtatggacatgctgctccttactcccagaccggttatcagcagacttacgggcagacgtatgaacagcctaagtatgacagtaatcctccgatgcagccaccttatggaggttcatatccaccagcaggtggtggtcagtcaggctattaccaaatgcagcaacctggtgttaggccttatgggatgcaacaaggtcctgtccagcaaggatatgggcctccacagcctgcagcagcagcttcttccggtgatgtgccttaccaaggtgcaactccagcagcaccgtcatatggcagtactaacatggctccacaacaacaacaatatggctacacgtcaagtgatgggccagtgcaacagcaaacatatccttcctatagttccgctccaccatctgacgcttacaacaatggtacacaaacacctgcaactggtccagcttaccagcagcaaagtgttcagccagcttcttccacctatgaccagactggtgcacagcaggctgcagcagctgggtacggtgggcaagtagctccaaccggtggatacacatatccaacctcacagcctgcttatggaagccaagccgcttattcacaagcagcacctactcaaacaggatatgagcaacagcctgcaactcaagctgcagtgtatgcgactgctccagggaccgcaccagtgaaaacccaatcaccccagtccgcgtatgctcaatacgatgcaagccaggtttacgcaactccacgttaa

SEQ ID NO: 81953 - protein, 725 aa, Arabidopsis thaliana
  peptide (1)..(725): Ceres Seq. ID no. 12662592
  misc_feature (275)..(326): Pfam Name: KH domain Pfam Description: KH domain
  misc_feature (17)..(344): Homolog of NCBI NO: 25511683 NR Description: F14M2.18 protein - Arabidopsis thaliana
  misc_feature (5)..(344): Homolog of NCBI NO: 15217613 NR Description: KH domain protein; protein id: At1g33680.1
  misc_feature (107)..(669): Homolog of NCBI NO: 15225229 NR Description: KH domain protein; protein id: At2g25970.1, by cDNA: gi_19310434 [Arabidopsis thaliana]
  misc_feature (159)..(545): Homolog of NCBI NO: 1082624 NR Description: myc far upstream element-binding protein - human
  misc_feature (159)..(545): Homolog of NCBI NO: 17402900 NR Description: far upstream element-binding protein; far
  misc_feature (159)..(546): Homolog of NCBI NO: 16975504 NR Description: DNA segment, Chr 3, ERATO Doi 330, expressed; far element (FUSE) binding protein 1 [Mus musculus] Similar to far upstream element (FUSE) binding protein 1 [Mus
  misc_feature (159)..(541): Homolog of NCBI NO: 16878077 NR Description: far upstream element (FUSE) binding protein 1
  misc_feature (180)..(545): Homolog of NCBI NO: 39794540 NR Description: Unknown (protein for MGC:75632) [Silurana
  misc_feature (131)..(364): Homolog of NCBI NO: 19424312 NR Description: MAP2 RNA trans-acting protein MARTA1 [Rattus
  misc_feature (443)..(672): Homolog of NCBI NO: 19424312 NR Description: MAP2 RNA trans-acting protein MARTA1 [Rattus
MTEEDFVVISTPPVDLKRKLDEVELNGNIVDDSNQTSDSSQAKRAKLEDEAQDGLDYGNTQENGSSMEVKEEEQLQEPKEENQDSVPLVEEVQDPIHADESENKICSVDQPTDDQVKPEDNQQGCIEDVNGGEHQKVIDDDSKEVNDGSSQENGKEENKEVDGEKSQKEVDGTQSTTRRIDVPSSKVGVLIGKGGETIRYLQFNSGAKIQILRDSEADPSSALRPVEIIGSVACIESAEKLISAVIAEAEAGGSPALVARGHPSTHAIGIPEQIEIKVPNDKVGLIIGRGGETIKNMQTRSGARTQLIPQHAEGDGLKERTVRISGDKMQIDIATDMIKDVMNQNARPSSYSGGYNQPAYRPQGPGGPPQWGSRGPHAPHPYDYHPRGPYSSQGSYYNSPGFGGYPPQHMPPRGGYGTDWDQRPPYSGPYNYYGRQGAQSAGPVPPPSGPVPSPAFGGPPLSQVSYGYGQSHGPEYGHAAPYSQTGYQQTYGQTYEQPKYDSNPPMQPPYGGSYPPAGGGQSGYYQMQQPGVRPYGMQQGPVQQGYGPPQPAAAASSGDVPYQGATPAAPSYGSTNMAPQQQQYGYTSSDGPVQQQTYPSYSSAPPSDAYNNGTQTPATGPAYQQQSVQPASSTYDQTGAQQAAAAGYGGQVAPTGGYTYPTSQPAYGSQAAYSQAAPTQTGYEQQPATQAAVYATAPGTAPVKTQSPQSAYAQYDASQVYATPR

SEQ ID NO: 81954 - protein, 659 aa, Arabidopsis thaliana
  peptide (1)..(659): Ceres Seq. ID no. 12662593
  misc_feature (209)..(260): Pfam Name: KH domain Pfam Description: KH domain
  misc_feature (1)..(278): Homolog of NCBI NO: 25511683 NR Description: F14M2.18 protein - Arabidopsis thaliana
  misc_feature (1)..(278): Homolog of NCBI NO: 15217613 NR Description: KH domain protein; protein id: At1g33680.1
  misc_feature (41)..(603): Homolog of NCBI NO: 15225229 NR Description: KH domain protein; protein id: At2g25970.1, by cDNA: gi_19310434 [Arabidopsis thaliana]
  misc_feature (93)..(479): Homolog of NCBI NO: 1082624 NR Description: myc far upstream element-binding protein - human
  misc_feature (93)..(479): Homolog of NCBI NO: 17402900 NR Description: far upstream element-binding protein; far
  misc_feature (93)..(480): Homolog of NCBI NO: 16975504 NR Description: DNA segment, Chr 3, ERATO Doi 330, expressed; far element (FUSE) binding protein 1 [Mus musculus] Similar to far upstream element (FUSE) binding protein 1 [Mus
  misc_feature (93)..(475): Homolog of NCBI NO: 16878077 NR Description: far upstream element (FUSE) binding protein 1
  misc_feature (114)..(479): Homolog of NCBI NO: 39794540 NR Description: Unknown (protein for MGC:75632) [Silurana
  misc_feature (65)..(298): Homolog of NCBI NO: 19424312 NR Description: MAP2 RNA trans-acting protein MARTA1 [Rattus
  misc_feature (377)..(606): Homolog of NCBI NO: 19424312 NR Description: MAP2 RNA trans-acting protein MARTA1 [Rattus
MEVKEEEQLQEPKEENQDSVPLVEEVQDPIHADESENKICSVDQPTDDQVKPEDNQQGCIEDVNGGEHQKVIDDDSKEVNDGSSQENGKEENKEVDGEKSQKEVDGTQSTTRRIDVPSSKVGVLIGKGGETIRYLQFNSGAKIQILRDSEADPSSALRPVEIIGSVACIESAEKLISAVIAEAEAGGSPALVARGHPSTHAIGIPEQIEIKVPNDKVGLIIGRGGETIKNMQTRSGARTQLIPQHAEGDGLKERTVRISGDKMQIDIATDMIKDVMNQNARPSSYSGGYNQPAYRPQGPGGPPQWGSRGPHAPHPYDYHPRGPYSSQGSYYNSPGFGGYPPQHMPPRGGYGTDWDQRPPYSGPYNYYGRQGAQSAGPVPPPSGPVPSPAFGGPPLSQVSYGYGQSHGPEYGHAAPYSQTGYQQTYGQTYEQPKYDSNPPMQPPYGGSYPPAGGGQSGYYQMQQPGVRPYGMQQGPVQQGYGPPQPAAAASSGDVPYQGATPAAPSYGSTNMAPQQQQYGYTSSDGPVQQQTYPSYSSAPPSDAYNNGTQTPATGPAYQQQSVQPASSTYDQTGAQQAAAAGYGGQVAPTGGYTYPTSQPAYGSQAAYSQAAPTQTGYEQQPATQAAVYATAPGTAPVKTQSPQSAYAQYDASQVYATPR

SEQ ID NO: 81955 - protein, 429 aa, Arabidopsis thaliana
  peptide (1)..(429): Ceres Seq. ID no. 12662594
  misc_feature (129)..(410): Pfam Name: High molecular weight glutenin subunit Pfam Description: High molecular weight glutenin subunit
  misc_feature (1)..(48): Homolog of NCBI NO: 25511683 NR Description: F14M2.18 protein - Arabidopsis thaliana
  misc_feature (1)..(48): Homolog of NCBI NO: 15217613 NR Description: KH domain protein; protein id: At1g33680.1
  misc_feature (1)..(373): Homolog of NCBI NO: 15225229 NR Description: KH domain protein; protein id: At2g25970.1, by cDNA: gi_19310434 [Arabidopsis thaliana]
  misc_feature (1)..(249): Homolog of NCBI NO: 1082624 NR Description: myc far upstream element-binding protein - human
  misc_feature (1)..(249): Homolog of NCBI NO: 17402900 NR Description: far upstream element-binding protein; far
  misc_feature (1)..(250): Homolog of NCBI NO: 16975504 NR Description: DNA segment, Chr 3, ERATO Doi 330, expressed; far element (FUSE) binding protein 1 [Mus musculus] Similar to far upstream element (FUSE) binding protein 1 [Mus
  misc_feature (1)..(245): Homolog of NCBI NO: 16878077 NR Description: far upstream element (FUSE) binding protein 1
  misc_feature (1)..(249): Homolog of NCBI NO: 39794540 NR Description: Unknown (protein for MGC:75632) [Silurana
  misc_feature (1)..(68): Homolog of NCBI NO: 19424312 NR Description: MAP2 RNA trans-acting protein MARTA1 [Rattus
  misc_feature (147)..(376): Homolog of NCBI NO: 19424312 NR Description: MAP2 RNA trans-acting protein MARTA1 [Rattus
MQTRSGARTQLIPQHAEGDGLKERTVRISGDKMQIDIATDMIKDVMNQNARPSSYSGGYNQPAYRPQGPGGPPQWGSRGPHAPHPYDYHPRGPYSSQGSYYNSPGFGGYPPQHMPPRGGYGTDWDQRPPYSGPYNYYGRQGAQSAGPVPPPSGPVPSPAFGGPPLSQVSYGYGQSHGPEYGHAAPYSQTGYQQTYGQTYEQPKYDSNPPMQPPYGGSYPPAGGGQSGYYQMQQPGVRPYGMQQGPVQQGYGPPQPAAAASSGDVPYQGATPAAPSYGSTNMAPQQQQYGYTSSDGPVQQQTYPSYSSAPPSDAYNNGTQTPATGPAYQQQSVQPASSTYDQTGAQQAAAAGYGGQVAPTGGYTYPTSQPAYGSQAAYSQAAPTQTGYEQQPATQAAVYATAPGTAPVKTQSPQSAYAQYDASQVYATPR

SEQ ID NO: 81956 - DNA, 1056 bp, Arabidopsis thaliana
  misc_feature (1)..(1056): Ceres Seq. ID no. 12662623
  misc_feature: MA Experiment ID: 20000185 Result: Up-regulated in Transcription
  misc_feature: MA Experiment 20000185 PARAMETER Experiment Name: At_Roots__P Parameter: Age (day) Value: 7 vs. 21
  misc_feature: MA Experiment 20000185 PARAMETER Experiment Name: At_Roots__P Parameter: Organism Value: A. thaliana
  misc_feature: MA Experiment 20000185 PARAMETER Experiment Name: At_Roots__P Parameter: Tissue Value: Roots vs. Whole Plant
  misc_feature: MA Experiment ID: 20000227 Result: Up-regulated in Transcription
  misc_feature: MA Experiment 20000227 PARAMETER Experiment Name: At_Root-Tips-vs-Tops_P Parameter: Tissue Value: Root Tips vs. Root Tops
  misc_feature: MA Experiment ID: 20001451 Result: Up-regulated in Transcription
  misc_feature: MA Experiment 20001451 PARAMETER Experiment Name: At_Far-red-induction_P Parameter: Age (day) Value: 7
  misc_feature: MA Experiment 20001451 PARAMETER Experiment Name: At_Far-red-induction_P Parameter: Light Value: Far-red vs. White
  misc_feature: MA Experiment 20001451 PARAMETER Experiment Name: At_Far-red-induction_P Parameter: Organism Value: A. thaliana
  misc_feature: MA Experiment 20001451 PARAMETER Experiment Name: At_Far-red-induction_P Parameter: Plant Line Value: Columbia
  misc_feature: MA Experiment 20001451 PARAMETER Experiment Name: At_Far-red-induction_P Parameter: Timepoint (hr) Value: 24
  misc_feature: MA Experiment 20001451 PARAMETER Experiment Name: At_Far-red-induction_P Parameter: Tissue Value: Whole Plant
atgggttcttcgtcgaacggaggagtgccacctggtttccggtttcatccgacggacgaagagcttctccattactacttgaagaagaaaatctcttaccaaaagtttgagatggaagtcatcagagaggttgacttaaacaagcttgagccttgggatttgcaagagagatgcaagataggatcaacaccacaaaacgaatggtacttcttcagccacaaggacaggaaatatccgacggggtcaaggaccaaccgtgctactcatgcagggttctggaaggcgacgggacgtgacaagtgcataaggaactcttacaaaaagataggaatgaggaagacacttgtgttctacaaaggtagagctcctcatggccaaaagactgattggatcatgcatgagtaccgtcttgaagacgctgatgatcctcaagccaaccctagtgaagatggatgggtggtatgtagagtgtttatgaagaaaaatttgttcaaggtagtaaatgaaggtagctcaagcattaactcattggaccaacacaaccatgacgcatctaacaacaaccatgcacttcaagctcgtagctttatgcaccgagacagtccataccagctagtacgtaaccacggagccatgacattcgaacttaacaagcctgaccttgctcttcatcaatacccaccaatcttccacaagccaccttcacttggatttgactactcttcaggacttgcaagggacagtgagagtgcggctagtgaagggttacaataccagcaagcgtgtgagccgggtttagacgttggtacatgtgagacagtggctagtcataatcatcaacaaggtctaggtgaatgggcaatgatggatagacttgtgacttgtcacatgggaaatgaagattcctctagagggattacgtatgaggatggtaacaacaattcgtcctctgtggttcagccagttcccgcgacgaaccagctaacattgcgtagtgagatggatttctggggttattctaaatagatgtttatatgtctttcttatgagtctacg

SEQ ID NO: 81957 - protein, 341 aa, Arabidopsis thaliana
  peptide (1)..(341): Ceres Seq. ID no. 12662624
  misc_feature (9)..(138): Pfam Name: No apical meristem (NAM) protein Pfam Description: No apical meristem (NAM) protein
  misc_feature (1)..(341): Homolog of NCBI NO: 15235031 NR Description: NAM/NAP like protein; protein id: At4g10350.1
  misc_feature (3)..(249): Homolog of NCBI NO: 15217491 NR Description: unknown protein; protein id: At1g33280.1
  misc_feature (1)..(306): Homolog of NCBI NO: 15219419 NR Description: NAM (no apical meristem)-like protein OsNAC4, protein id: At1g79580.1 [Arabidopsis thaliana]
  misc_feature (1)..(148): Homolog of NCBI NO: 6006373 NR Description: Similar to NAM like protein (AC005310) [Oryza
  misc_feature (149)..(163): Homolog of NCBI NO: 6006373 NR Description: Similar to NAM like protein (AC005310) [Oryza
  misc_feature (9)..(182): Homolog of NCBI NO: 6730944 NR Description: OsNAC7 protein [Oryza sativa]
  misc_feature (1)..(175): Homolog of NCBI NO: 27754598 NR Description: putative NAM (no apical meristem) protein
  misc_feature (1)..(175): Homolog of NCBI NO: 7485760 NR Description: NAM (no apical meristem)-like protein [imported] -
  misc_feature (1)..(175): Homolog of NCBI NO: 30690500 NR Description: No apical meristem (NAM) protein family
  misc_feature (9)..(236): Homolog of NCBI NO: 34902254 NR Description: Putative NAM-like protein [Oryza sativa (japonica
MGSSSNGGVPPGFRFHPTDEELLHYYLKKKISYQKFEMEVIREVDLNKLEPWDLQERCKIGSTPQNEWYFFSHKDRKYPTGSRTNRATHAGFWKATGRDKCIRNSYKKIGMRKTLVFYKGRAPHGQKTDWIMHEYRLEDADDPQANPSEDGWVVCRVFMKKNLFKVVNEGSSSINSLDQHNHDASNNNHALQARSFMHRDSPYQLVRNHGAMTFELNKPDLALHQYPPIFHKPPSLGFDYSSGLARDSESAASEGLQYQQACEPGLDVGTCETVASHNHQQGLGEWAMMDRLVTCHMGNEDSSRGITYEDGNNNSSSVVQPVPATNQLTLRSEMDFWGYSK

SEQ ID NO: 81958 - protein, 304 aa, Arabidopsis thaliana
  peptide (1)..(304): Ceres Seq. ID no. 12662625
  misc_feature (1)..(101): Pfam Name: No apical meristem (NAM) protein Pfam Description: No apical meristem (NAM) protein
  misc_feature (1)..(304): Homolog of NCBI NO: 15235031 NR Description: NAM/NAP like protein; protein id: At4g10350.1
  misc_feature (1)..(212): Homolog of NCBI NO: 15217491 NR Description: unknown protein; protein id: At1g33280.1
  misc_feature (1)..(269): Homolog of NCBI NO: 15219419 NR Description: NAM (no apical meristem)-like protein OsNAC4, protein id: At1g79580.1 [Arabidopsis thaliana]
  misc_feature (1)..(111): Homolog of NCBI NO: 6006373 NR Description: Similar to NAM like protein (AC005310) [Oryza
  misc_feature (112)..(126): Homolog of NCBI NO: 6006373 NR Description: Similar to NAM like protein (AC005310) [Oryza
  misc_feature (1)..(145): Homolog of NCBI NO: 6730944 NR Description: OsNAC7 protein [Oryza sativa]
  misc_feature (1)..(138): Homolog of NCBI NO: 27754598 NR Description: putative NAM (no apical meristem) protein
  misc_feature (1)..(138): Homolog of NCBI NO: 7485760 NR Description: NAM (no apical meristem)-like protein [imported] -
  misc_feature (1)..(138): Homolog of NCBI NO: 30690500 NR Description: No apical meristem (NAM) protein family
  misc_feature (1)..(199): Homolog of NCBI NO: 34902254 NR Description: Putative NAM-like protein [Oryza sativa (japonica
MEVIREVDLNKLEPWDLQERCKIGSTPQNEWYFFSHKDRKYPTGSRTNRATHAGFWKATGRDKCIRNSYKKIGMRKTLVFYKGRAPHGQKTDWIMHEYRLEDADDPQANPSEDGWVVCRVFMKKNLFKVVNEGSSSINSLDQHNHDASNNNHALQARSFMHRDSPYQLVRNHGAMTFELNKPDLALHQYPPIFHKPPSLGFDYSSGLARDSESAASEGLQYQQACEPGLDVGTCETVASHNHQQGLGEWAMMDRLVTCHMGNEDSSRGITYEDGNNNSSSVVQPVPATNQLTLRSEMDFWGYSK

SEQ ID NO: 81959 - protein, 231 aa, Arabidopsis thaliana
  peptide (1)..(231): Ceres Seq. ID no. 12662626
  misc_feature (1)..(231): Homolog of NCBI NO: 15235031 NR Description: NAM/NAP like protein; protein id: At4g10350.1
  misc_feature (1)..(139): Homolog of NCBI NO: 15217491 NR Description: unknown protein; protein id: At1g33280.1
  misc_feature (1)..(196): Homolog of NCBI NO: 15219419 NR Description: NAM (no apical meristem)-like protein OsNAC4, protein id: At1g79580.1 [Arabidopsis thaliana]
  misc_feature (1)..(38): Homolog of NCBI NO: 6006373 NR Description: Similar to NAM like protein (AC005310) [Oryza
  misc_feature (39)..(53): Homolog of NCBI NO: 6006373 NR Description: Similar to NAM like protein (AC005310) [Oryza
  misc_feature (1)..(72): Homolog of NCBI NO: 6730944 NR Description: OsNAC7 protein [Oryza sativa]
  misc_feature (1)..(65): Homolog of NCBI NO: 27754598 NR Description: putative NAM (no apical meristem) protein
  misc_feature (1)..(65): Homolog of NCBI NO: 7485760 NR Description: NAM (no apical meristem)-like protein [imported] -
  misc_feature (1)..(65): Homolog of NCBI NO: 30690500 NR Description: No apical meristem (NAM) protein family
  misc_feature (1)..(126): Homolog of NCBI NO: 34902254 NR Description: Putative NAM-like protein [Oryza sativa (japonica
MRKTLVFYKGRAPHGQKTDWIMHEYRLEDADDPQANPSEDGWVVCRVFMKKNLFKVVNEGSSSINSLDQHNHDASNNNHALQARSFMHRDSPYQLVRNHGAMTFELNKPDLALHQYPPIFHKPPSLGFDYSSGLARDSESAASEGLQYQQACEPGLDVGTCETVASHNHQQGLGEWAMMDRLVTCHMGNEDSSRGITYEDGNNNSSSVVQPVPATNQLTLRSEMDFWGYSK

SEQ ID NO: 81960 - DNA, 1505 bp, Arabidopsis thaliana
  misc_feature (1)..(1505): Ceres Seq. ID no. 12662627
  misc_feature: MA Experiment ID: 20000180 Result: Down-regulated in Transcription
  misc_feature: MA Experiment 20000180 PARAMETER Experiment Name: At_Germinating_Seeds_P Parameter: Age (hr) Value: 24 vs. 0
  misc_feature: MA Experiment 20000180 PARAMETER Experiment Name: At_Germinating_Seeds_P Parameter: Tissue Value: Germinating Seeds
  misc_feature: MA Experiment ID: 20000211 Result: Up-regulated in Transcription
  misc_feature: MA Experiment 20000211 PARAMETER Experiment Name: At_0.001percent_MeJA__P Parameter: Age (day) Value: 14
  misc_feature: MA Experiment 20000211 PARAMETER Experiment Name: At_0.001percent_MeJA__P Parameter: Organism Value: A. thaliana
  misc_feature: MA Experiment 20000211 PARAMETER Experiment Name: At_0.001percent_MeJA__P Parameter: Plant Line Value: WS
  misc_feature: MA Experiment 20000211 PARAMETER Experiment Name: At_0.001percent_MeJA__P Parameter: Timepoint (hr) Value: 1
  misc_feature: MA Experiment 20000211 PARAMETER Experiment Name: At_0.001percent_MeJA__P Parameter: Tissue Value: Aerial
  misc_feature: MA Experiment 20000211 PARAMETER Experiment Name: At_0.001percent_MeJA__P Parameter: Treatment Value: 0.001percent MeJA vs. No Treatment
  misc_feature: MA Experiment ID: 20000438 Result: Down-regulated in Transcription
  misc_feature: MA Experiment 20000438 PARAMETER Experiment Name: At_Shoots__P Parameter: Age (day) Value: 14
  misc_feature: MA Experiment 20000438 PARAMETER Experiment Name: At_Shoots__P Parameter: Tissue Value: Shoots vs. Whole Plant
  misc_feature: MA Experiment ID: 20000439 Result: Up-regulated in Transcription
  misc_feature: MA Experiment 20000439 PARAMETER Experiment Name: At_Roots__P Parameter: Age (day) Value: 14 vs. 21
  misc_feature: MA Experiment 20000439 PARAMETER Experiment Name: At_Roots__P Parameter: Organism Value: A. thaliana
  misc_feature: MA Experiment 20000439 PARAMETER Experiment Name: At_Roots__P Parameter: Tissue Value: Roots vs. Whole Plant
  misc_feature: MA Experiment ID: 20000527 Result: Down-regulated in Transcription
  misc_feature: MA Experiment 20000527 PARAMETER Experiment Name: At_10percent_PEG_P Parameter: Age (day) Value: 20
  misc_feature: MA Experiment 20000527 PARAMETER Experiment Name: At_10percent_PEG_P Parameter: Organism Value: A. thaliana
  misc_feature: MA Experiment 20000527 PARAMETER Experiment Name: At_10percent_PEG_P Parameter: Plant Line Value: WS
  misc_feature: MA Experiment 20000527 PARAMETER Experiment Name: At_10percent_PEG_P Parameter: Timepoint (day) Value: 20
  misc_feature: MA Experiment 20000527 PARAMETER Experiment Name: At_10percent_PEG_P Parameter: Tissue Value: Whole Plant
  misc_feature: MA Experiment 20000527 PARAMETER Experiment Name: At_10percent_PEG_P Parameter: Treatment Value: 10percent PEG vs. No Treatment
aaaacctttccttcttctttctttacaaatccaacaatctcaatgtctccaaatccataactttcttcgatccccttgttcttcctctgtctgctgttacattttttacaaaaccctaatcaaacccattttcttctatcaatcttaaccctagaatcaaataaagactcaatctttctttgctttgctctgttctgctctgtttttgctctgtttttataatggcttgtttcttgaattgtgttagatttgatgtctccaagacgatcaccgacaaacccacaagtcaaggatctggtgtgacttgttataacagctgggatgatgttgaaactctcacttccaatttctctagattgattggttctggtggctatagcagtatctacatggctcgcttctctggctctgataaagcggctctcaaggttcatgttagtagtcaccgtctttatcaagtctttagacttgagcttgatattttgcttcgtcttcaacatcctaacattgtcaagcttcttggctatttcgatgattcagaggaaaatggtgctcttcttcttgagtatcttcctcaaggaaatctacaagagaagctccaaagcaatagcaagcaagtcttgcaatggaggaaccgtgtagcgattgcgttacagttagttcaagctattgaacatattcatgagaaatgtagcccgcagatagtgcacggggacatcaaatcttccaacgttcttctagacaaaaactttgattgcaagctttgcgatttcgggtcagctaaagtcgggttctcttcgatggttcagcctcctacgatgtcgcctagatctagacaagtgaagatggtgggatctccaggttacacagaccctcattatttaagaaccgggattgcttcgaagaagatggatatgtatgggtttggagttgtggttcttgagttggtttcaggaaaagaagcgttttctgctgagagaggtgagatgctggtgcatatagctgctccacttatgaatgagattttggattcgagtgtagacatttcagaggacaaggtcagacagttcttggacccgaggttgttaagggatagtcttgatatcgatgaggtcaagacaatgttgagtgttgctgcggtctgtatcagtagcaagctatctctaagaccttcggctgctcaagtagcggatactcttataaaggaaataccatcattgagtttcctcggttgcggtaaaggagtgtgagttatcggtgtcgatggtttttgttgtagtgtggtaaggctgcgtgaacgacactgtaaagttggtgtgcatttaggagtttcttggaaaaccagcaagaagaataaccatgtaaatactcttgttttgttttgtgaatagaagcaggaaataacattttgtctaattatcattcatcaacatttcctaggaaatgtaattttgattgttgttttgtcttgaaatcttagagagaaagagaagttctgttcatgt

SEQ ID NO: 81961 - protein, 342 aa, Arabidopsis thaliana
  peptide (1)..(342): Ceres Seq. ID no. 12662628
  misc_feature (1)..(342): Homolog of NCBI NO: 15235071 NR Description: putative protein kinase; protein id: At4g10390.1, by cDNA: gi_20260591 [Arabidopsis thaliana]
  misc_feature (1)..(340): Homolog of NCBI NO: 25403176 NR Description: probable protein kinase [imported] - Arabidopsis >gi|12322574|gb|AAG51288.1|AC027035_11 protein kinase, putative
  misc_feature (1)..(340): Homolog of NCBI NO: 30692836 NR Description: protein kinase family [Arabidopsis thaliana]
  misc_feature (32)..(326): Homolog of NCBI NO: 37536060 NR Description: putative receptor protein kinase [Oryza sativa
  misc_feature (32)..(328): Homolog of NCBI NO: 27476081 NR Description: Hypothetical protein [Oryza sativa (japonica
  misc_feature (32)..(334): Homolog of NCBI NO: 38344983 NR Description: OSJNBa0011L07.13 [Oryza sativa (japonica
  misc_feature (32)..(291): Homolog of NCBI NO: 15227007 NR Description: putative receptor-like protein kinase; protein id:
  misc_feature (15)..(330): Homolog of NCBI NO: 2129635 NR Description: serine/threonine-specific receptor protein kinase
  misc_feature (15)..(330): Homolog of NCBI NO: 15233796 NR Description: serine threonine-specific receptor protein kinase protein id: At4g29990.1 [Arabidopsis thaliana]
  misc_feature (1)..(276): Homolog of NCBI NO: 15237096 NR Description: receptor protein kinase - like protein; protein
MACFLNCVRFDVSKTITDKPTSQGSGVTCYNSWDDVETLTSNFSRLIGSGGYSSIYMARFSGSDKAALKVHVSSHRLYQVFRLELDILLRLQHPNIVKLLGYFDDSEENGALLLEYLPQGNLQEKLQSNSKQVLQWRNRVAIALQLVQAIEHIHEKCSPQIVHGDIKSSNVLLDKNFDCKLCDFGSAKVGFSSMVQPPTMSPRSRQVKMVGSPGYTDPHYLRTGIASKKMDMYGFGVVVLELVSGKEAFSAERGEMLVHIAAPLMNEILDSSVDISEDKVRQFLDPRLLRDSLDIDEVKTMLSVAAVCISSKLSLRPSAAQVADTLIKEIPSLSFLGCGKGV

SEQ ID NO: 81962 - protein, 286 aa, Arabidopsis thaliana
  peptide (1)..(286): Ceres Seq. ID no. 12662629
  misc_feature (1)..(286): Homolog of NCBI NO: 15235071 NR Description: putative protein kinase; protein id: At4g10390.1, by cDNA: gi_20260591 [Arabidopsis thaliana]
  misc_feature (1)..(284): Homolog of NCBI NO: 25403176 NR Description: probable protein kinase [imported] - Arabidopsis >gi|12322574|gb|AAG51288.1|AC027035_11 protein kinase, putative
  misc_feature (1)..(284): Homolog of NCBI NO: 30692836 NR Description: protein kinase family [Arabidopsis thaliana]
  misc_feature (1)..(270): Homolog of NCBI NO: 37536060 NR Description: putative receptor protein kinase [Oryza sativa
  misc_feature (1)..(272): Homolog of NCBI NO: 27476081 NR Description: Hypothetical protein [Oryza sativa (japonica
  misc_feature (1)..(278): Homolog of NCBI NO: 38344983 NR Description: OSJNBa0011L07.13 [Oryza sativa (japonica
  misc_feature (1)..(235): Homolog of NCBI NO: 15227007 NR Description: putative receptor-like protein kinase; protein id:
  misc_feature (1)..(274): Homolog of NCBI NO: 2129635 NR Description: serine/threonine-specific receptor protein kinase
  misc_feature (1)..(274): Homolog of NCBI NO: 15233796 NR Description: serine threonine-specific receptor protein kinase protein id: At4g29990.1 [Arabidopsis thaliana]
  misc_feature (1)..(220): Homolog of NCBI NO: 15237096 NR Description: receptor protein kinase - like protein; protein
MARFSGSDKAALKVHVSSHRLYQVFRLELDILLRLQHPNIVKLLGYFDDSEENGALLLEYLPQGNLQEKLQSNSKQVLQWRNRVAIALQLVQAIEHIHEKCSPQIVHGDIKSSNVLLDKNFDCKLCDFGSAKVGFSSMVQPPTMSPRSRQVKMVGSPGYTDPHYLRTGIASKKMDMYGFGVVVLELVSGKEAFSAERGEMLVHIAAPLMNEILDSSVDISEDKVRQFLDPRLLRDSLDIDEVKTMLSVAAVCISSKLSLRPSAAQVADTLIKEIPSLSFLGCGKGV

SEQ ID NO: 81963 - DNA, 1902 bp, Arabidopsis thaliana
  misc_feature (1)..(1902): Ceres Seq. ID no. 12662630
  misc_feature: MA Experiment ID: 20000440 Result: Up-regulated in Transcription
  misc_feature: MA Experiment 20000440 PARAMETER Experiment Name: At_Closed-Flower__Sub_P Parameter: Tissue Value: Closed Flower vs. Whole Plant
atggcgaaagagaacagtggtcatcatcaccaaacagaagcaagaagaaagaaactaactttgattcttggtgtaagtggactctgcattttgttctatgttttaggtgcatggcaagccaataccgtcccatcttctatctcgaagctcggatgcgagacgcaatcaaacccttcttcgtcctcttcctcttcctcatcttcagagtcagctgaactagatttcaaaagccataatcagattgagttaaaggaaacaaaccaaaccattaagtactttgaaccatgtgaattatctctcagtgagtacactccttgtgaagaccgacaaagaggaagaagattcgataggaacatgatgaaatatagagaaagacattgtcctgtaaaagatgagcttctttattgtttgattcctcctccaccaaactacaagattccatttaaatggccacaaagtagagactatgcttggtatgacaatatccctcacaaggaacttagtgttgagaaagcagttcaaaactggattcaagttgaaggtgaccgctttagattccctggtggtggtactatgtttcctcgtggagctgatgcttatatcgatgatattgctaggcttattcctcttactgatggtggaatcagaacagctattgacactggatgtggtgttgcaagttttggtgcttacctcttgaagagagacattatggctgtgtcttttgctccaagagacactcatgaagctcaggtacagtttgctttagaacgcggagttcctgcgataatcgggattatgggatcaagaagacttccttatccagctagagcttttgatcttgctcattgttctcgttgtttgatcccttggtttaaaaatgatggtttgtaccttatggaggtcgaccgggttttaagaccgggcggttactggatcctctcgggaccaccgattaactggaaacagtactggagagggtgggagagaacagaggaggatttgaagaaagagcaagattcaatagaagatgtagcaaagagtctttgctggaagaaagtaactgaaaaaggtgacttatcaatttggcaaaagcctctcaatcacattgagtgtaaaaagctcaaacaaaacaataagtcacctccgatatgcagctcagataacgcggattccgcttggtacaaagacttggaaacttgtataacaccattaccagaaacaaacaatccagatgattcagcaggcggtgcactcgaggattggccagaccgagcattcgcggtacctccaagaatcatcagaggaactataccagaaatgaacgcggagaaatttagagaagacaacgaggtttggaaagagagaatagcacattacaagaagatagtccctgagctttcacatggaagattcaggaacattatggacatgaacgcttttctcggcggattcgctgcttccatgctgaaatatccctcatgggtcatgaacgttgtcccggtcgatgcagagaaacaaacgttaggtgtgatctacgaacgtggattgatagggacgtatcaagattggtgtgaaggattctcaacgtatccaagaacttatgatatgattcatgcaggaggattgttcagcttatacgaacataggtgtgatttgacgttgatattgttggagatggatcgaattttgagaccagaaggaacagttgtgttgagagataatgtggagacgttgaataaggtagagaagatagtgaagggaatgaagtggaagagtcaaattgttgatcatgagaaaggtccttttaatcctgagaagattcttgttgctgttaaaacttattggactggtcaaccttctgacaagaacaacaacaacaacaacaacaacaacaactag

SEQ ID NO: 81964 - protein, 633 aa, Arabidopsis thaliana
  peptide (1)..(633): Ceres Seq. ID no. 12662631
  misc_feature (102)..(613): Pfam Name: Putative methyltransferase Pfam Description: Putative methyltransferase
  misc_feature (53)..(621): Homolog of NCBI NO: 18398763 NR Description: unknown protein; protein id: At1g33170.1
  misc_feature (1)..(84): Homolog of NCBI NO: 18398763 NR Description: unknown protein; protein id: At1g33170.1
  misc_feature (291)..(621): Homolog of NCBI NO: 9665165 NR Description: Unknown Protein [Arabidopsis thaliana]
  misc_feature (53)..(294): Homolog of NCBI NO: 9665165 NR Description: Unknown Protein [Arabidopsis thaliana]
  misc_feature (13)..(624): Homolog of NCBI NO: 37535962 NR Description: unknown protein [Oryza sativa (japonica
  misc_feature (1)..(623): Homolog of NCBI NO: 24413975 NR Description: hypothetical protein~similar to Oryza sativa
  misc_feature (14)..(629): Homolog of NCBI NO: 15225560 NR Description: hypothetical protein; protein id: At2g45750.1
  misc_feature (14)..(626): Homolog of NCBI NO: 15236921 NR Description: hypothetical protein; protein id: At4g00750.1
  misc_feature (13)..(616): Homolog of NCBI NO: 18396075 NR Description: expressed protein; protein id: At1g26850.1, by cDNA: gi_14335101 [Arabidopsis thaliana] At1g26850/T2P11_4 [Arabidopsis thaliana]
  misc_feature (13)..(618): Homolog of NCBI NO: 6752888 NR Description: unknown [Malus x domestica]
MAKENSGHHHQTEARRKKLTLILGVSGLCILFYVLGAWQANTVPSSISKLGCETQSNPSSSSSSSSSSESAELDFKSHNQIELKETNQTIKYFEPCELSLSEYTPCEDRQRGRRFDRNMMKYRERHCPVKDELLYCLIPPPPNYKIPFKWPQSRDYAWYDNIPHKELSVEKAVQNWIQVEGDRFRFPGGGTMFPRGADAYIDDIARLIPLTDGGIRTAIDTGCGVASFGAYLLKRDIMAVSFAPRDTHEAQVQFALERGVPAIIGIMGSRRLPYPARAFDLAHCSRCLIPWFKNDGLYLMEVDRVLRPGGYWILSGPPINWKQYWRGWERTEEDLKKEQDSIEDVAKSLCWKKVTEKGDLSIWQKPLNHIECKKLKQNNKSPPICSSDNADSAWYKDLETCITPLPETNNPDDSAGGALEDWPDRAFAVPPRIIRGTIPEMNAEKFREDNEVWKERIAHYKKIVPELSHGRFRNIMDMNAFLGGFAASMLKYPSWVMNVVPVDAEKQTLGVIYERGLIGTYQDWCEGFSTYPRTYDMIHAGGLFSLYEHRCDLTLILLEMDRILRPEGTVVLRDNVETLNKVEKIVKGMKWKSQIVDHEKGPFNPEKILVAVKTYWTGQPSDKNNNNNNNNNN

SEQ ID NO: 81965 - protein, 515 aa, Arabidopsis thaliana
  peptide (1)..(515): Ceres Seq. ID no. 12662632
  misc_feature (1)..(495): Pfam Name: Putative methyltransferase Pfam Description: Putative methyltransferase
  misc_feature (1)..(503): Homolog of NCBI NO: 18398763 NR Description: unknown protein; protein id: At1g33170.1
  misc_feature (173)..(503): Homolog of NCBI NO: 9665165 NR Description: Unknown Protein [Arabidopsis thaliana]
  misc_feature (1)..(176): Homolog of NCBI NO: 9665165 NR Description: Unknown Protein [Arabidopsis thaliana]
  misc_feature (1)..(506): Homolog of NCBI NO: 37535962 NR Description: unknown protein [Oryza sativa (japonica
  misc_feature (1)..(505): Homolog of NCBI NO: 24413975 NR Description: hypothetical protein~similar to Oryza sativa
  misc_feature (1)..(511): Homolog of NCBI NO: 15225560 NR Description: hypothetical protein; protein id: At2g45750.1
  misc_feature (1)..(508): Homolog of NCBI NO: 15236921 NR Description: hypothetical protein; protein id: At4g00750.1
  misc_feature (1)..(498): Homolog of NCBI NO: 18396075 NR Description: expressed protein; protein id: At1g26850.1, by cDNA: gi_14335101 [Arabidopsis thaliana] At1g26850/T2P11_4 [Arabidopsis thaliana]
  misc_feature (1)..(500): Homolog of NCBI NO: 6752888 NR Description: unknown [Malus x domestica]
  misc_feature (1)..(515): Homolog of NCBI NO: 22328758 NR Description: putative protein; protein id: At4g18030.1, by cDNA: gi_15294145 [Arabidopsis thaliana] AT4g18030/T6K21_210 [Arabidopsis thaliana]
MMKYRERHCPVKDELLYCLIPPPPNYKIPFKWPQSRDYAWYDNIPHKELSVEKAVQNWIQVEGDRFRFPGGGTMFPRGADAYIDDIARLIPLTDGGIRTAIDTGCGVASFGAYLLKRDIMAVSFAPRDTHEAQVQFALERGVPAIIGIMGSRRLPYPARAFDLAHCSRCLIPWFKNDGLYLMEVDRVLRPGGYWILSGPPINWKQYWRGWERTEEDLKKEQDSIEDVAKSLCWKKVTEKGDLSIWQKPLNHIECKKLKQNNKSPPICSSDNADSAWYKDLETCITPLPETNNPDDSAGGALEDWPDRAFAVPPRIIRGTIPEMNAEKFREDNEVWKERIAHYKKIVPELSHGRFRNIMDMNAFLGGFAASMLKYPSWVMNVVPVDAEKQTLGVIYERGLIGTYQDWCEGFSTYPRTYDMIHAGGLFSLYEHRCDLTLILLEMDRILRPEGTVVLRDNVETLNKVEKIVKGMKWKSQIVDHEKGPFNPEKILVAVKTYWTGQPSDKNNNNNNNNNN

SEQ ID NO: 81966 - protein, 514 aa, Arabidopsis thaliana
  peptide (1)..(514): Ceres Seq. ID no. 12662633
  misc_feature (1)..(494): Pfam Name: Putative methyltransferase Pfam Description: Putative methyltransferase
  misc_feature (1)..(502): Homolog of NCBI NO: 18398763 NR Description: unknown protein; protein id: At1g33170.1
  misc_feature (172)..(502): Homolog of NCBI NO: 9665165 NR Description: Unknown Protein [Arabidopsis thaliana]
  misc_feature (1)..(175): Homolog of NCBI NO: 9665165 NR Description: Unknown Protein [Arabidopsis thaliana]
  misc_feature (1)..(505): Homolog of NCBI NO: 37535962 NR Description: unknown protein [Oryza sativa (japonica
  misc_feature (1)..(504): Homolog of NCBI NO: 24413975 NR Description: hypothetical protein~similar to Oryza sativa
  misc_feature (1)..(510): Homolog of NCBI NO: 15225560 NR Description: hypothetical protein; protein id: At2g45750.1
  misc_feature (1)..(507): Homolog of NCBI NO: 15236921 NR Description: hypothetical protein; protein id: At4g00750.1
  misc_feature (1)..(497): Homolog of NCBI NO: 18396075 NR Description: expressed protein; protein id: At1g26850.1, by cDNA: gi_14335101 [Arabidopsis thaliana] At1g26850/T2P11_4 [Arabidopsis thaliana]
  misc_feature (1)..(499): Homolog of NCBI NO: 6752888 NR Description: unknown [Malus x domestica]
  misc_feature (1)..(514): Homolog of NCBI NO: 22328758 NR Description: putative protein; protein id: At4g18030.1, by cDNA: gi_15294145 [Arabidopsis thaliana] AT4g18030/T6K21_210 [Arabidopsis thaliana]
MKYRERHCPVKDELLYCLIPPPPNYKIPFKWPQSRDYAWYDNIPHKELSVEKAVQNWIQVEGDRFRFPGGGTMFPRGADAYIDDIARLIPLTDGGIRTAIDTGCGVASFGAYLLKRDIMAVSFAPRDTHEAQVQFALERGVPAIIGIMGSRRLPYPARAFDLAHCSRCLIPWFKNDGLYLMEVDRVLRPGGYWILSGPPINWKQYWRGWERTEEDLKKEQDSIEDVAKSLCWKKVTEKGDLSIWQKPLNHIECKKLKQNNKSPPICSSDNADSAWYKDLETCITPLPETNNPDDSAGGALEDWPDRAFAVPPRIIRGTIPEMNAEKFREDNEVWKERIAHYKKIVPELSHGRFRNIMDMNAFLGGFAASMLKYPSWVMNVVPVDAEKQTLGVIYERGLIGTYQDWCEGFSTYPRTYDMIHAGGLFSLYEHRCDLTLILLEMDRILRPEGTVVLRDNVETLNKVEKIVKGMKWKSQIVDHEKGPFNPEKILVAVKTYWTGQPSDKNNNNNNNNNN

SEQ ID NO: 81967 - DNA, 1050 bp, Arabidopsis thaliana
  misc_feature (1)..(1050): Ceres Seq. ID no. 12662638
  misc_feature: MA Experiment ID: 20000182 Result: Up-regulated in Transcription
  misc_feature: MA Experiment 20000182 PARAMETER Experiment Name: At_2mM_SA_P Parameter: Age (day) Value: 14
  misc_feature: MA Experiment 20000182 PARAMETER Experiment Name: At_2mM_SA_P Parameter: Organism Value: A. thaliana
  misc_feature: MA Experiment 20000182 PARAMETER Experiment Name: At_2mM_SA_P Parameter: Plant Line Value: WS
  misc_feature: MA Experiment 20000182 PARAMETER Experiment Name: At_2mM_SA_P Parameter: Timepoint (hr) Value: 6
  misc_feature: MA Experiment 20000182 PARAMETER Experiment Name: At_2mM_SA_P Parameter: Tissue Value: Aerial
  misc_feature: MA Experiment 20000182 PARAMETER Experiment Name: At_2mM_SA_P Parameter: Treatment Value: 2mM SA vs. No Treatment
  misc_feature: MA Experiment ID: 20000184 Result: Down-regulated in Transcription
  misc_feature: MA Experiment 20000184 PARAMETER Experiment Name: At_Shoots__P Parameter: Age (day) Value: 7
  misc_feature: MA Experiment 20000184 PARAMETER Experiment Name: At_Shoots__P Parameter: Tissue Value: Shoots vs. Whole Plant
  misc_feature: MA Experiment ID: 20000227 Result: Down-regulated in Transcription
  misc_feature: MA Experiment 20000227 PARAMETER Experiment Name: At_Root-Tips-vs-Tops_P Parameter: Tissue Value: Root Tips vs. Root Tops
  misc_feature: MA Experiment ID: 20000234 Result: Down-regulated in Transcription
  misc_feature: MA Experiment 20000234 PARAMETER Experiment Name: At_Siliques_P Parameter: Age (day) Value: 21
  misc_feature: MA Experiment 20000234 PARAMETER Experiment Name: At_Siliques_P Parameter: Organism Value: A. thaliana
  misc_feature: MA Experiment 20000234 PARAMETER Experiment Name: At_Siliques_P Parameter: Plant Line Value: WS
  misc_feature: MA Experiment 20000234 PARAMETER Experiment Name: At_Siliques_P Parameter: Tissue Value: Less Than 5mm Siliques vs. Whole Plant
  misc_feature: MA Experiment ID: 20000267 Result: Up-regulated in Transcription
  misc_feature: MA Experiment 20000267 PARAMETER Experiment Name: At_Drought_P Parameter: Age (day) Value: 7
  misc_feature: MA Experiment 20000267 PARAMETER Experiment Name: At_Drought_P Parameter: Organism Value: A. thaliana
  misc_feature: MA Experiment 20000267 PARAMETER Experiment Name: At_Drought_P Parameter: Plant Line Value: WS
  misc_feature: MA Experiment 20000267 PARAMETER Experiment Name: At_Drought_P Parameter: Timepoint (hr) Value: 6
  misc_feature: MA Experiment 20000267 PARAMETER Experiment Name: At_Drought_P Parameter: Tissue Value: Whole Plant
  misc_feature: MA Experiment 20000267 PARAMETER Experiment Name: At_Drought_P Parameter: Treatment Value: Drought vs. No Drought
  misc_feature: MA Experiment ID: 20000436 Result: Up-regulated in Transcription
  misc_feature: MA Experiment 20000436 PARAMETER Experiment Name: At_Drought_P Parameter: Age (day) Value: 7
  misc_feature: MA Experiment 20000436 PARAMETER Experiment Name: At_Drought_P Parameter: Organism Value: A. thaliana
  misc_feature: MA Experiment 20000436 PARAMETER Experiment Name: At_Drought_P Parameter: Plant Line Value: WS
  misc_feature: MA Experiment 20000436 PARAMETER Experiment Name: At_Drought_P Parameter: Timepoint (hr) Value: 12
  misc_feature: MA Experiment 20000436 PARAMETER Experiment Name: At_Drought_P Parameter: Tissue Value: Whole Plant
  misc_feature: MA Experiment 20000436 PARAMETER Experiment Name: At_Drought_P Parameter: Treatment Value: Drought vs. No Drought
  misc_feature: MA Experiment ID: 20000439 Result: Down-regulated in Transcription
  misc_feature: MA Experiment 20000439 PARAMETER Experiment Name: At_Roots__P Parameter: Age (day) Value: 14 vs. 21
  misc_feature: MA Experiment 20000439 PARAMETER Experiment Name: At_Roots__P Parameter: Organism Value: A. thaliana
  misc_feature: MA Experiment 20000439 PARAMETER Experiment Name: At_Roots__P Parameter: Tissue Value: Roots vs. Whole Plant
  misc_feature: MA Experiment ID: 20000451 Result: Up-regulated in Transcription
  misc_feature: MA Experiment 20000451 PARAMETER Experiment Name: At_CS6879_Shoots-Roots_P Parameter: Age (day) Value: 14
  misc_feature: MA Experiment 20000451 PARAMETER Experiment Name: At_CS6879_Shoots-Roots_P Parameter: Organism Value: A. thaliana
  misc_feature: MA Experiment 20000451 PARAMETER Experiment Name: At_CS6879_Shoots-Roots_P Parameter: Plant Line Value: CS6879 vs. WS
  misc_feature: MA Experiment 20000451 PARAMETER Experiment Name: At_CS6879_Shoots-Roots_P Parameter: Tissue Value: Roots
  misc_feature: MA Experiment ID: 20000495 Result: Down-regulated in Transcription
  misc_feature: MA Experiment 20000495 PARAMETER Experiment Name: At_Guard_Cells_P Parameter: Harvest Date Value: 8/2/2002
  misc_feature: MA Experiment 20000495 PARAMETER Experiment Name: At_Guard_Cells_P Parameter: Organism Value: A. thaliana
  misc_feature: MA Experiment 20000495 PARAMETER Experiment Name: At_Guard_Cells_P Parameter: Tissue Value: Guard Cells vs. Leaves
  misc_feature: MA Experiment ID: 20001556 Result: Down-regulated in Transcription
  misc_feature: MA Experiment 20001556 PARAMETER Experiment Name: At_Drought_Soil_Dry_P Parameter: Age (day) Value: 26
  misc_feature: MA Experiment 20001556 PARAMETER Experiment Name: At_Drought_Soil_Dry_P Parameter: Organism Value: A. thaliana
  misc_feature: MA Experiment 20001556 PARAMETER Experiment Name: At_Drought_Soil_Dry_P Parameter: Plant Line Value: WS
  misc_feature: MA Experiment 20001556 PARAMETER Experiment Name: At_Drought_Soil_Dry_P Parameter: Post Timepoint (hr) Value: None
  misc_feature: MA Experiment 20001556 PARAMETER Experiment Name: At_Drought_Soil_Dry_P Parameter: Post-Treatment Value: None
  misc_feature: MA Experiment 20001556 PARAMETER Experiment Name: At_Drought_Soil_Dry_P Parameter: Timepoint (day) Value: 12
  misc_feature: MA Experiment 20001556 PARAMETER Experiment Name: At_Drought_Soil_Dry_P Parameter: Treatment Value: Drought vs. No Drought
  misc_feature: MA Experiment ID: 20001557 Result: Down-regulated in Transcription
  misc_feature: MA Experiment 20001557 PARAMETER Experiment Name: At_Drought_Soil_Dry_P Parameter: Age (day) Value: 27
  misc_feature: MA Experiment 20001557 PARAMETER Experiment Name: At_Drought_Soil_Dry_P Parameter: Organism Value: A. thaliana
  misc_feature: MA Experiment 20001557 PARAMETER Experiment Name: At_Drought_Soil_Dry_P Parameter: Plant Line Value: WS
  misc_feature: MA Experiment 20001557 PARAMETER Experiment Name: At_Drought_Soil_Dry_P Parameter: Post Timepoint (hr) Value: 3
  misc_feature: MA Experiment 20001557 PARAMETER Experiment Name: At_Drought_Soil_Dry_P Parameter: Post-Treatment Value: Re-Water vs. No Drought
  misc_feature: MA Experiment 20001557 PARAMETER Experiment Name: At_Drought_Soil_Dry_P Parameter: Timepoint (day) Value: 13
  misc_feature: MA Experiment 20001557 PARAMETER Experiment Name: At_Drought_Soil_Dry_P Parameter: Treatment Value: Drought vs. No Drought
  misc_feature: MA Experiment ID: 20001558 Result: Down-regulated in Transcription
  misc_feature: MA Experiment 20001558 PARAMETER Experiment Name: At_Drought_Soil_Dry_P Parameter: Age (day) Value: 27
  misc_feature: MA Experiment 20001558 PARAMETER Experiment Name: At_Drought_Soil_Dry_P Parameter: Organism Value: A. thaliana
  misc_feature: MA Experiment 20001558 PARAMETER Experiment Name: At_Drought_Soil_Dry_P Parameter: Plant Line Value: WS
  misc_feature: MA Experiment 20001558 PARAMETER Experiment Name: At_Drought_Soil_Dry_P Parameter: Post Timepoint (hr) Value: 6
  misc_feature: MA Experiment 20001558 PARAMETER Experiment Name: At_Drought_Soil_Dry_P Parameter: Post-Treatment Value: Re-Water vs. No Drought
  misc_feature: MA Experiment 20001558 PARAMETER Experiment Name: At_Drought_Soil_Dry_P Parameter: Timepoint (day) Value: 13
  misc_feature: MA Experiment 20001558 PARAMETER Experiment Name: At_Drought_Soil_Dry_P Parameter: Treatment Value: Drought vs. No Drought
  misc_feature: MA Experiment ID: 20001560 Result: Down-regulated in Transcription
  misc_feature: MA Experiment 20001560 PARAMETER Experiment Name: At_Drought_Soil_Dry_P Parameter: Age (day) Value: 28
  misc_feature: MA Experiment 20001560 PARAMETER Experiment Name: At_Drought_Soil_Dry_P Parameter: Organism Value: A. thaliana
  misc_feature: MA Experiment 20001560 PARAMETER Experiment Name: At_Drought_Soil_Dry_P Parameter: Plant Line Value: WS
  misc_feature: MA Experiment 20001560 PARAMETER Experiment Name: At_Drought_Soil_Dry_P Parameter: Post Timepoint (hr) Value: None
  misc_feature: MA Experiment 20001560 PARAMETER Experiment Name: At_Drought_Soil_Dry_P Parameter: Post-Treatment Value: None
  misc_feature: MA Experiment 20001560 PARAMETER Experiment Name: At_Drought_Soil_Dry_P Parameter: Timepoint (day) Value: 14
  misc_feature: MA Experiment 20001560 PARAMETER Experiment Name: At_Drought_Soil_Dry_P Parameter: Treatment Value: Drought vs. No Drought
  misc_feature: MA Experiment ID: 20001768 Result: Up-regulated in Transcription
  misc_feature: MA Experiment 20001768 PARAMETER Experiment Name: At_Far-red-enriched-adult_P Parameter: Age (day) Value: 28
  misc_feature: MA Experiment 20001768 PARAMETER Experiment Name: At_Far-red-enriched-adult_P Parameter: Light Value: Far-red enriched vs. White
  misc_feature: MA Experiment 20001768 PARAMETER Experiment Name: At_Far-red-enriched-adult_P Parameter: Organism Value: A. thaliana
  misc_feature: MA Experiment 20001768 PARAMETER Experiment Name: At_Far-red-enriched-adult_P Parameter: Plant Line Value: Columbia
  misc_feature: MA Experiment 20001768 PARAMETER Experiment Name: At_Far-red-enriched-adult_P Parameter: Timepoint (hr) Value: 1
  misc_feature: MA Experiment 20001768 PARAMETER Experiment Name: At_Far-red-enriched-adult_P Parameter: Tissue Value: Aerial
  misc_feature: MA Experiment ID: 20001773 Result: Down-regulated in Transcription
  misc_feature: MA Experiment 20001773 PARAMETER Experiment Name: At_Far-red-enriched-adult_P Parameter: Age (day) Value: 30
  misc_feature: MA Experiment 20001773 PARAMETER Experiment Name: At_Far-red-enriched-adult_P Parameter: Light Value: Far-red enriched vs. White
  misc_feature: MA Experiment 20001773 PARAMETER Experiment Name: At_Far-red-enriched-adult_P Parameter: Organism Value: A. thaliana
  misc_feature: MA Experiment 20001773 PARAMETER Experiment Name: At_Far-red-enriched-adult_P Parameter: Plant Line Value: Columbia
  misc_feature: MA Experiment 20001773 PARAMETER Experiment Name: At_Far-red-enriched-adult_P Parameter: Timepoint (hr) Value: 48
  misc_feature: MA Experiment 20001773 PARAMETER Experiment Name: At_Far-red-enriched-adult_P Parameter: Tissue Value: Aerial
atggcaacttctgcaatatctaagctcttagtgtctgatttcgcctcctccgttcacatcccttcaaactatgtccgaccaatctccgaccgtccgaacttgtccgaggtcgagagttctggcgattccatccctctgatcgatctccgggacctccatggacctaatcgagccgtaattgtccaacaacttgctagtgcgtgttccacttatggtttctttcagatcaagaatcatggagtaccagatacaaccgtcaataaaatgcaaaccgttgcgagagagttcttccatcaacccgagagcgaaagagtcaaacactactccgcagatccaacaaagacaacgagactctccaccagtttcaacgtcggcgcagacaaagtcttgaactggagagacttccttagactccattgctttcccatagaagatttcatcgaagaatggccatctagtcccatctctttcagagaagtcacagctgaatatgccacgagcgtaagagctttggttttgagacttcttgaggccatctcagagagtttaggccttgaaagcgaccatataagcaatatattaggcaaacacgctcaacacatggcgtttaactactatccgccgtgtccagaacccgagctaacttacggacttcccggacataaagacccaaccgttatcactgtccttcttcaagaccaagtctctggtttgcaagtctttaaggatgataaatgggtcgctgttagtccaattcccaacactttcatcgtcaatatcggcgaccaaatgcaggtcataagcaatgataaatacaagagtgtgctccatagagccgtagtaaacaccgagaacgagcggttatcgattccgactttctatttcccttcaacagatgcagtgattggtccagcacacgagctggtcaatgaacaagactctcttgccatttacagaacctacccgtttgttgagtattgggacaagttttggaacagatcacttgctactgcgagctgtctagacgccttcaaagctccaacaacctaa

SEQ ID NO: 81968 - protein, 349 aa, Arabidopsis thaliana
  peptide (1)..(349): Ceres Seq. ID no. 12662639
  misc_feature (197)..(296): Pfam Name: 2OG-Fe(II) oxygenase superfamily Pfam Description: 2OG-Fe(II) oxygenase superfamily
  misc_feature (1)..(349): Homolog of NCBI NO: 15235126 NR Description: putative Fe(II)/ascorbate oxidase; protein id:
  misc_feature (5)..(348): Homolog of NCBI NO: 15235124 NR Description: putative flavanone 3-beta-hydroxylase; protein At4g10490.1 [Arabidopsis thaliana] >gi|7433238|pir||T04184
  misc_feature (5)..(345): Homolog of NCBI NO: 38345873 NR Description: OSJNBa0064M23.15 [Oryza sativa (japonica
  misc_feature (7)..(344): Homolog of NCBI NO: 15238567 NR Description: flavanone 3-hydroxylase-like protein; protein id: supported by cDNA: 149654., supported by cDNA: gi_14423475,
  misc_feature (7)..(344): Homolog of NCBI NO: 21553527 NR Description: flavanone 3-hydroxylase-like protein [Arabidopsis
  misc_feature (20)..(345): Homolog of NCBI NO: 38345872 NR Description: OSJNBa0064M23.14 [Oryza sativa (japonica
  misc_feature (15)..(345): Homolog of NCBI NO: 37536444 NR Description: unknown protein [Oryza sativa (japonica
  misc_feature (9)..(323): Homolog of NCBI NO: 21327037 NR Description: putative flavanone 3-hydroxylase [Saussurea
  misc_feature (20)..(345): Homolog of NCBI NO: 7433240 NR Description: probable flavonol synthase [imported] - thaliana >gi|20197022|gb|AAM14878.1| putative flavonol synthase
  misc_feature (20)..(345): Homolog of NCBI NO: 30689834 NR Description: flavonol synthase family [Arabidopsis thaliana]
MATSAISKLLVSDFASSVHIPSNYVRPISDRPNLSEVESSGDSIPLIDLRDLHGPNRAVIVQQLASACSTYGFFQIKNHGVPDTTVNKMQTVAREFFHQPESERVKHYSADPTKTTRLSTSFNVGADKVLNWRDFLRLHCFPIEDFIEEWPSSPISFREVTAEYATSVRALVLRLLEAISESLGLESDHISNILGKHAQHMAFNYYPPCPEPELTYGLPGHKDPTVITVLLQDQVSGLQVFKDDKWVAVSPIPNTFIVNIGDQMQVISNDKYKSVLHRAVVNTENERLSIPTFYFPSTDAVIGPAHELVNEQDSLAIYRTYPFVEYWDKFWNRSLATASCLDAFKAPTT

SEQ ID NO: 81969 - protein, 261 aa, Arabidopsis thaliana
  peptide (1)..(261): Ceres Seq. ID no. 12662640
  misc_feature (109)..(208): Pfam Name: 2OG-Fe(II) oxygenase superfamily Pfam Description: 2OG-Fe(II) oxygenase superfamily
  misc_feature (1)..(261): Homolog of NCBI NO: 15235126 NR Description: putative Fe(II)/ascorbate oxidase; protein id:
  misc_feature (1)..(260): Homolog of NCBI NO: 15235124 NR Description: putative flavanone 3-beta-hydroxylase; protein At4g10490.1 [Arabidopsis thaliana] >gi|7433238|pir||T04184
  misc_feature (1)..(257): Homolog of NCBI NO: 38345873 NR Description: OSJNBa0064M23.15 [Oryza sativa (japonica
  misc_feature (1)..(256): Homolog of NCBI NO: 15238567 NR Description: flavanone 3-hydroxylase-like protein; protein id: supported by cDNA: 149654., supported by cDNA: gi_14423475,
  misc_feature (1)..(256): Homolog of NCBI NO: 21553527 NR Description: flavanone 3-hydroxylase-like protein [Arabidopsis
  misc_feature (1)..(257): Homolog of NCBI NO: 38345872 NR Description: OSJNBa0064M23.14 [Oryza sativa (japonica
  misc_feature (1)..(257): Homolog of NCBI NO: 37536444 NR Description: unknown protein [Oryza sativa (japonica
  misc_feature (1)..(235): Homolog of NCBI NO: 21327037 NR Description: putative flavanone 3-hydroxylase [Saussurea
  misc_feature (1)..(257): Homolog of NCBI NO: 7433240 NR Description: probable flavonol synthase [imported] - thaliana >gi|20197022|gb|AAM14878.1| putative flavonol synthase
  misc_feature (1)..(257): Homolog of NCBI NO: 30689834 NR Description: flavonol synthase family [Arabidopsis thaliana]
MQTVAREFFHQPESERVKHYSADPTKTTRLSTSFNVGADKVLNWRDFLRLHCFPIEDFIEEWPSSPISFREVTAEYATSVRALVLRLLEAISESLGLESDHISNILGKHAQHMAFNYYPPCPEPELTYGLPGHKDPTVITVLLQDQVSGLQVFKDDKWVAVSPIPNTFIVNIGDQMQVISNDKYKSVLHRAVVNTENERLSIPTFYFPSTDAVIGPAHELVNEQDSLAIYRTYPFVEYWDKFWNRSLATASCLDAFKAPTT

SEQ ID NO: 81970 - DNA, 2560 bp, Arabidopsis thaliana
  misc_feature (1)..(2560): Ceres Seq. ID no. 12662680
  misc_feature: MA Experiment ID: 20000173 Result: Down-regulated in Transcription
  misc_feature: MA Experiment 20000173 PARAMETER Experiment Name: At_42deg_Heat_P Parameter: Age (day) Value: 14
  misc_feature: MA Experiment 20000173 PARAMETER Experiment Name: At_42deg_Heat_P Parameter: Organism Value: A. thaliana
  misc_feature: MA Experiment 20000173 PARAMETER Experiment Name: At_42deg_Heat_P Parameter: Plant Line Value: WS
  misc_feature: MA Experiment 20000173 PARAMETER Experiment Name: At_42deg_Heat_P Parameter: Temperature (deg C) Value: 42 vs. 22
  misc_feature: MA Experiment 20000173 PARAMETER Experiment Name: At_42deg_Heat_P Parameter: Timepoint (hr) Value: 6
  misc_feature: MA Experiment 20000173 PARAMETER Experiment Name: At_42deg_Heat_P Parameter: Tissue Value: Aerial
  misc_feature: MA Experiment ID: 20000179 Result: Up-regulated in Transcription
  misc_feature: MA Experiment 20000179 PARAMETER Experiment Name: At_Germinating_Seeds_P Parameter: Age (hr) Value: 6 vs. 0
  misc_feature: MA Experiment 20000179 PARAMETER Experiment Name: At_Germinating_Seeds_P Parameter: Tissue Value: Germinating Seeds
  misc_feature: MA Experiment ID: 20000180 Result: Up-regulated in Transcription
  misc_feature: MA Experiment 20000180 PARAMETER Experiment Name: At_Germinating_Seeds_P Parameter: Age (hr) Value: 24 vs. 0
  misc_feature: MA Experiment 20000180 PARAMETER Experiment Name: At_Germinating_Seeds_P Parameter: Tissue Value: Germinating Seeds
  misc_feature: MA Experiment ID: 20000182 Result: Down-regulated in Transcription
  misc_feature: MA Experiment 20000182 PARAMETER Experiment Name: At_2mM_SA_P Parameter: Age (day) Value: 14
  misc_feature: MA Experiment 20000182 PARAMETER Experiment Name: At_2mM_SA_P Parameter: Organism Value: A. thaliana
  misc_feature: MA Experiment 20000182 PARAMETER Experiment Name: At_2mM_SA_P Parameter: Plant Line Value: WS
  misc_feature: MA Experiment 20000182 PARAMETER Experiment Name: At_2mM_SA_P Parameter: Timepoint (hr) Value: 6
  misc_feature: MA Experiment 20000182 PARAMETER Experiment Name: At_2mM_SA_P Parameter: Tissue Value: Aerial
  misc_feature: MA Experiment 20000182 PARAMETER Experiment Name: At_2mM_SA_P Parameter: Treatment Value: 2mM SA vs. No Treatment
  misc_feature: MA Experiment ID: 20000184 Result: Up-regulated in Transcription
  misc_feature: MA Experiment 20000184 PARAMETER Experiment Name: At_Shoots__P Parameter: Age (day) Value: 7
  misc_feature: MA Experiment 20000184 PARAMETER Experiment Name: At_Shoots__P Parameter: Tissue Value: Shoots vs. Whole Plant
  misc_feature: MA Experiment ID: 20000437 Result: Down-regulated in Transcription
  misc_feature: MA Experiment 20000437 PARAMETER Experiment Name: At_Drought_P Parameter: Age (day) Value: 8
  misc_feature: MA Experiment 20000437 PARAMETER Experiment Name: At_Drought_P Parameter: Organism Value: A. thaliana
  misc_feature: MA Experiment 20000437 PARAMETER Experiment Name: At_Drought_P Parameter: Plant Line Value: WS
  misc_feature: MA Experiment 20000437 PARAMETER Experiment Name: At_Drought_P Parameter: Timepoint (hr) Value: 24
  misc_feature: MA Experiment 20000437 PARAMETER Experiment Name: At_Drought_P Parameter: Tissue Value: Whole Plant
  misc_feature: MA Experiment 20000437 PARAMETER Experiment Name: At_Drought_P Parameter: Treatment Value: Drought vs. No Drought
  misc_feature: MA Experiment ID: 20000438 Result: Up-regulated in Transcription
  misc_feature: MA Experiment 20000438 PARAMETER Experiment Name: At_Shoots__P Parameter: Age (day) Value: 14
  misc_feature: MA Experiment 20000438 PARAMETER Experiment Name: At_Shoots__P Parameter: Tissue Value: Shoots vs. Whole Plant
  misc_feature: MA Experiment ID: 20000573 Result: Down-regulated in Transcription
  misc_feature: MA Experiment 20000573 PARAMETER Experiment Name: At_100uM_ABA_Mutants__P Parameter: Organism Value: A. thaliana
  misc_feature: MA Experiment 20000573 PARAMETER Experiment Name: At_100uM_ABA_Mutants__P Parameter: Plant Line Value: CS22 vs. Ler wt
  misc_feature: MA Experiment 20000573 PARAMETER Experiment Name: At_100uM_ABA_Mutants__P Parameter: Timepoint (hr) Value: N/A
  misc_feature: MA Experiment 20000573 PARAMETER Experiment Name: At_100uM_ABA_Mutants__P Parameter: Tissue Value: Whole Plant
  misc_feature: MA Experiment 20000573 PARAMETER Experiment Name: At_100uM_ABA_Mutants__P Parameter: Treatment Value: None
  misc_feature: MA Experiment ID: 20000574 Result: Down-regulated in Transcription
  misc_feature: MA Experiment 20000574 PARAMETER Experiment Name: At_100uM_ABA_Mutants__P Parameter: Organism Value: A. thaliana
  misc_feature: MA Experiment 20000574 PARAMETER Experiment Name: At_100uM_ABA_Mutants__P Parameter: Plant Line Value: CS23 vs. Ler wt
  misc_feature: MA Experiment 20000574 PARAMETER Experiment Name: At_100uM_ABA_Mutants__P Parameter: Timepoint (hr) Value: N/A
  misc_feature: MA Experiment 20000574 PARAMETER Experiment Name: At_100uM_ABA_Mutants__P Parameter: Tissue Value: Whole Plant
  misc_feature: MA Experiment 20000574 PARAMETER Experiment Name: At_100uM_ABA_Mutants__P Parameter: Treatment Value: None
  misc_feature: MA Experiment ID: 20000794 Result: Up-regulated in Transcription
  misc_feature: MA Experiment 20000794 PARAMETER Experiment Name: At_Petals_P Parameter: Age (day) Value: 23-25 days
  misc_feature: MA Experiment 20000794 PARAMETER Experiment Name: At_Petals_P Parameter: Plant Line Value: WS
  misc_feature: MA Experiment 20000794 PARAMETER Experiment Name: At_Petals_P Parameter: Tissue Value: Petals vs. Whole plant
  misc_feature: MA Experiment ID: 20001248 Result: Down-regulated in Transcription
  misc_feature: MA Experiment 20001248 PARAMETER Experiment Name: At_Far-red-induction_P Parameter: Age (day) Value: 7
  misc_feature: MA Experiment 20001248 PARAMETER Experiment Name: At_Far-red-induction_P Parameter: Light Value: Far-red vs. White
  misc_feature: MA Experiment 20001248 PARAMETER Experiment Name: At_Far-red-induction_P Parameter: Organism Value: A. thaliana
  misc_feature: MA Experiment 20001248 PARAMETER Experiment Name: At_Far-red-induction_P Parameter: Plant Line Value: Columbia
  misc_feature: MA Experiment 20001248 PARAMETER Experiment Name: At_Far-red-induction_P Parameter: Timepoint (hr) Value: 4
  misc_feature: MA Experiment 20001248 PARAMETER Experiment Name: At_Far-red-induction_P Parameter: Tissue Value: Whole Plant
  misc_feature: MA Experiment ID: 20001450 Result: Down-regulated in Transcription
  misc_feature: MA Experiment 20001450 PARAMETER Experiment Name: At_Far-red-induction_P Parameter: Age (day) Value: 7
  misc_feature: MA Experiment 20001450 PARAMETER Experiment Name: At_Far-red-induction_P Parameter: Light Value: Far-red vs. White
  misc_feature: MA Experiment 20001450 PARAMETER Experiment Name: At_Far-red-induction_P Parameter: Organism Value: A. thaliana
  misc_feature: MA Experiment 20001450 PARAMETER Experiment Name: At_Far-red-induction_P Parameter: Plant Line Value: Columbia
  misc_feature: MA Experiment 20001450 PARAMETER Experiment Name: At_Far-red-induction_P Parameter: Timepoint (hr) Value: 8
  misc_feature: MA Experiment 20001450 PARAMETER Experiment Name: At_Far-red-induction_P Parameter: Tissue Value: Whole Plant
  misc_feature: MA Experiment ID: 20001451 Result: Down-regulated in Transcription
  misc_feature: MA Experiment 20001451 PARAMETER Experiment Name: At_Far-red-induction_P Parameter: Age (day) Value: 7
  misc_feature: MA Experiment 20001451 PARAMETER Experiment Name: At_Far-red-induction_P Parameter: Light Value: Far-red vs. White
  misc_feature: MA Experiment 20001451 PARAMETER Experiment Name: At_Far-red-induction_P Parameter: Organism Value: A. thaliana
  misc_feature: MA Experiment 20001451 PARAMETER Experiment Name: At_Far-red-induction_P Parameter: Plant Line Value: Columbia
  misc_feature: MA Experiment 20001451 PARAMETER Experiment Name: At_Far-red-induction_P Parameter: Timepoint (hr) Value: 24
  misc_feature: MA Experiment 20001451 PARAMETER Experiment Name: At_Far-red-induction_P Parameter: Tissue Value: Whole Plant
  misc_feature: MA Experiment ID: 20001557 Result: Down-regulated in Transcription
  misc_feature: MA Experiment 20001557 PARAMETER Experiment Name: At_Drought_Soil_Dry_P Parameter: Age (day) Value: 27
  misc_feature: MA Experiment 20001557 PARAMETER Experiment Name: At_Drought_Soil_Dry_P Parameter: Organism Value: A. thaliana
  misc_feature: MA Experiment 20001557 PARAMETER Experiment Name: At_Drought_Soil_Dry_P Parameter: Plant Line Value: WS
  misc_feature: MA Experiment 20001557 PARAMETER Experiment Name: At_Drought_Soil_Dry_P Parameter: Post Timepoint (hr) Value: 3
  misc_feature: MA Experiment 20001557 PARAMETER Experiment Name: At_Drought_Soil_Dry_P Parameter: Post-Treatment Value: Re-Water vs. No Drought
  misc_feature: MA Experiment 20001557 PARAMETER Experiment Name: At_Drought_Soil_Dry_P Parameter: Timepoint (day) Value: 13
  misc_feature: MA Experiment 20001557 PARAMETER Experiment Name: At_Drought_Soil_Dry_P Parameter: Treatment Value: Drought vs. No Drought
  misc_feature: MA Experiment ID: 20001558 Result: Down-regulated in Transcription
  misc_feature: MA Experiment 20001558 PARAMETER Experiment Name: At_Drought_Soil_Dry_P Parameter: Age (day) Value: 27
  misc_feature: MA Experiment 20001558 PARAMETER Experiment Name: At_Drought_Soil_Dry_P Parameter: Organism Value: A. thaliana
  misc_feature: MA Experiment 20001558 PARAMETER Experiment Name: At_Drought_Soil_Dry_P Parameter: Plant Line Value: WS
  misc_feature: MA Experiment 20001558 PARAMETER Experiment Name: At_Drought_Soil_Dry_P Parameter: Post Timepoint (hr) Value: 6
  misc_feature: MA Experiment 20001558 PARAMETER Experiment Name: At_Drought_Soil_Dry_P Parameter: Post-Treatment Value: Re-Water vs. No Drought
  misc_feature: MA Experiment 20001558 PARAMETER Experiment Name: At_Drought_Soil_Dry_P Parameter: Timepoint (day) Value: 13
  misc_feature: MA Experiment 20001558 PARAMETER Experiment Name: At_Drought_Soil_Dry_P Parameter: Treatment Value: Drought vs. No Drought
  misc_feature: MA Experiment ID: 20001560 Result: Down-regulated in Transcription
  misc_feature: MA Experiment 20001560 PARAMETER Experiment Name: At_Drought_Soil_Dry_P Parameter: Age (day) Value: 28
  misc_feature: MA Experiment 20001560 PARAMETER Experiment Name: At_Drought_Soil_Dry_P Parameter: Organism Value: A. thaliana
  misc_feature: MA Experiment 20001560 PARAMETER Experiment Name: At_Drought_Soil_Dry_P Parameter: Plant Line Value: WS
  misc_feature: MA Experiment 20001560 PARAMETER Experiment Name: At_Drought_Soil_Dry_P Parameter: Post Timepoint (hr) Value: None
  misc_feature: MA Experiment 20001560 PARAMETER Experiment Name: At_Drought_Soil_Dry_P Parameter: Post-Treatment Value: None
  misc_feature: MA Experiment 20001560 PARAMETER Experiment Name: At_Drought_Soil_Dry_P Parameter: Timepoint (day) Value: 14
  misc_feature: MA Experiment 20001560 PARAMETER Experiment Name: At_Drought_Soil_Dry_P Parameter: Treatment Value: Drought vs. No Drought
  misc_feature: MA Experiment ID: 20001757 Result: Down-regulated in Transcription
  misc_feature: MA Experiment 20001757 PARAMETER Experiment Name: At_50mM_NH4NO3_L-to-H_P Parameter: Timepoint (hr) Value: 6
  misc_feature: MA Experiment 20001757 PARAMETER Experiment Name: At_50mM_NH4NO3_L-to-H_P Parameter: Tissue Value: Leaf
  misc_feature: MA Experiment 20001757 PARAMETER Experiment Name: At_50mM_NH4NO3_L-to-H_P Parameter: Treatment Value: 50mM NH4NO3 vs 100mM Mannitol
  misc_feature: MA Experiment ID: 20001905 Result: Down-regulated in Transcription
  misc_feature: MA Experiment 20001905 PARAMETER Experiment Name: At_Drought_Reproduction_P Parameter: Age (day) Value: 40
  misc_feature: MA Experiment 20001905 PARAMETER Experiment Name: At_Drought_Reproduction_P Parameter: Organism Value: A. thaliana
  misc_feature: MA Experiment 20001905 PARAMETER Experiment Name: At_Drought_Reproduction_P Parameter: Plant Line Value: WS
  misc_feature: MA Experiment 20001905 PARAMETER Experiment Name: At_Drought_Reproduction_P Parameter: Timepoint (day) Value: 10
  misc_feature: MA Experiment 20001905 PARAMETER Experiment Name: At_Drought_Reproduction_P Parameter: Tissue Value: Rosettes
  misc_feature: MA Experiment 20001905 PARAMETER Experiment Name: At_Drought_Reproduction_P Parameter: Treatment Value: Drought vs. No Drought
gaagaagactagaagatagctttgtcagattcacatctccccaaaaaaaaaacagagcaagaagaagaagaagaagacaaccatggaagaatcagaacaagttcttcctctattaacaaacccaaaagatctgacaaacccatcatatgcgtcatcatcttcatcttcatctgaaccaagagatgaaacagaggatcttcttttaccaatctccgacgagaatgaggaggaagaagaagagaactcaccaatccgacaagtagcactcactgttccgacaacagatgatccttcattacctgtcttaacatttcgcatgtgggtcttaggaactctctcttgcatcctcttgtcgtttctcaatcagttcttctggtatagaacagaacctctcactatctctgccatctccgctcaaatcgccgtcgtaccacttggtcgtctcatggctgctaaaatcaccgatagagtcttcttccaaggatcaaagtggcagtttacgttgaatccaggtccgtttaatgtgaaagagcatgtgttgatcactattttcgctaacgcgggagctggatctgtttacgcaatacacgttgttaccgtggtcaaagcgttttacatgaagaacataacgttctttgtgtctttcatcgttatcgttaccacccaagtgttaggttttggatgggctggaatatttaggaaataccttgttgaaccggcggcgatgtggtggccggcgaatcttgttcaagtctcactatttagagctttgcacgagaaagaagaacggaccaaaggagggctgacacgtacacaattcttcgtgatagcattcgtttgcagtttcgcttattatgtctttccgggctacttatttcagatcatgacgtcgttgtcgtgggtttgttggttctttccatcatcagttatggcccaacagatcgggtctggtcttcacgggttaggtgttggggccataggacttgactggtcaaccatttcctcttacttgggtagtccactcgctagtccatggtttgctacggctaatgtgggtgtgggatttgtgctggtgatatatgtcttggtaccaatatgctattggctcgatgtgtacaaggccaagaccttccccatattttcgagctcacttttttcgagccagggttcaaagtacaacatcacatccattatagactctaatttccaccttgacctcccagcctacgagcgtcaaggccctttgtatctttgcactttcttcgccattagttacggtgttggttttgccgctttaagcgctaccatcatgcatgttgctctcttccacggaagggagatatgggagcagagtaaggagagttttaaagaaaagaaattggatgtacacgcgaggctaatgcaaaggtacaaacaagttccagagtggtggttttggtgcatactcgttaccaacgttggagccacaatctttgcttgtgagtattacaatgaccaacttcaattaccatggtggggtgttctattggcatgtaccgtcgccattatctttacacttcctatcggtatcatcaccgccatcaccaatcaggcgccaggattgaacattattacagaatatatcataggatatatctatccaggatatccagttgcaaatatgtgctttaaagtatatggatacataagcatgcaacaagccatcacgtttcttcaagactttaagcttggtcactacatgaagataccacctagaaccatgttcatggcacagattgttggaacactcatctcatgttttgtttacctcacaacggcttggtggctaatggagaccatccccaacatatgtgattcggttactaactcggtttggacatgtccatcggataaagtcttttatgatgcatcggtgatatggggacttattggacctcgtagaatctttggagatcttggtttatacaaatccgttaattggttcttccttgtgggcgctatagcccctattcttgtatggttagcttcaaggatgtttcctagacaagagtggatcaagcttataaacatgccggttcttataagcgcgacaagctcgatgccgcccgcaacagccgtgaactacacaacatgggttcttgctggattcttatccggatttgttgtgtttaggtacaggccaaatctatggcagaggtataattatgttttgtcaggagcattggatgctggattagcatttatgggtgtgttgctttatatgtgtttgggacttgagaatgtgagtttggattggtggggaaatgagcttgatggttgtcctttggcctcttgtccaaccgcgcctggtattattgttgaaggatgcccgctttatacgtaaaacgcgtttgcgcggcgaaggcatttccaatgctaaagtttggtggttggatttggtacctatgtttgtaaagatcattttttacattcattctcatattcagtgtgtgagattgctgtgtatagtaaggatgattcattagtagggtggggtatttattcaattattcggattgat

SEQ ID NO: 81971 - protein, 766 aa, Arabidopsis thaliana
  peptide (1)..(766): Ceres Seq. ID no. 12662681
  misc_feature (36)..(766): Homolog of NCBI NO: 34898012 NR Description: ESTs D25093(R3139),AU082160(R3139) correspond to
  misc_feature (52)..(764): Homolog of NCBI NO: 34898034 NR Description: Similar to Arabidopsis thaliana BAC T12H20;
  misc_feature (52)..(764): Homolog of NCBI NO: 25553564 NR Description: putative isp4 protein [Oryza sativa (japonica
  misc_feature (49)..(765): Homolog of NCBI NO: 15234254 NR Description: putative protein; protein id: At4g27730.1
  misc_feature (34)..(764): Homolog of NCBI NO: 15238761 NR Description: isp4 protein; protein id: At5g53510.1 thaliana] >gi|9759190|dbj|BAB09727.1| isp4 protein [Arabidopsis
  misc_feature (47)..(765): Homolog of NCBI NO: 15238763 NR Description: isp4 protein; protein id: At5g53520.1 thaliana] >gi|9759191|dbj|BAB09728.1| isp4 protein [Arabidopsis
  misc_feature (47)..(765): Homolog of NCBI NO: 15218331 NR Description: unknown protein; protein id: At1g09930.1
  misc_feature (47)..(764): Homolog of NCBI NO: 21592665 NR Description: Isp4-like protein [Arabidopsis thaliana]
  misc_feature (112)..(765): Homolog of NCBI NO: 30722286 NR Description: glutathione transporter GT1 [Brassica juncea]
  misc_feature (112)..(656): Homolog of NCBI NO: 7485100 NR Description: hypothetical protein - Arabidopsis thaliana isp4 like protein [Arabidopsis thaliana]
MEESEQVLPLLTNPKDLTNPSYASSSSSSSEPRDETEDLLLPISDENEEEEEENSPIRQVALTVPTTDDPSLPVLTFRMWVLGTLSCILLSFLNQFFWYRTEPLTISAISAQIAVVPLGRLMAAKITDRVFFQGSKWQFTLNPGPFNVKEHVLITIFANAGAGSVYAIHVVTVVKAFYMKNITFFVSFIVIVTTQVLGFGWAGIFRKYLVEPAAMWWPANLVQVSLFRALHEKEERTKGGLTRTQFFVIAFVCSFAYYVFPGYLFQIMTSLSWVCWFFPSSVMAQQIGSGLHGLGVGAIGLDWSTISSYLGSPLASPWFATANVGVGFVLVIYVLVPICYWLDVYKAKTFPIFSSSLFSSQGSKYNITSIIDSNFHLDLPAYERQGPLYLCTFFAISYGVGFAALSATIMHVALFHGREIWEQSKESFKEKKLDVHARLMQRYKQVPEWWFWCILVTNVGATIFACEYYNDQLQLPWWGVLLACTVAIIFTLPIGIITAITNQAPGLNIITEYIIGYIYPGYPVANMCFKVYGYISMQQAITFLQDFKLGHYMKIPPRTMFMAQIVGTLISCFVYLTTAWWLMETIPNICDSVTNSVWTCPSDKVFYDASVIWGLIGPRRIFGDLGLYKSVNWFFLVGAIAPILVWLASRMFPRQEWIKLINMPVLISATSSMPPATAVNYTTWVLAGFLSGFVVFRYRPNLWQRYNYVLSGALDAGLAFMGVLLYMCLGLENVSLDWWGNELDGCPLASCPTAPGIIVEGCPLYT

SEQ ID NO: 81972 - protein, 688 aa, Arabidopsis thaliana
  peptide (1)..(688): Ceres Seq. ID no. 12662682
  misc_feature (1)..(688): Homolog of NCBI NO: 34898012 NR Description: ESTs D25093(R3139),AU082160(R3139) correspond to
  misc_feature (1)..(686): Homolog of NCBI NO: 34898034 NR Description: Similar to Arabidopsis thaliana BAC T12H20;
  misc_feature (1)..(686): Homolog of NCBI NO: 25553564 NR Description: putative isp4 protein [Oryza sativa (japonica
  misc_feature (1)..(687): Homolog of NCBI NO: 15234254 NR Description: putative protein; protein id: At4g27730.1
  misc_feature (1)..(686): Homolog of NCBI NO: 15238761 NR Description: isp4 protein; protein id: At5g53510.1 thaliana] >gi|9759190|dbj|BAB09727.1| isp4 protein [Arabidopsis
  misc_feature (1)..(687): Homolog of NCBI NO: 15238763 NR Description: isp4 protein; protein id: At5g53520.1 thaliana] >gi|9759191|dbj|BAB09728.1| isp4 protein [Arabidopsis
  misc_feature (1)..(687): Homolog of NCBI NO: 15218331 NR Description: unknown protein; protein id: At1g09930.1
  misc_feature (1)..(686): Homolog of NCBI NO: 21592665 NR Description: Isp4-like protein [Arabidopsis thaliana]
  misc_feature (34)..(687): Homolog of NCBI NO: 30722286 NR Description: glutathione transporter GT1 [Brassica juncea]
  misc_feature (34)..(578): Homolog of NCBI NO: 7485100 NR Description: hypothetical protein - Arabidopsis thaliana isp4 like protein [Arabidopsis thaliana]
MWVLGTLSCILLSFLNQFFWYRTEPLTISAISAQIAVVPLGRLMAAKITDRVFFQGSKWQFTLNPGPFNVKEHVLITIFANAGAGSVYAIHVVTVVKAFYMKNITFFVSFIVIVTTQVLGFGWAGIFRKYLVEPAAMWWPANLVQVSLFRALHEKEERTKGGLTRTQFFVIAFVCSFAYYVFPGYLFQIMTSLSWVCWFFPSSVMAQQIGSGLHGLGVGAIGLDWSTISSYLGSPLASPWFATANVGVGFVLVIYVLVPICYWLDVYKAKTFPIFSSSLFSSQGSKYNITSIIDSNFHLDLPAYERQGPLYLCTFFAISYGVGFAALSATIMHVALFHGREIWEQSKESFKEKKLDVHARLMQRYKQVPEWWFWCILVTNVGATIFACEYYNDQLQLPWWGVLLACTVAIIFTLPIGIITAITNQAPGLNIITEYIIGYIYPGYPVANMCFKVYGYISMQQAITFLQDFKLGHYMKIPPRTMFMAQIVGTLISCFVYLTTAWWLMETIPNICDSVTNSVWTCPSDKVFYDASVIWGLIGPRRIFGDLGLYKSVNWFFLVGAIAPILVWLASRMFPRQEWIKLINMPVLISATSSMPPATAVNYTTWVLAGFLSGFVVFRYRPNLWQRYNYVLSGALDAGLAFMGVLLYMCLGLENVSLDWWGNELDGCPLASCPTAPGIIVEGCPLYT

SEQ ID NO: 81973 - protein, 645 aa, Arabidopsis thaliana
  peptide (1)..(645): Ceres Seq. ID no. 12662683
  misc_feature (1)..(645): Homolog of NCBI NO: 34898012 NR Description: ESTs D25093(R3139),AU082160(R3139) correspond to
  misc_feature (1)..(643): Homolog of NCBI NO: 34898034 NR Description: Similar to Arabidopsis thaliana BAC T12H20;
  misc_feature (1)..(643): Homolog of NCBI NO: 25553564 NR Description: putative isp4 protein [Oryza sativa (japonica
  misc_feature (1)..(644): Homolog of NCBI NO: 15234254 NR Description: putative protein; protein id: At4g27730.1
  misc_feature (1)..(643): Homolog of NCBI NO: 15238761 NR Description: isp4 protein; protein id: At5g53510.1 thaliana] >gi|9759190|dbj|BAB09727.1| isp4 protein [Arabidopsis
  misc_feature (1)..(644): Homolog of NCBI NO: 15238763 NR Description: isp4 protein; protein id: At5g53520.1 thaliana] >gi|9759191|dbj|BAB09728.1| isp4 protein [Arabidopsis
  misc_feature (1)..(644): Homolog of NCBI NO: 15218331 NR Description: unknown protein; protein id: At1g09930.1
  misc_feature (1)..(643): Homolog of NCBI NO: 21592665 NR Description: Isp4-like protein [Arabidopsis thaliana]
  misc_feature (1)..(644): Homolog of NCBI NO: 30722286 NR Description: glutathione transporter GT1 [Brassica juncea]
  misc_feature (1)..(535): Homolog of NCBI NO: 7485100 NR Description: hypothetical protein - Arabidopsis thaliana isp4 like protein [Arabidopsis thaliana]
MAAKITDRVFFQGSKWQFTLNPGPFNVKEHVLITIFANAGAGSVYAIHVVTVVKAFYMKNITFFVSFIVIVTTQVLGFGWAGIFRKYLVEPAAMWWPANLVQVSLFRALHEKEERTKGGLTRTQFFVIAFVCSFAYYVFPGYLFQIMTSLSWVCWFFPSSVMAQQIGSGLHGLGVGAIGLDWSTISSYLGSPLASPWFATANVGVGFVLVIYVLVPICYWLDVYKAKTFPIFSSSLFSSQGSKYNITSIIDSNFHLDLPAYERQGPLYLCTFFAISYGVGFAALSATIMHVALFHGREIWEQSKESFKEKKLDVHARLMQRYKQVPEWWFWCILVTNVGATIFACEYYNDQLQLPWWGVLLACTVAIIFTLPIGIITAITNQAPGLNIITEYIIGYIYPGYPVANMCFKVYGYISMQQAITFLQDFKLGHYMKIPPRTMFMAQIVGTLISCFVYLTTAWWLMETIPNICDSVTNSVWTCPSDKVFYDASVIWGLIGPRRIFGDLGLYKSVNWFFLVGAIAPILVWLASRMFPRQEWIKLINMPVLISATSSMPPATAVNYTTWVLAGFLSGFVVFRYRPNLWQRYNYVLSGALDAGLAFMGVLLYMCLGLENVSLDWWGNELDGCPLASCPTAPGIIVEGCPLYT

SEQ ID NO: 81974 - DNA, 1203 bp, Arabidopsis thaliana
  misc_feature (1)..(1203): Ceres Seq. ID no. 12662710
atgtcgatcaagcttctcgttcttgttttctctcttctgataatcttcacgagacccaaattgatcgccgatcatcacttaactacaagaatctcgccgatttatccttcgatttctacgtttcagccttcgattccgccgtttttacctccatcgccgtcgcgcagagcacaatctccgacggtgaagccgtctttgccatttgtaccggcgttgttcgttttcggagattcctcagtcgatagcggaaccaataactttcttggaaccttagcgagagcagatcggcttccctacggtcgcgatttcgatacgcatcaaccaacgggaaggttttgcaatggaagaatcccagttgattatctaggcttaccattcgttcctagctatcttggacaaactgggactgttgaagacatgtttcaaggagtaaactatgcatcagctggtgctggaatcatcttatcaagtggatctgaattgggccagcgggtttcatttgcgatgcaagttgagcagtttgttgatacgtttcagcagatgatactgagtattggggagaaagcttcggaacgtttagtgtcaaactcggttttctacatatcgattggagtgaatgattacatacatttctacatcagaaacatctccaatgtgcagaatctctatactccatggaattttaatcagttcttggcttctaatatgagacaggagctcaagaccttgtacaatgtcaaggtgaggaggatggtggtgatgggactgccacctattggctgtgcaccatactacatgtggaaatacagaagccagaacggagaatgtgcagaagaagtgaacagcatgatcatggaatccaactttgtcatgagatacactgtagataaactcaaccgtgagcttccaggggcatccattatctactgtgacgtgttccaaagcgctatggacattctcaggaaccaccaacactacggttttaatgagacgacagatgcgtgttgtgggctagggaggtacaaaggatggcttccatgcatctcgccggagatggcttgctctgacgcctccggtcacctctggtgggaccagtttcatcctacagacgccgttaacgccattctagccgacaatgtatggaatggtcgccacgtggacatgtgttaccctactaacctagaaactatgcttcattcttaa

SEQ ID NO: 81975 - protein, 400 aa, Arabidopsis thaliana
  peptide (1)..(400): Ceres Seq. ID no. 12662711
  misc_feature (72)..(380): Pfam Name: GDSL-like Lipase/Acylhydrolase Pfam Description: GDSL-like Lipase/Acylhydrolase
  misc_feature (1)..(400): Homolog of NCBI NO: 18413404 NR Description: putative protein; protein id: At4g10950.1
  misc_feature (43)..(400): Homolog of NCBI NO: 7486138 NR Description: hypothetical protein F25I24.160 - Arabidopsis >gi|4539369|emb|CAB40063.1| putative protein [Arabidopsis >gi|7267793|emb|CAB81196.1| putative protein [Arabidopsis
  misc_feature (43)..(400): Homolog of NCBI NO: 7486718 NR Description: hypothetical protein F8M12.9 - Arabidopsis >gi|3513738|gb|AAC33954.1| similar to the GDSL family of
  misc_feature (70)..(397): Homolog of NCBI NO: 15241626 NR Description: GDSL-motif lipase acylhydrolase-like protein;
  misc_feature (67)..(394): Homolog of NCBI NO: 18417760 NR Description: putative protein; protein id: At5g15720.1, by cDNA: 118296. [Arabidopsis thaliana]
  misc_feature (69)..(397): Homolog of NCBI NO: 18409881 NR Description: hypothetical protein; protein id: At1g71691.1
  misc_feature (67)..(394): Homolog of NCBI NO: 11280578 NR Description: hypothetical protein F14F8_100 - Arabidopsis >gi|9755617|emb|CAC01771.1| putative protein [Arabidopsis
  misc_feature (67)..(397): Homolog of NCBI NO: 34910808 NR Description: GDSL-motif lipase/hydrolase-like protein [Oryza
  misc_feature (67)..(397): Homolog of NCBI NO: 15220512 NR Description: lipase/hydrolase, putative; protein id: supported by cDNA: 6680., supported by cDNA: gi_15215767
  misc_feature (58)..(399): Homolog of NCBI NO: 15224005 NR Description: putative GDSL-motif lipase/acylhydrolase; protein At1g71250.1 [Arabidopsis thaliana] >gi|25336259|pir||B96737
MSIKLLVLVFSLLIIFTRPKLIADHHLTTRISPIYPSISTFQPSIPPFLPPSPSRRAQSPTVKPSLPFVPALFVFGDSSVDSGTNNFLGTLARADRLPYGRDFDTHQPTGRFCNGRIPVDYLGLPFVPSYLGQTGTVEDMFQGVNYASAGAGIILSSGSELGQRVSFAMQVEQFVDTFQQMILSIGEKASERLVSNSVFYISIGVNDYIHFYIRNISNVQNLYTPWNFNQFLASNMRQELKTLYNVKVRRMVVMGLPPIGCAPYYMWKYRSQNGECAEEVNSMIMESNFVMRYTVDKLNRELPGASIIYCDVFQSAMDILRNHQHYGFNETTDACCGLGRYKGWLPCISPEMACSDASGHLWWDQFHPTDAVNAILADNVWNGRHVDMCYPTNLETMLHS

SEQ ID NO: 81976 - protein, 261 aa, Arabidopsis thaliana
  peptide (1)..(261): Ceres Seq. ID no. 12662712
  misc_feature (1)..(241): Pfam Name: GDSL-like Lipase/Acylhydrolase Pfam Description: GDSL-like Lipase/Acylhydrolase
  misc_feature (1)..(261): Homolog of NCBI NO: 18413404 NR Description: putative protein; protein id: At4g10950.1
  misc_feature (1)..(261): Homolog of NCBI NO: 7486138 NR Description: hypothetical protein F25I24.160 - Arabidopsis >gi|4539369|emb|CAB40063.1| putative protein [Arabidopsis >gi|7267793|emb|CAB81196.1| putative protein [Arabidopsis
  misc_feature (1)..(261): Homolog of NCBI NO: 7486718 NR Description: hypothetical protein F8M12.9 - Arabidopsis >gi|3513738|gb|AAC33954.1| similar to the GDSL family of
  misc_feature (1)..(258): Homolog of NCBI NO: 15241626 NR Description: GDSL-motif lipase acylhydrolase-like protein;
  misc_feature (1)..(255): Homolog of NCBI NO: 18417760 NR Description: putative protein; protein id: At5g15720.1, by cDNA: 118296. [Arabidopsis thaliana]
  misc_feature (1)..(258): Homolog of NCBI NO: 18409881 NR Description: hypothetical protein; protein id: At1g71691.1
  misc_feature (1)..(255): Homolog of NCBI NO: 11280578 NR Description: hypothetical protein F14F8_100 - Arabidopsis >gi|9755617|emb|CAC01771.1| putative protein [Arabidopsis
  misc_feature (1)..(258): Homolog of NCBI NO: 34910808 NR Description: GDSL-motif lipase/hydrolase-like protein [Oryza
  misc_feature (1)..(258): Homolog of NCBI NO: 15220512 NR Description: lipase/hydrolase, putative; protein id: supported by cDNA: 6680., supported by cDNA: gi_15215767
  misc_feature (1)..(260): Homolog of NCBI NO: 15224005 NR Description: putative GDSL-motif lipase/acylhydrolase; protein At1g71250.1 [Arabidopsis thaliana] >gi|25336259|pir||B96737
MFQGVNYASAGAGIILSSGSELGQRVSFAMQVEQFVDTFQQMILSIGEKASERLVSNSVFYISIGVNDYIHFYIRNISNVQNLYTPWNFNQFLASNMRQELKTLYNVKVRRMVVMGLPPIGCAPYYMWKYRSQNGECAEEVNSMIMESNFVMRYTVDKLNRELPGASIIYCDVFQSAMDILRNHQHYGFNETTDACCGLGRYKGWLPCISPEMACSDASGHLWWDQFHPTDAVNAILADNVWNGRHVDMCYPTNLETMLHS

SEQ ID NO: 81977 - protein, 232 aa, Arabidopsis thaliana
  peptide (1)..(232): Ceres Seq. ID no. 12662713
  misc_feature (1)..(212): Pfam Name: GDSL-like Lipase/Acylhydrolase Pfam Description: GDSL-like Lipase/Acylhydrolase
  misc_feature (1)..(232): Homolog of NCBI NO: 18413404 NR Description: putative protein; protein id: At4g10950.1
  misc_feature (1)..(232): Homolog of NCBI NO: 7486138 NR Description: hypothetical protein F25I24.160 - Arabidopsis >gi|4539369|emb|CAB40063.1| putative protein [Arabidopsis >gi|7267793|emb|CAB81196.1| putative protein [Arabidopsis
  misc_feature (1)..(232): Homolog of NCBI NO: 7486718 NR Description: hypothetical protein F8M12.9 - Arabidopsis >gi|3513738|gb|AAC33954.1| similar to the GDSL family of
  misc_feature (1)..(229): Homolog of NCBI NO: 15241626 NR Description: GDSL-motif lipase acylhydrolase-like protein;
  misc_feature (1)..(226): Homolog of NCBI NO: 18417760 NR Description: putative protein; protein id: At5g15720.1, by cDNA: 118296. [Arabidopsis thaliana]
  misc_feature (1)..(229): Homolog of NCBI NO: 18409881 NR Description: hypothetical protein; protein id: At1g71691.1
  misc_feature (1)..(226): Homolog of NCBI NO: 11280578 NR Description: hypothetical protein F14F8_100 - Arabidopsis >gi|9755617|emb|CAC01771.1| putative protein [Arabidopsis
  misc_feature (1)..(229): Homolog of NCBI NO: 34910808 NR Description: GDSL-motif lipase/hydrolase-like protein [Oryza
  misc_feature (1)..(229): Homolog of NCBI NO: 15220512 NR Description: lipase/hydrolase, putative; protein id: supported by cDNA: 6680., supported by cDNA: gi_15215767
  misc_feature (1)..(231): Homolog of NCBI NO: 15224005 NR Description: putative GDSL-motif lipase/acylhydrolase; protein At1g71250.1 [Arabidopsis thaliana] >gi|25336259|pir||B96737
MQVEQFVDTFQQMILSIGEKASERLVSNSVFYISIGVNDYIHFYIRNISNVQNLYTPWNFNQFLASNMRQELKTLYNVKVRRMVVMGLPPIGCAPYYMWKYRSQNGECAEEVNSMIMESNFVMRYTVDKLNRELPGASIIYCDVFQSAMDILRNHQHYGFNETTDACCGLGRYKGWLPCISPEMACSDASGHLWWDQFHPTDAVNAILADNVWNGRHVDMCYPTNLETMLHS

SEQ ID NO: 81978 - DNA, 1083 bp, Arabidopsis thaliana
  misc_feature (1)..(1083): Ceres Seq. ID no. 12662714
  misc_feature: MA Experiment ID: 108561 Result: Up-regulated in Transcription
  misc_feature: MA Experiment 108561 PARAMETER Experiment Name: At_100uM_ABA_cDNA_P Parameter: Timepoint (hr) Value: 6
  misc_feature: MA Experiment 108561 PARAMETER Experiment Name: At_100uM_ABA_cDNA_P Parameter: Tissue Value: Aerial
  misc_feature: MA Experiment 108561 PARAMETER Experiment Name: At_100uM_ABA_cDNA_P Parameter: Treatment Value: 100uM ABA vs. No Treatment
  misc_feature: MA Experiment ID: 108572 Result: Up-regulated in Transcription
  misc_feature: MA Experiment 108572 PARAMETER Experiment Name: At_Drought_cDNA_P Parameter: Timepoint (hr) Value: 1
  misc_feature: MA Experiment 108572 PARAMETER Experiment Name: At_Drought_cDNA_P Parameter: Tissue Value: Aerial
  misc_feature: MA Experiment 108572 PARAMETER Experiment Name: At_Drought_cDNA_P Parameter: Treatment Value: Drought vs. No Drought
  misc_feature: MA Experiment ID: 108573 Result: Up-regulated in Transcription
  misc_feature: MA Experiment 108573 PARAMETER Experiment Name: At_Drought_cDNA_P Parameter: Timepoint (hr) Value: 6
  misc_feature: MA Experiment 108573 PARAMETER Experiment Name: At_Drought_cDNA_P Parameter: Tissue Value: Aerial
  misc_feature: MA Experiment 108573 PARAMETER Experiment Name: At_Drought_cDNA_P Parameter: Treatment Value: Drought vs. No Drought
  misc_feature: MA Experiment ID: 108585 Result: Up-regulated in Transcription
  misc_feature: MA Experiment 108585 PARAMETER Experiment Name: At_5mM_NaNP_cDNA_P Parameter: Timepoint (hr) Value: 6
  misc_feature: MA Experiment 108585 PARAMETER Experiment Name: At_5mM_NaNP_cDNA_P Parameter: Tissue Value: Aerial
  misc_feature: MA Experiment 108585 PARAMETER Experiment Name: At_5mM_NaNP_cDNA_P Parameter: Treatment Value: null
  misc_feature: MA Experiment ID: 108595 Result: Up-regulated in Transcription
  misc_feature: MA Experiment 108595 PARAMETER Experiment Name: At_Ler-pi_Ovule_cDNA_P Parameter: Plant Line Value: null
  misc_feature: MA Experiment ID: 108668 Result: Up-regulated in Transcription
  misc_feature: MA Experiment 108668 PARAMETER Experiment Name: At_2mM_SA_cDNA_P Parameter: Plant Line Value: WS
  misc_feature: MA Experiment 108668 PARAMETER Experiment Name: At_2mM_SA_cDNA_P Parameter: Timepoint (hr) Value: 6
  misc_feature: MA Experiment 108668 PARAMETER Experiment Name: At_2mM_SA_cDNA_P Parameter: Treatment Value: 2mM SA vs. No Treatment
  misc_feature: Pfam Name: Lipase_3 Pfam Description: Lipase (class 3)
atgtttagtggtacagaagaagagaaaggaatgatgattagtgaaagagatgattttagtctcactggaccattacacttaacatctatagattgggctaatgaacatcatcgacgatccgtagctggatctttggttcaaggaatctatgtagctgagcgtgaccgtcagctacaaagagaaggtcctgagttagctttatctccaatatggtctgagtttttccatttccgcctcattcgtaagtttgtcgatgacgcggataactctatcttcggaggaatctatgagtacaaactgccgcaacagctctctcaaaccgtcaaatcaatggaatttagtccacgttttgtgattgctttcagaggaacggttacaaaagtggactccatttcccgtgacatcgagcatgacatccatgttattagaaacgggcttcacacgacaacacggtttgagatagctatccaagcagtgagaaacattgttgcttcggttggtggttctagtgtttggcttgctggtcattctcttggtgcatctatggcattacttaccgggaaaaccatcgctagaaccgggttttttcctgagtgtttcgcattcaatccgccgtttttgtctgcccctatcgaaaaaattaaggataagaggattaaacatgggatacgcattgcaggcagtgtgatcacagctggacttgctctagccaaaaaagccacccaacactacagccaaaacgaccgtgcattacccgcacctcctgatccatttgaagctttatccgactggttcccgcggctgtatgtcaaccctggtgaccacttatgctcagagtatgttggttactttgagcaccgaaacaagatggaagaaatcgggattgggtttgtagagcgggtagcgacgcagcactcgttgggcggtatgctgttaggaggacaagagccggtacatctgattccatcttcggttttgacggtgaacttaagctcctcgagagatttcaaacaagctcatgggattcatcagtggtggagggaagataacaagtttgagactaaagtttaccagtacaaatga

SEQ ID NO: 81979 - protein, 360 aa, Arabidopsis thaliana
  peptide (1)..(360): Ceres Seq. ID no. 12662715
  misc_feature: Pfam Name: Lipase_3 Pfam Description: Lipase (class 3)
  misc_feature (1)..(360): Homolog of NCBI NO: 18413406 NR Description: unknown protein; protein id: At4g10955.1
  misc_feature (11)..(322): Homolog of NCBI NO: 7486138 NR Description: hypothetical protein F25I24.160 - Arabidopsis >gi|4539369|emb|CAB40063.1| putative protein [Arabidopsis >gi|7267793|emb|CAB81196.1| putative protein [Arabidopsis
  misc_feature (33)..(322): Homolog of NCBI NO: 7486718 NR Description: hypothetical protein F8M12.9 - Arabidopsis >gi|3513738|gb|AAC33954.1| similar to the GDSL family of
  misc_feature (12)..(360): Homolog of NCBI NO: 18396010 NR Description: expressed protein; protein id: At2g05260.1, by cDNA: 33377. [Arabidopsis thaliana] >gi|25411153|pir||E84466
  misc_feature (9)..(346): Homolog of NCBI NO: 30689345 NR Description: expressed protein [Arabidopsis thaliana] unknown protein [Arabidopsis thaliana]
  misc_feature (44)..(359): Homolog of NCBI NO: 34910674 NR Description: P0690B02.1 [Oryza sativa (japonica
  misc_feature (14)..(350): Homolog of NCBI NO: 15237918 NR Description: putative protein; protein id: At5g24220.1 thaliana] >gi|10177081|dbj|BAB10387.1|
  misc_feature (15)..(350): Homolog of NCBI NO: 15237909 NR Description: putative protein; protein id: At5g24180.1 thaliana] >gi|9757927|dbj|BAB08409.1|
  misc_feature (9)..(247): Homolog of NCBI NO: 10177082 NR Description: gene_id:MOP9.4~pir||T04290~similar to unknown
  misc_feature (12)..(346): Homolog of NCBI NO: 15237913 NR Description: putative protein; protein id: At5g24200.1 thaliana] >gi|9757929|dbj|BAB08411.1|
MFSGTEEEKGMMISERDDFSLTGPLHLTSIDWANEHHRRSVAGSLVQGIYVAERDRQLQREGPELALSPIWSEFFHFRLIRKFVDDADNSIFGGIYEYKLPQQLSQTVKSMEFSPRFVIAFRGTVTKVDSISRDIEHDIHVIRNGLHTTTRFEIAIQAVRNIVASVGGSSVWLAGHSLGASMALLTGKTIARTGFFPECFAFNPPFLSAPIEKIKDKRIKHGIRIAGSVITAGLALAKKATQHYSQNDRALPAPPDPFEALSDWFPRLYVNPGDHLCSEYVGYFEHRNKMEEIGIGFVERVATQHSLGGMLLGGQEPVHLIPSSVLTVNLSSSRDFKQAHGIHQWWREDNKFETKVYQYK

SEQ ID NO: 81980 - protein, 350 aa, Arabidopsis thaliana
  peptide (1)..(350): Ceres Seq. ID no. 12662716
  misc_feature: Pfam Name: Lipase_3 Pfam Description: Lipase (class 3)
  misc_feature (1)..(350): Homolog of NCBI NO: 18413406 NR Description: unknown protein; protein id: At4g10955.1
  misc_feature (1)..(312): Homolog of NCBI NO: 7486138 NR Description: hypothetical protein F25I24.160 - Arabidopsis >gi|4539369|emb|CAB40063.1| putative protein [Arabidopsis >gi|7267793|emb|CAB81196.1| putative protein [Arabidopsis
  misc_feature (23)..(312): Homolog of NCBI NO: 7486718 NR Description: hypothetical protein F8M12.9 - Arabidopsis >gi|3513738|gb|AAC33954.1| similar to the GDSL family of
  misc_feature (2)..(350): Homolog of NCBI NO: 18396010 NR Description: expressed protein; protein id: At2g05260.1, by cDNA: 33377. [Arabidopsis thaliana] >gi|25411153|pir||E84466
  misc_feature (1)..(336): Homolog of NCBI NO: 30689345 NR Description: expressed protein [Arabidopsis thaliana] unknown protein [Arabidopsis thaliana]
  misc_feature (34)..(349): Homolog of NCBI NO: 34910674 NR Description: P0690B02.1 [Oryza sativa (japonica
  misc_feature (4)..(340): Homolog of NCBI NO: 15237918 NR Description: putative protein; protein id: At5g24220.1 thaliana] >gi|10177081|dbj|BAB10387.1|
  misc_feature (5)..(340): Homolog of NCBI NO: 15237909 NR Description: putative protein; protein id: At5g24180.1 thaliana] >gi|9757927|dbj|BAB08409.1|
  misc_feature (1)..(237): Homolog of NCBI NO: 10177082 NR Description: gene_id:MOP9.4~pir||T04290~similar to unknown
  misc_feature (2)..(336): Homolog of NCBI NO: 15237913 NR Description: putative protein; protein id: At5g24200.1 thaliana] >gi|9757929|dbj|BAB08411.1|
MMISERDDFSLTGPLHLTSIDWANEHHRRSVAGSLVQGIYVAERDRQLQREGPELALSPIWSEFFHFRLIRKFVDDADNSIFGGIYEYKLPQQLSQTVKSMEFSPRFVIAFRGTVTKVDSISRDIEHDIHVIRNGLHTTTRFEIAIQAVRNIVASVGGSSVWLAGHSLGASMALLTGKTIARTGFFPECFAFNPPFLSAPIEKIKDKRIKHGIRIAGSVITAGLALAKKATQHYSQNDRALPAPPDPFEALSDWFPRLYVNPGDHLCSEYVGYFEHRNKMEEIGIGFVERVATQHSLGGMLLGGQEPVHLIPSSVLTVNLSSSRDFKQAHGIHQWWREDNKFETKVYQYK

SEQ ID NO: 81981 - protein, 349 aa, Arabidopsis thaliana
  peptide (1)..(349): Ceres Seq. ID no. 12662717
  misc_feature: Pfam Name: Lipase_3 Pfam Description: Lipase (class 3)
  misc_feature (1)..(349): Homolog of NCBI NO: 18413406 NR Description: unknown protein; protein id: At4g10955.1
  misc_feature (1)..(311): Homolog of NCBI NO: 7486138 NR Description: hypothetical protein F25I24.160 - Arabidopsis >gi|4539369|emb|CAB40063.1| putative protein [Arabidopsis >gi|7267793|emb|CAB81196.1| putative protein [Arabidopsis
  misc_feature (22)..(311): Homolog of NCBI NO: 7486718 NR Description: hypothetical protein F8M12.9 - Arabidopsis >gi|3513738|gb|AAC33954.1| similar to the GDSL family of
  misc_feature (1)..(349): Homolog of NCBI NO: 18396010 NR Description: expressed protein; protein id: At2g05260.1, by cDNA: 33377. [Arabidopsis thaliana] >gi|25411153|pir||E84466
  misc_feature (1)..(335): Homolog of NCBI NO: 30689345 NR Description: expressed protein [Arabidopsis thaliana] unknown protein [Arabidopsis thaliana]
  misc_feature (33)..(348): Homolog of NCBI NO: 34910674 NR Description: P0690B02.1 [Oryza sativa (japonica
  misc_feature (3)..(339): Homolog of NCBI NO: 15237918 NR Description: putative protein; protein id: At5g24220.1 thaliana] >gi|10177081|dbj|BAB10387.1|
  misc_feature (4)..(339): Homolog of NCBI NO: 15237909 NR Description: putative protein; protein id: At5g24180.1 thaliana] >gi|9757927|dbj|BAB08409.1|
  misc_feature (1)..(236): Homolog of NCBI NO: 10177082 NR Description: gene_id:MOP9.4~pir||T04290~similar to unknown
  misc_feature (1)..(335): Homolog of NCBI NO: 15237913 NR Description: putative protein; protein id: At5g24200.1 thaliana] >gi|9757929|dbj|BAB08411.1|
MISERDDFSLTGPLHLTSIDWANEHHRRSVAGSLVQGIYVAERDRQLQREGPELALSPIWSEFFHFRLIRKFVDDADNSIFGGIYEYKLPQQLSQTVKSMEFSPRFVIAFRGTVTKVDSISRDIEHDIHVIRNGLHTTTRFEIAIQAVRNIVASVGGSSVWLAGHSLGASMALLTGKTIARTGFFPECFAFNPPFLSAPIEKIKDKRIKHGIRIAGSVITAGLALAKKATQHYSQNDRALPAPPDPFEALSDWFPRLYVNPGDHLCSEYVGYFEHRNKMEEIGIGFVERVATQHSLGGMLLGGQEPVHLIPSSVLTVNLSSSRDFKQAHGIHQWWREDNKFETKVYQYK

SEQ ID NO: 81982 - DNA, 2001 bp, Arabidopsis thaliana
  misc_feature (1)..(2001): Ceres Seq. ID no. 12662729
  misc_feature: MA Experiment ID: 20000440 Result: Up-regulated in Transcription
  misc_feature: MA Experiment 20000440 PARAMETER Experiment Name: At_Closed-Flower__Sub_P Parameter: Tissue Value: Closed Flower vs. Whole Plant
atgacgtcgcagaaaagattcatctttgaggtggaagccgctaaggaagccacagatggaaatccctcggttggtcctgtctatcgtagtacttttgctcagaacggattcccgaacccgatcgatggtatccaaagctgctgggatattttccgcacggctgttgagaagtatccaaacaatcgaatgcttggtcgccgtgagatttcgaacgggaaggcaggaaagtacgtgtggaaaacatacaaagaagtatacgacattgtcataaaacttggaaattctctacgtagttgcgggattaaggagggagaaaaatgtggtatatatggtataaattgttgtgagtggatcattagcatggaggcatgtaatgcacatggcctttattgtgtccctttatacgatacgttaggcgctggtgcagtggaattcatcatttctcatgcagaggtttcaattgctttcgtggaggagaagaagatccctgagctttttaagacttgtccaaactcaacaaaatatatgaagactgttgtgagctttggcggtgtcaaaccggaacaaaaagaagaagctgaaaaattgggattggtaatacattcgtgggatgagtttttgaagctgggtgagggtaagcaatatgagcttcccattaaaaagccaagcgacatatgcacgattatgtatactagcggaacaactggtgacccgaagggagttatgatttcaaatgaaagcattgttactataactactggagtgatgcatttcctagggaatgtgaatgcaagcctatctgagaaggatgtgtatatttcttatcttcctctcgcgcacgtctttgatcgggcaatcgaggaatgtattattcaagtaggtggttcaattggtttctggcgcggggatgtcaaattgttgattgaagaccttggtgagctaaaaccaagtatcttttgcgccgttcctcgtgtcctagatcgagtatacacaggactacagcagaaactatctggtggtggtttcttcaaaaagaaggtgtttgatgttgctttttcctataaatttggaaatatgaagaaaggacagtctcatgtggcagcttctccattttgtgacaaacttgtattcaacaaggttaaacaaggacttggaggcaatgtgaggattattctgtctggagcggctcctctcgctagtcacatagaatcttttctaagagttgttgcatgttgtaatgttctacaaggatatggtctaactgagagttgtgctggaacttttgcaacgttcccagacgaactagacatgcttgggactgttggtccacccgtgccaaacgtcgatatacgccttgaatctgtcccggaaatgaattatgatgctcttggaagtactccgcgaggcgaaatatgcatacgaggaaaaactttattttcagggtactacaaacgtgaagacctcacaaaagaggtttttatcgacggatggttgcacacaggtgatgttggtgagtggcaaccaaatggaagcatgaagataattgaccggaaaaagaacatcttcaaactcgcgcaaggagagtatgtcgctgttgagaatttagaaaatgtctacagtcaagtagaagttattgaatcgatatgggtatatggaaacagctttgagtccttccttgtcgcaatcgctaacccggcccaacaaactcttgaacgatgggctgtggagaatggagtgaatggagacttcaactccatctgccaaaacgcaaaggcaaaagcattcatacttggagaactcgttaaaacagccaaagagaacaagttgaagggttttgagatcataaaagatgttcatctggaaccagtggcgttcgacatggaacgagaccttcttactccaacctacaaaaagaagaggcctcaattgctcaaatactatcagaatgtgatccatgaaatgtacaagacaacaaaggaaagtctagcttccggacagtaa

SEQ ID NO: 81983 - protein, 666 aa, Arabidopsis thaliana
  peptide (1)..(666): Ceres Seq. ID no. 12662730
  misc_feature (1)..(664): Homolog of NCBI NO: 7437845 NR Description: probable long-chain-fatty-acid-CoA ligase (EC
  misc_feature (1)..(664): Homolog of NCBI NO: 15236634 NR Description: acyl-CoA synthetase - like protein; protein id: supported by cDNA: gi_15146195, supported by cDNA: gi_20805868
  misc_feature (264)..(666): Homolog of NCBI NO: 7437841 NR Description: probable long-chain-fatty-acid-CoA ligase (EC
  misc_feature (1)..(147): Homolog of NCBI NO: 7437841 NR Description: probable long-chain-fatty-acid-CoA ligase (EC
  misc_feature (6)..(660): Homolog of NCBI NO: 15217631 NR Description: acyl-CoA synthetase, putative; protein id: supported by cDNA: gi_14532621, supported by cDNA: gi_19310628,
  misc_feature (16)..(659): Homolog of NCBI NO: 34898260 NR Description: similar to long-chain-fatty-acid--CoA ligase 1
  misc_feature (287)..(659): Homolog of NCBI NO: 34911190 NR Description: putative acyl-CoA synthetase [Oryza sativa
  misc_feature (10)..(228): Homolog of NCBI NO: 34911190 NR Description: putative acyl-CoA synthetase [Oryza sativa
  misc_feature (11)..(663): Homolog of NCBI NO: 7437844 NR Description: probable long-chain-fatty-acid-CoA ligase (EC
  misc_feature (11)..(663): Homolog of NCBI NO: 22330132 NR Description: acyl CoA synthetase, putative; protein id: supported by cDNA: gi_17529275, supported by cDNA: gi_20453101, by cDNA: gi_20805864 [Arabidopsis thaliana]
MTSQKRFIFEVEAAKEATDGNPSVGPVYRSTFAQNGFPNPIDGIQSCWDIFRTAVEKYPNNRMLGRREISNGKAGKYVWKTYKEVYDIVIKLGNSLRSCGIKEGEKCGIYGINCCEWIISMEACNAHGLYCVPLYDTLGAGAVEFIISHAEVSIAFVEEKKIPELFKTCPNSTKYMKTVVSFGGVKPEQKEEAEKLGLVIHSWDEFLKLGEGKQYELPIKKPSDICTIMYTSGTTGDPKGVMISNESIVTITTGVMHFLGNVNASLSEKDVYISYLPLAHVFDRAIEECIIQVGGSIGFWRGDVKLLIEDLGELKPSIFCAVPRVLDRVYTGLQQKLSGGGFFKKKVFDVAFSYKFGNMKKGQSHVAASPFCDKLVFNKVKQGLGGNVRIILSGAAPLASHIESFLRVVACCNVLQGYGLTESCAGTFATFPDELDMLGTVGPPVPNVDIRLESVPEMNYDALGSTPRGEICIRGKTLFSGYYKREDLTKEVFIDGWLHTGDVGEWQPNGSMKIIDRKKNIFKLAQGEYVAVENLENVYSQVEVIESIWVYGNSFESFLVAIANPAQQTLERWAVENGVNGDFNSICQNAKAKAFILGELVKTAKENKLKGFEIIKDVHLEPVAFDMERDLLTPTYKKKRPQLLKYYQNVIHEMYKTTKESLASGQ

SEQ ID NO: 81984 - protein, 604 aa, Arabidopsis thaliana
  peptide (1)..(604): Ceres Seq. ID no. 12662731
  misc_feature (1)..(602): Homolog of NCBI NO: 7437845 NR Description: probable long-chain-fatty-acid-CoA ligase (EC
  misc_feature (1)..(602): Homolog of NCBI NO: 15236634 NR Description: acyl-CoA synthetase - like protein; protein id: supported by cDNA: gi_15146195, supported by cDNA: gi_20805868
  misc_feature (202)..(604): Homolog of NCBI NO: 7437841 NR Description: probable long-chain-fatty-acid-CoA ligase (EC
  misc_feature (1)..(85): Homolog of NCBI NO: 7437841 NR Description: probable long-chain-fatty-acid-CoA ligase (EC
  misc_feature (1)..(598): Homolog of NCBI NO: 15217631 NR Description: acyl-CoA synthetase, putative; protein id: supported by cDNA: gi_14532621, supported by cDNA: gi_19310628,
  misc_feature (1)..(597): Homolog of NCBI NO: 34898260 NR Description: similar to long-chain-fatty-acid--CoA ligase 1
  misc_feature (225)..(597): Homolog of NCBI NO: 34911190 NR Description: putative acyl-CoA synthetase [Oryza sativa
  misc_feature (1)..(166): Homolog of NCBI NO: 34911190 NR Description: putative acyl-CoA synthetase [Oryza sativa
  misc_feature (1)..(601): Homolog of NCBI NO: 7437844 NR Description: probable long-chain-fatty-acid-CoA ligase (EC
  misc_feature (1)..(601): Homolog of NCBI NO: 22330132 NR Description: acyl CoA synthetase, putative; protein id: supported by cDNA: gi_17529275, supported by cDNA: gi_20453101, by cDNA: gi_20805864 [Arabidopsis thaliana]
MLGRREISNGKAGKYVWKTYKEVYDIVIKLGNSLRSCGIKEGEKCGIYGINCCEWIISMEACNAHGLYCVPLYDTLGAGAVEFIISHAEVSIAFVEEKKIPELFKTCPNSTKYMKTVVSFGGVKPEQKEEAEKLGLVIHSWDEFLKLGEGKQYELPIKKPSDICTIMYTSGTTGDPKGVMISNESIVTITTGVMHFLGNVNASLSEKDVYISYLPLAHVFDRAIEECIIQVGGSIGFWRGDVKLLIEDLGELKPSIFCAVPRVLDRVYTGLQQKLSGGGFFKKKVFDVAFSYKFGNMKKGQSHVAASPFCDKLVFNKVKQGLGGNVRIILSGAAPLASHIESFLRVVACCNVLQGYGLTESCAGTFATFPDELDMLGTVGPPVPNVDIRLESVPEMNYDALGSTPRGEICIRGKTLFSGYYKREDLTKEVFIDGWLHTGDVGEWQPNGSMKIIDRKKNIFKLAQGEYVAVENLENVYSQVEVIESIWVYGNSFESFLVAIANPAQQTLERWAVENGVNGDFNSICQNAKAKAFILGELVKTAKENKLKGFEIIKDVHLEPVAFDMERDLLTPTYKKKRPQLLKYYQNVIHEMYKTTKESLASGQ

SEQ ID NO: 81985 - protein, 546 aa, Arabidopsis thaliana
  peptide (1)..(546): Ceres Seq. ID no. 12662732
  misc_feature (1)..(544): Homolog of NCBI NO: 7437845 NR Description: probable long-chain-fatty-acid-CoA ligase (EC
  misc_feature (1)..(544): Homolog of NCBI NO: 15236634 NR Description: acyl-CoA synthetase - like protein; protein id: supported by cDNA: gi_15146195, supported by cDNA: gi_20805868
  misc_feature (144)..(546): Homolog of NCBI NO: 7437841 NR Description: probable long-chain-fatty-acid-CoA ligase (EC
  misc_feature (1)..(27): Homolog of NCBI NO: 7437841 NR Description: probable long-chain-fatty-acid-CoA ligase (EC
  misc_feature (1)..(540): Homolog of NCBI NO: 15217631 NR Description: acyl-CoA synthetase, putative; protein id: supported by cDNA: gi_14532621, supported by cDNA: gi_19310628,
  misc_feature (1)..(539): Homolog of NCBI NO: 34898260 NR Description: similar to long-chain-fatty-acid--CoA ligase 1
  misc_feature (167)..(539): Homolog of NCBI NO: 34911190 NR Description: putative acyl-CoA synthetase [Oryza sativa
  misc_feature (1)..(108): Homolog of NCBI NO: 34911190 NR Description: putative acyl-CoA synthetase [Oryza sativa
  misc_feature (1)..(543): Homolog of NCBI NO: 7437844 NR Description: probable long-chain-fatty-acid-CoA ligase (EC
  misc_feature (1)..(543): Homolog of NCBI NO: 22330132 NR Description: acyl CoA synthetase, putative; protein id: supported by cDNA: gi_17529275, supported by cDNA: gi_20453101, by cDNA: gi_20805864 [Arabidopsis thaliana]
MEACNAHGLYCVPLYDTLGAGAVEFIISHAEVSIAFVEEKKIPELFKTCPNSTKYMKTVVSFGGVKPEQKEEAEKLGLVIHSWDEFLKLGEGKQYELPIKKPSDICTIMYTSGTTGDPKGVMISNESIVTITTGVMHFLGNVNASLSEKDVYISYLPLAHVFDRAIEECIIQVGGSIGFWRGDVKLLIEDLGELKPSIFCAVPRVLDRVYTGLQQKLSGGGFFKKKVFDVAFSYKFGNMKKGQSHVAASPFCDKLVFNKVKQGLGGNVRIILSGAAPLASHIESFLRVVACCNVLQGYGLTESCAGTFATFPDELDMLGTVGPPVPNVDIRLESVPEMNYDALGSTPRGEICIRGKTLFSGYYKREDLTKEVFIDGWLHTGDVGEWQPNGSMKIIDRKKNIFKLAQGEYVAVENLENVYSQVEVIESIWVYGNSFESFLVAIANPAQQTLERWAVENGVNGDFNSICQNAKAKAFILGELVKTAKENKLKGFEIIKDVHLEPVAFDMERDLLTPTYKKKRPQLLKYYQNVIHEMYKTTKESLASGQ

SEQ ID NO: 81986 - DNA, 973 bp, Arabidopsis thaliana
  misc_feature (1)..(973): Ceres Seq. ID no. 12662741
  misc_feature: MA Experiment ID: 20000173 Result: Up-regulated in Transcription
  misc_feature: MA Experiment 20000173 PARAMETER Experiment Name: At_42deg_Heat_P Parameter: Age (day) Value: 14
  misc_feature: MA Experiment 20000173 PARAMETER Experiment Name: At_42deg_Heat_P Parameter: Organism Value: A. thaliana
  misc_feature: MA Experiment 20000173 PARAMETER Experiment Name: At_42deg_Heat_P Parameter: Plant Line Value: WS
  misc_feature: MA Experiment 20000173 PARAMETER Experiment Name: At_42deg_Heat_P Parameter: Temperature (deg C) Value: 42 vs. 22
  misc_feature: MA Experiment 20000173 PARAMETER Experiment Name: At_42deg_Heat_P Parameter: Timepoint (hr) Value: 6
  misc_feature: MA Experiment 20000173 PARAMETER Experiment Name: At_42deg_Heat_P Parameter: Tissue Value: Aerial
  misc_feature: MA Experiment ID: 20000437 Result: Down-regulated in Transcription
  misc_feature: MA Experiment 20000437 PARAMETER Experiment Name: At_Drought_P Parameter: Age (day) Value: 8
  misc_feature: MA Experiment 20000437 PARAMETER Experiment Name: At_Drought_P Parameter: Organism Value: A. thaliana
  misc_feature: MA Experiment 20000437 PARAMETER Experiment Name: At_Drought_P Parameter: Plant Line Value: WS
  misc_feature: MA Experiment 20000437 PARAMETER Experiment Name: At_Drought_P Parameter: Timepoint (hr) Value: 24
  misc_feature: MA Experiment 20000437 PARAMETER Experiment Name: At_Drought_P Parameter: Tissue Value: Whole Plant
  misc_feature: MA Experiment 20000437 PARAMETER Experiment Name: At_Drought_P Parameter: Treatment Value: Drought vs. No Drought
  misc_feature: MA Experiment ID: 20000439 Result: Down-regulated in Transcription
  misc_feature: MA Experiment 20000439 PARAMETER Experiment Name: At_Roots__P Parameter: Age (day) Value: 14 vs. 21
  misc_feature: MA Experiment 20000439 PARAMETER Experiment Name: At_Roots__P Parameter: Organism Value: A. thaliana
  misc_feature: MA Experiment 20000439 PARAMETER Experiment Name: At_Roots__P Parameter: Tissue Value: Roots vs. Whole Plant
  misc_feature: MA Experiment ID: 20001451 Result: Up-regulated in Transcription
  misc_feature: MA Experiment 20001451 PARAMETER Experiment Name: At_Far-red-induction_P Parameter: Age (day) Value: 7
  misc_feature: MA Experiment 20001451 PARAMETER Experiment Name: At_Far-red-induction_P Parameter: Light Value: Far-red vs. White
  misc_feature: MA Experiment 20001451 PARAMETER Experiment Name: At_Far-red-induction_P Parameter: Organism Value: A. thaliana
  misc_feature: MA Experiment 20001451 PARAMETER Experiment Name: At_Far-red-induction_P Parameter: Plant Line Value: Columbia
  misc_feature: MA Experiment 20001451 PARAMETER Experiment Name: At_Far-red-induction_P Parameter: Timepoint (hr) Value: 24
  misc_feature: MA Experiment 20001451 PARAMETER Experiment Name: At_Far-red-induction_P Parameter: Tissue Value: Whole Plant
  misc_feature: MA Experiment ID: 20001910 Result: Up-regulated in Transcription
  misc_feature: MA Experiment 20001910 PARAMETER Experiment Name: At_Drought_Reproduction_P Parameter: Age (day) Value: 37
  misc_feature: MA Experiment 20001910 PARAMETER Experiment Name: At_Drought_Reproduction_P Parameter: Organism Value: A. thaliana
  misc_feature: MA Experiment 20001910 PARAMETER Experiment Name: At_Drought_Reproduction_P Parameter: Plant Line Value: WS
  misc_feature: MA Experiment 20001910 PARAMETER Experiment Name: At_Drought_Reproduction_P Parameter: Timepoint (day) Value: 7
  misc_feature: MA Experiment 20001910 PARAMETER Experiment Name: At_Drought_Reproduction_P Parameter: Tissue Value: Flowers
  misc_feature: MA Experiment 20001910 PARAMETER Experiment Name: At_Drought_Reproduction_P Parameter: Treatment Value: Drought vs. No Drought
atggaaatgatgaattgggagcggaggagtttgctaaacgagctaattcatggactaaaagcggccaagcagcttcagggttcgtcttctccatcgttgtcagcttcttcttcatatttgacgacggagataaaggagaatctcttacataacatagtttcttccttcaaaaaagctattttgatgctcaacggatccaccacacaacacaatccaacgatagagcttgcgcctgatcccctagctcatcccggaaaggttccaggatctccagcatcgatcaccggaaatccgagaagcgaagagtttttcaatgtaagatcgaaagaattcaacttaagttctaaaaagaggaagatgttgccaaagtggacagagcaagtgagaattagcccagagagaggcttagaaggacctcatgacgatatcttcagctggagaaaatatggccagaaagacattttgggcgccaaattcccaaggagttattacagatgcacatttcgtaacacacagtactgttgggctacgaaacaagtccaaagatcggacggtgatccaacgatcttcgaagtaacatacagaggaacacacacttgttcacaggggatcccacttccagagaaacgagaaaccaaaccaaaacacacagtagcagtaaattaccagaatctcagggccagtcttaccgtacgtaccggcggacttggaagcgaagctttctcattccccgtcacgtcgccgttatacacttacgagtccatcaacggtggtggaacgttttaccaccacgtgggaagttctggtccgtcggatttcactggattgatctcaacaaatacttccacaggaagttctccaatcttcgacgttaattttcaatttgatccaacggctgagattaacacaggcttccccacttttttccacaattcgatttaagtagtacagtattgaatattcttgagattaa

SEQ ID NO: 81987 - protein, 313 aa, Arabidopsis thaliana
  peptide (1)..(313): Ceres Seq. ID no. 12662742
  misc_feature (1)..(313): Homolog of NCBI NO: 15237039 NR Description: WRKY family transcription factor; protein id: supported by cDNA: gi_17064163 [Arabidopsis thaliana]
  misc_feature (48)..(313): Homolog of NCBI NO: 30681651 NR Description: WRKY family transcription factor [Arabidopsis >gi|24762209|gb|AAN64171.1| putative WRKY family transcription
  misc_feature (1)..(26): Homolog of NCBI NO: 30681651 NR Description: WRKY family transcription factor [Arabidopsis >gi|24762209|gb|AAN64171.1| putative WRKY family transcription
  misc_feature (2)..(313): Homolog of NCBI NO: 15236622 NR Description: WRKY family transcription factor; protein id: supported by cDNA: gi_13507100, supported by cDNA: gi_13877710 thaliana] >gi|7486745|pir||T05613 hypothetical protein putative
  misc_feature (48)..(295): Homolog of NCBI NO: 34911952 NR Description: P0694A04.6 [Oryza sativa (japonica
  misc_feature (88)..(233): Homolog of NCBI NO: 40253471 NR Description: putative transcription factor WRKY5 [Oryza sativa
  misc_feature (106)..(247): Homolog of NCBI NO: 34898262 NR Description: WRKY family transcription factor-like protein
  misc_feature (96)..(202): Homolog of NCBI NO: 18420751 NR Description: WRKY family transcription factor; protein id: supported by cDNA: 6469., supported by cDNA: gi_15384218 thaliana] >gi|10178159|dbj|BAB11571.1| gene_id:MLE8.3~unknown
  misc_feature (116)..(225): Homolog of NCBI NO: 15225975 NR Description: WRKY family transcription factor; protein id: supported by cDNA: gi_15430276, supported by cDNA: gi_19423941
  misc_feature (128)..(230): Homolog of NCBI NO: 11493824 NR Description: transcription factor WRKY5 [Petroselinum crispum]
MEMMNWERRSLLNELIHGLKAAKQLQGSSSPSLSASSSYLTTEIKENLLHNIVSSFKKAILMLNGSTTQHNPTIELAPDPLAHPGKVPGSPASITGNPRSEEFFNVRSKEFNLSSKKRKMLPKWTEQVRISPERGLEGPHDDIFSWRKYGQKDILGAKFPRSYYRCTFRNTQYCWATKQVQRSDGDPTIFEVTYRGTHTCSQGIPLPEKRETKPKHTVAVNYQNLRASLTVRTGGLGSEAFSFPVTSPLYTYESINGGGTFYHHVGSSGPSDFTGLISTNTSTGSSPIFDVNFQFDPTAEINTGFPTFFHNSI

SEQ ID NO: 81988 - protein, 311 aa, Arabidopsis thaliana
  peptide (1)..(311): Ceres Seq. ID no. 12662743
  misc_feature (1)..(311): Homolog of NCBI NO: 15237039 NR Description: WRKY family transcription factor; protein id: supported by cDNA: gi_17064163 [Arabidopsis thaliana]
  misc_feature (46)..(311): Homolog of NCBI NO: 30681651 NR Description: WRKY family transcription factor [Arabidopsis >gi|24762209|gb|AAN64171.1| putative WRKY family transcription
  misc_feature (1)..(24): Homolog of NCBI NO: 30681651 NR Description: WRKY family transcription factor [Arabidopsis >gi|24762209|gb|AAN64171.1| putative WRKY family transcription
  misc_feature (1)..(311): Homolog of NCBI NO: 15236622 NR Description: WRKY family transcription factor; protein id: supported by cDNA: gi_13507100, supported by cDNA: gi_13877710 thaliana] >gi|7486745|pir||T05613 hypothetical protein putative
  misc_feature (46)..(293): Homolog of NCBI NO: 34911952 NR Description: P0694A04.6 [Oryza sativa (japonica
  misc_feature (86)..(231): Homolog of NCBI NO: 40253471 NR Description: putative transcription factor WRKY5 [Oryza sativa
  misc_feature (104)..(245): Homolog of NCBI NO: 34898262 NR Description: WRKY family transcription factor-like protein
  misc_feature (94)..(200): Homolog of NCBI NO: 18420751 NR Description: WRKY family transcription factor; protein id: supported by cDNA: 6469., supported by cDNA: gi_15384218 thaliana] >gi|10178159|dbj|BAB11571.1| gene_id:MLE8.3~unknown
  misc_feature (114)..(223): Homolog of NCBI NO: 15225975 NR Description: WRKY family transcription factor; protein id: supported by cDNA: gi_15430276, supported by cDNA: gi_19423941
  misc_feature (126)..(228): Homolog of NCBI NO: 11493824 NR Description: transcription factor WRKY5 [Petroselinum crispum]
MMNWERRSLLNELIHGLKAAKQLQGSSSPSLSASSSYLTTEIKENLLHNIVSSFKKAILMLNGSTTQHNPTIELAPDPLAHPGKVPGSPASITGNPRSEEFFNVRSKEFNLSSKKRKMLPKWTEQVRISPERGLEGPHDDIFSWRKYGQKDILGAKFPRSYYRCTFRNTQYCWATKQVQRSDGDPTIFEVTYRGTHTCSQGIPLPEKRETKPKHTVAVNYQNLRASLTVRTGGLGSEAFSFPVTSPLYTYESINGGGTFYHHVGSSGPSDFTGLISTNTSTGSSPIFDVNFQFDPTAEINTGFPTFFHNSI

SEQ ID NO: 81989 - protein, 310 aa, Arabidopsis thaliana
  peptide (1)..(310): Ceres Seq. ID no. 12662744
  misc_feature (1)..(310): Homolog of NCBI NO: 15237039 NR Description: WRKY family transcription factor; protein id: supported by cDNA: gi_17064163 [Arabidopsis thaliana]
  misc_feature (45)..(310): Homolog of NCBI NO: 30681651 NR Description: WRKY family transcription factor [Arabidopsis >gi|24762209|gb|AAN64171.1| putative WRKY family transcription
  misc_feature (1)..(23): Homolog of NCBI NO: 30681651 NR Description: WRKY family transcription factor [Arabidopsis >gi|24762209|gb|AAN64171.1| putative WRKY family transcription
  misc_feature (1)..(310): Homolog of NCBI NO: 15236622 NR Description: WRKY family transcription factor; protein id: supported by cDNA: gi_13507100, supported by cDNA: gi_13877710 thaliana] >gi|7486745|pir||T05613 hypothetical protein putative
  misc_feature (45)..(292): Homolog of NCBI NO: 34911952 NR Description: P0694A04.6 [Oryza sativa (japonica
  misc_feature (85)..(230): Homolog of NCBI NO: 40253471 NR Description: putative transcription factor WRKY5 [Oryza sativa
  misc_feature (103)..(244): Homolog of NCBI NO: 34898262 NR Description: WRKY family transcription factor-like protein
  misc_feature (93)..(199): Homolog of NCBI NO: 18420751 NR Description: WRKY family transcription factor; protein id: supported by cDNA: 6469., supported by cDNA: gi_15384218 thaliana] >gi|10178159|dbj|BAB11571.1| gene_id:MLE8.3~unknown
  misc_feature (113)..(222): Homolog of NCBI NO: 15225975 NR Description: WRKY family transcription factor; protein id: supported by cDNA: gi_15430276, supported by cDNA: gi_19423941
  misc_feature (125)..(227): Homolog of NCBI NO: 11493824 NR Description: transcription factor WRKY5 [Petroselinum crispum]
MNWERRSLLNELIHGLKAAKQLQGSSSPSLSASSSYLTTEIKENLLHNIVSSFKKAILMLNGSTTQHNPTIELAPDPLAHPGKVPGSPASITGNPRSEEFFNVRSKEFNLSSKKRKMLPKWTEQVRISPERGLEGPHDDIFSWRKYGQKDILGAKFPRSYYRCTFRNTQYCWATKQVQRSDGDPTIFEVTYRGTHTCSQGIPLPEKRETKPKHTVAVNYQNLRASLTVRTGGLGSEAFSFPVTSPLYTYESINGGGTFYHHVGSSGPSDFTGLISTNTSTGSSPIFDVNFQFDPTAEINTGFPTFFHNSI

SEQ ID NO: 81990 - DNA, 1701 bp, Arabidopsis thaliana
  misc_feature (1)..(1701): Ceres Seq. ID no. 12662804
  misc_feature: MA Experiment ID: 20000180 Result: Down-regulated in Transcription
  misc_feature: MA Experiment 20000180 PARAMETER Experiment Name: At_Germinating_Seeds_P Parameter: Age (hr) Value: 24 vs. 0
  misc_feature: MA Experiment 20000180 PARAMETER Experiment Name: At_Germinating_Seeds_P Parameter: Tissue Value: Germinating Seeds
  misc_feature: MA Experiment ID: 20000227 Result: Up-regulated in Transcription
  misc_feature: MA Experiment 20000227 PARAMETER Experiment Name: At_Root-Tips-vs-Tops_P Parameter: Tissue Value: Root Tips vs. Root Tops
atggcggcaaaatcccagaaaaccctcgttctgctagcgaatttaatcaagtttcctccattaaaagctttttctctcttaaattctccaaatttccatgaatttcaacacacacacgaatcaatctcaatccttcttcgtctccttctctctgggaacttattctctcacgctcaatcacttcttctacaagtaatctccggaaaaatccactcccaattcttcacatcttcctctctgttacactatttgacagaatcagaaacgtcaaaaacaaagtttcgtctctacgaggtaatcatcaattcctatgttcaatctcaatccctaaacttatcaatctcttacttcaacgaaatggtcgataatggttttgttcctggatcgaattgcttcaactatctcttaactttcgttgttgggtcatcttctttcaatcaatggtggagtttcttcaacgagaacaaaagcaaagttgttttggacgtgtatagctttgggattctgatcaaaggttgttgtgaagctggtgagattgagaaaagctttgatcttcttattgaattgacagagtttgggttttctccaaatgtagttatctacactactttgattgatgggtgttgcaagaaaggtgagattgagaaggctaaagatttgttttttgagatggggaaacttggattagtggctaatgagcgtacttacacggttttgattaatgggttattcaaaaacggggttaagaaacaagggtttgagatgtatgagaagatgcaggaagatggagttttccctaatctctatacttataactgtgtgatgaatcagctttgtaaagatggaagaacaaaagatgcattccaagtgttcgacgaaatgcgtgagagaggggtttcttgtaacattgtcacttataatactttgattggtgggttatgtagagagatgaagttgaatgaggcaaataaagttgtggatcaaatgaagagtgatggaatcaacccgaatctgattacgtataacactttgattgatgggttttgtggtgtgggaaaattagggaaggcgttgagtttatgcagagatttgaagtcaagaggtctgtctccgtccctcgtcacgtataatatcctagtttccgggttctgtagaaaaggagatacttcaggagcagctaagatggttaaggagatggaagagagagggattaaaccgtcgaaagtaacatacacgatacttatcgacacatttgctcgttcggataacatggagaaagcaattcagcttcgactatcaatggaggaactaggattagtcccggatgttcatacctatagtgtattgattcatgggttttgcatcaaaggtcaaatgaatgaagcatctaggctttttaagtcgatggtcgaaaagaattgtgaaccgaacgaggttatatacaatacgatgattcttggttattgtaaggaaggtagttcttatagagcattgaagttgcttaaggagatggaagagaaagagttggctccaaatgttgctagctacagatatatgattgaagttctttgtaaagaaagaaaatcgaaagaagctgagcgtttagttgagaagatgattgattcagggattgatccatctacttcaatccttagtttgatctctagagccaaaaacgattcacatgtaagctcaaaataa

SEQ ID NO: 81991 - protein, 566 aa, Arabidopsis thaliana
  peptide (1)..(566): Ceres Seq. ID no. 12662805
  misc_feature (269)..(303): Pfam Name: PPR repeat Pfam Description: PPR repeat
  misc_feature (1)..(566): Homolog of NCBI NO: 15234269 NR Description: putative protein; protein id: At4g11690.1
  misc_feature (27)..(559): Homolog of NCBI NO: 15242446 NR Description: putative protein; protein id: At5g39710.1
  misc_feature (100)..(563): Homolog of NCBI NO: 15221549 NR Description: PPR-repeat protein; protein id: At1g62670.1
  misc_feature (113)..(554): Homolog of NCBI NO: 25518293 NR Description: hypothetical protein F13K23.2 - Arabidopsis >gi|8698724|gb|AAF78482.1|AC012187_2 Contains similarity to an protein F16M19.7 gi|6598837 from Arabidopsis thaliana BAC
  misc_feature (42)..(554): Homolog of NCBI NO: 15221282 NR Description: hypothetical protein; protein id: At1g12300.1
  misc_feature (97)..(546): Homolog of NCBI NO: 34902570 NR Description: Putative indole-3-acetate
  misc_feature (113)..(554): Homolog of NCBI NO: 25402719 NR Description: protein F5O11.4 [imported] - Arabidopsis thaliana
  misc_feature (100)..(563): Homolog of NCBI NO: 6630464 NR Description: F23N19.4 [Arabidopsis thaliana]
  misc_feature (113)..(554): Homolog of NCBI NO: 15220990 NR Description: unknown protein; protein id: At1g12770.1
  misc_feature (11)..(537): Homolog of NCBI NO: 15238562 NR Description: putative protein; protein id: At5g59900.1 thaliana] >gi|9757911|dbj|BAB08358.1|
MAAKSQKTLVLLANLIKFPPLKAFSLLNSPNFHEFQHTHESISILLRLLLSGNLFSHAQSLLLQVISGKIHSQFFTSSSLLHYLTESETSKTKFRLYEVIINSYVQSQSLNLSISYFNEMVDNGFVPGSNCFNYLLTFVVGSSSFNQWWSFFNENKSKVVLDVYSFGILIKGCCEAGEIEKSFDLLIELTEFGFSPNVVIYTTLIDGCCKKGEIEKAKDLFFEMGKLGLVANERTYTVLINGLFKNGVKKQGFEMYEKMQEDGVFPNLYTYNCVMNQLCKDGRTKDAFQVFDEMRERGVSCNIVTYNTLIGGLCREMKLNEANKVVDQMKSDGINPNLITYNTLIDGFCGVGKLGKALSLCRDLKSRGLSPSLVTYNILVSGFCRKGDTSGAAKMVKEMEERGIKPSKVTYTILIDTFARSDNMEKAIQLRLSMEELGLVPDVHTYSVLIHGFCIKGQMNEASRLFKSMVEKNCEPNEVIYNTMILGYCKEGSSYRALKLLKEMEEKELAPNVASYRYMIEVLCKERKSKEAERLVEKMIDSGIDPSTSILSLISRAKNDSHVSSK

SEQ ID NO: 81992 - protein, 447 aa, Arabidopsis thaliana
  peptide (1)..(447): Ceres Seq. ID no. 12662806
  misc_feature (150)..(184): Pfam Name: PPR repeat Pfam Description: PPR repeat
  misc_feature (1)..(447): Homolog of NCBI NO: 15234269 NR Description: putative protein; protein id: At4g11690.1
  misc_feature (1)..(440): Homolog of NCBI NO: 15242446 NR Description: putative protein; protein id: At5g39710.1
  misc_feature (1)..(444): Homolog of NCBI NO: 15221549 NR Description: PPR-repeat protein; protein id: At1g62670.1
  misc_feature (1)..(435): Homolog of NCBI NO: 25518293 NR Description: hypothetical protein F13K23.2 - Arabidopsis >gi|8698724|gb|AAF78482.1|AC012187_2 Contains similarity to an protein F16M19.7 gi|6598837 from Arabidopsis thaliana BAC
  misc_feature (1)..(435): Homolog of NCBI NO: 15221282 NR Description: hypothetical protein; protein id: At1g12300.1
  misc_feature (1)..(427): Homolog of NCBI NO: 34902570 NR Description: Putative indole-3-acetate
  misc_feature (1)..(435): Homolog of NCBI NO: 25402719 NR Description: protein F5O11.4 [imported] - Arabidopsis thaliana
  misc_feature (1)..(444): Homolog of NCBI NO: 6630464 NR Description: F23N19.4 [Arabidopsis thaliana]
  misc_feature (1)..(435): Homolog of NCBI NO: 15220990 NR Description: unknown protein; protein id: At1g12770.1
  misc_feature (1)..(418): Homolog of NCBI NO: 15238562 NR Description: putative protein; protein id: At5g59900.1 thaliana] >gi|9757911|dbj|BAB08358.1|
MVDNGFVPGSNCFNYLLTFVVGSSSFNQWWSFFNENKSKVVLDVYSFGILIKGCCEAGEIEKSFDLLIELTEFGFSPNVVIYTTLIDGCCKKGEIEKAKDLFFEMGKLGLVANERTYTVLINGLFKNGVKKQGFEMYEKMQEDGVFPNLYTYNCVMNQLCKDGRTKDAFQVFDEMRERGVSCNIVTYNTLIGGLCREMKLNEANKVVDQMKSDGINPNLITYNTLIDGFCGVGKLGKALSLCRDLKSRGLSPSLVTYNILVSGFCRKGDTSGAAKMVKEMEERGIKPSKVTYTILIDTFARSDNMEKAIQLRLSMEELGLVPDVHTYSVLIHGFCIKGQMNEASRLFKSMVEKNCEPNEVIYNTMILGYCKEGSSYRALKLLKEMEEKELAPNVASYRYMIEVLCKERKSKEAERLVEKMIDSGIDPSTSILSLISRAKNDSHVSSK

SEQ ID NO: 81993 - protein, 343 aa, Arabidopsis thaliana
  peptide (1)..(343): Ceres Seq. ID no. 12662807
  misc_feature (46)..(80): Pfam Name: PPR repeat Pfam Description: PPR repeat
  misc_feature (1)..(343): Homolog of NCBI NO: 15234269 NR Description: putative protein; protein id: At4g11690.1
  misc_feature (1)..(336): Homolog of NCBI NO: 15242446 NR Description: putative protein; protein id: At5g39710.1
  misc_feature (1)..(340): Homolog of NCBI NO: 15221549 NR Description: PPR-repeat protein; protein id: At1g62670.1
  misc_feature (1)..(331): Homolog of NCBI NO: 25518293 NR Description: hypothetical protein F13K23.2 - Arabidopsis >gi|8698724|gb|AAF78482.1|AC012187_2 Contains similarity to an protein F16M19.7 gi|6598837 from Arabidopsis thaliana BAC
  misc_feature (1)..(331): Homolog of NCBI NO: 15221282 NR Description: hypothetical protein; protein id: At1g12300.1
  misc_feature (1)..(323): Homolog of NCBI NO: 34902570 NR Description: Putative indole-3-acetate
  misc_feature (1)..(331): Homolog of NCBI NO: 25402719 NR Description: protein F5O11.4 [imported] - Arabidopsis thaliana
  misc_feature (1)..(340): Homolog of NCBI NO: 6630464 NR Description: F23N19.4 [Arabidopsis thaliana]
  misc_feature (1)..(331): Homolog of NCBI NO: 15220990 NR Description: unknown protein; protein id: At1g12770.1
  misc_feature (1)..(314): Homolog of NCBI NO: 15238562 NR Description: putative protein; protein id: At5g59900.1 thaliana] >gi|9757911|dbj|BAB08358.1|
MGKLGLVANERTYTVLINGLFKNGVKKQGFEMYEKMQEDGVFPNLYTYNCVMNQLCKDGRTKDAFQVFDEMRERGVSCNIVTYNTLIGGLCREMKLNEANKVVDQMKSDGINPNLITYNTLIDGFCGVGKLGKALSLCRDLKSRGLSPSLVTYNILVSGFCRKGDTSGAAKMVKEMEERGIKPSKVTYTILIDTFARSDNMEKAIQLRLSMEELGLVPDVHTYSVLIHGFCIKGQMNEASRLFKSMVEKNCEPNEVIYNTMILGYCKEGSSYRALKLLKEMEEKELAPNVASYRYMIEVLCKERKSKEAERLVEKMIDSGIDPSTSILSLISRAKNDSHVSSK

SEQ ID NO: 81994 - DNA, 759 bp, Arabidopsis thaliana
  misc_feature (1)..(759): Ceres Seq. ID no. 12662836
  misc_feature: MA Experiment ID: 20000440 Result: Up-regulated in Transcription
  misc_feature: MA Experiment 20000440 PARAMETER Experiment Name: At_Closed-Flower__Sub_P Parameter: Tissue Value: Closed Flower vs. Whole Plant
atggtgaggggaaagacagagatgaagaggatagagaacgcaacgagcaggcaagtgactttctcaaaaagaagaaatggacttttgaagaaagcttttgaattatcagtcctttgtgatgctgaagttgccctaatcatcttctctcctagaggcaaactctatgagttctctagctcctccagtatacctaaaacagtagaaagatatcaaaagcgaatacaagatctcgggtctaaccataagagaaatgataattcacagcaatcgaaggacgaaacctatggcttggcgagaaagatcgaacatttggagatttcgacacgaaaaatgatgggagaaggacttgacgcatcttctatagaagagttacaacaattggagaaccagttggacagaagcttaatgaaaataagagccaaaaagtaccagttattacgagaagaaactgagaaattaaaagaaaaggagaggaacctcattgcagaaaataaaatgctgatggagaagtgtgagatgcaaggaagaggaataataggaagaatatcatcatcatcatcaacatcagaactggatatagatgacaatgaaatggaagtggtgactgatttgttcattggacctcctgagactcgacacttcaaaaagtttcctccttcaaactaacatatatagtacaatgcttatatagatattatgtagggaattacttttttccctgaagaaaaattgatgttacttactgaatttagcagttgc

SEQ ID NO: 81995 - protein, 221 aa, Arabidopsis thaliana
  peptide (1)..(221): Ceres Seq. ID no. 12662837
  misc_feature (100)..(173): Pfam Name: K-box region Pfam Description: K-box region
  misc_feature (1)..(221): Homolog of NCBI NO: 15234342 NR Description: MADS-box protein AGL14; protein id: At4g11880.1
  misc_feature (7)..(221): Homolog of NCBI NO: 862644 NR Description: MADS-box protein AGL14
  misc_feature (1)..(221): Homolog of NCBI NO: 15235869 NR Description: MADS-box protein; protein id: At4g22950.1, by cDNA: gi_11545542 [Arabidopsis thaliana]
  misc_feature (1)..(210): Homolog of NCBI NO: 4322475 NR Description: putative MADS box transcription factor ETL
  misc_feature (1)..(216): Homolog of NCBI NO: 3493647 NR Description: transcription activator [Pimpinella brachycarpa]
  misc_feature (1)..(212): Homolog of NCBI NO: 13384056 NR Description: MADS-box transcription factor FBP21 [Petunia x
  misc_feature (1)..(209): Homolog of NCBI NO: 6635740 NR Description: agamous-like MADS box protein OPMADS1 [Elaeis
  misc_feature (1)..(212): Homolog of NCBI NO: 27804375 NR Description: MADS-box transcription factor CDM36
  misc_feature (1)..(212): Homolog of NCBI NO: 13384054 NR Description: MADS-box transcription factor FBP20 [Petunia x
  misc_feature (1)..(212): Homolog of NCBI NO: 40641816 NR Description: putative MADS-box transcription factor DEFH68
MVRGKTEMKRIENATSRQVTFSKRRNGLLKKAFELSVLCDAEVALIIFSPRGKLYEFSSSSSIPKTVERYQKRIQDLGSNHKRNDNSQQSKDETYGLARKIEHLEISTRKMMGEGLDASSIEELQQLENQLDRSLMKIRAKKYQLLREETEKLKEKERNLIAENKMLMEKCEMQGRGIIGRISSSSSTSELDIDDNEMEVVTDLFIGPPETRHFKKFPPSN

SEQ ID NO: 81996 - protein, 214 aa, Arabidopsis thaliana
  peptide (1)..(214): Ceres Seq. ID no. 12662838
  misc_feature (93)..(166): Pfam Name: K-box region Pfam Description: K-box region
  misc_feature (1)..(214): Homolog of NCBI NO: 15234342 NR Description: MADS-box protein AGL14; protein id: At4g11880.1
  misc_feature (1)..(214): Homolog of NCBI NO: 862644 NR Description: MADS-box protein AGL14
  misc_feature (1)..(214): Homolog of NCBI NO: 15235869 NR Description: MADS-box protein; protein id: At4g22950.1, by cDNA: gi_11545542 [Arabidopsis thaliana]
  misc_feature (1)..(203): Homolog of NCBI NO: 4322475 NR Description: putative MADS box transcription factor ETL
  misc_feature (1)..(209): Homolog of NCBI NO: 3493647 NR Description: transcription activator [Pimpinella brachycarpa]
  misc_feature (1)..(205): Homolog of NCBI NO: 13384056 NR Description: MADS-box transcription factor FBP21 [Petunia x
  misc_feature (1)..(202): Homolog of NCBI NO: 6635740 NR Description: agamous-like MADS box protein OPMADS1 [Elaeis
  misc_feature (1)..(205): Homolog of NCBI NO: 27804375 NR Description: MADS-box transcription factor CDM36
  misc_feature (1)..(205): Homolog of NCBI NO: 13384054 NR Description: MADS-box transcription factor FBP20 [Petunia x
  misc_feature (1)..(205): Homolog of NCBI NO: 40641816 NR Description: putative MADS-box transcription factor DEFH68
MKRIENATSRQVTFSKRRNGLLKKAFELSVLCDAEVALIIFSPRGKLYEFSSSSSIPKTVERYQKRIQDLGSNHKRNDNSQQSKDETYGLARKIEHLEISTRKMMGEGLDASSIEELQQLENQLDRSLMKIRAKKYQLLREETEKLKEKERNLIAENKMLMEKCEMQGRGIIGRISSSSSTSELDIDDNEMEVVTDLFIGPPETRHFKKFPPSN

SEQ ID NO: 81997 - protein, 111 aa, Arabidopsis thaliana
  peptide (1)..(111): Ceres Seq. ID no. 12662839
  misc_feature (1)..(63): Pfam Name: K-box region Pfam Description: K-box region
  misc_feature (1)..(111): Homolog of NCBI NO: 15234342 NR Description: MADS-box protein AGL14; protein id: At4g11880.1
  misc_feature (1)..(111): Homolog of NCBI NO: 862644 NR Description: MADS-box protein AGL14
  misc_feature (1)..(111): Homolog of NCBI NO: 15235869 NR Description: MADS-box protein; protein id: At4g22950.1, by cDNA: gi_11545542 [Arabidopsis thaliana]
  misc_feature (1)..(100): Homolog of NCBI NO: 4322475 NR Description: putative MADS box transcription factor ETL
  misc_feature (1)..(106): Homolog of NCBI NO: 3493647 NR Description: transcription activator [Pimpinella brachycarpa]
  misc_feature (1)..(102): Homolog of NCBI NO: 13384056 NR Description: MADS-box transcription factor FBP21 [Petunia x
  misc_feature (1)..(99): Homolog of NCBI NO: 6635740 NR Description: agamous-like MADS box protein OPMADS1 [Elaeis
  misc_feature (1)..(102): Homolog of NCBI NO: 27804375 NR Description: MADS-box transcription factor CDM36
  misc_feature (1)..(102): Homolog of NCBI NO: 13384054 NR Description: MADS-box transcription factor FBP20 [Petunia x
  misc_feature (1)..(102): Homolog of NCBI NO: 40641816 NR Description: putative MADS-box transcription factor DEFH68
MMGEGLDASSIEELQQLENQLDRSLMKIRAKKYQLLREETEKLKEKERNLIAENKMLMEKCEMQGRGIIGRISSSSSTSELDIDDNEMEVVTDLFIGPPETRHFKKFPPSN

SEQ ID NO: 81998 - DNA, 1333 bp, Arabidopsis thaliana
  misc_feature (1)..(1333): Ceres Seq. ID no. 12662852
  misc_feature: MA Experiment ID: 20000306 Result: Up-regulated in Transcription
  misc_feature: MA Experiment 20000306 PARAMETER Experiment Name: At_Germinating_Seeds_Sub_P Parameter: Age (hr) Value: 6 vs. 0
  misc_feature: MA Experiment 20000306 PARAMETER Experiment Name: At_Germinating_Seeds_Sub_P Parameter: Organism Value: A. thaliana
  misc_feature: MA Experiment 20000306 PARAMETER Experiment Name: At_Germinating_Seeds_Sub_P Parameter: Plant Line Value: WS
  misc_feature: MA Experiment 20000306 PARAMETER Experiment Name: At_Germinating_Seeds_Sub_P Parameter: Tissue Value: Germinating Seeds
  misc_feature: MA Experiment ID: 20000307 Result: Up-regulated in Transcription
  misc_feature: MA Experiment 20000307 PARAMETER Experiment Name: At_Germinating_Seeds_Sub_P Parameter: Age (hr) Value: 24 vs. 0
  misc_feature: MA Experiment 20000307 PARAMETER Experiment Name: At_Germinating_Seeds_Sub_P Parameter: Organism Value: A. thaliana
  misc_feature: MA Experiment 20000307 PARAMETER Experiment Name: At_Germinating_Seeds_Sub_P Parameter: Plant Line Value: WS
  misc_feature: MA Experiment 20000307 PARAMETER Experiment Name: At_Germinating_Seeds_Sub_P Parameter: Tissue Value: Germinating Seeds
  misc_feature: MA Experiment ID: 20000327 Result: Up-regulated in Transcription
  misc_feature: MA Experiment 20000327 PARAMETER Experiment Name: At_42deg_Heat_Sub_P Parameter: Age (day) Value: 14
  misc_feature: MA Experiment 20000327 PARAMETER Experiment Name: At_42deg_Heat_Sub_P Parameter: Organism Value: A. thaliana
  misc_feature: MA Experiment 20000327 PARAMETER Experiment Name: At_42deg_Heat_Sub_P Parameter: Plant Line Value: WS
  misc_feature: MA Experiment 20000327 PARAMETER Experiment Name: At_42deg_Heat_Sub_P Parameter: Temperature (deg C) Value: 42 vs. 22
  misc_feature: MA Experiment 20000327 PARAMETER Experiment Name: At_42deg_Heat_Sub_P Parameter: Timepoint (hr) Value: 1
  misc_feature: MA Experiment 20000327 PARAMETER Experiment Name: At_42deg_Heat_Sub_P Parameter: Tissue Value: Aerial
  misc_feature: MA Experiment ID: 20000328 Result: Up-regulated in Transcription
  misc_feature: MA Experiment 20000328 PARAMETER Experiment Name: At_42deg_Heat_Sub_P Parameter: Age (day) Value: 14
  misc_feature: MA Experiment 20000328 PARAMETER Experiment Name: At_42deg_Heat_Sub_P Parameter: Organism Value: A. thaliana
  misc_feature: MA Experiment 20000328 PARAMETER Experiment Name: At_42deg_Heat_Sub_P Parameter: Plant Line Value: WS
  misc_feature: MA Experiment 20000328 PARAMETER Experiment Name: At_42deg_Heat_Sub_P Parameter: Temperature (deg C) Value: 42 vs. 22
  misc_feature: MA Experiment 20000328 PARAMETER Experiment Name: At_42deg_Heat_Sub_P Parameter: Timepoint (hr) Value: 6
  misc_feature: MA Experiment 20000328 PARAMETER Experiment Name: At_42deg_Heat_Sub_P Parameter: Tissue Value: Aerial
  misc_feature: MA Experiment ID: 20000347 Result: Up-regulated in Transcription
  misc_feature: MA Experiment 20000347 PARAMETER Experiment Name: At_2mM_SA_Sub_P Parameter: Age (day) Value: 14
  misc_feature: MA Experiment 20000347 PARAMETER Experiment Name: At_2mM_SA_Sub_P Parameter: Organism Value: A. thaliana
  misc_feature: MA Experiment 20000347 PARAMETER Experiment Name: At_2mM_SA_Sub_P Parameter: Plant Line Value: WS
  misc_feature: MA Experiment 20000347 PARAMETER Experiment Name: At_2mM_SA_Sub_P Parameter: Timepoint (hr) Value: 6
  misc_feature: MA Experiment 20000347 PARAMETER Experiment Name: At_2mM_SA_Sub_P Parameter: Tissue Value: Aerial
  misc_feature: MA Experiment 20000347 PARAMETER Experiment Name: At_2mM_SA_Sub_P Parameter: Treatment Value: 2mM SA vs. No Treatment
  misc_feature: MA Experiment ID: 20000348 Result: Up-regulated in Transcription
  misc_feature: MA Experiment 20000348 PARAMETER Experiment Name: At_100uM_ABA_Sub_P Parameter: Age (day) Value: 14
  misc_feature: MA Experiment 20000348 PARAMETER Experiment Name: At_100uM_ABA_Sub_P Parameter: Organism Value: A. thaliana
  misc_feature: MA Experiment 20000348 PARAMETER Experiment Name: At_100uM_ABA_Sub_P Parameter: Plant Line Value: WS
  misc_feature: MA Experiment 20000348 PARAMETER Experiment Name: At_100uM_ABA_Sub_P Parameter: Timepoint (hr) Value: 1
  misc_feature: MA Experiment 20000348 PARAMETER Experiment Name: At_100uM_ABA_Sub_P Parameter: Tissue Value: Aerial
  misc_feature: MA Experiment 20000348 PARAMETER Experiment Name: At_100uM_ABA_Sub_P Parameter: Treatment Value: 100uM ABA vs. No Treatment
  misc_feature: MA Experiment ID: 20000352 Result: Up-regulated in Transcription
  misc_feature: MA Experiment 20000352 PARAMETER Experiment Name: At_Drought_Sub_P Parameter: Age (day) Value: 7
  misc_feature: MA Experiment 20000352 PARAMETER Experiment Name: At_Drought_Sub_P Parameter: Organism Value: A. thaliana
  misc_feature: MA Experiment 20000352 PARAMETER Experiment Name: At_Drought_Sub_P Parameter: Plant Line Value: WS
  misc_feature: MA Experiment 20000352 PARAMETER Experiment Name: At_Drought_Sub_P Parameter: Timepoint (hr) Value: 6
  misc_feature: MA Experiment 20000352 PARAMETER Experiment Name: At_Drought_Sub_P Parameter: Tissue Value: Whole Plant
  misc_feature: MA Experiment 20000352 PARAMETER Experiment Name: At_Drought_Sub_P Parameter: Treatment Value: Drought vs. No Drought
  misc_feature: MA Experiment ID: 20000440 Result: Up-regulated in Transcription
  misc_feature: MA Experiment 20000440 PARAMETER Experiment Name: At_Closed-Flower__Sub_P Parameter: Tissue Value: Closed Flower vs. Whole Plant
attaacaaacaaaccgaaaaaagaaaaaaactcatctttctccaaaatcacacaaatcttctttatttgttattctcaatccttccttcatccccaggtttctttcgattcgttgagtcattcaatttttccatcactgggtttttctctctgaatccgatcggagaatccagtcgattactaatctagcgctctctttttttctactcgatgacttatcacgaagaagacgatacagtttctgaatttcgagttagagttgaagaagatggagttgataaattaggtcattatgttaaacttactgaagatttcgaagtacatcgacaagaaacagaacaagaatcttcatcatcaccgtcttcttcttcttcatgtggacagaaacgatctgtttggttttggatcaagcttggtcttttcttcacttttctaactgctttgggtctcgctggttacaaatggctataccctttaatcatggataaggagctaatcccactcataaaatgggagatggagacatttacacaccctgtgtgcggtattcttgtgtttgcatcagtctctttattccctgtgatacttattccaactacgccgtcaatgtgggtggctgggattacatttggttatttctatggccttctccttactcttccagctgtagctattggtgtttcacttccttacttcatcagctatctcttcctcaacaaaattcaaggttggttagaaagatatccagatcaagctgcaatgttgagagctgctggtggaggcagttggtttcatcagtttcgtgcagttaccttaatccggatttctccatttccttttgctgtatataattactgcgctgttgcaactcgtgtgaagttcggtccttacatggctggttctctcgtaggcatggcgccggagatttttgtcgcaatttatacagggattcttataaggacattggcagatgcatccactgcggaacaaaagggtctctcgattcttcaaattgttctcaacatttttggttttgtagcaactgttgtgacaactgttctcatcactaagtatgcgaaaagacagcttgaagttatgaagaaggagaaggaagctttgttgttacagtaatggagacaacaacctcagaagttatgtctctgcttattcccaaagtacaggttttcgtccatgatgtgaaagaactcttgatttttggtctctgttttggtttgtttatagccgagaaatgaaagggtataaaagaaattataatgactatataaacactaactaaactctctaacacgatttaatcttatttgcgttttct

SEQ ID NO: 81999 - protein, 306 aa, Arabidopsis thaliana
  peptide (1)..(306): Ceres Seq. ID no. 12662853
  misc_feature (1)..(306): Homolog of NCBI NO: 15234386 NR Description: putative protein; protein id: At4g12000.1, by cDNA: gi_18176120, supported by cDNA: gi_20465310 [Arabidopsis
  misc_feature (1)..(304): Homolog of NCBI NO: 30685958 NR Description: expressed protein [Arabidopsis thaliana] unknown protein [Arabidopsis thaliana]
  misc_feature (1)..(299): Homolog of NCBI NO: 15221330 NR Description: hypothetical protein; protein id: At1g12450.1
  misc_feature (28)..(297): Homolog of NCBI NO: 18395356 NR Description: expressed protein; protein id: At2g02370.1, by cDNA: gi_13605570, supported by cDNA: gi_16323325 [Arabidopsis >gi|13605571|gb|AAK32779.1|AF361611_1 At2g02370/T16F16.16
  misc_feature (60)..(300): Homolog of NCBI NO: 31249711 NR Description: hypothetical protein [Oryza sativa (japonica
  misc_feature (140)..(304): Homolog of NCBI NO: 7486891 NR Description: hypothetical protein T12H17.240 - Arabidopsis >gi|2832606|emb|CAA16570.1| predicted protein [Arabidopsis >gi|3292810|emb|CAA19800.1| putative protein [Arabidopsis
  misc_feature (47)..(300): Homolog of NCBI NO: 34913316 NR Description: P0519E12.36 [Oryza sativa (japonica >gi|22093829|dbj|BAC07116.1| hypothetical protein [Oryza sativa
  misc_feature (1)..(172): Homolog of NCBI NO: 8778630 NR Description: F5O11.19 [Arabidopsis thaliana]
  misc_feature (239)..(299): Homolog of NCBI NO: 8778630 NR Description: F5O11.19 [Arabidopsis thaliana]
  misc_feature (140)..(245): Homolog of NCBI NO: 8778630 NR Description: F5O11.19 [Arabidopsis thaliana]
MTYHEEDDTVSEFRVRVEEDGVDKLGHYVKLTEDFEVHRQETEQESSSSPSSSSSCGQKRSVWFWIKLGLFFTFLTALGLAGYKWLYPLIMDKELIPLIKWEMETFTHPVCGILVFASVSLFPVILIPTTPSMWVAGITFGYFYGLLLTLPAVAIGVSLPYFISYLFLNKIQGWLERYPDQAAMLRAAGGGSWFHQFRAVTLIRISPFPFAVYNYCAVATRVKFGPYMAGSLVGMAPEIFVAIYTGILIRTLADASTAEQKGLSILQIVLNIFGFVATVVTTVLITKYAKRQLEVMKKEKEALLLQ

SEQ ID NO: 82000 - protein, 216 aa, Arabidopsis thaliana
  peptide (1)..(216): Ceres Seq. ID no. 12662854
  misc_feature (1)..(216): Homolog of NCBI NO: 15234386 NR Description: putative protein; protein id: At4g12000.1, by cDNA: gi_18176120, supported by cDNA: gi_20465310 [Arabidopsis
  misc_feature (1)..(214): Homolog of NCBI NO: 30685958 NR Description: expressed protein [Arabidopsis thaliana] unknown protein [Arabidopsis thaliana]
  misc_feature (1)..(209): Homolog of NCBI NO: 15221330 NR Description: hypothetical protein; protein id: At1g12450.1
  misc_feature (1)..(207): Homolog of NCBI NO: 18395356 NR Description: expressed protein; protein id: At2g02370.1, by cDNA: gi_13605570, supported by cDNA: gi_16323325 [Arabidopsis >gi|13605571|gb|AAK32779.1|AF361611_1 At2g02370/T16F16.16
  misc_feature (1)..(210): Homolog of NCBI NO: 31249711 NR Description: hypothetical protein [Oryza sativa (japonica
  misc_feature (50)..(214): Homolog of NCBI NO: 7486891 NR Description: hypothetical protein T12H17.240 - Arabidopsis >gi|2832606|emb|CAA16570.1| predicted protein [Arabidopsis >gi|3292810|emb|CAA19800.1| putative protein [Arabidopsis
  misc_feature (1)..(210): Homolog of NCBI NO: 34913316 NR Description: P0519E12.36 [Oryza sativa (japonica >gi|22093829|dbj|BAC07116.1| hypothetical protein [Oryza sativa
  misc_feature (1)..(82): Homolog of NCBI NO: 8778630 NR Description: F5O11.19 [Arabidopsis thaliana]
  misc_feature (149)..(209): Homolog of NCBI NO: 8778630 NR Description: F5O11.19 [Arabidopsis thaliana]
  misc_feature (50)..(155): Homolog of NCBI NO: 8778630 NR Description: F5O11.19 [Arabidopsis thaliana]
MDKELIPLIKWEMETFTHPVCGILVFASVSLFPVILIPTTPSMWVAGITFGYFYGLLLTLPAVAIGVSLPYFISYLFLNKIQGWLERYPDQAAMLRAAGGGSWFHQFRAVTLIRISPFPFAVYNYCAVATRVKFGPYMAGSLVGMAPEIFVAIYTGILIRTLADASTAEQKGLSILQIVLNIFGFVATVVTTVLITKYAKRQLEVMKKEKEALLLQ

SEQ ID NO: 82001 - protein, 204 aa, Arabidopsis thaliana
  peptide (1)..(204): Ceres Seq. ID no. 12662855
  misc_feature (1)..(204): Homolog of NCBI NO: 15234386 NR Description: putative protein; protein id: At4g12000.1, by cDNA: gi_18176120, supported by cDNA: gi_20465310 [Arabidopsis
  misc_feature (1)..(202): Homolog of NCBI NO: 30685958 NR Description: expressed protein [Arabidopsis thaliana] unknown protein [Arabidopsis thaliana]
  misc_feature (1)..(197): Homolog of NCBI NO: 15221330 NR Description: hypothetical protein; protein id: At1g12450.1
  misc_feature (1)..(195): Homolog of NCBI NO: 18395356 NR Description: expressed protein; protein id: At2g02370.1, by cDNA: gi_13605570, supported by cDNA: gi_16323325 [Arabidopsis >gi|13605571|gb|AAK32779.1|AF361611_1 At2g02370/T16F16.16
  misc_feature (1)..(198): Homolog of NCBI NO: 31249711 NR Description: hypothetical protein [Oryza sativa (japonica
  misc_feature (38)..(202): Homolog of NCBI NO: 7486891 NR Description: hypothetical protein T12H17.240 - Arabidopsis >gi|2832606|emb|CAA16570.1| predicted protein [Arabidopsis >gi|3292810|emb|CAA19800.1| putative protein [Arabidopsis
  misc_feature (1)..(198): Homolog of NCBI NO: 34913316 NR Description: P0519E12.36 [Oryza sativa (japonica >gi|22093829|dbj|BAC07116.1| hypothetical protein [Oryza sativa
  misc_feature (1)..(70): Homolog of NCBI NO: 8778630 NR Description: F5O11.19 [Arabidopsis thaliana]
  misc_feature (137)..(197): Homolog of NCBI NO: 8778630 NR Description: F5O11.19 [Arabidopsis thaliana]
  misc_feature (38)..(143): Homolog of NCBI NO: 8778630 NR Description: F5O11.19 [Arabidopsis thaliana]
METFTHPVCGILVFASVSLFPVILIPTTPSMWVAGITFGYFYGLLLTLPAVAIGVSLPYFISYLFLNKIQGWLERYPDQAAMLRAAGGGSWFHQFRAVTLIRISPFPFAVYNYCAVATRVKFGPYMAGSLVGMAPEIFVAIYTGILIRTLADASTAEQKGLSILQIVLNIFGFVATVVTTVLITKYAKRQLEVMKKEKEALLLQ

SEQ ID NO: 82002 - DNA, 5688 bp, Arabidopsis thaliana
  misc_feature (1)..(5688): Ceres Seq. ID no. 12662856
  misc_feature: MA Experiment ID: 20000184 Result: Down-regulated in Transcription
  misc_feature: MA Experiment 20000184 PARAMETER Experiment Name: At_Shoots__P Parameter: Age (day) Value: 7
  misc_feature: MA Experiment 20000184 PARAMETER Experiment Name: At_Shoots__P Parameter: Tissue Value: Shoots vs. Whole Plant
  misc_feature: MA Experiment ID: 20000185 Result: Up-regulated in Transcription
  misc_feature: MA Experiment 20000185 PARAMETER Experiment Name: At_Roots__P Parameter: Age (day) Value: 7 vs. 21
  misc_feature: MA Experiment 20000185 PARAMETER Experiment Name: At_Roots__P Parameter: Organism Value: A. thaliana
  misc_feature: MA Experiment 20000185 PARAMETER Experiment Name: At_Roots__P Parameter: Tissue Value: Roots vs. Whole Plant
  misc_feature: MA Experiment ID: 20000437 Result: Up-regulated in Transcription
  misc_feature: MA Experiment 20000437 PARAMETER Experiment Name: At_Drought_P Parameter: Age (day) Value: 8
  misc_feature: MA Experiment 20000437 PARAMETER Experiment Name: At_Drought_P Parameter: Organism Value: A. thaliana
  misc_feature: MA Experiment 20000437 PARAMETER Experiment Name: At_Drought_P Parameter: Plant Line Value: WS
  misc_feature: MA Experiment 20000437 PARAMETER Experiment Name: At_Drought_P Parameter: Timepoint (hr) Value: 24
  misc_feature: MA Experiment 20000437 PARAMETER Experiment Name: At_Drought_P Parameter: Tissue Value: Whole Plant
  misc_feature: MA Experiment 20000437 PARAMETER Experiment Name: At_Drought_P Parameter: Treatment Value: Drought vs. No Drought
  misc_feature: MA Experiment ID: 20000439 Result: Up-regulated in Transcription
  misc_feature: MA Experiment 20000439 PARAMETER Experiment Name: At_Roots__P Parameter: Age (day) Value: 14 vs. 21
  misc_feature: MA Experiment 20000439 PARAMETER Experiment Name: At_Roots__P Parameter: Organism Value: A. thaliana
  misc_feature: MA Experiment 20000439 PARAMETER Experiment Name: At_Roots__P Parameter: Tissue Value: Roots vs. Whole Plant
atgtcggagaaggaagaacttccgttgacattgacgtccatcggagcggccaccgcgactagtgattatcatcagagagtaggaagttccggtgaagggattagtagctcgagtagtgatgttgacccgaggttcatgcagaatagccccacgggtttgatgatttcccaatcgtcgtcgatgtgcaccgtaccgcctggcatggcagcaacaccaccaataagctcaggttccggtttatctcagcagcttaataattcttctagttccaagttatgtcaagtggaaggatgtcaaaaaggagcaagagatgcatctggtcgttgcatttcccatggcggtggacgtagatgccagaaacctgattgccagaagggagctgaaggtaaaacagtgtactgtaaagcccacggaggtggtcgcagatgtgaatatcttggatgcaccaaaggcgcagaaggcagtactgatttttgtatagctcatggaggtggtcgaagatgcaaccatgaagattgcacacgatctgcttggggaagaacagaattctgtgtcaagcacggtggaggagcgagatgcaaaacatacggctgcggaaaaagcgctagtggtcctttgccattctgccgagcccatggtggtggtaaaaaatgcagccatgaagattgcacaggatttgctaggggaagatcaggactctgtctcatgcacggtgggggaaagagatgccaaagagagaactgcactaaaagcgctgaaggtctttcgggactctgcatatcccatggtggtggtcggcgatgtcaatctattggatgcacaaaaggagcgaaagggagcaaaatgttctgcaaagcatgcataactaaaaggcctctaacgattgatggaggaggaaatatgggaggggtaacaacaggtgatgccttgaactatctcaaagctgtgaaggacaagtttgaagacagtgagaaatatgacactttccttgaagtcttgaatgactgtaaacatcagggagttgacactagtggcgtcatagccagattaaaagatttgttcaagggccatgacgacttacttttgggttttaatacctacttgtcaaaggagtaccaaataaccattctgcccgaggatgatttccctatcgattttcttgacaaggttgagggaccttatgaaatgacatatcagcaagctcaaacagttcaagccaatgccaatatgcaacctcaaactgagtacccttcttcctctgcggttcaatcattttcatcgggtcaacctcagatccccacctcagctccggattcttcactactagctaaaagtaatacctcaggtataactatcatcgagcacatgtcacaacagcctctaaatgttgacaaacaagttaatgatggctataactggcaaaagtatgggcaaaagaaagttaaaggcagcaagtttcctctaagctattacaagtgcacatatctaggatgtccttccaagaggaaggttgagagatctcttgatggacaagtagcagaaatcgtctacaaagatcgacacaatcacgaacctcctaaccaaggaaaagatggtagcaccacatatctaagtgggagttcgacacacatcaattgcatgagctctgaattgacagcatcacagtttagctccaacaagactaagatagagcaacaggaagcagcaagtctagctacgacaatagagtacatgtctgaggcaagtgacaatgaagaagacagtaatggagaaactagtgagggagagaaagatgaagacgagcctgaaccaaagagaagaattacagaagttcaggtttcggaactagctgatgcttcagatagaaccgtgagagagcctagggttattttccaaacaacgagtgaagttgataatttagatgatggatataggtggcggaaatatggacagaaagttgttaaagggaatccttatccaaggttttcctcctctaaagattatgatgtcgtaatcagatacggaagagcagatataagcaatgaggatttcattagccatcttcgtgcttccctctgccggagagggatttctgtctatgaaaaatttaatgaagtggatgcacttccaaaatgtagggttttgattatagtattaacaagcacatatgtcccttcgaacctcttaaacattcttgaacaccaacatacagaggatcgagtggtttatccaattttctacagactatcaccatatgattttgtctgtaacagcaagaattatgagagattttatctccaagatgagccaaaaaaatggcaagctgctttgaaggaaataactcagatgcctggctacacattgacagataagtctgaatctgaacttatagatgagattgtaagagatgctttaaaggtgctatgttctgctgataaggtgaacatgattgggatggatatgcaagtagaggagattttgtcactgctatgcattgagtcccttgatgttcgcagcattggtatatggggtacagttggtataggaaaaacaaccattgctgaagagatctttcgcaaaatctctgtccaatatgagacctgtgtcgtccttaaggacctccacaaagaagttgaggtaaaaggtcacgatgctgtgagagagaattttctgtctgaagttttagaggtagaacctcatgttatccggatatctgacattaaaacaagcttcttgagaagtcggcttcagcgtaaaaggatccttgttattcttgacgatgtgaatgattacagagatgttgacacctttttggggacgcttaactattttggtccaggaagcagaataatcatgacctctagaaatagacgtgttttcgtactatgtaaaatcgatcatgtctatgaggttaagccattagatattcctaagtctctactacttcttgatcgtgggacatgtcaaattgttttgtcacctgaggtttacaagacattgtcacttgagctggtcaaattttcaaatggaaatccccaggttcttcagttcttgagcagtattgacagagaatggaataagttatcacaagaagttaagacaacatctcccatttacatcccaggtatatttgaaaagagctgttgtgggcttgatgacaacgagaggggtatatttttggacattgcatgtttctttaataggattgataaagacaatgtcgcaatgttgctggatggttgtggtttctctgcacatgtcggatttagaggccttgttgacaaatcactgttgacaatatcacaacacaacttggtggacatgctcagttttatccaggcaactggtcgagaaattgttcgccaagaatcagctgacagaccaggagaccgcagcaggttgtggaatgccgactatatcagacacgtattcataaatgacactggcacatcagctattgagggcattttcctagacatgttgaatcttaaatttgatgcaaatcccaacgtgttcgagaaaatgtgtaaccttagactgttgaaattgtattgctccaaagcggaagagaagcatggagtatcttttccacaaggtcttgaatatttgccgagcaagctaaggcttctccattgggaatattatcctctaagttctttgccgaaaagttttaatccagagaaccttgtcgagcttaacttgccaagtagctgtgcaaagaaactttggaaaggaaaaaaggcaaggttttgtacaaccaattcaagtctggaaaagcttaaaaagatgagacttagctactccgaccagttaactaaaatcccaagactttcaagcgcaacaaatcttgagcatattgatcttgaaggttgcaacagtttgttgagccttagccagtccatttcttatcttaagaagcttgtttttctgaatttaaagggctgctcgaagctggagaatattccatctatggttgatttagaatcgcttgaggttctaaatctttcgggttgttcaaagctagggaacttcccggagatctcaccaaatgtgaaagaactgtacatgggtgggactatgatacaagaaatcccgtcatcgattaagaacttggtattgcttgagaaactggacctggaaaacagtagacatctcaagaatcttccaacaagcatctacaagttgaagcatcttgaaactctaaatctttcaggctgcataagcctggagcgatttccagactcgtcgagaaggatgaaatgcttaaggtttttggatttaagcaggacagacattaaagagctgccctcttccatatcgtatctgactgctcttgacgaactattattcgtagactccaggagaaactcgccagttgtaaccaatcccaatgccaattcaactgagttgatgccttctgagtcaagtaagcttgagatcttaggtactccggcagataacgaagtagttgttggtggtacggtagagaaaacccgtggtattgaacgaacgccgactattttggtgaagtcgagagagtatctaattcccgatgatgttgtggcggttggtggtgatattaaggggctaagaccaccagtacttcagctccaaccagcaatgaaactatctcatattcctcgaggatcaacttgggatttcgttacgcatttcgctccacctgaaacagttgcgccgccgagttcctcttcagaagccagggaagaggaagtggaaacggaagagacgggagctatgtttatcccattgggggataaggagacatgctcattcactgtaaacaagggtgactcctcaaggacaatatctaatacgtcgccgatttatgcctccgaaggatctttcatcacgtgttggcagaagggtcaacttctgggacgaggatcattagggtccgtatatgaaggcatttcagcagacggggacttctttgctttcaaggaagtttcactacttgatcagggaagtcaggcacatgaatggatacaacaagtcgagggggggattgcgctacttagtcagcttcagcatcagaatatcgtgcgatatcgtggcacaactaaggacgagtcgaatttgtacatttttcttgaacttgtaacccaagggtcccttcgaaaactctaccaaagaaaccagcttggggactctgtagtctccttatacacaagacagattcttgatggattgaaatatctccacgataaaggttttatacacaggaacattaaatgtgcaaatgtattggtggacgctaatggaacagttaaacttgcagattttggattggctaaggtaatgtccctctggcgaactccgtattggaattggatggctccagaggttattcttaacccgaaggattatgatggttatggaactccagctgatatatggagccttgggtgtactgtgctagaaatgttgactggtcagattccctactccgatctggaaatcggtacagccttgtataacattggaacgggtaagcttccgaaaatacctgatattctatcgctagacgcccgggatttcatacttacgtgtctcaaagtgaacccggaagagcggccaactgcagctgagctgcttaaccatccatttgtgaatatgccattaccatcctcgggctcaggttcagtatcttcgctcctccgtggatga

SEQ ID NO: 82003 - protein, 1895 aa, Arabidopsis thaliana
  peptide (1)..(1895): Ceres Seq. ID no. 12662857
  misc_feature (1626)..(1877): Pfam Name: Protein kinase domain Pfam Description: Protein kinase domain
  misc_feature (1473)..(1894): Homolog of NCBI NO: 1255448 NR Description: mitogen-activated protein kinase [Arabidopsis
  misc_feature (1473)..(1894): Homolog of NCBI NO: 15236515 NR Description: MEKK1/MAP kinase kinase kinase; protein id: supported by cDNA: gi_1255447, supported by cDNA: gi_17064765
  misc_feature (1473)..(1894): Homolog of NCBI NO: 17064766 NR Description: Unknown protein [Arabidopsis thaliana]
  misc_feature (1527)..(1894): Homolog of NCBI NO: 15236511 NR Description: putative mitogen-activated protein kinase;
  misc_feature (1473)..(1542): Homolog of NCBI NO: 15236511 NR Description: putative mitogen-activated protein kinase;
  misc_feature (1480)..(1542): Homolog of NCBI NO: 15236511 NR Description: putative mitogen-activated protein kinase;
  misc_feature (1464)..(1887): Homolog of NCBI NO: 3688209 NR Description: MAP3K beta 1 protein kinase [Brassica napus]
  misc_feature (1623)..(1877): Homolog of NCBI NO: 15236509 NR Description: putative mitogen-activated protein kinase;
  misc_feature (1623)..(1877): Homolog of NCBI NO: 28393793 NR Description: putative mitogen-activated protein kinase
  misc_feature (1507)..(1645): Homolog of NCBI NO: 15236509 NR Description: putative mitogen-activated protein kinase;
MSEKEELPLTLTSIGAATATSDYHQRVGSSGEGISSSSSDVDPRFMQNSPTGLMISQSSSMCTVPPGMAATPPISSGSGLSQQLNNSSSSKLCQVEGCQKGARDASGRCISHGGGRRCQKPDCQKGAEGKTVYCKAHGGGRRCEYLGCTKGAEGSTDFCIAHGGGRRCNHEDCTRSAWGRTEFCVKHGGGARCKTYGCGKSASGPLPFCRAHGGGKKCSHEDCTGFARGRSGLCLMHGGGKRCQRENCTKSAEGLSGLCISHGGGRRCQSIGCTKGAKGSKMFCKACITKRPLTIDGGGNMGGVTTGDALNYLKAVKDKFEDSEKYDTFLEVLNDCKHQGVDTSGVIARLKDLFKGHDDLLLGFNTYLSKEYQITILPEDDFPIDFLDKVEGPYEMTYQQAQTVQANANMQPQTEYPSSSAVQSFSSGQPQIPTSAPDSSLLAKSNTSGITIIEHMSQQPLNVDKQVNDGYNWQKYGQKKVKGSKFPLSYYKCTYLGCPSKRKVERSLDGQVAEIVYKDRHNHEPPNQGKDGSTTYLSGSSTHINCMSSELTASQFSSNKTKIEQQEAASLATTIEYMSEASDNEEDSNGETSEGEKDEDEPEPKRRITEVQVSELADASDRTVREPRVIFQTTSEVDNLDDGYRWRKYGQKVVKGNPYPRFSSSKDYDVVIRYGRADISNEDFISHLRASLCRRGISVYEKFNEVDALPKCRVLIIVLTSTYVPSNLLNILEHQHTEDRVVYPIFYRLSPYDFVCNSKNYERFYLQDEPKKWQAALKEITQMPGYTLTDKSESELIDEIVRDALKVLCSADKVNMIGMDMQVEEILSLLCIESLDVRSIGIWGTVGIGKTTIAEEIFRKISVQYETCVVLKDLHKEVEVKGHDAVRENFLSEVLEVEPHVIRISDIKTSFLRSRLQRKRILVILDDVNDYRDVDTFLGTLNYFGPGSRIIMTSRNRRVFVLCKIDHVYEVKPLDIPKSLLLLDRGTCQIVLSPEVYKTLSLELVKFSNGNPQVLQFLSSIDREWNKLSQEVKTTSPIYIPGIFEKSCCGLDDNERGIFLDIACFFNRIDKDNVAMLLDGCGFSAHVGFRGLVDKSLLTISQHNLVDMLSFIQATGREIVRQESADRPGDRSRLWNADYIRHVFINDTGTSAIEGIFLDMLNLKFDANPNVFEKMCNLRLLKLYCSKAEEKHGVSFPQGLEYLPSKLRLLHWEYYPLSSLPKSFNPENLVELNLPSSCAKKLWKGKKARFCTTNSSLEKLKKMRLSYSDQLTKIPRLSSATNLEHIDLEGCNSLLSLSQSISYLKKLVFLNLKGCSKLENIPSMVDLESLEVLNLSGCSKLGNFPEISPNVKELYMGGTMIQEIPSSIKNLVLLEKLDLENSRHLKNLPTSIYKLKHLETLNLSGCISLERFPDSSRRMKCLRFLDLSRTDIKELPSSISYLTALDELLFVDSRRNSPVVTNPNANSTELMPSESSKLEILGTPADNEVVVGGTVEKTRGIERTPTILVKSREYLIPDDVVAVGGDIKGLRPPVLQLQPAMKLSHIPRGSTWDFVTHFAPPETVAPPSSSSEAREEEVETEETGAMFIPLGDKETCSFTVNKGDSSRTISNTSPIYASEGSFITCWQKGQLLGRGSLGSVYEGISADGDFFAFKEVSLLDQGSQAHEWIQQVEGGIALLSQLQHQNIVRYRGTTKDESNLYIFLELVTQGSLRKLYQRNQLGDSVVSLYTRQILDGLKYLHDKGFIHRNIKCANVLVDANGTVKLADFGLAKVMSLWRTPYWNWMAPEVILNPKDYDGYGTPADIWSLGCTVLEMLTGQIPYSDLEIGTALYNIGTGKLPKIPDILSLDARDFILTCLKVNPEERPTAAELLNHPFVNMPLPSSGSGSVSSLLRG

SEQ ID NO: 82004 - protein, 1850 aa, Arabidopsis thaliana
  peptide (1)..(1850): Ceres Seq. ID no. 12662858
  misc_feature (1581)..(1832): Pfam Name: Protein kinase domain Pfam Description: Protein kinase domain
  misc_feature (1428)..(1849): Homolog of NCBI NO: 1255448 NR Description: mitogen-activated protein kinase [Arabidopsis
  misc_feature (1428)..(1849): Homolog of NCBI NO: 15236515 NR Description: MEKK1/MAP kinase kinase kinase; protein id: supported by cDNA: gi_1255447, supported by cDNA: gi_17064765
  misc_feature (1428)..(1849): Homolog of NCBI NO: 17064766 NR Description: Unknown protein [Arabidopsis thaliana]
  misc_feature (1482)..(1849): Homolog of NCBI NO: 15236511 NR Description: putative mitogen-activated protein kinase;
  misc_feature (1428)..(1497): Homolog of NCBI NO: 15236511 NR Description: putative mitogen-activated protein kinase;
  misc_feature (1435)..(1497): Homolog of NCBI NO: 15236511 NR Description: putative mitogen-activated protein kinase;
  misc_feature (1419)..(1842): Homolog of NCBI NO: 3688209 NR Description: MAP3K beta 1 protein kinase [Brassica napus]
  misc_feature (1578)..(1832): Homolog of NCBI NO: 15236509 NR Description: putative mitogen-activated protein kinase;
  misc_feature (1578)..(1832): Homolog of NCBI NO: 28393793 NR Description: putative mitogen-activated protein kinase
  misc_feature (1462)..(1600): Homolog of NCBI NO: 15236509 NR Description: putative mitogen-activated protein kinase;
MQNSPTGLMISQSSSMCTVPPGMAATPPISSGSGLSQQLNNSSSSKLCQVEGCQKGARDASGRCISHGGGRRCQKPDCQKGAEGKTVYCKAHGGGRRCEYLGCTKGAEGSTDFCIAHGGGRRCNHEDCTRSAWGRTEFCVKHGGGARCKTYGCGKSASGPLPFCRAHGGGKKCSHEDCTGFARGRSGLCLMHGGGKRCQRENCTKSAEGLSGLCISHGGGRRCQSIGCTKGAKGSKMFCKACITKRPLTIDGGGNMGGVTTGDALNYLKAVKDKFEDSEKYDTFLEVLNDCKHQGVDTSGVIARLKDLFKGHDDLLLGFNTYLSKEYQITILPEDDFPIDFLDKVEGPYEMTYQQAQTVQANANMQPQTEYPSSSAVQSFSSGQPQIPTSAPDSSLLAKSNTSGITIIEHMSQQPLNVDKQVNDGYNWQKYGQKKVKGSKFPLSYYKCTYLGCPSKRKVERSLDGQVAEIVYKDRHNHEPPNQGKDGSTTYLSGSSTHINCMSSELTASQFSSNKTKIEQQEAASLATTIEYMSEASDNEEDSNGETSEGEKDEDEPEPKRRITEVQVSELADASDRTVREPRVIFQTTSEVDNLDDGYRWRKYGQKVVKGNPYPRFSSSKDYDVVIRYGRADISNEDFISHLRASLCRRGISVYEKFNEVDALPKCRVLIIVLTSTYVPSNLLNILEHQHTEDRVVYPIFYRLSPYDFVCNSKNYERFYLQDEPKKWQAALKEITQMPGYTLTDKSESELIDEIVRDALKVLCSADKVNMIGMDMQVEEILSLLCIESLDVRSIGIWGTVGIGKTTIAEEIFRKISVQYETCVVLKDLHKEVEVKGHDAVRENFLSEVLEVEPHVIRISDIKTSFLRSRLQRKRILVILDDVNDYRDVDTFLGTLNYFGPGSRIIMTSRNRRVFVLCKIDHVYEVKPLDIPKSLLLLDRGTCQIVLSPEVYKTLSLELVKFSNGNPQVLQFLSSIDREWNKLSQEVKTTSPIYIPGIFEKSCCGLDDNERGIFLDIACFFNRIDKDNVAMLLDGCGFSAHVGFRGLVDKSLLTISQHNLVDMLSFIQATGREIVRQESADRPGDRSRLWNADYIRHVFINDTGTSAIEGIFLDMLNLKFDANPNVFEKMCNLRLLKLYCSKAEEKHGVSFPQGLEYLPSKLRLLHWEYYPLSSLPKSFNPENLVELNLPSSCAKKLWKGKKARFCTTNSSLEKLKKMRLSYSDQLTKIPRLSSATNLEHIDLEGCNSLLSLSQSISYLKKLVFLNLKGCSKLENIPSMVDLESLEVLNLSGCSKLGNFPEISPNVKELYMGGTMIQEIPSSIKNLVLLEKLDLENSRHLKNLPTSIYKLKHLETLNLSGCISLERFPDSSRRMKCLRFLDLSRTDIKELPSSISYLTALDELLFVDSRRNSPVVTNPNANSTELMPSESSKLEILGTPADNEVVVGGTVEKTRGIERTPTILVKSREYLIPDDVVAVGGDIKGLRPPVLQLQPAMKLSHIPRGSTWDFVTHFAPPETVAPPSSSSEAREEEVETEETGAMFIPLGDKETCSFTVNKGDSSRTISNTSPIYASEGSFITCWQKGQLLGRGSLGSVYEGISADGDFFAFKEVSLLDQGSQAHEWIQQVEGGIALLSQLQHQNIVRYRGTTKDESNLYIFLELVTQGSLRKLYQRNQLGDSVVSLYTRQILDGLKYLHDKGFIHRNIKCANVLVDANGTVKLADFGLAKVMSLWRTPYWNWMAPEVILNPKDYDGYGTPADIWSLGCTVLEMLTGQIPYSDLEIGTALYNIGTGKLPKIPDILSLDARDFILTCLKVNPEERPTAAELLNHPFVNMPLPSSGSGSVSSLLRG

SEQ ID NO: 82005 - protein, 1842 aa, Arabidopsis thaliana
  peptide (1)..(1842): Ceres Seq. ID no. 12662859
  misc_feature (1573)..(1824): Pfam Name: Protein kinase domain Pfam Description: Protein kinase domain
  misc_feature (1420)..(1841): Homolog of NCBI NO: 1255448 NR Description: mitogen-activated protein kinase [Arabidopsis
  misc_feature (1420)..(1841): Homolog of NCBI NO: 15236515 NR Description: MEKK1/MAP kinase kinase kinase; protein id: supported by cDNA: gi_1255447, supported by cDNA: gi_17064765
  misc_feature (1420)..(1841): Homolog of NCBI NO: 17064766 NR Description: Unknown protein [Arabidopsis thaliana]
  misc_feature (1474)..(1841): Homolog of NCBI NO: 15236511 NR Description: putative mitogen-activated protein kinase;
  misc_feature (1420)..(1489): Homolog of NCBI NO: 15236511 NR Description: putative mitogen-activated protein kinase;
  misc_feature (1427)..(1489): Homolog of NCBI NO: 15236511 NR Description: putative mitogen-activated protein kinase;
  misc_feature (1411)..(1834): Homolog of NCBI NO: 3688209 NR Description: MAP3K beta 1 protein kinase [Brassica napus]
  misc_feature (1570)..(1824): Homolog of NCBI NO: 15236509 NR Description: putative mitogen-activated protein kinase;
  misc_feature (1570)..(1824): Homolog of NCBI NO: 28393793 NR Description: putative mitogen-activated protein kinase
  misc_feature (1454)..(1592): Homolog of NCBI NO: 15236509 NR Description: putative mitogen-activated protein kinase;
MISQSSSMCTVPPGMAATPPISSGSGLSQQLNNSSSSKLCQVEGCQKGARDASGRCISHGGGRRCQKPDCQKGAEGKTVYCKAHGGGRRCEYLGCTKGAEGSTDFCIAHGGGRRCNHEDCTRSAWGRTEFCVKHGGGARCKTYGCGKSASGPLPFCRAHGGGKKCSHEDCTGFARGRSGLCLMHGGGKRCQRENCTKSAEGLSGLCISHGGGRRCQSIGCTKGAKGSKMFCKACITKRPLTIDGGGNMGGVTTGDALNYLKAVKDKFEDSEKYDTFLEVLNDCKHQGVDTSGVIARLKDLFKGHDDLLLGFNTYLSKEYQITILPEDDFPIDFLDKVEGPYEMTYQQAQTVQANANMQPQTEYPSSSAVQSFSSGQPQIPTSAPDSSLLAKSNTSGITIIEHMSQQPLNVDKQVNDGYNWQKYGQKKVKGSKFPLSYYKCTYLGCPSKRKVERSLDGQVAEIVYKDRHNHEPPNQGKDGSTTYLSGSSTHINCMSSELTASQFSSNKTKIEQQEAASLATTIEYMSEASDNEEDSNGETSEGEKDEDEPEPKRRITEVQVSELADASDRTVREPRVIFQTTSEVDNLDDGYRWRKYGQKVVKGNPYPRFSSSKDYDVVIRYGRADISNEDFISHLRASLCRRGISVYEKFNEVDALPKCRVLIIVLTSTYVPSNLLNILEHQHTEDRVVYPIFYRLSPYDFVCNSKNYERFYLQDEPKKWQAALKEITQMPGYTLTDKSESELIDEIVRDALKVLCSADKVNMIGMDMQVEEILSLLCIESLDVRSIGIWGTVGIGKTTIAEEIFRKISVQYETCVVLKDLHKEVEVKGHDAVRENFLSEVLEVEPHVIRISDIKTSFLRSRLQRKRILVILDDVNDYRDVDTFLGTLNYFGPGSRIIMTSRNRRVFVLCKIDHVYEVKPLDIPKSLLLLDRGTCQIVLSPEVYKTLSLELVKFSNGNPQVLQFLSSIDREWNKLSQEVKTTSPIYIPGIFEKSCCGLDDNERGIFLDIACFFNRIDKDNVAMLLDGCGFSAHVGFRGLVDKSLLTISQHNLVDMLSFIQATGREIVRQESADRPGDRSRLWNADYIRHVFINDTGTSAIEGIFLDMLNLKFDANPNVFEKMCNLRLLKLYCSKAEEKHGVSFPQGLEYLPSKLRLLHWEYYPLSSLPKSFNPENLVELNLPSSCAKKLWKGKKARFCTTNSSLEKLKKMRLSYSDQLTKIPRLSSATNLEHIDLEGCNSLLSLSQSISYLKKLVFLNLKGCSKLENIPSMVDLESLEVLNLSGCSKLGNFPEISPNVKELYMGGTMIQEIPSSIKNLVLLEKLDLENSRHLKNLPTSIYKLKHLETLNLSGCISLERFPDSSRRMKCLRFLDLSRTDIKELPSSISYLTALDELLFVDSRRNSPVVTNPNANSTELMPSESSKLEILGTPADNEVVVGGTVEKTRGIERTPTILVKSREYLIPDDVVAVGGDIKGLRPPVLQLQPAMKLSHIPRGSTWDFVTHFAPPETVAPPSSSSEAREEEVETEETGAMFIPLGDKETCSFTVNKGDSSRTISNTSPIYASEGSFITCWQKGQLLGRGSLGSVYEGISADGDFFAFKEVSLLDQGSQAHEWIQQVEGGIALLSQLQHQNIVRYRGTTKDESNLYIFLELVTQGSLRKLYQRNQLGDSVVSLYTRQILDGLKYLHDKGFIHRNIKCANVLVDANGTVKLADFGLAKVMSLWRTPYWNWMAPEVILNPKDYDGYGTPADIWSLGCTVLEMLTGQIPYSDLEIGTALYNIGTGKLPKIPDILSLDARDFILTCLKVNPEERPTAAELLNHPFVNMPLPSSGSGSVSSLLRG

SEQ ID NO: 82006 - DNA, 1364 bp, Arabidopsis thaliana
  misc_feature (1)..(1364): Ceres Seq. ID no. 12662860
  misc_feature: MA Experiment ID: 20000182 Result: Down-regulated in Transcription
  misc_feature: MA Experiment 20000182 PARAMETER Experiment Name: At_2mM_SA_P Parameter: Age (day) Value: 14
  misc_feature: MA Experiment 20000182 PARAMETER Experiment Name: At_2mM_SA_P Parameter: Organism Value: A. thaliana
  misc_feature: MA Experiment 20000182 PARAMETER Experiment Name: At_2mM_SA_P Parameter: Plant Line Value: WS
  misc_feature: MA Experiment 20000182 PARAMETER Experiment Name: At_2mM_SA_P Parameter: Timepoint (hr) Value: 6
  misc_feature: MA Experiment 20000182 PARAMETER Experiment Name: At_2mM_SA_P Parameter: Tissue Value: Aerial
  misc_feature: MA Experiment 20000182 PARAMETER Experiment Name: At_2mM_SA_P Parameter: Treatment Value: 2mM SA vs. No Treatment
  misc_feature: MA Experiment ID: 20000227 Result: Down-regulated in Transcription
  misc_feature: MA Experiment 20000227 PARAMETER Experiment Name: At_Root-Tips-vs-Tops_P Parameter: Tissue Value: Root Tips vs. Root Tops
  misc_feature: MA Experiment ID: 20000234 Result: Down-regulated in Transcription
  misc_feature: MA Experiment 20000234 PARAMETER Experiment Name: At_Siliques_P Parameter: Age (day) Value: 21
  misc_feature: MA Experiment 20000234 PARAMETER Experiment Name: At_Siliques_P Parameter: Organism Value: A. thaliana
  misc_feature: MA Experiment 20000234 PARAMETER Experiment Name: At_Siliques_P Parameter: Plant Line Value: WS
  misc_feature: MA Experiment 20000234 PARAMETER Experiment Name: At_Siliques_P Parameter: Tissue Value: Less Than 5mm Siliques vs. Whole Plant
  misc_feature: MA Experiment ID: 20000264 Result: Down-regulated in Transcription
  misc_feature: MA Experiment 20000264 PARAMETER Experiment Name: At_Open_Flower_P Parameter: Age (day) Value: 21
  misc_feature: MA Experiment 20000264 PARAMETER Experiment Name: At_Open_Flower_P Parameter: Plant Line Value: WS
  misc_feature: MA Experiment 20000264 PARAMETER Experiment Name: At_Open_Flower_P Parameter: Tissue Value: Open Flower vs. Whole Plant
  misc_feature: MA Experiment ID: 20000286 Result: Down-regulated in Transcription
  misc_feature: MA Experiment 20000286 PARAMETER Experiment Name: At_Open_Flower_P Parameter: Age (day) Value: 21
  misc_feature: MA Experiment 20000286 PARAMETER Experiment Name: At_Open_Flower_P Parameter: Plant Line Value: WS
  misc_feature: MA Experiment 20000286 PARAMETER Experiment Name: At_Open_Flower_P Parameter: Tissue Value: Half Open vs. Whole Plant
  misc_feature: MA Experiment ID: 20000437 Result: Down-regulated in Transcription
  misc_feature: MA Experiment 20000437 PARAMETER Experiment Name: At_Drought_P Parameter: Age (day) Value: 8
  misc_feature: MA Experiment 20000437 PARAMETER Experiment Name: At_Drought_P Parameter: Organism Value: A. thaliana
  misc_feature: MA Experiment 20000437 PARAMETER Experiment Name: At_Drought_P Parameter: Plant Line Value: WS
  misc_feature: MA Experiment 20000437 PARAMETER Experiment Name: At_Drought_P Parameter: Timepoint (hr) Value: 24
  misc_feature: MA Experiment 20000437 PARAMETER Experiment Name: At_Drought_P Parameter: Tissue Value: Whole Plant
  misc_feature: MA Experiment 20000437 PARAMETER Experiment Name: At_Drought_P Parameter: Treatment Value: Drought vs. No Drought
  misc_feature: MA Experiment ID: 20000445 Result: Down-regulated in Transcription
  misc_feature: MA Experiment 20000445 PARAMETER Experiment Name: At_100uM_NAA__P Parameter: Age (day) Value: 14
  misc_feature: MA Experiment 20000445 PARAMETER Experiment Name: At_100uM_NAA__P Parameter: Organism Value: A. thaliana
  misc_feature: MA Experiment 20000445 PARAMETER Experiment Name: At_100uM_NAA__P Parameter: Plant Line Value: WS
  misc_feature: MA Experiment 20000445 PARAMETER Experiment Name: At_100uM_NAA__P Parameter: Timepoint (hr) Value: 6
  misc_feature: MA Experiment 20000445 PARAMETER Experiment Name: At_100uM_NAA__P Parameter: Tissue Value: Aerial
  misc_feature: MA Experiment 20000445 PARAMETER Experiment Name: At_100uM_NAA__P Parameter: Treatment Value: 100uM NAA vs. No Treatment
  misc_feature: MA Experiment ID: 20000451 Result: Up-regulated in Transcription
  misc_feature: MA Experiment 20000451 PARAMETER Experiment Name: At_CS6879_Shoots-Roots_P Parameter: Age (day) Value: 14
  misc_feature: MA Experiment 20000451 PARAMETER Experiment Name: At_CS6879_Shoots-Roots_P Parameter: Organism Value: A. thaliana
  misc_feature: MA Experiment 20000451 PARAMETER Experiment Name: At_CS6879_Shoots-Roots_P Parameter: Plant Line Value: CS6879 vs. WS
  misc_feature: MA Experiment 20000451 PARAMETER Experiment Name: At_CS6879_Shoots-Roots_P Parameter: Tissue Value: Roots
  misc_feature: MA Experiment ID: 20000495 Result: Up-regulated in Transcription
  misc_feature: MA Experiment 20000495 PARAMETER Experiment Name: At_Guard_Cells_P Parameter: Harvest Date Value: 8/2/2002
  misc_feature: MA Experiment 20000495 PARAMETER Experiment Name: At_Guard_Cells_P Parameter: Organism Value: A. thaliana
  misc_feature: MA Experiment 20000495 PARAMETER Experiment Name: At_Guard_Cells_P Parameter: Tissue Value: Guard Cells vs. Leaves
  misc_feature: MA Experiment ID: 20000527 Result: Up-regulated in Transcription
  misc_feature: MA Experiment 20000527 PARAMETER Experiment Name: At_10percent_PEG_P Parameter: Age (day) Value: 20
  misc_feature: MA Experiment 20000527 PARAMETER Experiment Name: At_10percent_PEG_P Parameter: Organism Value: A. thaliana
  misc_feature: MA Experiment 20000527 PARAMETER Experiment Name: At_10percent_PEG_P Parameter: Plant Line Value: WS
  misc_feature: MA Experiment 20000527 PARAMETER Experiment Name: At_10percent_PEG_P Parameter: Timepoint (day) Value: 20
  misc_feature: MA Experiment 20000527 PARAMETER Experiment Name: At_10percent_PEG_P Parameter: Tissue Value: Whole Plant
  misc_feature: MA Experiment 20000527 PARAMETER Experiment Name: At_10percent_PEG_P Parameter: Treatment Value: 10percent PEG vs. No Treatment
  misc_feature: MA Experiment ID: 20001247 Result: Down-regulated in Transcription
  misc_feature: MA Experiment 20001247 PARAMETER Experiment Name: At_Far-red-induction_P Parameter: Age (day) Value: 7
  misc_feature: MA Experiment 20001247 PARAMETER Experiment Name: At_Far-red-induction_P Parameter: Light Value: Far-red vs. White
  misc_feature: MA Experiment 20001247 PARAMETER Experiment Name: At_Far-red-induction_P Parameter: Organism Value: A. thaliana
  misc_feature: MA Experiment 20001247 PARAMETER Experiment Name: At_Far-red-induction_P Parameter: Plant Line Value: Columbia
  misc_feature: MA Experiment 20001247 PARAMETER Experiment Name: At_Far-red-induction_P Parameter: Timepoint (hr) Value: 1
  misc_feature: MA Experiment 20001247 PARAMETER Experiment Name: At_Far-red-induction_P Parameter: Tissue Value: Whole Plant
  misc_feature: MA Experiment ID: 20001248 Result: Down-regulated in Transcription
  misc_feature: MA Experiment 20001248 PARAMETER Experiment Name: At_Far-red-induction_P Parameter: Age (day) Value: 7
  misc_feature: MA Experiment 20001248 PARAMETER Experiment Name: At_Far-red-induction_P Parameter: Light Value: Far-red vs. White
  misc_feature: MA Experiment 20001248 PARAMETER Experiment Name: At_Far-red-induction_P Parameter: Organism Value: A. thaliana
  misc_feature: MA Experiment 20001248 PARAMETER Experiment Name: At_Far-red-induction_P Parameter: Plant Line Value: Columbia
  misc_feature: MA Experiment 20001248 PARAMETER Experiment Name: At_Far-red-induction_P Parameter: Timepoint (hr) Value: 4
  misc_feature: MA Experiment 20001248 PARAMETER Experiment Name: At_Far-red-induction_P Parameter: Tissue Value: Whole Plant
  misc_feature: MA Experiment ID: 20001450 Result: Down-regulated in Transcription
  misc_feature: MA Experiment 20001450 PARAMETER Experiment Name: At_Far-red-induction_P Parameter: Age (day) Value: 7
  misc_feature: MA Experiment 20001450 PARAMETER Experiment Name: At_Far-red-induction_P Parameter: Light Value: Far-red vs. White
  misc_feature: MA Experiment 20001450 PARAMETER Experiment Name: At_Far-red-induction_P Parameter: Organism Value: A. thaliana
  misc_feature: MA Experiment 20001450 PARAMETER Experiment Name: At_Far-red-induction_P Parameter: Plant Line Value: Columbia
  misc_feature: MA Experiment 20001450 PARAMETER Experiment Name: At_Far-red-induction_P Parameter: Timepoint (hr) Value: 8
  misc_feature: MA Experiment 20001450 PARAMETER Experiment Name: At_Far-red-induction_P Parameter: Tissue Value: Whole Plant
  misc_feature: MA Experiment ID: 20001451 Result: Down-regulated in Transcription
  misc_feature: MA Experiment 20001451 PARAMETER Experiment Name: At_Far-red-induction_P Parameter: Age (day) Value: 7
  misc_feature: MA Experiment 20001451 PARAMETER Experiment Name: At_Far-red-induction_P Parameter: Light Value: Far-red vs. White
  misc_feature: MA Experiment 20001451 PARAMETER Experiment Name: At_Far-red-induction_P Parameter: Organism Value: A. thaliana
  misc_feature: MA Experiment 20001451 PARAMETER Experiment Name: At_Far-red-induction_P Parameter: Plant Line Value: Columbia
  misc_feature: MA Experiment 20001451 PARAMETER Experiment Name: At_Far-red-induction_P Parameter: Timepoint (hr) Value: 24
  misc_feature: MA Experiment 20001451 PARAMETER Experiment Name: At_Far-red-induction_P Parameter: Tissue Value: Whole Plant
  misc_feature: MA Experiment ID: 20001756 Result: Up-regulated in Transcription
  misc_feature: MA Experiment 20001756 PARAMETER Experiment Name: At_50mM_NH4NO3_L-to-H_P Parameter: Timepoint (hr) Value: 4
  misc_feature: MA Experiment 20001756 PARAMETER Experiment Name: At_50mM_NH4NO3_L-to-H_P Parameter: Tissue Value: Leaf
  misc_feature: MA Experiment 20001756 PARAMETER Experiment Name: At_50mM_NH4NO3_L-to-H_P Parameter: Treatment Value: 50mM NH4NO3 vs 100mM Mannitol
  misc_feature: MA Experiment ID: 20001757 Result: Up-regulated in Transcription
  misc_feature: MA Experiment 20001757 PARAMETER Experiment Name: At_50mM_NH4NO3_L-to-H_P Parameter: Timepoint (hr) Value: 6
  misc_feature: MA Experiment 20001757 PARAMETER Experiment Name: At_50mM_NH4NO3_L-to-H_P Parameter: Tissue Value: Leaf
  misc_feature: MA Experiment 20001757 PARAMETER Experiment Name: At_50mM_NH4NO3_L-to-H_P Parameter: Treatment Value: 50mM NH4NO3 vs 100mM Mannitol
  misc_feature: MA Experiment ID: 20001905 Result: Down-regulated in Transcription
  misc_feature: MA Experiment 20001905 PARAMETER Experiment Name: At_Drought_Reproduction_P Parameter: Age (day) Value: 40
  misc_feature: MA Experiment 20001905 PARAMETER Experiment Name: At_Drought_Reproduction_P Parameter: Organism Value: A. thaliana
  misc_feature: MA Experiment 20001905 PARAMETER Experiment Name: At_Drought_Reproduction_P Parameter: Plant Line Value: WS
  misc_feature: MA Experiment 20001905 PARAMETER Experiment Name: At_Drought_Reproduction_P Parameter: Timepoint (day) Value: 10
  misc_feature: MA Experiment 20001905 PARAMETER Experiment Name: At_Drought_Reproduction_P Parameter: Tissue Value: Rosettes
  misc_feature: MA Experiment 20001905 PARAMETER Experiment Name: At_Drought_Reproduction_P Parameter: Treatment Value: Drought vs. No Drought
  misc_feature: MA Experiment ID: 20001910 Result: Down-regulated in Transcription
  misc_feature: MA Experiment 20001910 PARAMETER Experiment Name: At_Drought_Reproduction_P Parameter: Age (day) Value: 37
  misc_feature: MA Experiment 20001910 PARAMETER Experiment Name: At_Drought_Reproduction_P Parameter: Organism Value: A. thaliana
  misc_feature: MA Experiment 20001910 PARAMETER Experiment Name: At_Drought_Reproduction_P Parameter: Plant Line Value: WS
  misc_feature: MA Experiment 20001910 PARAMETER Experiment Name: At_Drought_Reproduction_P Parameter: Timepoint (day) Value: 7
  misc_feature: MA Experiment 20001910 PARAMETER Experiment Name: At_Drought_Reproduction_P Parameter: Tissue Value: Flowers
  misc_feature: MA Experiment 20001910 PARAMETER Experiment Name: At_Drought_Reproduction_P Parameter: Treatment Value: Drought vs. No Drought
acatctctttctctttctctcttaagcctcaagaaagaaaaatgggtgtgatatctccgactgaaactctgttcttaaagtctcaacatcgtcttcttcaacctcgaaactattcatacgcacttgcttttcacagcactcgacgagttgcgaatttcccacgcaactcattctcttctctaggatcatgttctgtagattttccactacgaagtaacccgatttcacaaaatagcaagtcaattcatccttggcggagatatgtatccgaatctgactcaaacgagctgtatcataagaaggtttcttctattatggaaacattaaagcaagcctactcttttattcctcatggaattctgttaagtacaatattagctcttgtctatccaccttctttcacatggttcaagccaagggttcatgatgtttgctgttggtatcaactctaatgaaagagattttcttgaagcacttaaaagaccagatgctatttttgccggttacatcggacaatacttgattaaacctctcttaggttacattttcggcgtaattgctgtctctcttttcaatctacctacttctataggtgctggaatcatgttggtctcatgtgttagtggagctcagctatcaaattacacaactttcttgaccgatccttcactcgcggcgcttagcatcgtcatgacatctatctcaacggccactgcggtcctcgttacacctatgctttcactcttactcattggtaaaaagcttcccgttgatgtgtttgggatgatctctagcattcttcaagtggtgattacacctattgccgcaggactacttctgaaccggttgtttccaaggttgtctaatgcaatcaaaccatttcttccggcgttaacagttatcgatatgagttgttgcataggagcaccccttgctttgaatatagattcaatcttgtctccgtttggtgcaaccattttgttcctcgtcatcacgtttcatctcttggcttttgttgctggttactttttcactggtttcttcttcagcaaggcacctgatgtaaaagctctgcaaagaacaatttcctatgaaacaggaatgcaaagtagtcttctcgctctggccctcgctacaaagttctttcaagatcctctcgttggagtgcctccagcaatctccacggttgttatgtctctaatgggcgtctcgcttgttaccatatggaaaaacagaaaggagtagtgacatgaaacctaatcagggattttgcggaatttgctgttgtttatggtcggctgttccaattgttttcgtaatgatctggttatgttttcatataaaagaaccaagaatttacccat

SEQ ID NO: 82007 - protein, 273 aa, Arabidopsis thaliana
  peptide (1)..(273): Ceres Seq. ID no. 12662861
  misc_feature (1)..(180): Pfam Name: Sodium Bile acid symporter family Pfam Description: Sodium Bile acid symporter family
  misc_feature (1)..(253): Homolog of NCBI NO: 7485566 NR Description: hypothetical protein F16J13.100 - Arabidopsis >gi|4586108|emb|CAB40944.1| putative transport protein thaliana] >gi|7267904|emb|CAB78246.1| putative transport protein
  misc_feature (1)..(273): Homolog of NCBI NO: 18413732 NR Description: putative transport protein; protein id: supported by cDNA: gi_15215838, supported by cDNA: gi_20453270 thaliana] >gi|15215839|gb|AAK91464.1| AT4g12030/F16J13_100
  misc_feature (1)..(272): Homolog of NCBI NO: 18416020 NR Description: similar to putative transport protein; protein At4g22840.1, supported by cDNA: 9746., supported by cDNA: [Arabidopsis thaliana] >gi|17529350|gb|AAL38902.1| unknown
  misc_feature (1)..(272): Homolog of NCBI NO: 7486890 NR Description: hypothetical protein T12H17.230 - Arabidopsis >gi|2827561|emb|CAA16569.1| predicted protein [Arabidopsis >gi|3292809|emb|CAA19799.1| putative protein [Arabidopsis
  misc_feature (1)..(270): Homolog of NCBI NO: 18404505 NR Description: expressed protein; protein id: At3g25410.1, by cDNA: 26683., supported by cDNA: gi_19698908 [Arabidopsis >gi|19698909|gb|AAL91190.1| unknown protein [Arabidopsis
  misc_feature (1)..(270): Homolog of NCBI NO: 21554890 NR Description: unknown [Arabidopsis thaliana]
  misc_feature (1)..(270): Homolog of NCBI NO: 20269901 NR Description: putative sodium-dependent bile acid symporter
  misc_feature (1)..(270): Homolog of NCBI NO: 30683305 NR Description: bile acid:sodium symporter family [Arabidopsis
  misc_feature (1)..(256): Homolog of NCBI NO: 9279722 NR Description: contains similarity to transporter
  misc_feature (2)..(270): Homolog of NCBI NO: 28393076 NR Description: putative Na+ dependent ileal bile acid
MMFAVGINSNERDFLEALKRPDAIFAGYIGQYLIKPLLGYIFGVIAVSLFNLPTSIGAGIMLVSCVSGAQLSNYTTFLTDPSLAALSIVMTSISTATAVLVTPMLSLLLIGKKLPVDVFGMISSILQVVITPIAAGLLLNRLFPRLSNAIKPFLPALTVIDMSCCIGAPLALNIDSILSPFGATILFLVITFHLLAFVAGYFFTGFFFSKAPDVKALQRTISYETGMQSSLLALALATKFFQDPLVGVPPAISTVVMSLMGVSLVTIWKNRKE

SEQ ID NO: 82008 - protein, 272 aa, Arabidopsis thaliana
  peptide (1)..(272): Ceres Seq. ID no. 12662862
  misc_feature (1)..(179): Pfam Name: Sodium Bile acid symporter family Pfam Description: Sodium Bile acid symporter family
  misc_feature (1)..(252): Homolog of NCBI NO: 7485566 NR Description: hypothetical protein F16J13.100 - Arabidopsis >gi|4586108|emb|CAB40944.1| putative transport protein thaliana] >gi|7267904|emb|CAB78246.1| putative transport protein
  misc_feature (1)..(272): Homolog of NCBI NO: 18413732 NR Description: putative transport protein; protein id: supported by cDNA: gi_15215838, supported by cDNA: gi_20453270 thaliana] >gi|15215839|gb|AAK91464.1| AT4g12030/F16J13_100
  misc_feature (1)..(271): Homolog of NCBI NO: 18416020 NR Description: similar to putative transport protein; protein At4g22840.1, supported by cDNA: 9746., supported by cDNA: [Arabidopsis thaliana] >gi|17529350|gb|AAL38902.1| unknown
  misc_feature (1)..(271): Homolog of NCBI NO: 7486890 NR Description: hypothetical protein T12H17.230 - Arabidopsis >gi|2827561|emb|CAA16569.1| predicted protein [Arabidopsis >gi|3292809|emb|CAA19799.1| putative protein [Arabidopsis
  misc_feature (1)..(269): Homolog of NCBI NO: 18404505 NR Description: expressed protein; protein id: At3g25410.1, by cDNA: 26683., supported by cDNA: gi_19698908 [Arabidopsis >gi|19698909|gb|AAL91190.1| unknown protein [Arabidopsis
  misc_feature (1)..(269): Homolog of NCBI NO: 21554890 NR Description: unknown [Arabidopsis thaliana]
  misc_feature (1)..(269): Homolog of NCBI NO: 20269901 NR Description: putative sodium-dependent bile acid symporter
  misc_feature (1)..(269): Homolog of NCBI NO: 30683305 NR Description: bile acid:sodium symporter family [Arabidopsis
  misc_feature (1)..(255): Homolog of NCBI NO: 9279722 NR Description: contains similarity to transporter
  misc_feature (1)..(269): Homolog of NCBI NO: 28393076 NR Description: putative Na+ dependent ileal bile acid
MFAVGINSNERDFLEALKRPDAIFAGYIGQYLIKPLLGYIFGVIAVSLFNLPTSIGAGIMLVSCVSGAQLSNYTTFLTDPSLAALSIVMTSISTATAVLVTPMLSLLLIGKKLPVDVFGMISSILQVVITPIAAGLLLNRLFPRLSNAIKPFLPALTVIDMSCCIGAPLALNIDSILSPFGATILFLVITFHLLAFVAGYFFTGFFFSKAPDVKALQRTISYETGMQSSLLALALATKFFQDPLVGVPPAISTVVMSLMGVSLVTIWKNRKE

SEQ ID NO: 82009 - protein, 213 aa, Arabidopsis thaliana
  peptide (1)..(213): Ceres Seq. ID no. 12662863
  misc_feature (1)..(120): Pfam Name: Sodium Bile acid symporter family Pfam Description: Sodium Bile acid symporter family
  misc_feature (1)..(193): Homolog of NCBI NO: 7485566 NR Description: hypothetical protein F16J13.100 - Arabidopsis >gi|4586108|emb|CAB40944.1| putative transport protein thaliana] >gi|7267904|emb|CAB78246.1| putative transport protein
  misc_feature (1)..(213): Homolog of NCBI NO: 18413732 NR Description: putative transport protein; protein id: supported by cDNA: gi_15215838, supported by cDNA: gi_20453270 thaliana] >gi|15215839|gb|AAK91464.1| AT4g12030/F16J13_100
  misc_feature (1)..(212): Homolog of NCBI NO: 18416020 NR Description: similar to putative transport protein; protein At4g22840.1, supported by cDNA: 9746., supported by cDNA: [Arabidopsis thaliana] >gi|17529350|gb|AAL38902.1| unknown
  misc_feature (1)..(212): Homolog of NCBI NO: 7486890 NR Description: hypothetical protein T12H17.230 - Arabidopsis >gi|2827561|emb|CAA16569.1| predicted protein [Arabidopsis >gi|3292809|emb|CAA19799.1| putative protein [Arabidopsis
  misc_feature (1)..(210): Homolog of NCBI NO: 18404505 NR Description: expressed protein; protein id: At3g25410.1, by cDNA: 26683., supported by cDNA: gi_19698908 [Arabidopsis >gi|19698909|gb|AAL91190.1| unknown protein [Arabidopsis
  misc_feature (1)..(210): Homolog of NCBI NO: 21554890 NR Description: unknown [Arabidopsis thaliana]
  misc_feature (1)..(210): Homolog of NCBI NO: 20269901 NR Description: putative sodium-dependent bile acid symporter
  misc_feature (1)..(210): Homolog of NCBI NO: 30683305 NR Description: bile acid:sodium symporter family [Arabidopsis
  misc_feature (1)..(196): Homolog of NCBI NO: 9279722 NR Description: contains similarity to transporter
  misc_feature (1)..(210): Homolog of NCBI NO: 28393076 NR Description: putative Na+ dependent ileal bile acid
MLVSCVSGAQLSNYTTFLTDPSLAALSIVMTSISTATAVLVTPMLSLLLIGKKLPVDVFGMISSILQVVITPIAAGLLLNRLFPRLSNAIKPFLPALTVIDMSCCIGAPLALNIDSILSPFGATILFLVITFHLLAFVAGYFFTGFFFSKAPDVKALQRTISYETGMQSSLLALALATKFFQDPLVGVPPAISTVVMSLMGVSLVTIWKNRKE

SEQ ID NO: 82010 - DNA, 1020 bp, Arabidopsis thaliana
  misc_feature (1)..(1020): Ceres Seq. ID no. 12662864
  misc_feature: MA Experiment ID: 20000184 Result: Up-regulated in Transcription
  misc_feature: MA Experiment 20000184 PARAMETER Experiment Name: At_Shoots__P Parameter: Age (day) Value: 7
  misc_feature: MA Experiment 20000184 PARAMETER Experiment Name: At_Shoots__P Parameter: Tissue Value: Shoots vs. Whole Plant
  misc_feature: MA Experiment ID: 20000185 Result: Up-regulated in Transcription
  misc_feature: MA Experiment 20000185 PARAMETER Experiment Name: At_Roots__P Parameter: Age (day) Value: 7 vs. 21
  misc_feature: MA Experiment 20000185 PARAMETER Experiment Name: At_Roots__P Parameter: Organism Value: A. thaliana
  misc_feature: MA Experiment 20000185 PARAMETER Experiment Name: At_Roots__P Parameter: Tissue Value: Roots vs. Whole Plant
  misc_feature: MA Experiment ID: 20000439 Result: Up-regulated in Transcription
  misc_feature: MA Experiment 20000439 PARAMETER Experiment Name: At_Roots__P Parameter: Age (day) Value: 14 vs. 21
  misc_feature: MA Experiment 20000439 PARAMETER Experiment Name: At_Roots__P Parameter: Organism Value: A. thaliana
  misc_feature: MA Experiment 20000439 PARAMETER Experiment Name: At_Roots__P Parameter: Tissue Value: Roots vs. Whole Plant
atggatccagttcaatctcatggatcacaaagctctcttcctcctcctttccatgctagagatttccaattacatcttcaacaacaacaacaacatcaacaacaacatcaacaacaacaacaacaacagttctttctccaccatcatcagcaaccacaaagaaaccttgatcaagatcacgagcagcaaggagggtcaatattgaatagatctatcaagatggatcgcgaagagacaagcgataacatggacaacatcgctaataccaacagcggtagcgaaggtaaagagatgagtttacacggaggagaaggaggaagcggtggtggaggaagtggagaacagatgacaagaaggccaagaggaagaccagcaggatccaagaacaaacctaaagctccaataatcataacaagagacagcgcaaacgcgcttcgaactcacgtcatggagataggagacggatgtgacatagttgactgtatggctacgttcgctagacgccgccaaagaggcgtttgcgttatgagcggtacaggaagcgttactaacgtcactatacgtcagcctggatcgccacctggctcggtggttagccttcacggccggtttgaaatcctctctctttcgggatctttcttgcctccgcctgcgccgcctgcagccaccggactaagcgtttacctagccggaggacaagggcaggtcgttggaggtagtgtggtgggacctttgttgtgttcgggtcctgtggtggttatggcggcttcttttagcaatgcggcgtacgaaaggctgcctttggaagaagatgagatgcagacgccagttcaaggaggcggtggaggaggaggaggtggtggtggaatgggatctcccccgatgatgggacagcaacaagctatggcagctatggcggcggctcaaggactaccaccgaatcttcttggttcggttcagttgccaccgccacaacagaatgatcagcagtattggtctacgggtcggccaccgtattga

SEQ ID NO: 82011 - protein, 339 aa, Arabidopsis thaliana
  peptide (1)..(339): Ceres Seq. ID no. 12662865
  misc_feature (6)..(66): Pfam Name: Atrophin-1 family Pfam Description: Atrophin-1 family
  misc_feature (1)..(339): Homolog of NCBI NO: 15234404 NR Description: putative DNA-binding protein; protein id:
  misc_feature (1)..(339): Homolog of NCBI NO: 15235815 NR Description: putative DNA binding protein; protein id:
  misc_feature (46)..(339): Homolog of NCBI NO: 15225475 NR Description: putative AT-hook DNA-binding protein; protein id:
  misc_feature (76)..(339): Homolog of NCBI NO: 38346718 NR Description: OSJNBa0086O06.16 [Oryza sativa (japonica
  misc_feature (79)..(322): Homolog of NCBI NO: 15236657 NR Description: hypothetical protein; protein id: At4g17800.1, by cDNA: gi_17933298, supported by cDNA: gi_20453386 [Arabidopsis
  misc_feature (53)..(293): Homolog of NCBI NO: 15226945 NR Description: putative AT-hook DNA-binding protein; protein id:
  misc_feature (112)..(339): Homolog of NCBI NO: 15232970 NR Description: putative protein; protein id: At3g60870.1
  misc_feature (45)..(339): Homolog of NCBI NO: 34905212 NR Description: P0672D01.8 [Oryza sativa (japonica
  misc_feature (111)..(339): Homolog of NCBI NO: 18414224 NR Description: Expressed protein; protein id: At4g14465.1, by cDNA: 36844. [Arabidopsis thaliana]
  misc_feature (111)..(339): Homolog of NCBI NO: 21593180 NR Description: putative DNA-binding protein [Arabidopsis
MDPVQSHGSQSSLPPPFHARDFQLHLQQQQQHQQQHQQQQQQQFFLHHHQQPQRNLDQDHEQQGGSILNRSIKMDREETSDNMDNIANTNSGSEGKEMSLHGGEGGSGGGGSGEQMTRRPRGRPAGSKNKPKAPIIITRDSANALRTHVMEIGDGCDIVDCMATFARRRQRGVCVMSGTGSVTNVTIRQPGSPPGSVVSLHGRFEILSLSGSFLPPPAPPAATGLSVYLAGGQGQVVGGSVVGPLLCSGPVVVMAASFSNAAYERLPLEEDEMQTPVQGGGGGGGGGGGMGSPPMMGQQQAMAAMAAAQGLPPNLLGSVQLPPPQQNDQQYWSTGRPPY

SEQ ID NO: 82012 - protein, 266 aa, Arabidopsis thaliana
  peptide (1)..(266): Ceres Seq. ID no. 12662866
  misc_feature (1)..(266): Homolog of NCBI NO: 15234404 NR Description: putative DNA-binding protein; protein id:
  misc_feature (1)..(266): Homolog of NCBI NO: 15235815 NR Description: putative DNA binding protein; protein id:
  misc_feature (1)..(266): Homolog of NCBI NO: 15225475 NR Description: putative AT-hook DNA-binding protein; protein id:
  misc_feature (3)..(266): Homolog of NCBI NO: 38346718 NR Description: OSJNBa0086O06.16 [Oryza sativa (japonica
  misc_feature (6)..(249): Homolog of NCBI NO: 15236657 NR Description: hypothetical protein; protein id: At4g17800.1, by cDNA: gi_17933298, supported by cDNA: gi_20453386 [Arabidopsis
  misc_feature (1)..(220): Homolog of NCBI NO: 15226945 NR Description: putative AT-hook DNA-binding protein; protein id:
  misc_feature (39)..(266): Homolog of NCBI NO: 15232970 NR Description: putative protein; protein id: At3g60870.1
  misc_feature (1)..(266): Homolog of NCBI NO: 34905212 NR Description: P0672D01.8 [Oryza sativa (japonica
  misc_feature (38)..(266): Homolog of NCBI NO: 18414224 NR Description: Expressed protein; protein id: At4g14465.1, by cDNA: 36844. [Arabidopsis thaliana]
  misc_feature (38)..(266): Homolog of NCBI NO: 21593180 NR Description: putative DNA-binding protein [Arabidopsis
MDREETSDNMDNIANTNSGSEGKEMSLHGGEGGSGGGGSGEQMTRRPRGRPAGSKNKPKAPIIITRDSANALRTHVMEIGDGCDIVDCMATFARRRQRGVCVMSGTGSVTNVTIRQPGSPPGSVVSLHGRFEILSLSGSFLPPPAPPAATGLSVYLAGGQGQVVGGSVVGPLLCSGPVVVMAASFSNAAYERLPLEEDEMQTPVQGGGGGGGGGGGMGSPPMMGQQQAMAAMAAAQGLPPNLLGSVQLPPPQQNDQQYWSTGRPPY

SEQ ID NO: 82013 - protein, 257 aa, Arabidopsis thaliana
  peptide (1)..(257): Ceres Seq. ID no. 12662867
  misc_feature (1)..(257): Homolog of NCBI NO: 15234404 NR Description: putative DNA-binding protein; protein id:
  misc_feature (1)..(257): Homolog of NCBI NO: 15235815 NR Description: putative DNA binding protein; protein id:
  misc_feature (1)..(257): Homolog of NCBI NO: 15225475 NR Description: putative AT-hook DNA-binding protein; protein id:
  misc_feature (1)..(257): Homolog of NCBI NO: 38346718 NR Description: OSJNBa0086O06.16 [Oryza sativa (japonica
  misc_feature (1)..(240): Homolog of NCBI NO: 15236657 NR Description: hypothetical protein; protein id: At4g17800.1, by cDNA: gi_17933298, supported by cDNA: gi_20453386 [Arabidopsis
  misc_feature (1)..(211): Homolog of NCBI NO: 15226945 NR Description: putative AT-hook DNA-binding protein; protein id:
  misc_feature (30)..(257): Homolog of NCBI NO: 15232970 NR Description: putative protein; protein id: At3g60870.1
  misc_feature (1)..(257): Homolog of NCBI NO: 34905212 NR Description: P0672D01.8 [Oryza sativa (japonica
  misc_feature (29)..(257): Homolog of NCBI NO: 18414224 NR Description: Expressed protein; protein id: At4g14465.1, by cDNA: 36844. [Arabidopsis thaliana]
  misc_feature (29)..(257): Homolog of NCBI NO: 21593180 NR Description: putative DNA-binding protein [Arabidopsis
MDNIANTNSGSEGKEMSLHGGEGGSGGGGSGEQMTRRPRGRPAGSKNKPKAPIIITRDSANALRTHVMEIGDGCDIVDCMATFARRRQRGVCVMSGTGSVTNVTIRQPGSPPGSVVSLHGRFEILSLSGSFLPPPAPPAATGLSVYLAGGQGQVVGGSVVGPLLCSGPVVVMAASFSNAAYERLPLEEDEMQTPVQGGGGGGGGGGGMGSPPMMGQQQAMAAMAAAQGLPPNLLGSVQLPPPQQNDQQYWSTGRPPY

SEQ ID NO: 82014 - DNA, 2028 bp, Arabidopsis thaliana
  misc_feature (1)..(2028): Ceres Seq. ID no. 12662879
  misc_feature: MA Experiment ID: 20000184 Result: Up-regulated in Transcription
  misc_feature: MA Experiment 20000184 PARAMETER Experiment Name: At_Shoots__P Parameter: Age (day) Value: 7
  misc_feature: MA Experiment 20000184 PARAMETER Experiment Name: At_Shoots__P Parameter: Tissue Value: Shoots vs. Whole Plant
  misc_feature: MA Experiment ID: 20000185 Result: Up-regulated in Transcription
  misc_feature: MA Experiment 20000185 PARAMETER Experiment Name: At_Roots__P Parameter: Age (day) Value: 7 vs. 21
  misc_feature: MA Experiment 20000185 PARAMETER Experiment Name: At_Roots__P Parameter: Organism Value: A. thaliana
  misc_feature: MA Experiment 20000185 PARAMETER Experiment Name: At_Roots__P Parameter: Tissue Value: Roots vs. Whole Plant
  misc_feature: MA Experiment ID: 20000437 Result: Down-regulated in Transcription
  misc_feature: MA Experiment 20000437 PARAMETER Experiment Name: At_Drought_P Parameter: Age (day) Value: 8
  misc_feature: MA Experiment 20000437 PARAMETER Experiment Name: At_Drought_P Parameter: Organism Value: A. thaliana
  misc_feature: MA Experiment 20000437 PARAMETER Experiment Name: At_Drought_P Parameter: Plant Line Value: WS
  misc_feature: MA Experiment 20000437 PARAMETER Experiment Name: At_Drought_P Parameter: Timepoint (hr) Value: 24
  misc_feature: MA Experiment 20000437 PARAMETER Experiment Name: At_Drought_P Parameter: Tissue Value: Whole Plant
  misc_feature: MA Experiment 20000437 PARAMETER Experiment Name: At_Drought_P Parameter: Treatment Value: Drought vs. No Drought
  misc_feature: MA Experiment ID: 20000439 Result: Up-regulated in Transcription
  misc_feature: MA Experiment 20000439 PARAMETER Experiment Name: At_Roots__P Parameter: Age (day) Value: 14 vs. 21
  misc_feature: MA Experiment 20000439 PARAMETER Experiment Name: At_Roots__P Parameter: Organism Value: A. thaliana
  misc_feature: MA Experiment 20000439 PARAMETER Experiment Name: At_Roots__P Parameter: Tissue Value: Roots vs. Whole Plant
atgtcttcttgtttcaaatcctctgtttctctgttctcagttttcttgtttatgatcttgaagacagttacttcagatccaacttatctctaccacatatgtccaaacacaacaacgtactcaagaaacagcagttacttaaccaatctccgaactgttctttcatctctctcctctccaaacgcagcttatgcatcgctttttgataacgcagccgctggtgaagagaacgatagcaacagagtctatggtgtttttctctgccgtggagatgtctcagccgaaatctgccgtgactgtgtcgcgtttgcagccaacgaaacgctccaaaggtgtccaagagagaaagtggcagtgatttggtacgatgagtgtatggtaagatactctaatcaaagcatcgtagggcaaatgagaattagacctggtgttttcttgacgaacaagcaaaacatcacagagaatcaagtgagcagattcaacgagtctttgcctgctctgctcatagatgttgcggtgaaagccgctttgagctcgagaaagttcgctacggagaaagccaatttcacggtttttcagacaatctatagccttgtgcagtgcactccggatttgactaatcaagattgtgagagctgtttgagacaagtcattaattacttgccgagatgttgtgatcgaagcgttggcgggagagtaatcgctccgagttgtagcttcagatatgagctttatccattttacaatgaaactatagctgcggctccgatggctcctcctccttcgtcaacggtgactgcaccaccactgaatattccttcagaaaaaggtaaaggcaagaacttgacagttatagttaccgcgatcgctgtaccggtttctgtctgtgtgttacttcttggtgctatgtgttggttactagcaagaagaaggaataataagctcagtgctgaaacagaggatttagatgaagatggtattacgtcaacagaaacactgcaattccagtttagcgcaatcgaagcagcgacaaataagttctcagaaagtaacaagcttggtcatggtggatttggtgaagtttataagggtcagcttataactggagaaacagtagcaataaagagactatctcaaggatcgacacaaggagctgaagaattcaagaacgaagttgatgtggtcgcaaagctacaacacaggaatctagctaagctcttgggatattgcttagatggagaagagaaaatacttgtctatgagtttgttcctaacaaaagcctcgactacttccttttcgataatgagaagagaagagttttggattggcaaagaaggtacaagatcattgaagggatagctcgaggaatactatatttacatcgagattctcggctaacgatcattcaccgtgaccttaaagctagtaacatactcttagatgcagacatgcatccgaagatctcagatttcggtatggcgaggatctttggtgttgatcaaactcaagccaatactaaaagaatcgttggtacatatggttatatgtctcctgagtatgcgatccacgggaaatactcggtgaaatcggatgtctatagcttcggagtcttggttcttgaactcataaccggcaagaaaaacagtagcttctatgaagaagatggtcttggagatttagtgacctacgtgtggaagctatgggtggagaattcaccactggagctagtagatgaagcaatgagagggaattttcagacaaatgaagtgatcagatgcattcacattgctttgttatgtgttcaagaagattcttcagagagaccttcaatggatgacattcttgtgatgatgaacagcttcactgttactttaccgattccaaagcgatctgggtttcttcttcgaaccatgaaagactctagagatccacgctcaggaggttctgcttctgatcactctgcaacaagcaagtctttgcctttgtctgttgacgattcttccatcactatagtttatcctcgttga

SEQ ID NO: 82015 - protein, 675 aa, Arabidopsis thaliana
  peptide (1)..(675): Ceres Seq. ID no. 12662880
  misc_feature (10)..(675): Homolog of NCBI NO: 30686087 NR Description: serine/threonine kinase -related protein
  misc_feature (10)..(675): Homolog of NCBI NO: 24417476 NR Description: unknown [Arabidopsis thaliana]
  misc_feature (10)..(675): Homolog of NCBI NO: 13506745 NR Description: receptor-like protein kinase 4 [Arabidopsis
  misc_feature (325)..(675): Homolog of NCBI NO: 7488195 NR Description: probable serine/threonine-specific protein kinase
  misc_feature (10)..(278): Homolog of NCBI NO: 7488195 NR Description: probable serine/threonine-specific protein kinase
  misc_feature (7)..(675): Homolog of NCBI NO: 18416076 NR Description: serine threonine kinase - like protein; protein At4g23140.1, supported by cDNA: gi_13506746 [Arabidopsis
  misc_feature (270)..(675): Homolog of NCBI NO: 15236453 NR Description: serine/threonine kinase - like protein; protein At4g23310.1 [Arabidopsis thaliana] >gi|7488242|pir||T04848
  misc_feature (23)..(307): Homolog of NCBI NO: 15236453 NR Description: serine/threonine kinase - like protein; protein At4g23310.1 [Arabidopsis thaliana] >gi|7488242|pir||T04848
  misc_feature (7)..(675): Homolog of NCBI NO: 30686066 NR Description: serine threonine kinase - like protein
  misc_feature (1)..(675): Homolog of NCBI NO: 30686073 NR Description: serine/threonine kinase - like protein thaliana] >gi|22136670|gb|AAM91654.1| putative serine/threonine
MSSCFKSSVSLFSVFLFMILKTVTSDPTYLYHICPNTTTYSRNSSYLTNLRTVLSSLSSPNAAYASLFDNAAAGEENDSNRVYGVFLCRGDVSAEICRDCVAFAANETLQRCPREKVAVIWYDECMVRYSNQSIVGQMRIRPGVFLTNKQNITENQVSRFNESLPALLIDVAVKAALSSRKFATEKANFTVFQTIYSLVQCTPDLTNQDCESCLRQVINYLPRCCDRSVGGRVIAPSCSFRYELYPFYNETIAAAPMAPPPSSTVTAPPLNIPSEKGKGKNLTVIVTAIAVPVSVCVLLLGAMCWLLARRRNNKLSAETEDLDEDGITSTETLQFQFSAIEAATNKFSESNKLGHGGFGEVYKGQLITGETVAIKRLSQGSTQGAEEFKNEVDVVAKLQHRNLAKLLGYCLDGEEKILVYEFVPNKSLDYFLFDNEKRRVLDWQRRYKIIEGIARGILYLHRDSRLTIIHRDLKASNILLDADMHPKISDFGMARIFGVDQTQANTKRIVGTYGYMSPEYAIHGKYSVKSDVYSFGVLVLELITGKKNSSFYEEDGLGDLVTYVWKLWVENSPLELVDEAMRGNFQTNEVIRCIHIALLCVQEDSSERPSMDDILVMMNSFTVTLPIPKRSGFLLRTMKDSRDPRSGGSASDHSATSKSLPLSVDDSSITIVYPR

SEQ ID NO: 82016 - protein, 658 aa, Arabidopsis thaliana
  peptide (1)..(658): Ceres Seq. ID no. 12662881
  misc_feature (1)..(658): Homolog of NCBI NO: 30686087 NR Description: serine/threonine kinase -related protein
  misc_feature (1)..(658): Homolog of NCBI NO: 24417476 NR Description: unknown [Arabidopsis thaliana]
  misc_feature (1)..(658): Homolog of NCBI NO: 13506745 NR Description: receptor-like protein kinase 4 [Arabidopsis
  misc_feature (308)..(658): Homolog of NCBI NO: 7488195 NR Description: probable serine/threonine-specific protein kinase
  misc_feature (1)..(261): Homolog of NCBI NO: 7488195 NR Description: probable serine/threonine-specific protein kinase
  misc_feature (1)..(658): Homolog of NCBI NO: 18416076 NR Description: serine threonine kinase - like protein; protein At4g23140.1, supported by cDNA: gi_13506746 [Arabidopsis
  misc_feature (253)..(658): Homolog of NCBI NO: 15236453 NR Description: serine/threonine kinase - like protein; protein At4g23310.1 [Arabidopsis thaliana] >gi|7488242|pir||T04848
  misc_feature (6)..(290): Homolog of NCBI NO: 15236453 NR Description: serine/threonine kinase - like protein; protein At4g23310.1 [Arabidopsis thaliana] >gi|7488242|pir||T04848
  misc_feature (1)..(658): Homolog of NCBI NO: 30686066 NR Description: serine threonine kinase - like protein
  misc_feature (1)..(658): Homolog of NCBI NO: 30686073 NR Description: serine/threonine kinase - like protein thaliana] >gi|22136670|gb|AAM91654.1| putative serine/threonine
MILKTVTSDPTYLYHICPNTTTYSRNSSYLTNLRTVLSSLSSPNAAYASLFDNAAAGEENDSNRVYGVFLCRGDVSAEICRDCVAFAANETLQRCPREKVAVIWYDECMVRYSNQSIVGQMRIRPGVFLTNKQNITENQVSRFNESLPALLIDVAVKAALSSRKFATEKANFTVFQTIYSLVQCTPDLTNQDCESCLRQVINYLPRCCDRSVGGRVIAPSCSFRYELYPFYNETIAAAPMAPPPSSTVTAPPLNIPSEKGKGKNLTVIVTAIAVPVSVCVLLLGAMCWLLARRRNNKLSAETEDLDEDGITSTETLQFQFSAIEAATNKFSESNKLGHGGFGEVYKGQLITGETVAIKRLSQGSTQGAEEFKNEVDVVAKLQHRNLAKLLGYCLDGEEKILVYEFVPNKSLDYFLFDNEKRRVLDWQRRYKIIEGIARGILYLHRDSRLTIIHRDLKASNILLDADMHPKISDFGMARIFGVDQTQANTKRIVGTYGYMSPEYAIHGKYSVKSDVYSFGVLVLELITGKKNSSFYEEDGLGDLVTYVWKLWVENSPLELVDEAMRGNFQTNEVIRCIHIALLCVQEDSSERPSMDDILVMMNSFTVTLPIPKRSGFLLRTMKDSRDPRSGGSASDHSATSKSLPLSVDDSSITIVYPR

SEQ ID NO: 82017 - protein, 550 aa, Arabidopsis thaliana
  peptide (1)..(550): Ceres Seq. ID no. 12662882
  misc_feature (1)..(550): Homolog of NCBI NO: 30686087 NR Description: serine/threonine kinase -related protein
  misc_feature (1)..(550): Homolog of NCBI NO: 24417476 NR Description: unknown [Arabidopsis thaliana]
  misc_feature (1)..(550): Homolog of NCBI NO: 13506745 NR Description: receptor-like protein kinase 4 [Arabidopsis
  misc_feature (200)..(550): Homolog of NCBI NO: 7488195 NR Description: probable serine/threonine-specific protein kinase
  misc_feature (1)..(153): Homolog of NCBI NO: 7488195 NR Description: probable serine/threonine-specific protein kinase
  misc_feature (1)..(550): Homolog of NCBI NO: 18416076 NR Description: serine threonine kinase - like protein; protein At4g23140.1, supported by cDNA: gi_13506746 [Arabidopsis
  misc_feature (145)..(550): Homolog of NCBI NO: 15236453 NR Description: serine/threonine kinase - like protein; protein At4g23310.1 [Arabidopsis thaliana] >gi|7488242|pir||T04848
  misc_feature (1)..(182): Homolog of NCBI NO: 15236453 NR Description: serine/threonine kinase - like protein; protein At4g23310.1 [Arabidopsis thaliana] >gi|7488242|pir||T04848
  misc_feature (1)..(550): Homolog of NCBI NO: 30686066 NR Description: serine threonine kinase - like protein
  misc_feature (1)..(550): Homolog of NCBI NO: 30686073 NR Description: serine/threonine kinase - like protein thaliana] >gi|22136670|gb|AAM91654.1| putative serine/threonine
MVRYSNQSIVGQMRIRPGVFLTNKQNITENQVSRFNESLPALLIDVAVKAALSSRKFATEKANFTVFQTIYSLVQCTPDLTNQDCESCLRQVINYLPRCCDRSVGGRVIAPSCSFRYELYPFYNETIAAAPMAPPPSSTVTAPPLNIPSEKGKGKNLTVIVTAIAVPVSVCVLLLGAMCWLLARRRNNKLSAETEDLDEDGITSTETLQFQFSAIEAATNKFSESNKLGHGGFGEVYKGQLITGETVAIKRLSQGSTQGAEEFKNEVDVVAKLQHRNLAKLLGYCLDGEEKILVYEFVPNKSLDYFLFDNEKRRVLDWQRRYKIIEGIARGILYLHRDSRLTIIHRDLKASNILLDADMHPKISDFGMARIFGVDQTQANTKRIVGTYGYMSPEYAIHGKYSVKSDVYSFGVLVLELITGKKNSSFYEEDGLGDLVTYVWKLWVENSPLELVDEAMRGNFQTNEVIRCIHIALLCVQEDSSERPSMDDILVMMNSFTVTLPIPKRSGFLLRTMKDSRDPRSGGSASDHSATSKSLPLSVDDSSITIVYPR

SEQ ID NO: 82018 - DNA, 1350 bp, Arabidopsis thaliana
  misc_feature (1)..(1350): Ceres Seq. ID no. 12662929
  misc_feature: MA Experiment ID: 20000173 Result: Up-regulated in Transcription
  misc_feature: MA Experiment 20000173 PARAMETER Experiment Name: At_42deg_Heat_P Parameter: Age (day) Value: 14
  misc_feature: MA Experiment 20000173 PARAMETER Experiment Name: At_42deg_Heat_P Parameter: Organism Value: A. thaliana
  misc_feature: MA Experiment 20000173 PARAMETER Experiment Name: At_42deg_Heat_P Parameter: Plant Line Value: WS
  misc_feature: MA Experiment 20000173 PARAMETER Experiment Name: At_42deg_Heat_P Parameter: Temperature (deg C) Value: 42 vs. 22
  misc_feature: MA Experiment 20000173 PARAMETER Experiment Name: At_42deg_Heat_P Parameter: Timepoint (hr) Value: 6
  misc_feature: MA Experiment 20000173 PARAMETER Experiment Name: At_42deg_Heat_P Parameter: Tissue Value: Aerial
atggctccacacaggtcgaggcagcggaatccgagattcaagctatggagatacgatgatgaacctctagcaattgctgaaaccatgcccgaattacgacacctcaagctttttgggaacggactgaccaacttaagattggaagccattcttgacaactgtgttcacttggtacatcttgatttacgccgctgcttcaacattaaccttctcggggatctcgagaagcgctgttctgagaggatcagagatttgagacgccctgatgactcaaccgctgattccccttttgatgcctcttccgatatatattcagcaggagaagacgactacgacttttactcagatgatagcgatggtacgttatctgatcactttgaagaatgcaagacagtatcagtggcaactggtaatgaaagcgtttatgttctctcttttgttagatctgacaattttatttaccctaaaaaaattgcttcgtcgtcttcgttgtcgtcaactcccttaccttcgctgatgaaagacaaaaagttgagaaactgggcggagcttccgtccaagttgacgtcatcgattctacttcgtcttggcgctattgagatacttcaaaacgctcaaaaagtgtgcaaaccgtggcatcgagtctgcaaagacccctcgatgtggcggaagatcgacatagataaccgcaatgatagggcagccttcaagtacgacctcgagtcaatgtgccgtcacgcagttgatcgtagccacggtggtttgattgagatcgagatttggtactacggtactaatgatctcatcatgtacatagctgacaggtcaagtaatctgaaaagccttggacttgtaaggtgctttccaataacagatgagggagttgccaaagcagtttcgaaagtaccgttgcttgaataccttgaggtttcatactgcttgttttcaggagagtctctgagagatataggccggtcttgtccgaatctgaagacactgaagctaaaccgagcccctgaaatcatgttttcaaatagtgggtttgatgataatgccaaagcaattgcagaaagcatgcctgaactacgccacctccagcttttagggaacgggctaaccaataagggcttgaacgccattcttgatggttgtcctcacctggaacaccttgatttacgccagtgtttcaacatcaaccttgttggggatctcaagaaacgatgttttgagaggatcaaagacttgagatgccccaatgactcagatgacgattcagatgatggctcagataatggtgcggtgacaacatttgggtcacaatttaatgaaaccgactatcattggtactag

SEQ ID NO: 82019 - protein, 449 aa, Arabidopsis thaliana
  peptide (1)..(449): Ceres Seq. ID no. 12662930
  misc_feature (361)..(385): Pfam Name: Leucine Rich Repeat Pfam Description: Leucine Rich Repeat
  misc_feature (1)..(449): Homolog of NCBI NO: 18412953 NR Description: F-box protein family, AtFBL9/AtFBL23; protein id: [Arabidopsis thaliana] >gi|25407343|pir||B85069 hypothetical
  misc_feature (154)..(424): Homolog of NCBI NO: 18412949 NR Description: F-box protein family, AtFBL21; protein id:
  misc_feature (19)..(100): Homolog of NCBI NO: 18412949 NR Description: F-box protein family, AtFBL21; protein id:
  misc_feature (165)..(429): Homolog of NCBI NO: 18412947 NR Description: F-box protein family, AtFBL20; protein id: supported by cDNA: 38347. [Arabidopsis thaliana]
  misc_feature (165)..(429): Homolog of NCBI NO: 21593361 NR Description: F-box protein family, AtFBL20 [Arabidopsis
  misc_feature (172)..(445): Homolog of NCBI NO: 25376524 NR Description: N7-like protein [imported] - Arabidopsis thaliana
  misc_feature (158)..(434): Homolog of NCBI NO: 18412951 NR Description: F-box protein family, AtFBL22; protein id:
  misc_feature (172)..(424): Homolog of NCBI NO: 18412949 NR Description: F-box protein family, AtFBL21; protein id:
  misc_feature (140)..(424): Homolog of NCBI NO: 25376523 NR Description: N7-like protein [imported] - Arabidopsis thaliana
  misc_feature (162)..(406): Homolog of NCBI NO: 30692594 NR Description: predicted protein [Arabidopsis thaliana] contains similarity to Medicago truncatula N7 protein (GB:Y17613)
MAPHRSRQRNPRFKLWRYDDEPLAIAETMPELRHLKLFGNGLTNLRLEAILDNCVHLVHLDLRRCFNINLLGDLEKRCSERIRDLRRPDDSTADSPFDASSDIYSAGEDDYDFYSDDSDGTLSDHFEECKTVSVATGNESVYVLSFVRSDNFIYPKKIASSSSLSSTPLPSLMKDKKLRNWAELPSKLTSSILLRLGAIEILQNAQKVCKPWHRVCKDPSMWRKIDIDNRNDRAAFKYDLESMCRHAVDRSHGGLIEIEIWYYGTNDLIMYIADRSSNLKSLGLVRCFPITDEGVAKAVSKVPLLEYLEVSYCLFSGESLRDIGRSCPNLKTLKLNRAPEIMFSNSGFDDNAKAIAESMPELRHLQLLGNGLTNKGLNAILDGCPHLEHLDLRQCFNINLVGDLKKRCFERIKDLRCPNDSDDDSDDGSDNGAVTTFGSQFNETDYHWY

SEQ ID NO: 82020 - protein, 421 aa, Arabidopsis thaliana
  peptide (1)..(421): Ceres Seq. ID no. 12662931
  misc_feature (333)..(357): Pfam Name: Leucine Rich Repeat Pfam Description: Leucine Rich Repeat
  misc_feature (1)..(421): Homolog of NCBI NO: 18412953 NR Description: F-box protein family, AtFBL9/AtFBL23; protein id: [Arabidopsis thaliana] >gi|25407343|pir||B85069 hypothetical
  misc_feature (126)..(396): Homolog of NCBI NO: 18412949 NR Description: F-box protein family, AtFBL21; protein id:
  misc_feature (1)..(72): Homolog of NCBI NO: 18412949 NR Description: F-box protein family, AtFBL21; protein id:
  misc_feature (137)..(401): Homolog of NCBI NO: 18412947 NR Description: F-box protein family, AtFBL20; protein id: supported by cDNA: 38347. [Arabidopsis thaliana]
  misc_feature (137)..(401): Homolog of NCBI NO: 21593361 NR Description: F-box protein family, AtFBL20 [Arabidopsis
  misc_feature (144)..(417): Homolog of NCBI NO: 25376524 NR Description: N7-like protein [imported] - Arabidopsis thaliana
  misc_feature (130)..(406): Homolog of NCBI NO: 18412951 NR Description: F-box protein family, AtFBL22; protein id:
  misc_feature (144)..(396): Homolog of NCBI NO: 18412949 NR Description: F-box protein family, AtFBL21; protein id:
  misc_feature (112)..(396): Homolog of NCBI NO: 25376523 NR Description: N7-like protein [imported] - Arabidopsis thaliana
  misc_feature (134)..(378): Homolog of NCBI NO: 30692594 NR Description: predicted protein [Arabidopsis thaliana] contains similarity to Medicago truncatula N7 protein (GB:Y17613)
MPELRHLKLFGNGLTNLRLEAILDNCVHLVHLDLRRCFNINLLGDLEKRCSERIRDLRRPDDSTADSPFDASSDIYSAGEDDYDFYSDDSDGTLSDHFEECKTVSVATGNESVYVLSFVRSDNFIYPKKIASSSSLSSTPLPSLMKDKKLRNWAELPSKLTSSILLRLGAIEILQNAQKVCKPWHRVCKDPSMWRKIDIDNRNDRAAFKYDLESMCRHAVDRSHGGLIEIEIWYYGTNDLIMYIADRSSNLKSLGLVRCFPITDEGVAKAVSKVPLLEYLEVSYCLFSGESLRDIGRSCPNLKTLKLNRAPEIMFSNSGFDDNAKAIAESMPELRHLQLLGNGLTNKGLNAILDGCPHLEHLDLRQCFNINLVGDLKKRCFERIKDLRCPNDSDDDSDDGSDNGAVTTFGSQFNETDYHWY

SEQ ID NO: 82021 - protein, 277 aa, Arabidopsis thaliana
  peptide (1)..(277): Ceres Seq. ID no. 12662932
  misc_feature (189)..(213): Pfam Name: Leucine Rich Repeat Pfam Description: Leucine Rich Repeat
  misc_feature (1)..(277): Homolog of NCBI NO: 18412953 NR Description: F-box protein family, AtFBL9/AtFBL23; protein id: [Arabidopsis thaliana] >gi|25407343|pir||B85069 hypothetical
  misc_feature (1)..(252): Homolog of NCBI NO: 18412949 NR Description: F-box protein family, AtFBL21; protein id:
  misc_feature (1)..(257): Homolog of NCBI NO: 18412947 NR Description: F-box protein family, AtFBL20; protein id: supported by cDNA: 38347. [Arabidopsis thaliana]
  misc_feature (1)..(257): Homolog of NCBI NO: 21593361 NR Description: F-box protein family, AtFBL20 [Arabidopsis
  misc_feature (1)..(273): Homolog of NCBI NO: 25376524 NR Description: N7-like protein [imported] - Arabidopsis thaliana
  misc_feature (1)..(262): Homolog of NCBI NO: 18412951 NR Description: F-box protein family, AtFBL22; protein id:
  misc_feature (1)..(252): Homolog of NCBI NO: 18412949 NR Description: F-box protein family, AtFBL21; protein id:
  misc_feature (1)..(252): Homolog of NCBI NO: 25376523 NR Description: N7-like protein [imported] - Arabidopsis thaliana
  misc_feature (1)..(234): Homolog of NCBI NO: 30692594 NR Description: predicted protein [Arabidopsis thaliana] contains similarity to Medicago truncatula N7 protein (GB:Y17613)
  misc_feature (69)..(249): Homolog of NCBI NO: 15237166 NR Description: nodulin-like protein; protein id: At5g52480.1
MKDKKLRNWAELPSKLTSSILLRLGAIEILQNAQKVCKPWHRVCKDPSMWRKIDIDNRNDRAAFKYDLESMCRHAVDRSHGGLIEIEIWYYGTNDLIMYIADRSSNLKSLGLVRCFPITDEGVAKAVSKVPLLEYLEVSYCLFSGESLRDIGRSCPNLKTLKLNRAPEIMFSNSGFDDNAKAIAESMPELRHLQLLGNGLTNKGLNAILDGCPHLEHLDLRQCFNINLVGDLKKRCFERIKDLRCPNDSDDDSDDGSDNGAVTTFGSQFNETDYHWY

SEQ ID NO: 82022 - DNA, 1007 bp, Arabidopsis thaliana
  misc_feature (1)..(1007): Ceres Seq. ID no. 12662940
  misc_feature: MA Experiment ID: 20000184 Result: Up-regulated in Transcription
  misc_feature: MA Experiment 20000184 PARAMETER Experiment Name: At_Shoots__P Parameter: Age (day) Value: 7
  misc_feature: MA Experiment 20000184 PARAMETER Experiment Name: At_Shoots__P Parameter: Tissue Value: Shoots vs. Whole Plant
  misc_feature: MA Experiment ID: 20000288 Result: Down-regulated in Transcription
  misc_feature: MA Experiment 20000288 PARAMETER Experiment Name: At_Drought_P Parameter: Age (day) Value: 7
  misc_feature: MA Experiment 20000288 PARAMETER Experiment Name: At_Drought_P Parameter: Organism Value: A. thaliana
  misc_feature: MA Experiment 20000288 PARAMETER Experiment Name: At_Drought_P Parameter: Plant Line Value: WS
  misc_feature: MA Experiment 20000288 PARAMETER Experiment Name: At_Drought_P Parameter: Timepoint (hr) Value: 1
  misc_feature: MA Experiment 20000288 PARAMETER Experiment Name: At_Drought_P Parameter: Tissue Value: Whole Plant
  misc_feature: MA Experiment 20000288 PARAMETER Experiment Name: At_Drought_P Parameter: Treatment Value: Drought vs. No Drought
  misc_feature: MA Experiment ID: 20000437 Result: Up-regulated in Transcription
  misc_feature: MA Experiment 20000437 PARAMETER Experiment Name: At_Drought_P Parameter: Age (day) Value: 8
  misc_feature: MA Experiment 20000437 PARAMETER Experiment Name: At_Drought_P Parameter: Organism Value: A. thaliana
  misc_feature: MA Experiment 20000437 PARAMETER Experiment Name: At_Drought_P Parameter: Plant Line Value: WS
  misc_feature: MA Experiment 20000437 PARAMETER Experiment Name: At_Drought_P Parameter: Timepoint (hr) Value: 24
  misc_feature: MA Experiment 20000437 PARAMETER Experiment Name: At_Drought_P Parameter: Tissue Value: Whole Plant
  misc_feature: MA Experiment 20000437 PARAMETER Experiment Name: At_Drought_P Parameter: Treatment Value: Drought vs. No Drought
  misc_feature: MA Experiment ID: 20001450 Result: Up-regulated in Transcription
  misc_feature: MA Experiment 20001450 PARAMETER Experiment Name: At_Far-red-induction_P Parameter: Age (day) Value: 7
  misc_feature: MA Experiment 20001450 PARAMETER Experiment Name: At_Far-red-induction_P Parameter: Light Value: Far-red vs. White
  misc_feature: MA Experiment 20001450 PARAMETER Experiment Name: At_Far-red-induction_P Parameter: Organism Value: A. thaliana
  misc_feature: MA Experiment 20001450 PARAMETER Experiment Name: At_Far-red-induction_P Parameter: Plant Line Value: Columbia
  misc_feature: MA Experiment 20001450 PARAMETER Experiment Name: At_Far-red-induction_P Parameter: Timepoint (hr) Value: 8
  misc_feature: MA Experiment 20001450 PARAMETER Experiment Name: At_Far-red-induction_P Parameter: Tissue Value: Whole Plant
  misc_feature: MA Experiment ID: 20001459 Result: Down-regulated in Transcription
  misc_feature: MA Experiment 20001459 PARAMETER Experiment Name: At_50mM_NH4NO3_L-to-H_P Parameter: Age (day) Value: Undefined
  misc_feature: MA Experiment 20001459 PARAMETER Experiment Name: At_50mM_NH4NO3_L-to-H_P Parameter: Organism Value: Undefined
  misc_feature: MA Experiment 20001459 PARAMETER Experiment Name: At_50mM_NH4NO3_L-to-H_P Parameter: Plant Line Value: Undefined
  misc_feature: MA Experiment 20001459 PARAMETER Experiment Name: At_50mM_NH4NO3_L-to-H_P Parameter: Timepoint (hr) Value: 4
  misc_feature: MA Experiment 20001459 PARAMETER Experiment Name: At_50mM_NH4NO3_L-to-H_P Parameter: Tissue Value: Siliques
  misc_feature: MA Experiment 20001459 PARAMETER Experiment Name: At_50mM_NH4NO3_L-to-H_P Parameter: Treatment Value: 50mM NH4NO3 vs. 100mM Manitol
  misc_feature: MA Experiment ID: 20001907 Result: Up-regulated in Transcription
  misc_feature: MA Experiment 20001907 PARAMETER Experiment Name: At_Drought_Reproduction_P Parameter: Age (day) Value: 37
  misc_feature: MA Experiment 20001907 PARAMETER Experiment Name: At_Drought_Reproduction_P Parameter: Organism Value: A. thaliana
  misc_feature: MA Experiment 20001907 PARAMETER Experiment Name: At_Drought_Reproduction_P Parameter: Plant Line Value: WS
  misc_feature: MA Experiment 20001907 PARAMETER Experiment Name: At_Drought_Reproduction_P Parameter: Timepoint (day) Value: 7
  misc_feature: MA Experiment 20001907 PARAMETER Experiment Name: At_Drought_Reproduction_P Parameter: Tissue Value: Siliques
  misc_feature: MA Experiment 20001907 PARAMETER Experiment Name: At_Drought_Reproduction_P Parameter: Treatment Value: Drought vs. No Drought
  misc_feature: MA Experiment ID: 20001910 Result: Up-regulated in Transcription
  misc_feature: MA Experiment 20001910 PARAMETER Experiment Name: At_Drought_Reproduction_P Parameter: Age (day) Value: 37
  misc_feature: MA Experiment 20001910 PARAMETER Experiment Name: At_Drought_Reproduction_P Parameter: Organism Value: A. thaliana
  misc_feature: MA Experiment 20001910 PARAMETER Experiment Name: At_Drought_Reproduction_P Parameter: Plant Line Value: WS
  misc_feature: MA Experiment 20001910 PARAMETER Experiment Name: At_Drought_Reproduction_P Parameter: Timepoint (day) Value: 7
  misc_feature: MA Experiment 20001910 PARAMETER Experiment Name: At_Drought_Reproduction_P Parameter: Tissue Value: Flowers
  misc_feature: MA Experiment 20001910 PARAMETER Experiment Name: At_Drought_Reproduction_P Parameter: Treatment Value: Drought vs. No Drought
cttaaattagggttatatatggctacatctgctagaagagcatatggattcgggagagctgacgaggcgactcacccggactccattagagccactttggctgagtttctttccacgttcgtcttcgtctttgctggagaaggctcaatcctcgctctagacaagttgtattgggacacggcggctcacacggggacaaacacgcctggagggttagttctggtggcgttagctcatgcattggccttgttcgcggctgtttctgcagccatcaatgtctctggtggccacgtcaaccccgctgtcacttttgctgctctaatcggaggcaggatctcggtcattcgagctatctactattgggttgctcagcttataggtgctatcctcgcttgtctcttgttgaggcttgccactaatggcttgagaccagtaggtttccatgtagcatcaggagttagtgagcttcatgggctactgatggagatcatacttacatttgctttggtttatgttgtctactcgaccgcaatcgatccaaagagggggagtattgggatcatagcgccactagccatcgggctcatagttggggcaaacattttggtgggaggacctttcgatggagcctctatgaatccggctagagcctttggtccagcattagtgggatggaggtggagtaaccattggatctattgggttggaccgttcattggtggtgcactcgccgcactgatctatgagtacatgatcatccccagcgtgaacgaacctcctcaccacagtacccaccaaccattggctccggaagattactagaccggagcagtcttcatgtagagggttctctctttgtataaatagtctctgtgtttgcttgtgttgtttgtctctttacttgttttgttttcctgccatttcctatgtataattgagtccacaccaaaatctgttttcttgtattgtatatcttacagaataataaagattttcaatgatcggat

SEQ ID NO: 82023 - protein, 273 aa, Arabidopsis thaliana
  peptide (1)..(273): Ceres Seq. ID no. 12662941
  misc_feature (22)..(248): Pfam Name: Major intrinsic protein Pfam Description: Major intrinsic protein
  misc_feature (7)..(273): Homolog of NCBI NO: 15220848 NR Description: tonoplast intrinsic protein, putative; protein
  misc_feature (7)..(273): Homolog of NCBI NO: 15219403 NR Description: tonoplast intrinsic protein, alpha (alpha-TIP); id: At1g73190.1 [Arabidopsis thaliana] Tonoplast intrinsic protein, alpha (Alpha TIP)
  misc_feature (54)..(273): Homolog of NCBI NO: 30685536 NR Description: major intrinsic protein (MIP) family [Arabidopsis
  misc_feature (72)..(273): Homolog of NCBI NO: 7441287 NR Description: membrane protein MP23 precursor - cucurbit
  misc_feature (13)..(71): Homolog of NCBI NO: 7441287 NR Description: membrane protein MP23 precursor - cucurbit
  misc_feature (13)..(273): Homolog of NCBI NO: 7441288 NR Description: membrane protein MP28 - cucurbit
  misc_feature (11)..(273): Homolog of NCBI NO: 81886 NR Description: tonoplast intrinsic protein alpha - kidney bean
  misc_feature (11)..(273): Homolog of NCBI NO: 135859 NR Description: TONOPLAST INTRINSIC PROTEIN, ALPHA (ALPHA TIP)
  misc_feature (7)..(273): Homolog of NCBI NO: 37535634 NR Description: putative beta-tonoplast intrinsic protein [Oryza
  misc_feature (8)..(273): Homolog of NCBI NO: 13448043 NR Description: tonoplast membrane integral protein ZmTIP3-2 [Zea
LKLGLYMATSARRAYGFGRADEATHPDSIRATLAEFLSTFVFVFAGEGSILALDKLYWDTAAHTGTNTPGGLVLVALAHALALFAAVSAAINVSGGHVNPAVTFAALIGGRISVIRAIYYWVAQLIGAILACLLLRLATNGLRPVGFHVASGVSELHGLLMEIILTFALVYVVYSTAIDPKRGSIGIIAPLAIGLIVGANILVGGPFDGASMNPARAFGPALVGWRWSNHWIYWVGPFIGGALAALIYEYMIIPSVNEPPHHSTHQPLAPEDY

SEQ ID NO: 82024 - protein, 267 aa, Arabidopsis thaliana
  peptide (1)..(267): Ceres Seq. ID no. 12662942
  misc_feature (16)..(242): Pfam Name: Major intrinsic protein Pfam Description: Major intrinsic protein
  misc_feature (1)..(267): Homolog of NCBI NO: 15220848 NR Description: tonoplast intrinsic protein, putative; protein
  misc_feature (1)..(267): Homolog of NCBI NO: 15219403 NR Description: tonoplast intrinsic protein, alpha (alpha-TIP); id: At1g73190.1 [Arabidopsis thaliana] Tonoplast intrinsic protein, alpha (Alpha TIP)
  misc_feature (48)..(267): Homolog of NCBI NO: 30685536 NR Description: major intrinsic protein (MIP) family [Arabidopsis
  misc_feature (66)..(267): Homolog of NCBI NO: 7441287 NR Description: membrane protein MP23 precursor - cucurbit
  misc_feature (7)..(65): Homolog of NCBI NO: 7441287 NR Description: membrane protein MP23 precursor - cucurbit
  misc_feature (7)..(267): Homolog of NCBI NO: 7441288 NR Description: membrane protein MP28 - cucurbit
  misc_feature (5)..(267): Homolog of NCBI NO: 81886 NR Description: tonoplast intrinsic protein alpha - kidney bean
  misc_feature (5)..(267): Homolog of NCBI NO: 135859 NR Description: TONOPLAST INTRINSIC PROTEIN, ALPHA (ALPHA TIP)
  misc_feature (1)..(267): Homolog of NCBI NO: 37535634 NR Description: putative beta-tonoplast intrinsic protein [Oryza
  misc_feature (2)..(267): Homolog of NCBI NO: 13448043 NR Description: tonoplast membrane integral protein ZmTIP3-2 [Zea
MATSARRAYGFGRADEATHPDSIRATLAEFLSTFVFVFAGEGSILALDKLYWDTAAHTGTNTPGGLVLVALAHALALFAAVSAAINVSGGHVNPAVTFAALIGGRISVIRAIYYWVAQLIGAILACLLLRLATNGLRPVGFHVASGVSELHGLLMEIILTFALVYVVYSTAIDPKRGSIGIIAPLAIGLIVGANILVGGPFDGASMNPARAFGPALVGWRWSNHWIYWVGPFIGGALAALIYEYMIIPSVNEPPHHSTHQPLAPEDY

SEQ ID NO: 82025 - DNA, 1377 bp, Arabidopsis thaliana
  misc_feature (1)..(1377): Ceres Seq. ID no. 12662958
  misc_feature: MA Experiment ID: 20000179 Result: Down-regulated in Transcription
  misc_feature: MA Experiment 20000179 PARAMETER Experiment Name: At_Germinating_Seeds_P Parameter: Age (hr) Value: 6 vs. 0
  misc_feature: MA Experiment 20000179 PARAMETER Experiment Name: At_Germinating_Seeds_P Parameter: Tissue Value: Germinating Seeds
  misc_feature: MA Experiment ID: 20000185 Result: Up-regulated in Transcription
  misc_feature: MA Experiment 20000185 PARAMETER Experiment Name: At_Roots__P Parameter: Age (day) Value: 7 vs. 21
  misc_feature: MA Experiment 20000185 PARAMETER Experiment Name: At_Roots__P Parameter: Organism Value: A. thaliana
  misc_feature: MA Experiment 20000185 PARAMETER Experiment Name: At_Roots__P Parameter: Tissue Value: Roots vs. Whole Plant
  misc_feature: MA Experiment ID: 20000227 Result: Down-regulated in Transcription
  misc_feature: MA Experiment 20000227 PARAMETER Experiment Name: At_Root-Tips-vs-Tops_P Parameter: Tissue Value: Root Tips vs. Root Tops
  misc_feature: MA Experiment ID: 20000264 Result: Up-regulated in Transcription
  misc_feature: MA Experiment 20000264 PARAMETER Experiment Name: At_Open_Flower_P Parameter: Age (day) Value: 21
  misc_feature: MA Experiment 20000264 PARAMETER Experiment Name: At_Open_Flower_P Parameter: Plant Line Value: WS
  misc_feature: MA Experiment 20000264 PARAMETER Experiment Name: At_Open_Flower_P Parameter: Tissue Value: Open Flower vs. Whole Plant
  misc_feature: MA Experiment ID: 20000439 Result: Up-regulated in Transcription
  misc_feature: MA Experiment 20000439 PARAMETER Experiment Name: At_Roots__P Parameter: Age (day) Value: 14 vs. 21
  misc_feature: MA Experiment 20000439 PARAMETER Experiment Name: At_Roots__P Parameter: Organism Value: A. thaliana
  misc_feature: MA Experiment 20000439 PARAMETER Experiment Name: At_Roots__P Parameter: Tissue Value: Roots vs. Whole Plant
  misc_feature: MA Experiment ID: 20000451 Result: Down-regulated in Transcription
  misc_feature: MA Experiment 20000451 PARAMETER Experiment Name: At_CS6879_Shoots-Roots_P Parameter: Age (day) Value: 14
  misc_feature: MA Experiment 20000451 PARAMETER Experiment Name: At_CS6879_Shoots-Roots_P Parameter: Organism Value: A. thaliana
  misc_feature: MA Experiment 20000451 PARAMETER Experiment Name: At_CS6879_Shoots-Roots_P Parameter: Plant Line Value: CS6879 vs. WS
  misc_feature: MA Experiment 20000451 PARAMETER Experiment Name: At_CS6879_Shoots-Roots_P Parameter: Tissue Value: Roots
  misc_feature: MA Experiment ID: 20000460 Result: Up-regulated in Transcription
  misc_feature: MA Experiment 20000460 PARAMETER Experiment Name: At_10percent_PEG_P Parameter: Age (day) Value: 12
  misc_feature: MA Experiment 20000460 PARAMETER Experiment Name: At_10percent_PEG_P Parameter: Organism Value: A. thaliana
  misc_feature: MA Experiment 20000460 PARAMETER Experiment Name: At_10percent_PEG_P Parameter: Plant Line Value: WS
  misc_feature: MA Experiment 20000460 PARAMETER Experiment Name: At_10percent_PEG_P Parameter: Timepoint (day) Value: 12
  misc_feature: MA Experiment 20000460 PARAMETER Experiment Name: At_10percent_PEG_P Parameter: Tissue Value: Whole Plant
  misc_feature: MA Experiment 20000460 PARAMETER Experiment Name: At_10percent_PEG_P Parameter: Treatment Value: 10percent PEG vs. No Treatment
  misc_feature: MA Experiment ID: 20000527 Result: Up-regulated in Transcription
  misc_feature: MA Experiment 20000527 PARAMETER Experiment Name: At_10percent_PEG_P Parameter: Age (day) Value: 20
  misc_feature: MA Experiment 20000527 PARAMETER Experiment Name: At_10percent_PEG_P Parameter: Organism Value: A. thaliana
  misc_feature: MA Experiment 20000527 PARAMETER Experiment Name: At_10percent_PEG_P Parameter: Plant Line Value: WS
  misc_feature: MA Experiment 20000527 PARAMETER Experiment Name: At_10percent_PEG_P Parameter: Timepoint (day) Value: 20
  misc_feature: MA Experiment 20000527 PARAMETER Experiment Name: At_10percent_PEG_P Parameter: Tissue Value: Whole Plant
  misc_feature: MA Experiment 20000527 PARAMETER Experiment Name: At_10percent_PEG_P Parameter: Treatment Value: 10percent PEG vs. No Treatment
  misc_feature: MA Experiment ID: 20000573 Result: Up-regulated in Transcription
  misc_feature: MA Experiment 20000573 PARAMETER Experiment Name: At_100uM_ABA_Mutants__P Parameter: Organism Value: A. thaliana
  misc_feature: MA Experiment 20000573 PARAMETER Experiment Name: At_100uM_ABA_Mutants__P Parameter: Plant Line Value: CS22 vs. Ler wt
  misc_feature: MA Experiment 20000573 PARAMETER Experiment Name: At_100uM_ABA_Mutants__P Parameter: Timepoint (hr) Value: N/A
  misc_feature: MA Experiment 20000573 PARAMETER Experiment Name: At_100uM_ABA_Mutants__P Parameter: Tissue Value: Whole Plant
  misc_feature: MA Experiment 20000573 PARAMETER Experiment Name: At_100uM_ABA_Mutants__P Parameter: Treatment Value: None
  misc_feature: MA Experiment ID: 20000574 Result: Up-regulated in Transcription
  misc_feature: MA Experiment 20000574 PARAMETER Experiment Name: At_100uM_ABA_Mutants__P Parameter: Organism Value: A. thaliana
  misc_feature: MA Experiment 20000574 PARAMETER Experiment Name: At_100uM_ABA_Mutants__P Parameter: Plant Line Value: CS23 vs. Ler wt
  misc_feature: MA Experiment 20000574 PARAMETER Experiment Name: At_100uM_ABA_Mutants__P Parameter: Timepoint (hr) Value: N/A
  misc_feature: MA Experiment 20000574 PARAMETER Experiment Name: At_100uM_ABA_Mutants__P Parameter: Tissue Value: Whole Plant
  misc_feature: MA Experiment 20000574 PARAMETER Experiment Name: At_100uM_ABA_Mutants__P Parameter: Treatment Value: None
atggcgaataatcatcatcccaaggatgaggcttatctctcatccgtcatccccaagcgtatcaggctcttcgaggaaatccaagccgagcagcttgagcagcttcaatctcggccacacgatccaatcaagattactcttctccccgacggtatcgagaaagaaggaaggagatgggagacctctccaatggacatcgcagtgcagatttctaagggtttagcaaaatctgctctggtttcttcggttaatcatgtcttgtgggacatgaataggcccctggaaggtgattgttccttagagattttcggatttgacagcgaccaaggccgtaatactttctggcattctagcgcccacattctaggccaggctctcgagcaggagtatggatgcaagctatgtattggaccctgcgaacccagagatgaaggcttctattacgattcactttattatggcgagctgggattaaacgacaatcattttccaaacatcgaagcaaaattacccattagaatggccgaatttggagtgttacaccgaaatgaggacagtggagcacttggtggaatgacccgtgtccgacggtttgtacaggatgatgcacacatattctgtagagtggatcaggttgaggaagaagtgaagggtgtgttggatttcattgactatgtttacagaatatttgggtttacctatgaactaacgctttcaacgaggccaaaggatcacattggagatttggaaacatgggctaaagctgaaaatgatcttgaaaaagctctagatgattttggaaagccatgggttataaaggaaggagacggtgcattttatggcccaaagatagacataacagtgtctgatgccaggaataggaaattccagtgtgctactatacagcttgattttcaacttccggcttgcttcaaactgaaatacctaagtgaaaaaaacgaaatggaggcacctgtgatgatacatagtgcggtgttgggatctattgagcgtatgtttgccatattgttggaacattacaaaggaatttggcccttctggcttagtccccgccaggccatagtttgctctctttcagaggattgtagttcctatgccaaacaggtacaaaaacagattaatgaagtcgggtactatgttgatattgatgaaagtgacagaagcctccgtaaaaaggtggcagatgctcgggatgcaccatacaactacatactggtcgtaggtcaaaaagaggttgcaactggacaggtgacagttcggctcagagaggaccctgaaggccgtaaagacttgccagagatgagcatcgaaagtttgcttgatgaattcaagttcaagacagtcaacttcctctga

SEQ ID NO: 82026 - protein, 458 aa, Arabidopsis thaliana
  peptide (1)..(458): Ceres Seq. ID no. 12662959
  misc_feature (111)..(234): Pfam Name: tRNA synthetase class II core domain (G, H, P, S and T) Pfam Description: tRNA synthetase class II core domain (G, H, P,
  misc_feature (1)..(458): Homolog of NCBI NO: 15220911 NR Description: threonyl-tRNA synthetase, putative; protein id: [Arabidopsis thaliana] >gi|25518755|pir||H86314 hypothetical
  misc_feature (169)..(458): Homolog of NCBI NO: 11271129 NR Description: threonine-tRNA ligase (EC 6.1.1.3) [imported] -
  misc_feature (1)..(168): Homolog of NCBI NO: 11271129 NR Description: threonine-tRNA ligase (EC 6.1.1.3) [imported] -
  misc_feature (169)..(458): Homolog of NCBI NO: 30690426 NR Description: threonyl-tRNA synthetase [Arabidopsis thaliana]
  misc_feature (1)..(168): Homolog of NCBI NO: 30690426 NR Description: threonyl-tRNA synthetase [Arabidopsis thaliana]
  misc_feature (169)..(458): Homolog of NCBI NO: 15081626 NR Description: AT5g26830/F2P16_90 [Arabidopsis thaliana]
  misc_feature (1)..(168): Homolog of NCBI NO: 15081626 NR Description: AT5g26830/F2P16_90 [Arabidopsis thaliana]
  misc_feature (169)..(458): Homolog of NCBI NO: 7437517 NR Description: threonine-tRNA ligase (EC 6.1.1.3) - Arabidopsis
  misc_feature (1)..(131): Homolog of NCBI NO: 7437517 NR Description: threonine-tRNA ligase (EC 6.1.1.3) - Arabidopsis
  misc_feature (144)..(168): Homolog of NCBI NO: 7437517 NR Description: threonine-tRNA ligase (EC 6.1.1.3) - Arabidopsis
MANNHHPKDEAYLSSVIPKRIRLFEEIQAEQLEQLQSRPHDPIKITLLPDGIEKEGRRWETSPMDIAVQISKGLAKSALVSSVNHVLWDMNRPLEGDCSLEIFGFDSDQGRNTFWHSSAHILGQALEQEYGCKLCIGPCEPRDEGFYYDSLYYGELGLNDNHFPNIEAKLPIRMAEFGVLHRNEDSGALGGMTRVRRFVQDDAHIFCRVDQVEEEVKGVLDFIDYVYRIFGFTYELTLSTRPKDHIGDLETWAKAENDLEKALDDFGKPWVIKEGDGAFYGPKIDITVSDARNRKFQCATIQLDFQLPACFKLKYLSEKNEMEAPVMIHSAVLGSIERMFAILLEHYKGIWPFWLSPRQAIVCSLSEDCSSYAKQVQKQINEVGYYVDIDESDRSLRKKVADARDAPYNYILVVGQKEVATGQVTVRLREDPEGRKDLPEMSIESLLDEFKFKTVNFL

SEQ ID NO: 82027 - protein, 395 aa, Arabidopsis thaliana
  peptide (1)..(395): Ceres Seq. ID no. 12662960
  misc_feature (48)..(171): Pfam Name: tRNA synthetase class II core domain (G, H, P, S and T) Pfam Description: tRNA synthetase class II core domain (G, H, P,
  misc_feature (1)..(395): Homolog of NCBI NO: 15220911 NR Description: threonyl-tRNA synthetase, putative; protein id: [Arabidopsis thaliana] >gi|25518755|pir||H86314 hypothetical
  misc_feature (106)..(395): Homolog of NCBI NO: 11271129 NR Description: threonine-tRNA ligase (EC 6.1.1.3) [imported] -
  misc_feature (1)..(105): Homolog of NCBI NO: 11271129 NR Description: threonine-tRNA ligase (EC 6.1.1.3) [imported] -
  misc_feature (106)..(395): Homolog of NCBI NO: 30690426 NR Description: threonyl-tRNA synthetase [Arabidopsis thaliana]
  misc_feature (1)..(105): Homolog of NCBI NO: 30690426 NR Description: threonyl-tRNA synthetase [Arabidopsis thaliana]
  misc_feature (106)..(395): Homolog of NCBI NO: 15081626 NR Description: AT5g26830/F2P16_90 [Arabidopsis thaliana]
  misc_feature (1)..(105): Homolog of NCBI NO: 15081626 NR Description: AT5g26830/F2P16_90 [Arabidopsis thaliana]
  misc_feature (106)..(395): Homolog of NCBI NO: 7437517 NR Description: threonine-tRNA ligase (EC 6.1.1.3) - Arabidopsis
  misc_feature (1)..(68): Homolog of NCBI NO: 7437517 NR Description: threonine-tRNA ligase (EC 6.1.1.3) - Arabidopsis
  misc_feature (81)..(105): Homolog of NCBI NO: 7437517 NR Description: threonine-tRNA ligase (EC 6.1.1.3) - Arabidopsis
MDIAVQISKGLAKSALVSSVNHVLWDMNRPLEGDCSLEIFGFDSDQGRNTFWHSSAHILGQALEQEYGCKLCIGPCEPRDEGFYYDSLYYGELGLNDNHFPNIEAKLPIRMAEFGVLHRNEDSGALGGMTRVRRFVQDDAHIFCRVDQVEEEVKGVLDFIDYVYRIFGFTYELTLSTRPKDHIGDLETWAKAENDLEKALDDFGKPWVIKEGDGAFYGPKIDITVSDARNRKFQCATIQLDFQLPACFKLKYLSEKNEMEAPVMIHSAVLGSIERMFAILLEHYKGIWPFWLSPRQAIVCSLSEDCSSYAKQVQKQINEVGYYVDIDESDRSLRKKVADARDAPYNYILVVGQKEVATGQVTVRLREDPEGRKDLPEMSIESLLDEFKFKTVNFL

SEQ ID NO: 82028 - protein, 369 aa, Arabidopsis thaliana
  peptide (1)..(369): Ceres Seq. ID no. 12662961
  misc_feature (22)..(145): Pfam Name: tRNA synthetase class II core domain (G, H, P, S and T) Pfam Description: tRNA synthetase class II core domain (G, H, P,
  misc_feature (1)..(369): Homolog of NCBI NO: 15220911 NR Description: threonyl-tRNA synthetase, putative; protein id: [Arabidopsis thaliana] >gi|25518755|pir||H86314 hypothetical
  misc_feature (80)..(369): Homolog of NCBI NO: 11271129 NR Description: threonine-tRNA ligase (EC 6.1.1.3) [imported] -
  misc_feature (1)..(79): Homolog of NCBI NO: 11271129 NR Description: threonine-tRNA ligase (EC 6.1.1.3) [imported] -
  misc_feature (80)..(369): Homolog of NCBI NO: 30690426 NR Description: threonyl-tRNA synthetase [Arabidopsis thaliana]
  misc_feature (1)..(79): Homolog of NCBI NO: 30690426 NR Description: threonyl-tRNA synthetase [Arabidopsis thaliana]
  misc_feature (80)..(369): Homolog of NCBI NO: 15081626 NR Description: AT5g26830/F2P16_90 [Arabidopsis thaliana]
  misc_feature (1)..(79): Homolog of NCBI NO: 15081626 NR Description: AT5g26830/F2P16_90 [Arabidopsis thaliana]
  misc_feature (80)..(369): Homolog of NCBI NO: 7437517 NR Description: threonine-tRNA ligase (EC 6.1.1.3) - Arabidopsis
  misc_feature (1)..(42): Homolog of NCBI NO: 7437517 NR Description: threonine-tRNA ligase (EC 6.1.1.3) - Arabidopsis
  misc_feature (55)..(79): Homolog of NCBI NO: 7437517 NR Description: threonine-tRNA ligase (EC 6.1.1.3) - Arabidopsis
MNRPLEGDCSLEIFGFDSDQGRNTFWHSSAHILGQALEQEYGCKLCIGPCEPRDEGFYYDSLYYGELGLNDNHFPNIEAKLPIRMAEFGVLHRNEDSGALGGMTRVRRFVQDDAHIFCRVDQVEEEVKGVLDFIDYVYRIFGFTYELTLSTRPKDHIGDLETWAKAENDLEKALDDFGKPWVIKEGDGAFYGPKIDITVSDARNRKFQCATIQLDFQLPACFKLKYLSEKNEMEAPVMIHSAVLGSIERMFAILLEHYKGIWPFWLSPRQAIVCSLSEDCSSYAKQVQKQINEVGYYVDIDESDRSLRKKVADARDAPYNYILVVGQKEVATGQVTVRLREDPEGRKDLPEMSIESLLDEFKFKTVNFL

SEQ ID NO: 82029 - DNA, 624 bp, Arabidopsis thaliana
  misc_feature (1)..(624): Ceres Seq. ID no. 12662979
  misc_feature: MA Experiment ID: 20000314 Result: Down-regulated in Transcription
  misc_feature: MA Experiment 20000314 PARAMETER Experiment Name: At_14day_Shoots-Roots_Sub_P Parameter: Age (day) Value: 14
  misc_feature: MA Experiment 20000314 PARAMETER Experiment Name: At_14day_Shoots-Roots_Sub_P Parameter: Organism Value: A. thaliana
  misc_feature: MA Experiment 20000314 PARAMETER Experiment Name: At_14day_Shoots-Roots_Sub_P Parameter: Plant Line Value: WS
  misc_feature: MA Experiment 20000314 PARAMETER Experiment Name: At_14day_Shoots-Roots_Sub_P Parameter: Tissue Value: Roots vs. Whole Plant
  misc_feature: MA Experiment ID: 20000315 Result: Down-regulated in Transcription
  misc_feature: MA Experiment 20000315 PARAMETER Experiment Name: At_14day_Shoots-Roots_Sub_P Parameter: Age (day) Value: 14
  misc_feature: MA Experiment 20000315 PARAMETER Experiment Name: At_14day_Shoots-Roots_Sub_P Parameter: Organism Value: A. thaliana
  misc_feature: MA Experiment 20000315 PARAMETER Experiment Name: At_14day_Shoots-Roots_Sub_P Parameter: Plant Line Value: WS
  misc_feature: MA Experiment 20000315 PARAMETER Experiment Name: At_14day_Shoots-Roots_Sub_P Parameter: Tissue Value: Shoots vs. Whole Plant
  misc_feature: MA Experiment ID: 20000327 Result: Down-regulated in Transcription
  misc_feature: MA Experiment 20000327 PARAMETER Experiment Name: At_42deg_Heat_Sub_P Parameter: Age (day) Value: 14
  misc_feature: MA Experiment 20000327 PARAMETER Experiment Name: At_42deg_Heat_Sub_P Parameter: Organism Value: A. thaliana
  misc_feature: MA Experiment 20000327 PARAMETER Experiment Name: At_42deg_Heat_Sub_P Parameter: Plant Line Value: WS
  misc_feature: MA Experiment 20000327 PARAMETER Experiment Name: At_42deg_Heat_Sub_P Parameter: Temperature (deg C) Value: 42 vs. 22
  misc_feature: MA Experiment 20000327 PARAMETER Experiment Name: At_42deg_Heat_Sub_P Parameter: Timepoint (hr) Value: 1
  misc_feature: MA Experiment 20000327 PARAMETER Experiment Name: At_42deg_Heat_Sub_P Parameter: Tissue Value: Aerial
  misc_feature: MA Experiment ID: 20000346 Result: Up-regulated in Transcription
  misc_feature: MA Experiment 20000346 PARAMETER Experiment Name: At_2mM_SA_Sub_P Parameter: Age (day) Value: 14
  misc_feature: MA Experiment 20000346 PARAMETER Experiment Name: At_2mM_SA_Sub_P Parameter: Organism Value: A. thaliana
  misc_feature: MA Experiment 20000346 PARAMETER Experiment Name: At_2mM_SA_Sub_P Parameter: Plant Line Value: WS
  misc_feature: MA Experiment 20000346 PARAMETER Experiment Name: At_2mM_SA_Sub_P Parameter: Timepoint (hr) Value: 1
  misc_feature: MA Experiment 20000346 PARAMETER Experiment Name: At_2mM_SA_Sub_P Parameter: Tissue Value: Aerial
  misc_feature: MA Experiment 20000346 PARAMETER Experiment Name: At_2mM_SA_Sub_P Parameter: Treatment Value: 2mM SA vs. No Treatment
  misc_feature: MA Experiment ID: 20000347 Result: Up-regulated in Transcription
  misc_feature: MA Experiment 20000347 PARAMETER Experiment Name: At_2mM_SA_Sub_P Parameter: Age (day) Value: 14
  misc_feature: MA Experiment 20000347 PARAMETER Experiment Name: At_2mM_SA_Sub_P Parameter: Organism Value: A. thaliana
  misc_feature: MA Experiment 20000347 PARAMETER Experiment Name: At_2mM_SA_Sub_P Parameter: Plant Line Value: WS
  misc_feature: MA Experiment 20000347 PARAMETER Experiment Name: At_2mM_SA_Sub_P Parameter: Timepoint (hr) Value: 6
  misc_feature: MA Experiment 20000347 PARAMETER Experiment Name: At_2mM_SA_Sub_P Parameter: Tissue Value: Aerial
  misc_feature: MA Experiment 20000347 PARAMETER Experiment Name: At_2mM_SA_Sub_P Parameter: Treatment Value: 2mM SA vs. No Treatment
  misc_feature: MA Experiment ID: 20000352 Result: Up-regulated in Transcription
  misc_feature: MA Experiment 20000352 PARAMETER Experiment Name: At_Drought_Sub_P Parameter: Age (day) Value: 7
  misc_feature: MA Experiment 20000352 PARAMETER Experiment Name: At_Drought_Sub_P Parameter: Organism Value: A. thaliana
  misc_feature: MA Experiment 20000352 PARAMETER Experiment Name: At_Drought_Sub_P Parameter: Plant Line Value: WS
  misc_feature: MA Experiment 20000352 PARAMETER Experiment Name: At_Drought_Sub_P Parameter: Timepoint (hr) Value: 6
  misc_feature: MA Experiment 20000352 PARAMETER Experiment Name: At_Drought_Sub_P Parameter: Tissue Value: Whole Plant
  misc_feature: MA Experiment 20000352 PARAMETER Experiment Name: At_Drought_Sub_P Parameter: Treatment Value: Drought vs. No Drought
  misc_feature: MA Experiment ID: 20000355 Result: Down-regulated in Transcription
  misc_feature: MA Experiment 20000355 PARAMETER Experiment Name: At_Siliques_Sub_P Parameter: Age (day) Value: 21
  misc_feature: MA Experiment 20000355 PARAMETER Experiment Name: At_Siliques_Sub_P Parameter: Organism Value: A. thaliana
  misc_feature: MA Experiment 20000355 PARAMETER Experiment Name: At_Siliques_Sub_P Parameter: Plant Line Value: WS
  misc_feature: MA Experiment 20000355 PARAMETER Experiment Name: At_Siliques_Sub_P Parameter: Tissue Value: Less Than 5mm Siliques vs. Whole Plant
  misc_feature: MA Experiment ID: 20000440 Result: Down-regulated in Transcription
  misc_feature: MA Experiment 20000440 PARAMETER Experiment Name: At_Closed-Flower__Sub_P Parameter: Tissue Value: Closed Flower vs. Whole Plant
  misc_feature: MA Experiment ID: 20000634 Result: Up-regulated in Transcription
  misc_feature: MA Experiment 20000634 PARAMETER Experiment Name: At_10percent_PEG_Sub_P Parameter: Age (day) Value: 12
  misc_feature: MA Experiment 20000634 PARAMETER Experiment Name: At_10percent_PEG_Sub_P Parameter: Organism Value: A. thaliana
  misc_feature: MA Experiment 20000634 PARAMETER Experiment Name: At_10percent_PEG_Sub_P Parameter: Plant Line Value: WS
  misc_feature: MA Experiment 20000634 PARAMETER Experiment Name: At_10percent_PEG_Sub_P Parameter: Timepoint (day) Value: 12
  misc_feature: MA Experiment 20000634 PARAMETER Experiment Name: At_10percent_PEG_Sub_P Parameter: Tissue Value: Whole Plant
  misc_feature: MA Experiment 20000634 PARAMETER Experiment Name: At_10percent_PEG_Sub_P Parameter: Treatment Value: 10% PEG vs. No Treatment
  misc_feature: MA Experiment ID: 20001806 Result: Up-regulated in Transcription
  misc_feature: MA Experiment 20001806 PARAMETER Experiment Name: At_50mM_NH4NO3_L-to-H_Sub_P Parameter: Timepoint (hr) Value: 4
  misc_feature: MA Experiment 20001806 PARAMETER Experiment Name: At_50mM_NH4NO3_L-to-H_Sub_P Parameter: Tissue Value: Leaf
  misc_feature: MA Experiment 20001806 PARAMETER Experiment Name: At_50mM_NH4NO3_L-to-H_Sub_P Parameter: Treatment Value: 50mM NH4NO3 vs 100mM Mannitol
atgacagggttctctgtgtctctttttgtgtcaaacttgtcaaatgtggcctcgtatttgtcgcccatcttcgagaacatcccctccaccaaggttgttcccgcacagatcgagaaagttgtctctttggtctctcgtaccggtcgcgatttgcagcgttacgatcacgctggctatcgtcaagtcgtcggatgtgtaccgtatagatacaagaaacaagaagtcaatggagttgaaacccaagtaatccaagttcttcttgtcagtgctcaaaagggcaaaggaatgttatttccaaaaggaggttgggagacggatgaatcaatggaggaagctgctttgagagagacgatcgaagaagcgggtgtaacaggagagctcgaagaaaagcttgggaaatggcaatacaaaagcaaaagacatagcataattcacgatgggtatatgtttgctttgcttgtcagtcaagagttcgagcgatggcctgaggcggaaatgagacaacgcagatgggtaagtttggatgaagcaagagaagtatgtcagaattggtggatgagagaagctcttgaagcattcattaacctgaaatgtctagctgacgatgatgaaagtgggaactga

SEQ ID NO: 82030 - protein, 207 aa, Arabidopsis thaliana
  peptide (1)..(207): Ceres Seq. ID no. 12662980
  misc_feature (59)..(196): Pfam Name: NUDIX domain Pfam Description: NUDIX domain
  misc_feature (1)..(207): Homolog of NCBI NO: 15221055 NR Description: unknown protein; protein id: At1g18300.1 thaliana] >gi|6714298|gb|AAF25994.1|AC013354_13 F15H18.18 thaliana] >gi|8671772|gb|AAF78378.1|AC069551_11 T10O22.27
  misc_feature (6)..(198): Homolog of NCBI NO: 22330598 NR Description: unknown protein; protein id: At1g73540.1, by cDNA: gi_18252868 [Arabidopsis thaliana] unknown protein [Arabidopsis thaliana]
  misc_feature (26)..(198): Homolog of NCBI NO: 25367539 NR Description: unknown protein [imported] - Arabidopsis thaliana
  misc_feature (37)..(194): Homolog of NCBI NO: 18379275 NR Description: expressed protein; protein id: At2g01670.1, by cDNA: 8247., supported by cDNA: gi_13272382, supported by gi_15293192, supported by cDNA: gi_15724325 [Arabidopsis
  misc_feature (40)..(194): Homolog of NCBI NO: 15223919 NR Description: hypothetical protein; protein id: At1g14860.1
  misc_feature (40)..(194): Homolog of NCBI NO: 21595695 NR Description: unknown [Arabidopsis thaliana]
  misc_feature (43)..(196): Homolog of NCBI NO: 18391450 NR Description: expressed protein; protein id: At1g12880.1, by cDNA: gi_15810278, supported by cDNA: gi_20258974 [Arabidopsis >gi|15810279|gb|AAL07027.1| unknown protein [Arabidopsis
  misc_feature (43)..(196): Homolog of NCBI NO: 25518008 NR Description: F13K23.14 protein - Arabidopsis thaliana
  misc_feature (43)..(193): Homolog of NCBI NO: 18399682 NR Description: expressed protein; protein id: At3g12600.1 thaliana] >gi|9294354|dbj|BAB02251.1| to unknown protein [Arabidopsis thaliana]
  misc_feature (42)..(202): Homolog of NCBI NO: 15231598 NR Description: MutT-like protein; protein id: At3g26690.1
MTGFSVSLFVSNLSNVASYLSPIFENIPSTKVVPAQIEKVVSLVSRTGRDLQRYDHAGYRQVVGCVPYRYKKQEVNGVETQVIQVLLVSAQKGKGMLFPKGGWETDESMEEAALRETIEEAGVTGELEEKLGKWQYKSKRHSIIHDGYMFALLVSQEFERWPEAEMRQRRWVSLDEAREVCQNWWMREALEAFINLKCLADDDESGN

SEQ ID NO: 82031 - protein, 112 aa, Arabidopsis thaliana
  peptide (1)..(112): Ceres Seq. ID no. 12662981
  misc_feature (1)..(101): Pfam Name: NUDIX domain Pfam Description: NUDIX domain
  misc_feature (1)..(112): Homolog of NCBI NO: 15221055 NR Description: unknown protein; protein id: At1g18300.1 thaliana] >gi|6714298|gb|AAF25994.1|AC013354_13 F15H18.18 thaliana] >gi|8671772|gb|AAF78378.1|AC069551_11 T10O22.27
  misc_feature (1)..(103): Homolog of NCBI NO: 22330598 NR Description: unknown protein; protein id: At1g73540.1, by cDNA: gi_18252868 [Arabidopsis thaliana] unknown protein [Arabidopsis thaliana]
  misc_feature (1)..(103): Homolog of NCBI NO: 25367539 NR Description: unknown protein [imported] - Arabidopsis thaliana
  misc_feature (1)..(99): Homolog of NCBI NO: 18379275 NR Description: expressed protein; protein id: At2g01670.1, by cDNA: 8247., supported by cDNA: gi_13272382, supported by gi_15293192, supported by cDNA: gi_15724325 [Arabidopsis
  misc_feature (1)..(99): Homolog of NCBI NO: 15223919 NR Description: hypothetical protein; protein id: At1g14860.1
  misc_feature (1)..(99): Homolog of NCBI NO: 21595695 NR Description: unknown [Arabidopsis thaliana]
  misc_feature (1)..(101): Homolog of NCBI NO: 18391450 NR Description: expressed protein; protein id: At1g12880.1, by cDNA: gi_15810278, supported by cDNA: gi_20258974 [Arabidopsis >gi|15810279|gb|AAL07027.1| unknown protein [Arabidopsis
  misc_feature (1)..(101): Homolog of NCBI NO: 25518008 NR Description: F13K23.14 protein - Arabidopsis thaliana
  misc_feature (1)..(98): Homolog of NCBI NO: 18399682 NR Description: expressed protein; protein id: At3g12600.1 thaliana] >gi|9294354|dbj|BAB02251.1| to unknown protein [Arabidopsis thaliana]
  misc_feature (1)..(107): Homolog of NCBI NO: 15231598 NR Description: MutT-like protein; protein id: At3g26690.1
MLFPKGGWETDESMEEAALRETIEEAGVTGELEEKLGKWQYKSKRHSIIHDGYMFALLVSQEFERWPEAEMRQRRWVSLDEAREVCQNWWMREALEAFINLKCLADDDESGN

SEQ ID NO: 82032 - DNA, 924 bp, Arabidopsis thaliana
  misc_feature (1)..(924): Ceres Seq. ID no. 12662998
  misc_feature: MA Experiment ID: 20000314 Result: Down-regulated in Transcription
  misc_feature: MA Experiment 20000314 PARAMETER Experiment Name: At_14day_Shoots-Roots_Sub_P Parameter: Age (day) Value: 14
  misc_feature: MA Experiment 20000314 PARAMETER Experiment Name: At_14day_Shoots-Roots_Sub_P Parameter: Organism Value: A. thaliana
  misc_feature: MA Experiment 20000314 PARAMETER Experiment Name: At_14day_Shoots-Roots_Sub_P Parameter: Plant Line Value: WS
  misc_feature: MA Experiment 20000314 PARAMETER Experiment Name: At_14day_Shoots-Roots_Sub_P Parameter: Tissue Value: Roots vs. Whole Plant
  misc_feature: MA Experiment ID: 20000315 Result: Down-regulated in Transcription
  misc_feature: MA Experiment 20000315 PARAMETER Experiment Name: At_14day_Shoots-Roots_Sub_P Parameter: Age (day) Value: 14
  misc_feature: MA Experiment 20000315 PARAMETER Experiment Name: At_14day_Shoots-Roots_Sub_P Parameter: Organism Value: A. thaliana
  misc_feature: MA Experiment 20000315 PARAMETER Experiment Name: At_14day_Shoots-Roots_Sub_P Parameter: Plant Line Value: WS
  misc_feature: MA Experiment 20000315 PARAMETER Experiment Name: At_14day_Shoots-Roots_Sub_P Parameter: Tissue Value: Shoots vs. Whole Plant
  misc_feature: MA Experiment ID: 20000328 Result: Down-regulated in Transcription
  misc_feature: MA Experiment 20000328 PARAMETER Experiment Name: At_42deg_Heat_Sub_P Parameter: Age (day) Value: 14
  misc_feature: MA Experiment 20000328 PARAMETER Experiment Name: At_42deg_Heat_Sub_P Parameter: Organism Value: A. thaliana
  misc_feature: MA Experiment 20000328 PARAMETER Experiment Name: At_42deg_Heat_Sub_P Parameter: Plant Line Value: WS
  misc_feature: MA Experiment 20000328 PARAMETER Experiment Name: At_42deg_Heat_Sub_P Parameter: Temperature (deg C) Value: 42 vs. 22
  misc_feature: MA Experiment 20000328 PARAMETER Experiment Name: At_42deg_Heat_Sub_P Parameter: Timepoint (hr) Value: 6
  misc_feature: MA Experiment 20000328 PARAMETER Experiment Name: At_42deg_Heat_Sub_P Parameter: Tissue Value: Aerial
  misc_feature: MA Experiment ID: 20000355 Result: Down-regulated in Transcription
  misc_feature: MA Experiment 20000355 PARAMETER Experiment Name: At_Siliques_Sub_P Parameter: Age (day) Value: 21
  misc_feature: MA Experiment 20000355 PARAMETER Experiment Name: At_Siliques_Sub_P Parameter: Organism Value: A. thaliana
  misc_feature: MA Experiment 20000355 PARAMETER Experiment Name: At_Siliques_Sub_P Parameter: Plant Line Value: WS
  misc_feature: MA Experiment 20000355 PARAMETER Experiment Name: At_Siliques_Sub_P Parameter: Tissue Value: Less Than 5mm Siliques vs. Whole Plant
  misc_feature: MA Experiment ID: 20000440 Result: Down-regulated in Transcription
  misc_feature: MA Experiment 20000440 PARAMETER Experiment Name: At_Closed-Flower__Sub_P Parameter: Tissue Value: Closed Flower vs. Whole Plant
atggctcttgttcgtaaacgccgtcaaatcaacctccgtctccctgtcccaccgctctctgttcacctcccctggttctcctttgcctcatccaccgcccccgtcatcaacaacggaatctcagcttccgatgtcgagaaactccacgttctcggaagaggaagcagcgggatcgtatacaaagtccaccacaaaaccacgggggagatatacgctctgaaatcagtcaacggcgacatgagtcctgctttcacaagacaattagcgcgcgagatggagatcctccgtcgcacggattctccttatgtcgtcaggtgtcaagggatcttcgagaaaccaatcgtcggagaggtttcgatcctcatggagtatatggacggtggaaacctagaatctctccgcggcgccgttacggagaaacaactagcgggattttcccgccagattttgaaaggtttaagttatctccactcactcaagatcgttcacagagacatcaaacctgcgaatctactcttaaactcgagaaacgaagttaaaatcgctgattttggagtgagcaaaatcattacccgatcgttagattactgcaattcctacgtcggcacttgcgcttacatgagcccggagagatttgactctgccgccggagaaaactccgatgtttacgcaggcgatatctggagtttcggagtgatgatacttgagctcttcgtcggacattttccgttgcttcctcagggacagagacctgactgggcgacgttaatgtgcgtcgtgtgctttggagaaccaccgcgtgcgccggaaggatgttccgacgagtttaggagttttgttgactgttgtctccgtaaagaatcgagtgagaggtggacggcgtcgcagcttctcggtcacccttttctccgtgaaagtctttag

SEQ ID NO: 82033 - protein, 307 aa, Arabidopsis thaliana
  peptide (1)..(307): Ceres Seq. ID no. 12662999
  misc_feature (45)..(303): Pfam Name: Protein kinase domain Pfam Description: Protein kinase domain
  misc_feature (1)..(307): Homolog of NCBI NO: 15221060 NR Description: MAP kinase kinase 5, putative; protein id: [Arabidopsis thaliana] >gi|6714299|gb|AAF25995.1|AC013354_14
  misc_feature (1)..(307): Homolog of NCBI NO: 15219482 NR Description: MAP kinase, putative; protein id: At1g73500.1, by cDNA: 112118. [Arabidopsis thaliana] >gi|25287619|pir||G96761
  misc_feature (1)..(291): Homolog of NCBI NO: 15230671 NR Description: putative MAP kinase; protein id: At3g06230.1 thaliana] >gi|6862927|gb|AAF30316.1|AC018907_16 putative MAP
  misc_feature (14)..(306): Homolog of NCBI NO: 33563103 NR Description: mitogen-activated protein kinase kinase [Solanum
  misc_feature (14)..(306): Homolog of NCBI NO: 12484128 NR Description: mitogen-activated protein kinase 2 [Nicotiana
  misc_feature (40)..(303): Homolog of NCBI NO: 15528439 NR Description: MEK map kinase kinsae [Medicago sativa subsp. x
  misc_feature (5)..(303): Homolog of NCBI NO: 15232491 NR Description: MAP kinase kinase 5; protein id: At3g21220.1, by cDNA: gi_19698850, supported by cDNA: gi_3219272 [Arabidopsis
  misc_feature (5)..(303): Homolog of NCBI NO: 19698851 NR Description: MAP kinase kinase 5 [Arabidopsis thaliana]
  misc_feature (5)..(303): Homolog of NCBI NO: 25287595 NR Description: mitogen-activated protein kinase kinase (EC
  misc_feature (1)..(306): Homolog of NCBI NO: 15217998 NR Description: MAP kinase kinase 4 (ATMKK4); protein id: supported by cDNA: gi_11908061, supported by cDNA: gi_13194803, by cDNA: gi_13265419, supported by cDNA: gi_14030614, supported
MALVRKRRQINLRLPVPPLSVHLPWFSFASSTAPVINNGISASDVEKLHVLGRGSSGIVYKVHHKTTGEIYALKSVNGDMSPAFTRQLAREMEILRRTDSPYVVRCQGIFEKPIVGEVSILMEYMDGGNLESLRGAVTEKQLAGFSRQILKGLSYLHSLKIVHRDIKPANLLLNSRNEVKIADFGVSKIITRSLDYCNSYVGTCAYMSPERFDSAAGENSDVYAGDIWSFGVMILELFVGHFPLLPQGQRPDWATLMCVVCFGEPPRAPEGCSDEFRSFVDCCLRKESSERWTASQLLGHPFLRESL

SEQ ID NO: 82034 - protein, 228 aa, Arabidopsis thaliana
  peptide (1)..(228): Ceres Seq. ID no. 12663000
  misc_feature (1)..(224): Pfam Name: Protein kinase domain Pfam Description: Protein kinase domain
  misc_feature (1)..(228): Homolog of NCBI NO: 15221060 NR Description: MAP kinase kinase 5, putative; protein id: [Arabidopsis thaliana] >gi|6714299|gb|AAF25995.1|AC013354_14
  misc_feature (1)..(228): Homolog of NCBI NO: 15219482 NR Description: MAP kinase, putative; protein id: At1g73500.1, by cDNA: 112118. [Arabidopsis thaliana] >gi|25287619|pir||G96761
  misc_feature (1)..(212): Homolog of NCBI NO: 15230671 NR Description: putative MAP kinase; protein id: At3g06230.1 thaliana] >gi|6862927|gb|AAF30316.1|AC018907_16 putative MAP
  misc_feature (1)..(227): Homolog of NCBI NO: 33563103 NR Description: mitogen-activated protein kinase kinase [Solanum
  misc_feature (1)..(227): Homolog of NCBI NO: 12484128 NR Description: mitogen-activated protein kinase 2 [Nicotiana
  misc_feature (1)..(224): Homolog of NCBI NO: 15528439 NR Description: MEK map kinase kinsae [Medicago sativa subsp. x
  misc_feature (1)..(224): Homolog of NCBI NO: 15232491 NR Description: MAP kinase kinase 5; protein id: At3g21220.1, by cDNA: gi_19698850, supported by cDNA: gi_3219272 [Arabidopsis
  misc_feature (1)..(224): Homolog of NCBI NO: 19698851 NR Description: MAP kinase kinase 5 [Arabidopsis thaliana]
  misc_feature (1)..(224): Homolog of NCBI NO: 25287595 NR Description: mitogen-activated protein kinase kinase (EC
  misc_feature (1)..(227): Homolog of NCBI NO: 15217998 NR Description: MAP kinase kinase 4 (ATMKK4); protein id: supported by cDNA: gi_11908061, supported by cDNA: gi_13194803, by cDNA: gi_13265419, supported by cDNA: gi_14030614, supported
MSPAFTRQLAREMEILRRTDSPYVVRCQGIFEKPIVGEVSILMEYMDGGNLESLRGAVTEKQLAGFSRQILKGLSYLHSLKIVHRDIKPANLLLNSRNEVKIADFGVSKIITRSLDYCNSYVGTCAYMSPERFDSAAGENSDVYAGDIWSFGVMILELFVGHFPLLPQGQRPDWATLMCVVCFGEPPRAPEGCSDEFRSFVDCCLRKESSERWTASQLLGHPFLRESL

SEQ ID NO: 82035 - protein, 216 aa, Arabidopsis thaliana
  peptide (1)..(216): Ceres Seq. ID no. 12663001
  misc_feature (1)..(212): Pfam Name: Protein kinase domain Pfam Description: Protein kinase domain
  misc_feature (1)..(216): Homolog of NCBI NO: 15221060 NR Description: MAP kinase kinase 5, putative; protein id: [Arabidopsis thaliana] >gi|6714299|gb|AAF25995.1|AC013354_14
  misc_feature (1)..(216): Homolog of NCBI NO: 15219482 NR Description: MAP kinase, putative; protein id: At1g73500.1, by cDNA: 112118. [Arabidopsis thaliana] >gi|25287619|pir||G96761
  misc_feature (1)..(200): Homolog of NCBI NO: 15230671 NR Description: putative MAP kinase; protein id: At3g06230.1 thaliana] >gi|6862927|gb|AAF30316.1|AC018907_16 putative MAP
  misc_feature (1)..(215): Homolog of NCBI NO: 33563103 NR Description: mitogen-activated protein kinase kinase [Solanum
  misc_feature (1)..(215): Homolog of NCBI NO: 12484128 NR Description: mitogen-activated protein kinase 2 [Nicotiana
  misc_feature (1)..(212): Homolog of NCBI NO: 15528439 NR Description: MEK map kinase kinsae [Medicago sativa subsp. x
  misc_feature (1)..(212): Homolog of NCBI NO: 15232491 NR Description: MAP kinase kinase 5; protein id: At3g21220.1, by cDNA: gi_19698850, supported by cDNA: gi_3219272 [Arabidopsis
  misc_feature (1)..(212): Homolog of NCBI NO: 19698851 NR Description: MAP kinase kinase 5 [Arabidopsis thaliana]
  misc_feature (1)..(212): Homolog of NCBI NO: 25287595 NR Description: mitogen-activated protein kinase kinase (EC
  misc_feature (1)..(215): Homolog of NCBI NO: 15217998 NR Description: MAP kinase kinase 4 (ATMKK4); protein id: supported by cDNA: gi_11908061, supported by cDNA: gi_13194803, by cDNA: gi_13265419, supported by cDNA: gi_14030614, supported
MEILRRTDSPYVVRCQGIFEKPIVGEVSILMEYMDGGNLESLRGAVTEKQLAGFSRQILKGLSYLHSLKIVHRDIKPANLLLNSRNEVKIADFGVSKIITRSLDYCNSYVGTCAYMSPERFDSAAGENSDVYAGDIWSFGVMILELFVGHFPLLPQGQRPDWATLMCVVCFGEPPRAPEGCSDEFRSFVDCCLRKESSERWTASQLLGHPFLRESL

SEQ ID NO: 82036 - DNA, 2925 bp, Arabidopsis thaliana
  misc_feature (1)..(2925): Ceres Seq. ID no. 12663006
  misc_feature: MA Experiment ID: 20000171 Result: Down-regulated in Transcription
  misc_feature: MA Experiment 20000171 PARAMETER Experiment Name: At_42deg_Heat_P Parameter: Age (day) Value: 14
  misc_feature: MA Experiment 20000171 PARAMETER Experiment Name: At_42deg_Heat_P Parameter: Organism Value: A. thaliana
  misc_feature: MA Experiment 20000171 PARAMETER Experiment Name: At_42deg_Heat_P Parameter: Plant Line Value: WS
  misc_feature: MA Experiment 20000171 PARAMETER Experiment Name: At_42deg_Heat_P Parameter: Temperature (deg C) Value: 42 vs. 22
  misc_feature: MA Experiment 20000171 PARAMETER Experiment Name: At_42deg_Heat_P Parameter: Timepoint (hr) Value: 1
  misc_feature: MA Experiment 20000171 PARAMETER Experiment Name: At_42deg_Heat_P Parameter: Tissue Value: Aerial
  misc_feature: MA Experiment ID: 20000173 Result: Down-regulated in Transcription
  misc_feature: MA Experiment 20000173 PARAMETER Experiment Name: At_42deg_Heat_P Parameter: Age (day) Value: 14
  misc_feature: MA Experiment 20000173 PARAMETER Experiment Name: At_42deg_Heat_P Parameter: Organism Value: A. thaliana
  misc_feature: MA Experiment 20000173 PARAMETER Experiment Name: At_42deg_Heat_P Parameter: Plant Line Value: WS
  misc_feature: MA Experiment 20000173 PARAMETER Experiment Name: At_42deg_Heat_P Parameter: Temperature (deg C) Value: 42 vs. 22
  misc_feature: MA Experiment 20000173 PARAMETER Experiment Name: At_42deg_Heat_P Parameter: Timepoint (hr) Value: 6
  misc_feature: MA Experiment 20000173 PARAMETER Experiment Name: At_42deg_Heat_P Parameter: Tissue Value: Aerial
  misc_feature: MA Experiment ID: 20000180 Result: Up-regulated in Transcription
  misc_feature: MA Experiment 20000180 PARAMETER Experiment Name: At_Germinating_Seeds_P Parameter: Age (hr) Value: 24 vs. 0
  misc_feature: MA Experiment 20000180 PARAMETER Experiment Name: At_Germinating_Seeds_P Parameter: Tissue Value: Germinating Seeds
  misc_feature: MA Experiment ID: 20000185 Result: Up-regulated in Transcription
  misc_feature: MA Experiment 20000185 PARAMETER Experiment Name: At_Roots__P Parameter: Age (day) Value: 7 vs. 21
  misc_feature: MA Experiment 20000185 PARAMETER Experiment Name: At_Roots__P Parameter: Organism Value: A. thaliana
  misc_feature: MA Experiment 20000185 PARAMETER Experiment Name: At_Roots__P Parameter: Tissue Value: Roots vs. Whole Plant
  misc_feature: MA Experiment ID: 20000234 Result: Up-regulated in Transcription
  misc_feature: MA Experiment 20000234 PARAMETER Experiment Name: At_Siliques_P Parameter: Age (day) Value: 21
  misc_feature: MA Experiment 20000234 PARAMETER Experiment Name: At_Siliques_P Parameter: Organism Value: A. thaliana
  misc_feature: MA Experiment 20000234 PARAMETER Experiment Name: At_Siliques_P Parameter: Plant Line Value: WS
  misc_feature: MA Experiment 20000234 PARAMETER Experiment Name: At_Siliques_P Parameter: Tissue Value: Less Than 5mm Siliques vs. Whole Plant
  misc_feature: MA Experiment ID: 20000235 Result: Up-regulated in Transcription
  misc_feature: MA Experiment 20000235 PARAMETER Experiment Name: At_Siliques_P Parameter: Age (day) Value: 21
  misc_feature: MA Experiment 20000235 PARAMETER Experiment Name: At_Siliques_P Parameter: Organism Value: A. thaliana
  misc_feature: MA Experiment 20000235 PARAMETER Experiment Name: At_Siliques_P Parameter: Plant Line Value: WS
  misc_feature: MA Experiment 20000235 PARAMETER Experiment Name: At_Siliques_P Parameter: Tissue Value: 5-10mm Siliques vs. Whole Plant
  misc_feature: MA Experiment ID: 20000264 Result: Up-regulated in Transcription
  misc_feature: MA Experiment 20000264 PARAMETER Experiment Name: At_Open_Flower_P Parameter: Age (day) Value: 21
  misc_feature: MA Experiment 20000264 PARAMETER Experiment Name: At_Open_Flower_P Parameter: Plant Line Value: WS
  misc_feature: MA Experiment 20000264 PARAMETER Experiment Name: At_Open_Flower_P Parameter: Tissue Value: Open Flower vs. Whole Plant
  misc_feature: MA Experiment ID: 20000265 Result: Up-regulated in Transcription
  misc_feature: MA Experiment 20000265 PARAMETER Experiment Name: At_Open_Flower_P Parameter: Age (day) Value: 21
  misc_feature: MA Experiment 20000265 PARAMETER Experiment Name: At_Open_Flower_P Parameter: Plant Line Value: WS
  misc_feature: MA Experiment 20000265 PARAMETER Experiment Name: At_Open_Flower_P Parameter: Tissue Value: Closed Flower vs. Whole Plant
  misc_feature: MA Experiment ID: 20000269 Result: Down-regulated in Transcription
  misc_feature: MA Experiment 20000269 PARAMETER Experiment Name: At_1mM_KNO3_L-vs-H_Roots_P Parameter: Age (day) Value: 7,10,12
  misc_feature: MA Experiment 20000269 PARAMETER Experiment Name: At_1mM_KNO3_L-vs-H_Roots_P Parameter: Organism Value: A. thaliana
  misc_feature: MA Experiment 20000269 PARAMETER Experiment Name: At_1mM_KNO3_L-vs-H_Roots_P Parameter: Plant Line Value: WS
  misc_feature: MA Experiment 20000269 PARAMETER Experiment Name: At_1mM_KNO3_L-vs-H_Roots_P Parameter: Timepoint (day) Value: 7,10,12
  misc_feature: MA Experiment 20000269 PARAMETER Experiment Name: At_1mM_KNO3_L-vs-H_Roots_P Parameter: Tissue Value: Roots
  misc_feature: MA Experiment 20000269 PARAMETER Experiment Name: At_1mM_KNO3_L-vs-H_Roots_P Parameter: Treatment Value: 1mM KNO3 vs. 50mM KNO3
  misc_feature: MA Experiment ID: 20000286 Result: Up-regulated in Transcription
  misc_feature: MA Experiment 20000286 PARAMETER Experiment Name: At_Open_Flower_P Parameter: Age (day) Value: 21
  misc_feature: MA Experiment 20000286 PARAMETER Experiment Name: At_Open_Flower_P Parameter: Plant Line Value: WS
  misc_feature: MA Experiment 20000286 PARAMETER Experiment Name: At_Open_Flower_P Parameter: Tissue Value: Half Open vs. Whole Plant
  misc_feature: MA Experiment ID: 20000439 Result: Up-regulated in Transcription
  misc_feature: MA Experiment 20000439 PARAMETER Experiment Name: At_Roots__P Parameter: Age (day) Value: 14 vs. 21
  misc_feature: MA Experiment 20000439 PARAMETER Experiment Name: At_Roots__P Parameter: Organism Value: A. thaliana
  misc_feature: MA Experiment 20000439 PARAMETER Experiment Name: At_Roots__P Parameter: Tissue Value: Roots vs. Whole Plant
  misc_feature: MA Experiment ID: 20000451 Result: Down-regulated in Transcription
  misc_feature: MA Experiment 20000451 PARAMETER Experiment Name: At_CS6879_Shoots-Roots_P Parameter: Age (day) Value: 14
  misc_feature: MA Experiment 20000451 PARAMETER Experiment Name: At_CS6879_Shoots-Roots_P Parameter: Organism Value: A. thaliana
  misc_feature: MA Experiment 20000451 PARAMETER Experiment Name: At_CS6879_Shoots-Roots_P Parameter: Plant Line Value: CS6879 vs. WS
  misc_feature: MA Experiment 20000451 PARAMETER Experiment Name: At_CS6879_Shoots-Roots_P Parameter: Tissue Value: Roots
  misc_feature: MA Experiment ID: 20000495 Result: Up-regulated in Transcription
  misc_feature: MA Experiment 20000495 PARAMETER Experiment Name: At_Guard_Cells_P Parameter: Harvest Date Value: 8/2/2002
  misc_feature: MA Experiment 20000495 PARAMETER Experiment Name: At_Guard_Cells_P Parameter: Organism Value: A. thaliana
  misc_feature: MA Experiment 20000495 PARAMETER Experiment Name: At_Guard_Cells_P Parameter: Tissue Value: Guard Cells vs. Leaves
  misc_feature: MA Experiment ID: 20000496 Result: Up-regulated in Transcription
  misc_feature: MA Experiment 20000496 PARAMETER Experiment Name: At_Guard_Cells_P Parameter: Harvest Date Value: 7/19/2002
  misc_feature: MA Experiment 20000496 PARAMETER Experiment Name: At_Guard_Cells_P Parameter: Organism Value: Canola
  misc_feature: MA Experiment 20000496 PARAMETER Experiment Name: At_Guard_Cells_P Parameter: Tissue Value: Guard Cells vs. Leaves
  misc_feature: MA Experiment ID: 20001450 Result: Down-regulated in Transcription
  misc_feature: MA Experiment 20001450 PARAMETER Experiment Name: At_Far-red-induction_P Parameter: Age (day) Value: 7
  misc_feature: MA Experiment 20001450 PARAMETER Experiment Name: At_Far-red-induction_P Parameter: Light Value: Far-red vs. White
  misc_feature: MA Experiment 20001450 PARAMETER Experiment Name: At_Far-red-induction_P Parameter: Organism Value: A. thaliana
  misc_feature: MA Experiment 20001450 PARAMETER Experiment Name: At_Far-red-induction_P Parameter: Plant Line Value: Columbia
  misc_feature: MA Experiment 20001450 PARAMETER Experiment Name: At_Far-red-induction_P Parameter: Timepoint (hr) Value: 8
  misc_feature: MA Experiment 20001450 PARAMETER Experiment Name: At_Far-red-induction_P Parameter: Tissue Value: Whole Plant
  misc_feature: MA Experiment ID: 20001560 Result: Up-regulated in Transcription
  misc_feature: MA Experiment 20001560 PARAMETER Experiment Name: At_Drought_Soil_Dry_P Parameter: Age (day) Value: 28
  misc_feature: MA Experiment 20001560 PARAMETER Experiment Name: At_Drought_Soil_Dry_P Parameter: Organism Value: A. thaliana
  misc_feature: MA Experiment 20001560 PARAMETER Experiment Name: At_Drought_Soil_Dry_P Parameter: Plant Line Value: WS
  misc_feature: MA Experiment 20001560 PARAMETER Experiment Name: At_Drought_Soil_Dry_P Parameter: Post Timepoint (hr) Value: None
  misc_feature: MA Experiment 20001560 PARAMETER Experiment Name: At_Drought_Soil_Dry_P Parameter: Post-Treatment Value: None
  misc_feature: MA Experiment 20001560 PARAMETER Experiment Name: At_Drought_Soil_Dry_P Parameter: Timepoint (day) Value: 14
  misc_feature: MA Experiment 20001560 PARAMETER Experiment Name: At_Drought_Soil_Dry_P Parameter: Treatment Value: Drought vs. No Drought
  misc_feature: MA Experiment ID: 20001911 Result: Down-regulated in Transcription
  misc_feature: MA Experiment 20001911 PARAMETER Experiment Name: At_Drought_Reproduction_P Parameter: Age (day) Value: 40
  misc_feature: MA Experiment 20001911 PARAMETER Experiment Name: At_Drought_Reproduction_P Parameter: Organism Value: A. thaliana
  misc_feature: MA Experiment 20001911 PARAMETER Experiment Name: At_Drought_Reproduction_P Parameter: Plant Line Value: WS
  misc_feature: MA Experiment 20001911 PARAMETER Experiment Name: At_Drought_Reproduction_P Parameter: Timepoint (day) Value: 10
  misc_feature: MA Experiment 20001911 PARAMETER Experiment Name: At_Drought_Reproduction_P Parameter: Tissue Value: Flowers
  misc_feature: MA Experiment 20001911 PARAMETER Experiment Name: At_Drought_Reproduction_P Parameter: Treatment Value: Drought vs. No Drought
atgactataaaaacaccgggaactccggtttcgaagatggacagaacaccagctgtaacaccaggtggaagctcaagatccagggaagagaagattgttgttactgtaaggttaaggccaatgaataagagagaactgttagctaaagaccaagttgcttgggaatgtgtaaatgaccacaccattgtgtctaaaccacaagttcaagaacgtttgcatcatcagtcctcatttacatttgataaagtttttggaccagagagtttaacagagaatgtgtatgaagatggtgttaagaatgttgcattgtctgctttgatgggcataaatgcaacaatatttgcatatggacaaacaagcagtggaaagacatataccatgagaggagtaacggagaaagctgtcaatgatatttacaatcacataattaagacccctgaaagagattttactatcaagatttctggtctggaaatatataatgaaaatgtcagagatctgctcaattcagattcgggacgtgcccttaaactccttgatgatccagagaaaggtactgtggttgaaaaactggttgaagaaacagctaataacgataaccatttgcggcatctgattagcatttgtgaagctcaaagacaagttggagaaactgctttgaatgatactagctcgcggtcacaccaaataatcagactgacaatacaaagtactcaccgcgaaaattcagattgtgtgaggtcatatatggctagtctgaactttgtggacttagcaggaagcgaaagagcatcacaatcgcaggcagatggaacgagactcagggaaggttgtcatatcaatctaagtctaatgacacttacaactgtcataaggaaattaagtgtggggaaaagaagcggccatataccttacagagactccaagcttactaggattttacagcattcactaggtgggaatgctcgaacagccattatatgtacattgagtccagctttggctcatgttgaacaatcaagaaatactctatacttcgccaaccgagccaaggaagttacaaacaatgcccacgtgaacatggttgtctctgataagcaactagtgaaacatcttcagaaagaagtggctagattggaggccgagcgtcgcacccctggtccatcgacagaaaaggatttcaagatccagcagatggaaatggaaatcggagagcttagaagacaaagagatgatgcacaaattcaacttgaggagttacgccaaaagcttcaaggggatcagcaacaaaataagggcttaaatccttttgaatctccagacccaccggtcagaaaatgtctttcctattctgttgccgtaacgcctagctcggagaacaaaacgctaaaccggaatgagagagcaagaaagactacgatgcgccaatctatgatacggcaatcatcaactgctccatttacattgatgcatgaaatccgcaaactcgaacaccttcaagaacagttaggggaggaagcaacgaaagcccttgaagtgttacaaaaggaagtagcttgccatagactagggaatcaagatgcagctcagacgatagctaagcttcaagcagagataagggaaatgcgtactgttaaaccatctgcaatgcttaaagaggttggagatgtcatagctcctaacaagagcgtaagtgccaatctcaaggaagagataacaaggctccattcacaaggaagcaccattgcgaatctagaggagcaacttgagagcgttcagaagtcaatagataagttggtgatgtctcttccgagcaatatcagtgctggagatgagactccaaagacaaagaatcatcatcatcaatcaaagaagaagaagcttcttcctctgacaccaagcagcgcatccaaccgccagaacttcttgaaatctccatgctctccgctttcagcttctaggcaagtcttggattgtgatgctgagaacaaagctcctcaagaaaacaacagttctgcagctagaggggcgacgacaccacaggggtctgagaaagagactccacagaaaggagaagaaagcggagatgtctcgtcaagagaaggtactccaggctacagaagatcaagctcagtgaacatgaagaaaatgcagcaaatgtttcaaaacgcagcagaggagaatgtaagaagcataagagcatacgtaaccgaactcaaagaacgagtagctaaactacagtaccagaaacaacttctcgtttgtcaggtgcttgagttggaagcaaatgatggagctggatatagtgtagagaacgaggagaacacgataatggaagatgaagagcagaatcaagtggcgtggcatataactttcatagaggaaagacaacagatcatagagctgtggcatgtctgccatgtctccataatccacaggacacaattctacctactgttcaaaggtgaccaagccgatcaaatctacatggaagtcgagctaagacggttaacttggttagaacaacatctagcagaagtaggaaacgcaactccagctcgaaactgcgatgaatctgtggtttctctatcatcaagtataaaagcattgagaagagagcgagagtttttggcgaaaagggttaactcgagattgacgcctgaggagagagaggagctgtatatgaaatgggatgtgccattggaagggaaacagaggaaacttcagttcgtgaacaagctatggactgatccttatgattcaaggcacgtgcaagagagtgcagagatagttgcgaagctagttggattctgtgaaagtggcaacatctctaaagagatgtttgagctcaatttcgcagtgccttcagataaaagacagtggaacattggttgggacaacatctctaatcttcttcacctatga

SEQ ID NO: 82037 - protein, 974 aa, Arabidopsis thaliana
  peptide (1)..(974): Ceres Seq. ID no. 12663007
  misc_feature (6)..(739): Homolog of NCBI NO: 11358478 NR Description: kinesin-like protein - Arabidopsis thaliana
  misc_feature (662)..(974): Homolog of NCBI NO: 11358478 NR Description: kinesin-like protein - Arabidopsis thaliana
  misc_feature (1)..(793): Homolog of NCBI NO: 19570249 NR Description: kinesin-like protein NACK2 [Nicotiana tabacum]
  misc_feature (4)..(797): Homolog of NCBI NO: 34914660 NR Description: putative kinesin [Oryza sativa (japonica
  misc_feature (6)..(739): Homolog of NCBI NO: 22796151 NR Description: kinesin-like protein [Arabidopsis thaliana]
  misc_feature (6)..(739): Homolog of NCBI NO: 30690898 NR Description: kinesin -related protein [Arabidopsis thaliana]
  misc_feature (6)..(653): Homolog of NCBI NO: 21954474 NR Description: kinesin-like protein [Arabidopsis thaliana]
  misc_feature (29)..(432): Homolog of NCBI NO: 30698217 NR Description: kinesin heavy chain DNA binding protein-related
  misc_feature (651)..(953): Homolog of NCBI NO: 30698217 NR Description: kinesin heavy chain DNA binding protein-related
  misc_feature (23)..(644): Homolog of NCBI NO: 30693419 NR Description: expressed protein [Arabidopsis thaliana]
MTIKTPGTPVSKMDRTPAVTPGGSSRSREEKIVVTVRLRPMNKRELLAKDQVAWECVNDHTIVSKPQVQERLHHQSSFTFDKVFGPESLTENVYEDGVKNVALSALMGINATIFAYGQTSSGKTYTMRGVTEKAVNDIYNHIIKTPERDFTIKISGLEIYNENVRDLLNSDSGRALKLLDDPEKGTVVEKLVEETANNDNHLRHLISICEAQRQVGETALNDTSSRSHQIIRLTIQSTHRENSDCVRSYMASLNFVDLAGSERASQSQADGTRLREGCHINLSLMTLTTVIRKLSVGKRSGHIPYRDSKLTRILQHSLGGNARTAIICTLSPALAHVEQSRNTLYFANRAKEVTNNAHVNMVVSDKQLVKHLQKEVARLEAERRTPGPSTEKDFKIQQMEMEIGELRRQRDDAQIQLEELRQKLQGDQQQNKGLNPFESPDPPVRKCLSYSVAVTPSSENKTLNRNERARKTTMRQSMIRQSSTAPFTLMHEIRKLEHLQEQLGEEATKALEVLQKEVACHRLGNQDAAQTIAKLQAEIREMRTVKPSAMLKEVGDVIAPNKSVSANLKEEITRLHSQGSTIANLEEQLESVQKSIDKLVMSLPSNISAGDETPKTKNHHHQSKKKKLLPLTPSSASNRQNFLKSPCSPLSASRQVLDCDAENKAPQENNSSAARGATTPQGSEKETPQKGEESGDVSSREGTPGYRRSSSVNMKKMQQMFQNAAEENVRSIRAYVTELKERVAKLQYQKQLLVCQVLELEANDGAGYSVENEENTIMEDEEQNQVAWHITFIEERQQIIELWHVCHVSIIHRTQFYLLFKGDQADQIYMEVELRRLTWLEQHLAEVGNATPARNCDESVVSLSSSIKALRREREFLAKRVNSRLTPEEREELYMKWDVPLEGKQRKLQFVNKLWTDPYDSRHVQESAEIVAKLVGFCESGNISKEMFELNFAVPSDKRQWNIGWDNISNLLHL

SEQ ID NO: 82038 - protein, 962 aa, Arabidopsis thaliana
  peptide (1)..(962): Ceres Seq. ID no. 12663008
  misc_feature (1)..(727): Homolog of NCBI NO: 11358478 NR Description: kinesin-like protein - Arabidopsis thaliana
  misc_feature (650)..(962): Homolog of NCBI NO: 11358478 NR Description: kinesin-like protein - Arabidopsis thaliana
  misc_feature (1)..(781): Homolog of NCBI NO: 19570249 NR Description: kinesin-like protein NACK2 [Nicotiana tabacum]
  misc_feature (1)..(785): Homolog of NCBI NO: 34914660 NR Description: putative kinesin [Oryza sativa (japonica
  misc_feature (1)..(727): Homolog of NCBI NO: 22796151 NR Description: kinesin-like protein [Arabidopsis thaliana]
  misc_feature (1)..(727): Homolog of NCBI NO: 30690898 NR Description: kinesin -related protein [Arabidopsis thaliana]
  misc_feature (1)..(641): Homolog of NCBI NO: 21954474 NR Description: kinesin-like protein [Arabidopsis thaliana]
  misc_feature (17)..(420): Homolog of NCBI NO: 30698217 NR Description: kinesin heavy chain DNA binding protein-related
  misc_feature (639)..(941): Homolog of NCBI NO: 30698217 NR Description: kinesin heavy chain DNA binding protein-related
  misc_feature (11)..(632): Homolog of NCBI NO: 30693419 NR Description: expressed protein [Arabidopsis thaliana]
MDRTPAVTPGGSSRSREEKIVVTVRLRPMNKRELLAKDQVAWECVNDHTIVSKPQVQERLHHQSSFTFDKVFGPESLTENVYEDGVKNVALSALMGINATIFAYGQTSSGKTYTMRGVTEKAVNDIYNHIIKTPERDFTIKISGLEIYNENVRDLLNSDSGRALKLLDDPEKGTVVEKLVEETANNDNHLRHLISICEAQRQVGETALNDTSSRSHQIIRLTIQSTHRENSDCVRSYMASLNFVDLAGSERASQSQADGTRLREGCHINLSLMTLTTVIRKLSVGKRSGHIPYRDSKLTRILQHSLGGNARTAIICTLSPALAHVEQSRNTLYFANRAKEVTNNAHVNMVVSDKQLVKHLQKEVARLEAERRTPGPSTEKDFKIQQMEMEIGELRRQRDDAQIQLEELRQKLQGDQQQNKGLNPFESPDPPVRKCLSYSVAVTPSSENKTLNRNERARKTTMRQSMIRQSSTAPFTLMHEIRKLEHLQEQLGEEATKALEVLQKEVACHRLGNQDAAQTIAKLQAEIREMRTVKPSAMLKEVGDVIAPNKSVSANLKEEITRLHSQGSTIANLEEQLESVQKSIDKLVMSLPSNISAGDETPKTKNHHHQSKKKKLLPLTPSSASNRQNFLKSPCSPLSASRQVLDCDAENKAPQENNSSAARGATTPQGSEKETPQKGEESGDVSSREGTPGYRRSSSVNMKKMQQMFQNAAEENVRSIRAYVTELKERVAKLQYQKQLLVCQVLELEANDGAGYSVENEENTIMEDEEQNQVAWHITFIEERQQIIELWHVCHVSIIHRTQFYLLFKGDQADQIYMEVELRRLTWLEQHLAEVGNATPARNCDESVVSLSSSIKALRREREFLAKRVNSRLTPEEREELYMKWDVPLEGKQRKLQFVNKLWTDPYDSRHVQESAEIVAKLVGFCESGNISKEMFELNFAVPSDKRQWNIGWDNISNLLHL

SEQ ID NO: 82039 - protein, 934 aa, Arabidopsis thaliana
  peptide (1)..(934): Ceres Seq. ID no. 12663009
  misc_feature (1)..(699): Homolog of NCBI NO: 11358478 NR Description: kinesin-like protein - Arabidopsis thaliana
  misc_feature (622)..(934): Homolog of NCBI NO: 11358478 NR Description: kinesin-like protein - Arabidopsis thaliana
  misc_feature (1)..(753): Homolog of NCBI NO: 19570249 NR Description: kinesin-like protein NACK2 [Nicotiana tabacum]
  misc_feature (1)..(757): Homolog of NCBI NO: 34914660 NR Description: putative kinesin [Oryza sativa (japonica
  misc_feature (1)..(699): Homolog of NCBI NO: 22796151 NR Description: kinesin-like protein [Arabidopsis thaliana]
  misc_feature (1)..(699): Homolog of NCBI NO: 30690898 NR Description: kinesin -related protein [Arabidopsis thaliana]
  misc_feature (1)..(613): Homolog of NCBI NO: 21954474 NR Description: kinesin-like protein [Arabidopsis thaliana]
  misc_feature (1)..(392): Homolog of NCBI NO: 30698217 NR Description: kinesin heavy chain DNA binding protein-related
  misc_feature (611)..(913): Homolog of NCBI NO: 30698217 NR Description: kinesin heavy chain DNA binding protein-related
  misc_feature (1)..(604): Homolog of NCBI NO: 30693419 NR Description: expressed protein [Arabidopsis thaliana]
MNKRELLAKDQVAWECVNDHTIVSKPQVQERLHHQSSFTFDKVFGPESLTENVYEDGVKNVALSALMGINATIFAYGQTSSGKTYTMRGVTEKAVNDIYNHIIKTPERDFTIKISGLEIYNENVRDLLNSDSGRALKLLDDPEKGTVVEKLVEETANNDNHLRHLISICEAQRQVGETALNDTSSRSHQIIRLTIQSTHRENSDCVRSYMASLNFVDLAGSERASQSQADGTRLREGCHINLSLMTLTTVIRKLSVGKRSGHIPYRDSKLTRILQHSLGGNARTAIICTLSPALAHVEQSRNTLYFANRAKEVTNNAHVNMVVSDKQLVKHLQKEVARLEAERRTPGPSTEKDFKIQQMEMEIGELRRQRDDAQIQLEELRQKLQGDQQQNKGLNPFESPDPPVRKCLSYSVAVTPSSENKTLNRNERARKTTMRQSMIRQSSTAPFTLMHEIRKLEHLQEQLGEEATKALEVLQKEVACHRLGNQDAAQTIAKLQAEIREMRTVKPSAMLKEVGDVIAPNKSVSANLKEEITRLHSQGSTIANLEEQLESVQKSIDKLVMSLPSNISAGDETPKTKNHHHQSKKKKLLPLTPSSASNRQNFLKSPCSPLSASRQVLDCDAENKAPQENNSSAARGATTPQGSEKETPQKGEESGDVSSREGTPGYRRSSSVNMKKMQQMFQNAAEENVRSIRAYVTELKERVAKLQYQKQLLVCQVLELEANDGAGYSVENEENTIMEDEEQNQVAWHITFIEERQQIIELWHVCHVSIIHRTQFYLLFKGDQADQIYMEVELRRLTWLEQHLAEVGNATPARNCDESVVSLSSSIKALRREREFLAKRVNSRLTPEEREELYMKWDVPLEGKQRKLQFVNKLWTDPYDSRHVQESAEIVAKLVGFCESGNISKEMFELNFAVPSDKRQWNIGWDNISNLLHL

SEQ ID NO: 82040 - DNA, 2400 bp, Arabidopsis thaliana
  misc_feature (1)..(2400): Ceres Seq. ID no. 12663034
  misc_feature: MA Experiment ID: 20000173 Result: Down-regulated in Transcription
  misc_feature: MA Experiment 20000173 PARAMETER Experiment Name: At_42deg_Heat_P Parameter: Age (day) Value: 14
  misc_feature: MA Experiment 20000173 PARAMETER Experiment Name: At_42deg_Heat_P Parameter: Organism Value: A. thaliana
  misc_feature: MA Experiment 20000173 PARAMETER Experiment Name: At_42deg_Heat_P Parameter: Plant Line Value: WS
  misc_feature: MA Experiment 20000173 PARAMETER Experiment Name: At_42deg_Heat_P Parameter: Temperature (deg C) Value: 42 vs. 22
  misc_feature: MA Experiment 20000173 PARAMETER Experiment Name: At_42deg_Heat_P Parameter: Timepoint (hr) Value: 6
  misc_feature: MA Experiment 20000173 PARAMETER Experiment Name: At_42deg_Heat_P Parameter: Tissue Value: Aerial
  misc_feature: MA Experiment ID: 20000180 Result: Up-regulated in Transcription
  misc_feature: MA Experiment 20000180 PARAMETER Experiment Name: At_Germinating_Seeds_P Parameter: Age (hr) Value: 24 vs. 0
  misc_feature: MA Experiment 20000180 PARAMETER Experiment Name: At_Germinating_Seeds_P Parameter: Tissue Value: Germinating Seeds
  misc_feature: MA Experiment ID: 20000234 Result: Up-regulated in Transcription
  misc_feature: MA Experiment 20000234 PARAMETER Experiment Name: At_Siliques_P Parameter: Age (day) Value: 21
  misc_feature: MA Experiment 20000234 PARAMETER Experiment Name: At_Siliques_P Parameter: Organism Value: A. thaliana
  misc_feature: MA Experiment 20000234 PARAMETER Experiment Name: At_Siliques_P Parameter: Plant Line Value: WS
  misc_feature: MA Experiment 20000234 PARAMETER Experiment Name: At_Siliques_P Parameter: Tissue Value: Less Than 5mm Siliques vs. Whole Plant
  misc_feature: MA Experiment ID: 20000264 Result: Up-regulated in Transcription
  misc_feature: MA Experiment 20000264 PARAMETER Experiment Name: At_Open_Flower_P Parameter: Age (day) Value: 21
  misc_feature: MA Experiment 20000264 PARAMETER Experiment Name: At_Open_Flower_P Parameter: Plant Line Value: WS
  misc_feature: MA Experiment 20000264 PARAMETER Experiment Name: At_Open_Flower_P Parameter: Tissue Value: Open Flower vs. Whole Plant
  misc_feature: MA Experiment ID: 20000265 Result: Up-regulated in Transcription
  misc_feature: MA Experiment 20000265 PARAMETER Experiment Name: At_Open_Flower_P Parameter: Age (day) Value: 21
  misc_feature: MA Experiment 20000265 PARAMETER Experiment Name: At_Open_Flower_P Parameter: Plant Line Value: WS
  misc_feature: MA Experiment 20000265 PARAMETER Experiment Name: At_Open_Flower_P Parameter: Tissue Value: Closed Flower vs. Whole Plant
atgccggtatctactcgatctaaggtgatgaaacaggagcgaaacgagcaagagaacacaaatctgaatcttccgttgagaaatccacatcaagggttgaaggaaaagatgagagctttgactctcttgtacgagcagcaaaagagagcctctttctctctcaggaaccctaatcataatcagtctccgaaacctgaagatcagagattcaagactcagctgcttgattcttccaagaaaggagacagatttcatcgcctggacggtaaagattctacctttgttgaagaagataccaaagagaacaatgtatttgaagcagatcggatttttggggttagttcggttcctgttaagcctagtggtgtgattaggaagctttcaatgggtaatggagctagaaacgtttcggaagctgagaaattggagagtcttaatgcttctgtgagtcggattttggtgtttgttaggcttagaccaatggggaaaaaggaaagagagaatgggtcaaggtgttgtgtcaaggttttgaataaaagagatgtttacctaacggagtttacgaatgagaatgattaccttaggcttaagaggctccgtgttcgtcatttcacttttgattcttcatttcctgaaactaccacacaacaagaggtttattccaccacaacaggagatcttgttgaagcagttcttgaaggaagaaatggttcagttttctgctacggtgctacgggagcaggcaagacttatacgatgttagggacaatggagaatccaggtgtaatggttctagcaatcaaagatttgtttgctaaagttagacagagaagcttagatgggaaccatgttgttcatctttcttatcttgaggtttataatgaaactgttagagatttgctttcacctggtagacctctcattctccgtgaagataagcagggaattgtggctgctggtctcactcaatatagagcttactcaacagatgaggttatggctttgcttcaaaggggaaatcaaaacagaactaccgagcctactcgttgcaatgaaacatcttctcgctcacatgccatccttcaggtaatagtggagtataagactagagatgcttccatgaatatcatcagccgggtaggaaagctatctctcattgatcttgcgggttctgaaagagcgctagcaactgatcaaaggacgctcagatcactggaaggtgcaaacataaacagatcacttcttgcattaagtagttgcattaacgcgcttgtggaaggcaagaaacatattccttacagaaactcaaagctcacacaactactcaaagactcactaggcggctcgtgtaacacggtgatgattgctaatataagtccaagcagtcaatcttttggtgaaacacaaaacactctccattgggctgatcgagccaaggagattcgtgtgaaggaatgtgaagtaaatgaagaggtggttcaagtgggtgaagaagaaggagctgatcaggctaagcttttgttagaacttcaaaaagagaatagtgaattgcgtgtccagctagcaaagcagcagcaaaagcttttgactctacaagcagagaacatagccgctgctaataacaacaacaacatttctctgacacctccatcaatctcatctcttatgactccaccgtctgcattaacagctcagcagaagaagaaaccaaggcattcgttgttatcagggacatgtttcacaccagaatcattgaaaaggacaaaagcagaagaagctgtgaaggaacttcagctgactgttaaggcattgaagatggagatggagagaatgaagagggaacatggtttgcagatgaagaagcaaaaagacgaattaatgaaagatctttgtagtagaaagagcgagaaaactccagaaagatgcaaagaaacaaggaggattgtcacaagagggagcttgagaccaaaggagaaggaaaaggaactgaaaagtccgagtcatcggtttgcatctccagttgcagcagctaaaaagagaagcttttgggacataaccgttgctaatactagtcctgcgttggatagaaggaaaacgagaagccacggtcttgttcatcaagaagctccttcaaaactgcttcagaattatttgcatgccactagaaacccatatcaaaccattaagggtagggaaggacgctatgcagaggtgcaattcacatcggagaaccatgcagccaagattgttcagctagcccgtctatcttacaatagaaacaagctaaaggtttataatttggagttagatctctgccgtgaggatagagctacagttgaaaacatgattgagttgaggaaaagtttatttcggataccaaactacgcggaaatattctag

SEQ ID NO: 82041 - protein, 799 aa, Arabidopsis thaliana
  peptide (1)..(799): Ceres Seq. ID no. 12663035
  misc_feature (115)..(715): Homolog of NCBI NO: 34912450 NR Description: P0681B11.29 [Oryza sativa (japonica
  misc_feature (30)..(49): Homolog of NCBI NO: 34912450 NR Description: P0681B11.29 [Oryza sativa (japonica
  misc_feature (151)..(536): Homolog of NCBI NO: 28277259 NR Description: Similar to hypothetical protein FLJ37300 [Xenopus
  misc_feature (146)..(706): Homolog of NCBI NO: 28838703 NR Description: Similar to hypothetical protein DKFZp434G2226
  misc_feature (143)..(524): Homolog of NCBI NO: 23397458 NR Description: hypothetical protein FLJ37300 [Homo sapiens]
  misc_feature (8)..(482): Homolog of NCBI NO: 23613466 NR Description: kinesin, putative [Plasmodium falciparum 3D7]
  misc_feature (180)..(635): Homolog of NCBI NO: 29421238 NR Description: kinesin [Botryotinia fuckeliana]
  misc_feature (164)..(528): Homolog of NCBI NO: 38109289 NR Description: hypothetical protein MG06839.4 [Magnaporthe
  misc_feature (197)..(623): Homolog of NCBI NO: 29421282 NR Description: kinesin [Gibberella moniliformis]
  misc_feature (154)..(663): Homolog of NCBI NO: 12053149 NR Description: hypothetical protein [Homo sapiens]
MPVSTRSKVMKQERNEQENTNLNLPLRNPHQGLKEKMRALTLLYEQQKRASFSLRNPNHNQSPKPEDQRFKTQLLDSSKKGDRFHRLDGKDSTFVEEDTKENNVFEADRIFGVSSVPVKPSGVIRKLSMGNGARNVSEAEKLESLNASVSRILVFVRLRPMGKKERENGSRCCVKVLNKRDVYLTEFTNENDYLRLKRLRVRHFTFDSSFPETTTQQEVYSTTTGDLVEAVLEGRNGSVFCYGATGAGKTYTMLGTMENPGVMVLAIKDLFAKVRQRSLDGNHVVHLSYLEVYNETVRDLLSPGRPLILREDKQGIVAAGLTQYRAYSTDEVMALLQRGNQNRTTEPTRCNETSSRSHAILQVIVEYKTRDASMNIISRVGKLSLIDLAGSERALATDQRTLRSLEGANINRSLLALSSCINALVEGKKHIPYRNSKLTQLLKDSLGGSCNTVMIANISPSSQSFGETQNTLHWADRAKEIRVKECEVNEEVVQVGEEEGADQAKLLLELQKENSELRVQLAKQQQKLLTLQAENIAAANNNNNISLTPPSISSLMTPPSALTAQQKKKPRHSLLSGTCFTPESLKRTKAEEAVKELQLTVKALKMEMERMKREHGLQMKKQKDELMKDLCSRKSEKTPERCKETRRIVTRGSLRPKEKEKELKSPSHRFASPVAAAKKRSFWDITVANTSPALDRRKTRSHGLVHQEAPSKLLQNYLHATRNPYQTIKGREGRYAEVQFTSENHAAKIVQLARLSYNRNKLKVYNLELDLCREDRATVENMIELRKSLFRIPNYAEIF

SEQ ID NO: 82042 - protein, 790 aa, Arabidopsis thaliana
  peptide (1)..(790): Ceres Seq. ID no. 12663036
  misc_feature (106)..(706): Homolog of NCBI NO: 34912450 NR Description: P0681B11.29 [Oryza sativa (japonica
  misc_feature (21)..(40): Homolog of NCBI NO: 34912450 NR Description: P0681B11.29 [Oryza sativa (japonica
  misc_feature (142)..(527): Homolog of NCBI NO: 28277259 NR Description: Similar to hypothetical protein FLJ37300 [Xenopus
  misc_feature (137)..(697): Homolog of NCBI NO: 28838703 NR Description: Similar to hypothetical protein DKFZp434G2226
  misc_feature (134)..(515): Homolog of NCBI NO: 23397458 NR Description: hypothetical protein FLJ37300 [Homo sapiens]
  misc_feature (1)..(473): Homolog of NCBI NO: 23613466 NR Description: kinesin, putative [Plasmodium falciparum 3D7]
  misc_feature (171)..(626): Homolog of NCBI NO: 29421238 NR Description: kinesin [Botryotinia fuckeliana]
  misc_feature (155)..(519): Homolog of NCBI NO: 38109289 NR Description: hypothetical protein MG06839.4 [Magnaporthe
  misc_feature (188)..(614): Homolog of NCBI NO: 29421282 NR Description: kinesin [Gibberella moniliformis]
  misc_feature (145)..(654): Homolog of NCBI NO: 12053149 NR Description: hypothetical protein [Homo sapiens]
MKQERNEQENTNLNLPLRNPHQGLKEKMRALTLLYEQQKRASFSLRNPNHNQSPKPEDQRFKTQLLDSSKKGDRFHRLDGKDSTFVEEDTKENNVFEADRIFGVSSVPVKPSGVIRKLSMGNGARNVSEAEKLESLNASVSRILVFVRLRPMGKKERENGSRCCVKVLNKRDVYLTEFTNENDYLRLKRLRVRHFTFDSSFPETTTQQEVYSTTTGDLVEAVLEGRNGSVFCYGATGAGKTYTMLGTMENPGVMVLAIKDLFAKVRQRSLDGNHVVHLSYLEVYNETVRDLLSPGRPLILREDKQGIVAAGLTQYRAYSTDEVMALLQRGNQNRTTEPTRCNETSSRSHAILQVIVEYKTRDASMNIISRVGKLSLIDLAGSERALATDQRTLRSLEGANINRSLLALSSCINALVEGKKHIPYRNSKLTQLLKDSLGGSCNTVMIANISPSSQSFGETQNTLHWADRAKEIRVKECEVNEEVVQVGEEEGADQAKLLLELQKENSELRVQLAKQQQKLLTLQAENIAAANNNNNISLTPPSISSLMTPPSALTAQQKKKPRHSLLSGTCFTPESLKRTKAEEAVKELQLTVKALKMEMERMKREHGLQMKKQKDELMKDLCSRKSEKTPERCKETRRIVTRGSLRPKEKEKELKSPSHRFASPVAAAKKRSFWDITVANTSPALDRRKTRSHGLVHQEAPSKLLQNYLHATRNPYQTIKGREGRYAEVQFTSENHAAKIVQLARLSYNRNKLKVYNLELDLCREDRATVENMIELRKSLFRIPNYAEIF

SEQ ID NO: 82043 - protein, 763 aa, Arabidopsis thaliana
  peptide (1)..(763): Ceres Seq. ID no. 12663037
  misc_feature (79)..(679): Homolog of NCBI NO: 34912450 NR Description: P0681B11.29 [Oryza sativa (japonica
  misc_feature (1)..(13): Homolog of NCBI NO: 34912450 NR Description: P0681B11.29 [Oryza sativa (japonica
  misc_feature (115)..(500): Homolog of NCBI NO: 28277259 NR Description: Similar to hypothetical protein FLJ37300 [Xenopus
  misc_feature (110)..(670): Homolog of NCBI NO: 28838703 NR Description: Similar to hypothetical protein DKFZp434G2226
  misc_feature (107)..(488): Homolog of NCBI NO: 23397458 NR Description: hypothetical protein FLJ37300 [Homo sapiens]
  misc_feature (1)..(446): Homolog of NCBI NO: 23613466 NR Description: kinesin, putative [Plasmodium falciparum 3D7]
  misc_feature (144)..(599): Homolog of NCBI NO: 29421238 NR Description: kinesin [Botryotinia fuckeliana]
  misc_feature (128)..(492): Homolog of NCBI NO: 38109289 NR Description: hypothetical protein MG06839.4 [Magnaporthe
  misc_feature (161)..(587): Homolog of NCBI NO: 29421282 NR Description: kinesin [Gibberella moniliformis]
  misc_feature (118)..(627): Homolog of NCBI NO: 12053149 NR Description: hypothetical protein [Homo sapiens]
MRALTLLYEQQKRASFSLRNPNHNQSPKPEDQRFKTQLLDSSKKGDRFHRLDGKDSTFVEEDTKENNVFEADRIFGVSSVPVKPSGVIRKLSMGNGARNVSEAEKLESLNASVSRILVFVRLRPMGKKERENGSRCCVKVLNKRDVYLTEFTNENDYLRLKRLRVRHFTFDSSFPETTTQQEVYSTTTGDLVEAVLEGRNGSVFCYGATGAGKTYTMLGTMENPGVMVLAIKDLFAKVRQRSLDGNHVVHLSYLEVYNETVRDLLSPGRPLILREDKQGIVAAGLTQYRAYSTDEVMALLQRGNQNRTTEPTRCNETSSRSHAILQVIVEYKTRDASMNIISRVGKLSLIDLAGSERALATDQRTLRSLEGANINRSLLALSSCINALVEGKKHIPYRNSKLTQLLKDSLGGSCNTVMIANISPSSQSFGETQNTLHWADRAKEIRVKECEVNEEVVQVGEEEGADQAKLLLELQKENSELRVQLAKQQQKLLTLQAENIAAANNNNNISLTPPSISSLMTPPSALTAQQKKKPRHSLLSGTCFTPESLKRTKAEEAVKELQLTVKALKMEMERMKREHGLQMKKQKDELMKDLCSRKSEKTPERCKETRRIVTRGSLRPKEKEKELKSPSHRFASPVAAAKKRSFWDITVANTSPALDRRKTRSHGLVHQEAPSKLLQNYLHATRNPYQTIKGREGRYAEVQFTSENHAAKIVQLARLSYNRNKLKVYNLELDLCREDRATVENMIELRKSLFRIPNYAEIF

SEQ ID NO: 82044 - DNA, 1146 bp, Arabidopsis thaliana
  misc_feature (1)..(1146): Ceres Seq. ID no. 12663046
  misc_feature: MA Experiment ID: 20000234 Result: Down-regulated in Transcription
  misc_feature: MA Experiment 20000234 PARAMETER Experiment Name: At_Siliques_P Parameter: Age (day) Value: 21
  misc_feature: MA Experiment 20000234 PARAMETER Experiment Name: At_Siliques_P Parameter: Organism Value: A. thaliana
  misc_feature: MA Experiment 20000234 PARAMETER Experiment Name: At_Siliques_P Parameter: Plant Line Value: WS
  misc_feature: MA Experiment 20000234 PARAMETER Experiment Name: At_Siliques_P Parameter: Tissue Value: Less Than 5mm Siliques vs. Whole Plant
  misc_feature: MA Experiment ID: 20000235 Result: Down-regulated in Transcription
  misc_feature: MA Experiment 20000235 PARAMETER Experiment Name: At_Siliques_P Parameter: Age (day) Value: 21
  misc_feature: MA Experiment 20000235 PARAMETER Experiment Name: At_Siliques_P Parameter: Organism Value: A. thaliana
  misc_feature: MA Experiment 20000235 PARAMETER Experiment Name: At_Siliques_P Parameter: Plant Line Value: WS
  misc_feature: MA Experiment 20000235 PARAMETER Experiment Name: At_Siliques_P Parameter: Tissue Value: 5-10mm Siliques vs. Whole Plant
  misc_feature: MA Experiment ID: 20000265 Result: Down-regulated in Transcription
  misc_feature: MA Experiment 20000265 PARAMETER Experiment Name: At_Open_Flower_P Parameter: Age (day) Value: 21
  misc_feature: MA Experiment 20000265 PARAMETER Experiment Name: At_Open_Flower_P Parameter: Plant Line Value: WS
  misc_feature: MA Experiment 20000265 PARAMETER Experiment Name: At_Open_Flower_P Parameter: Tissue Value: Closed Flower vs. Whole Plant
  misc_feature: MA Experiment ID: 20000286 Result: Down-regulated in Transcription
  misc_feature: MA Experiment 20000286 PARAMETER Experiment Name: At_Open_Flower_P Parameter: Age (day) Value: 21
  misc_feature: MA Experiment 20000286 PARAMETER Experiment Name: At_Open_Flower_P Parameter: Plant Line Value: WS
  misc_feature: MA Experiment 20000286 PARAMETER Experiment Name: At_Open_Flower_P Parameter: Tissue Value: Half Open vs. Whole Plant
  misc_feature: MA Experiment ID: 20000438 Result: Down-regulated in Transcription
  misc_feature: MA Experiment 20000438 PARAMETER Experiment Name: At_Shoots__P Parameter: Age (day) Value: 14
  misc_feature: MA Experiment 20000438 PARAMETER Experiment Name: At_Shoots__P Parameter: Tissue Value: Shoots vs. Whole Plant
  misc_feature: MA Experiment ID: 20000453 Result: Down-regulated in Transcription
  misc_feature: MA Experiment 20000453 PARAMETER Experiment Name: At_100uM_ABA_P Parameter: Age (day) Value: 15
  misc_feature: MA Experiment 20000453 PARAMETER Experiment Name: At_100uM_ABA_P Parameter: Organism Value: A. thaliana
  misc_feature: MA Experiment 20000453 PARAMETER Experiment Name: At_100uM_ABA_P Parameter: Plant Line Value: WS
  misc_feature: MA Experiment 20000453 PARAMETER Experiment Name: At_100uM_ABA_P Parameter: Timepoint (hr) Value: 24
  misc_feature: MA Experiment 20000453 PARAMETER Experiment Name: At_100uM_ABA_P Parameter: Tissue Value: Aerial
  misc_feature: MA Experiment 20000453 PARAMETER Experiment Name: At_100uM_ABA_P Parameter: Treatment Value: 100uM ABA vs. No Treatment
  misc_feature: MA Experiment ID: 20000527 Result: Down-regulated in Transcription
  misc_feature: MA Experiment 20000527 PARAMETER Experiment Name: At_10percent_PEG_P Parameter: Age (day) Value: 20
  misc_feature: MA Experiment 20000527 PARAMETER Experiment Name: At_10percent_PEG_P Parameter: Organism Value: A. thaliana
  misc_feature: MA Experiment 20000527 PARAMETER Experiment Name: At_10percent_PEG_P Parameter: Plant Line Value: WS
  misc_feature: MA Experiment 20000527 PARAMETER Experiment Name: At_10percent_PEG_P Parameter: Timepoint (day) Value: 20
  misc_feature: MA Experiment 20000527 PARAMETER Experiment Name: At_10percent_PEG_P Parameter: Tissue Value: Whole Plant
  misc_feature: MA Experiment 20000527 PARAMETER Experiment Name: At_10percent_PEG_P Parameter: Treatment Value: 10percent PEG vs. No Treatment
  misc_feature: MA Experiment ID: 20000573 Result: Down-regulated in Transcription
  misc_feature: MA Experiment 20000573 PARAMETER Experiment Name: At_100uM_ABA_Mutants__P Parameter: Organism Value: A. thaliana
  misc_feature: MA Experiment 20000573 PARAMETER Experiment Name: At_100uM_ABA_Mutants__P Parameter: Plant Line Value: CS22 vs. Ler wt
  misc_feature: MA Experiment 20000573 PARAMETER Experiment Name: At_100uM_ABA_Mutants__P Parameter: Timepoint (hr) Value: N/A
  misc_feature: MA Experiment 20000573 PARAMETER Experiment Name: At_100uM_ABA_Mutants__P Parameter: Tissue Value: Whole Plant
  misc_feature: MA Experiment 20000573 PARAMETER Experiment Name: At_100uM_ABA_Mutants__P Parameter: Treatment Value: None
  misc_feature: MA Experiment ID: 20000574 Result: Down-regulated in Transcription
  misc_feature: MA Experiment 20000574 PARAMETER Experiment Name: At_100uM_ABA_Mutants__P Parameter: Organism Value: A. thaliana
  misc_feature: MA Experiment 20000574 PARAMETER Experiment Name: At_100uM_ABA_Mutants__P Parameter: Plant Line Value: CS23 vs. Ler wt
  misc_feature: MA Experiment 20000574 PARAMETER Experiment Name: At_100uM_ABA_Mutants__P Parameter: Timepoint (hr) Value: N/A
  misc_feature: MA Experiment 20000574 PARAMETER Experiment Name: At_100uM_ABA_Mutants__P Parameter: Tissue Value: Whole Plant
  misc_feature: MA Experiment 20000574 PARAMETER Experiment Name: At_100uM_ABA_Mutants__P Parameter: Treatment Value: None
  misc_feature: MA Experiment ID: 20001451 Result: Up-regulated in Transcription
  misc_feature: MA Experiment 20001451 PARAMETER Experiment Name: At_Far-red-induction_P Parameter: Age (day) Value: 7
  misc_feature: MA Experiment 20001451 PARAMETER Experiment Name: At_Far-red-induction_P Parameter: Light Value: Far-red vs. White
  misc_feature: MA Experiment 20001451 PARAMETER Experiment Name: At_Far-red-induction_P Parameter: Organism Value: A. thaliana
  misc_feature: MA Experiment 20001451 PARAMETER Experiment Name: At_Far-red-induction_P Parameter: Plant Line Value: Columbia
  misc_feature: MA Experiment 20001451 PARAMETER Experiment Name: At_Far-red-induction_P Parameter: Timepoint (hr) Value: 24
  misc_feature: MA Experiment 20001451 PARAMETER Experiment Name: At_Far-red-induction_P Parameter: Tissue Value: Whole Plant
  misc_feature: MA Experiment ID: 20001555 Result: Up-regulated in Transcription
  misc_feature: MA Experiment 20001555 PARAMETER Experiment Name: At_Drought_Soil_Dry_P Parameter: Age (day) Value: 24
  misc_feature: MA Experiment 20001555 PARAMETER Experiment Name: At_Drought_Soil_Dry_P Parameter: Organism Value: A. thaliana
  misc_feature: MA Experiment 20001555 PARAMETER Experiment Name: At_Drought_Soil_Dry_P Parameter: Plant Line Value: WS
  misc_feature: MA Experiment 20001555 PARAMETER Experiment Name: At_Drought_Soil_Dry_P Parameter: Post Timepoint (hr) Value: None
  misc_feature: MA Experiment 20001555 PARAMETER Experiment Name: At_Drought_Soil_Dry_P Parameter: Post-Treatment Value: None
  misc_feature: MA Experiment 20001555 PARAMETER Experiment Name: At_Drought_Soil_Dry_P Parameter: Timepoint (day) Value: 10
  misc_feature: MA Experiment 20001555 PARAMETER Experiment Name: At_Drought_Soil_Dry_P Parameter: Treatment Value: Drought vs. No Drought
  misc_feature: MA Experiment ID: 20001556 Result: Up-regulated in Transcription
  misc_feature: MA Experiment 20001556 PARAMETER Experiment Name: At_Drought_Soil_Dry_P Parameter: Age (day) Value: 26
  misc_feature: MA Experiment 20001556 PARAMETER Experiment Name: At_Drought_Soil_Dry_P Parameter: Organism Value: A. thaliana
  misc_feature: MA Experiment 20001556 PARAMETER Experiment Name: At_Drought_Soil_Dry_P Parameter: Plant Line Value: WS
  misc_feature: MA Experiment 20001556 PARAMETER Experiment Name: At_Drought_Soil_Dry_P Parameter: Post Timepoint (hr) Value: None
  misc_feature: MA Experiment 20001556 PARAMETER Experiment Name: At_Drought_Soil_Dry_P Parameter: Post-Treatment Value: None
  misc_feature: MA Experiment 20001556 PARAMETER Experiment Name: At_Drought_Soil_Dry_P Parameter: Timepoint (day) Value: 12
  misc_feature: MA Experiment 20001556 PARAMETER Experiment Name: At_Drought_Soil_Dry_P Parameter: Treatment Value: Drought vs. No Drought
  misc_feature: MA Experiment ID: 20001559 Result: Up-regulated in Transcription
  misc_feature: MA Experiment 20001559 PARAMETER Experiment Name: At_Drought_Soil_Dry_P Parameter: Age (day) Value: 28
  misc_feature: MA Experiment 20001559 PARAMETER Experiment Name: At_Drought_Soil_Dry_P Parameter: Organism Value: A. thaliana
  misc_feature: MA Experiment 20001559 PARAMETER Experiment Name: At_Drought_Soil_Dry_P Parameter: Plant Line Value: WS
  misc_feature: MA Experiment 20001559 PARAMETER Experiment Name: At_Drought_Soil_Dry_P Parameter: Post Timepoint (hr) Value: 29
  misc_feature: MA Experiment 20001559 PARAMETER Experiment Name: At_Drought_Soil_Dry_P Parameter: Post-Treatment Value: Re-Water vs. No Drought
  misc_feature: MA Experiment 20001559 PARAMETER Experiment Name: At_Drought_Soil_Dry_P Parameter: Timepoint (day) Value: 14
  misc_feature: MA Experiment 20001559 PARAMETER Experiment Name: At_Drought_Soil_Dry_P Parameter: Treatment Value: Drought vs. No Drought
  misc_feature: MA Experiment ID: 20001761 Result: Down-regulated in Transcription
  misc_feature: MA Experiment 20001761 PARAMETER Experiment Name: At_50mM_NH4NO3_L-to-H_P Parameter: Timepoint (hr) Value: 4
  misc_feature: MA Experiment 20001761 PARAMETER Experiment Name: At_50mM_NH4NO3_L-to-H_P Parameter: Tissue Value: Siliques
  misc_feature: MA Experiment 20001761 PARAMETER Experiment Name: At_50mM_NH4NO3_L-to-H_P Parameter: Treatment Value: 50mM NH4NO3 vs 100mM Mannitol
  misc_feature: MA Experiment ID: 20001904 Result: Up-regulated in Transcription
  misc_feature: MA Experiment 20001904 PARAMETER Experiment Name: At_Drought_Reproduction_P Parameter: Age (day) Value: 37
  misc_feature: MA Experiment 20001904 PARAMETER Experiment Name: At_Drought_Reproduction_P Parameter: Organism Value: A. thaliana
  misc_feature: MA Experiment 20001904 PARAMETER Experiment Name: At_Drought_Reproduction_P Parameter: Plant Line Value: WS
  misc_feature: MA Experiment 20001904 PARAMETER Experiment Name: At_Drought_Reproduction_P Parameter: Timepoint (day) Value: 7
  misc_feature: MA Experiment 20001904 PARAMETER Experiment Name: At_Drought_Reproduction_P Parameter: Tissue Value: Rosettes
  misc_feature: MA Experiment 20001904 PARAMETER Experiment Name: At_Drought_Reproduction_P Parameter: Treatment Value: Drought vs. No Drought
  misc_feature: MA Experiment ID: 20001905 Result: Up-regulated in Transcription
  misc_feature: MA Experiment 20001905 PARAMETER Experiment Name: At_Drought_Reproduction_P Parameter: Age (day) Value: 40
  misc_feature: MA Experiment 20001905 PARAMETER Experiment Name: At_Drought_Reproduction_P Parameter: Organism Value: A. thaliana
  misc_feature: MA Experiment 20001905 PARAMETER Experiment Name: At_Drought_Reproduction_P Parameter: Plant Line Value: WS
  misc_feature: MA Experiment 20001905 PARAMETER Experiment Name: At_Drought_Reproduction_P Parameter: Timepoint (day) Value: 10
  misc_feature: MA Experiment 20001905 PARAMETER Experiment Name: At_Drought_Reproduction_P Parameter: Tissue Value: Rosettes
  misc_feature: MA Experiment 20001905 PARAMETER Experiment Name: At_Drought_Reproduction_P Parameter: Treatment Value: Drought vs. No Drought
atgggggattctcctgctagttcaaatagagttaagcttcgggatgggagattcttagcttataaagaaagaggagttccaaaggaaaaggccaaatacaagatcattcttgttcatggctttggaagctccaaagatatgaacttctctgcctcaaaagagcttatagaagaacttgaggtgtacttgctattctacgaccgttctggatatggagcatcagattcaaacacaaaacgttcgttggaaagcgaagttgaagacatagcagaacttgcagatcagctggagttaggacctaagttatccggcgtggcttttgttgctccggtggttaattatcgatggccttcacttccgaagaagctaatcaaaaaagattataggacaggtattatcaaatggggtttgaggatatcaaaatatgcacctggactgttacattggtggatcattcaaaagctcttcgcttcaactagttcggtccttgaaagcaatccggtctacttcaacagccacgacatagaagtgctcaagcgaaaaactggttttcccatgcttactaaggaaaagctacgggaaagaaatgttttcgatactctaagggacgattttatggtttgtttcgggcaatgggacttcgaacccgcggatctaagcatcagtacaaagagctatattcacatctggcatggtaaggaagacaaagttgttccatttcaacttcaaagatgcattctgcagaaacaacctttgatcaactaccacgaaatcccccaaggcggacatctgatcgtacactacgatggcatttgcgatacgattctacgtgcactattgctcaaggaagaacaacaaaagctcgaaccagtgcaaggatctaacagatccgctagaacgttagctcctgaaactctcctcatcccgtcctcgctatcttcgcatccagcgacttgcgccataaccgccgtcgcatcttcaacgatcccgcaccgcgaatctttcacgatcagcgaaaacagagccggaatcgcgccgagagagatcatcgtcgatcggttcatcggatacagagcgatcgcgaagagtgccttgagcgagtctttgatcgatcgaggatgcgaatctggatatctaatgatgtga

SEQ ID NO: 82045 - protein, 381 aa, Arabidopsis thaliana
  peptide (1)..(381): Ceres Seq. ID no. 12663047
  misc_feature (101)..(284): Pfam Name: alpha/beta hydrolase fold Pfam Description: alpha/beta hydrolase fold
  misc_feature (1)..(381): Homolog of NCBI NO: 25407040 NR Description: protein T23G18.18 [imported] - Arabidopsis >gi|6579201|gb|AAF18244.1|AC011438_6 T23G18.18 [Arabidopsis
  misc_feature (1)..(288): Homolog of NCBI NO: 15223177 NR Description: unknown protein; protein id: At1g08310.1
  misc_feature (12)..(167): Homolog of NCBI NO: 6664302 NR Description: T27G7.1 [Arabidopsis thaliana]
  misc_feature (190)..(288): Homolog of NCBI NO: 6664302 NR Description: T27G7.1 [Arabidopsis thaliana]
  misc_feature (108)..(290): Homolog of NCBI NO: 15229984 NR Description: putative protein; protein id: At3g44510.1
  misc_feature (101)..(281): Homolog of NCBI NO: 15242253 NR Description: putative protein; protein id: At5g22460.1, by cDNA: gi_15292740, supported by cDNA: gi_20465594 [Arabidopsis
  misc_feature (5)..(101): Homolog of NCBI NO: 15242253 NR Description: putative protein; protein id: At5g22460.1, by cDNA: gi_15292740, supported by cDNA: gi_20465594 [Arabidopsis
  misc_feature (101)..(288): Homolog of NCBI NO: 34908462 NR Description: P0683F02.22 [Oryza sativa (japonica
  misc_feature (2)..(101): Homolog of NCBI NO: 34908462 NR Description: P0683F02.22 [Oryza sativa (japonica
  misc_feature (101)..(279): Homolog of NCBI NO: 22122901 NR Description: hypothetical protein [Oryza sativa (japonica
MGDSPASSNRVKLRDGRFLAYKERGVPKEKAKYKIILVHGFGSSKDMNFSASKELIEELEVYLLFYDRSGYGASDSNTKRSLESEVEDIAELADQLELGPKLSGVAFVAPVVNYRWPSLPKKLIKKDYRTGIIKWGLRISKYAPGLLHWWIIQKLFASTSSVLESNPVYFNSHDIEVLKRKTGFPMLTKEKLRERNVFDTLRDDFMVCFGQWDFEPADLSISTKSYIHIWHGKEDKVVPFQLQRCILQKQPLINYHEIPQGGHLIVHYDGICDTILRALLLKEEQQKLEPVQGSNRSARTLAPETLLIPSSLSSHPATCAITAVASSTIPHRESFTISENRAGIAPREIIVDRFIGYRAIAKSALSESLIDRGCESGYLMM

SEQ ID NO: 82046 - protein, 335 aa, Arabidopsis thaliana
  peptide (1)..(335): Ceres Seq. ID no. 12663048
  misc_feature (55)..(238): Pfam Name: alpha/beta hydrolase fold Pfam Description: alpha/beta hydrolase fold
  misc_feature (1)..(335): Homolog of NCBI NO: 25407040 NR Description: protein T23G18.18 [imported] - Arabidopsis >gi|6579201|gb|AAF18244.1|AC011438_6 T23G18.18 [Arabidopsis
  misc_feature (1)..(242): Homolog of NCBI NO: 15223177 NR Description: unknown protein; protein id: At1g08310.1
  misc_feature (1)..(121): Homolog of NCBI NO: 6664302 NR Description: T27G7.1 [Arabidopsis thaliana]
  misc_feature (144)..(242): Homolog of NCBI NO: 6664302 NR Description: T27G7.1 [Arabidopsis thaliana]
  misc_feature (62)..(244): Homolog of NCBI NO: 15229984 NR Description: putative protein; protein id: At3g44510.1
  misc_feature (55)..(235): Homolog of NCBI NO: 15242253 NR Description: putative protein; protein id: At5g22460.1, by cDNA: gi_15292740, supported by cDNA: gi_20465594 [Arabidopsis
  misc_feature (1)..(55): Homolog of NCBI NO: 15242253 NR Description: putative protein; protein id: At5g22460.1, by cDNA: gi_15292740, supported by cDNA: gi_20465594 [Arabidopsis
  misc_feature (55)..(242): Homolog of NCBI NO: 34908462 NR Description: P0683F02.22 [Oryza sativa (japonica
  misc_feature (1)..(55): Homolog of NCBI NO: 34908462 NR Description: P0683F02.22 [Oryza sativa (japonica
  misc_feature (55)..(233): Homolog of NCBI NO: 22122901 NR Description: hypothetical protein [Oryza sativa (japonica
MNFSASKELIEELEVYLLFYDRSGYGASDSNTKRSLESEVEDIAELADQLELGPKLSGVAFVAPVVNYRWPSLPKKLIKKDYRTGIIKWGLRISKYAPGLLHWWIIQKLFASTSSVLESNPVYFNSHDIEVLKRKTGFPMLTKEKLRERNVFDTLRDDFMVCFGQWDFEPADLSISTKSYIHIWHGKEDKVVPFQLQRCILQKQPLINYHEIPQGGHLIVHYDGICDTILRALLLKEEQQKLEPVQGSNRSARTLAPETLLIPSSLSSHPATCAITAVASSTIPHRESFTISENRAGIAPREIIVDRFIGYRAIAKSALSESLIDRGCESGYLMM

SEQ ID NO: 82047 - protein, 196 aa, Arabidopsis thaliana
  peptide (1)..(196): Ceres Seq. ID no. 12663049
  misc_feature (1)..(99): Pfam Name: alpha/beta hydrolase fold Pfam Description: alpha/beta hydrolase fold
  misc_feature (1)..(196): Homolog of NCBI NO: 25407040 NR Description: protein T23G18.18 [imported] - Arabidopsis >gi|6579201|gb|AAF18244.1|AC011438_6 T23G18.18 [Arabidopsis
  misc_feature (1)..(103): Homolog of NCBI NO: 15223177 NR Description: unknown protein; protein id: At1g08310.1
  misc_feature (5)..(103): Homolog of NCBI NO: 6664302 NR Description: T27G7.1 [Arabidopsis thaliana]
  misc_feature (1)..(105): Homolog of NCBI NO: 15229984 NR Description: putative protein; protein id: At3g44510.1
  misc_feature (1)..(96): Homolog of NCBI NO: 15242253 NR Description: putative protein; protein id: At5g22460.1, by cDNA: gi_15292740, supported by cDNA: gi_20465594 [Arabidopsis
  misc_feature (1)..(103): Homolog of NCBI NO: 34908462 NR Description: P0683F02.22 [Oryza sativa (japonica
  misc_feature (1)..(94): Homolog of NCBI NO: 22122901 NR Description: hypothetical protein [Oryza sativa (japonica
  misc_feature (1)..(95): Homolog of NCBI NO: 37536164 NR Description: putative alpha/beta hydrolase [Oryza sativa
  misc_feature (1)..(94): Homolog of NCBI NO: 37536162 NR Description: putative alpha/beta hydrolase [Oryza sativa
  misc_feature (1)..(99): Homolog of NCBI NO: 38346334 NR Description: OSJNBa0073L04.5 [Oryza sativa (japonica
MLTKEKLRERNVFDTLRDDFMVCFGQWDFEPADLSISTKSYIHIWHGKEDKVVPFQLQRCILQKQPLINYHEIPQGGHLIVHYDGICDTILRALLLKEEQQKLEPVQGSNRSARTLAPETLLIPSSLSSHPATCAITAVASSTIPHRESFTISENRAGIAPREIIVDRFIGYRAIAKSALSESLIDRGCESGYLMM

SEQ ID NO: 82048 - DNA, 3015 bp, Arabidopsis thaliana
  misc_feature (1)..(3015): Ceres Seq. ID no. 12663066
  misc_feature: MA Experiment ID: 20000495 Result: Down-regulated in Transcription
  misc_feature: MA Experiment 20000495 PARAMETER Experiment Name: At_Guard_Cells_P Parameter: Harvest Date Value: 8/2/2002
  misc_feature: MA Experiment 20000495 PARAMETER Experiment Name: At_Guard_Cells_P Parameter: Organism Value: A. thaliana
  misc_feature: MA Experiment 20000495 PARAMETER Experiment Name: At_Guard_Cells_P Parameter: Tissue Value: Guard Cells vs. Leaves
  misc_feature: MA Experiment ID: 20000496 Result: Down-regulated in Transcription
  misc_feature: MA Experiment 20000496 PARAMETER Experiment Name: At_Guard_Cells_P Parameter: Harvest Date Value: 7/19/2002
  misc_feature: MA Experiment 20000496 PARAMETER Experiment Name: At_Guard_Cells_P Parameter: Organism Value: Canola
  misc_feature: MA Experiment 20000496 PARAMETER Experiment Name: At_Guard_Cells_P Parameter: Tissue Value: Guard Cells vs. Leaves
atggatgaagattcgtctatggtggctgacaacgatcaggatcgtgagtttcagagccttgatggaggccaatctccttcgcctatggaaagagaaacgcctcagcagatgaacgaccaatcacctcctcctgaaggcggatcggtgcctacgccgccgccttcggatcctaatccggcaacttctcagcagcaagcggctgcggttgttggacaagagcagcagccggcgctagttgttggtccgaggtgtgcacctacgtattcggtggtggatgctatgatggataaaaaagaggatgggcctggccctaggtgtggtcacaccttgacggctgtgcctgctgttggtgatgaaggaacgcctggttatattggtcctcgtcttgtattgtttggtggtgcgacggctcttgagggaaattctggtggcaccggaactcctacttcagctggaagtgccggcattcggctagctggggcaactgctgatgttcattgttatgatgtactttctaataagtggactaggcttacaccttttggagaaccaccaaccccgagggccgcacatgttgcaactgcagtcgggaccatggtagttattcagggtggaattggtcctgctggtttatcggctgaagaccttcatgttcttgatctcactcaacaacggccacgatggcacagggttgttgttcagggtcctggaccaggacctcgttatggacatgtcatggcactcgtggggcaaaggtatctcatggcaattggtggaaatgatggaaaacgtccacttgctgatgtatgggccttggatactgccgccaagccttatgaatggcgtaagttggaaccagaaggggaaggtccacctccctgcatgtatgcaactgcaagtgcgcgctccgatggtcttcttctcctctgtggtggaagggatgcaaacagtgtgcctctggccagtgcatatggacttgcgaagcacagagatggacgttgggaatgggccatagcccctggtgtctcaccatcttccagatatcagcatgcagcagtctttgtaaatgcaagacttcatgtgtccggtggggcacttggtggtggacgcatggttgaagactcatccagtgttgcagtattggatactgcagcaggtgtatggtgtgatacaaaatcagttgttactagtcctagaactggtaggtatagtgccgatgcagctggtggcgatgcttcggttgagctgactaggcggtgtaggcatgctgctgctgcagtcggtgatttgatatttatctacggtggtttacgtggagctgcggcaacaaattctccaccaggtcgattacctggaaggtatggtttttcagatgaaaggaacagggagttatctgaatcagctgctgatggcgctgtggtgctgggaagccctgttgcaccccctgtaaatggtgatatgcatactgatattagccctgaaaatgcattacttccaggaactcgtgatgaatttagtgacaatgatccatcaccactttgtaggagaacgaataagggtgtggagtatcttgttgaagcatcagcagcggaagctgaggcgatcagtgcgacgttggctgctgccaaggcaagacaagtcaatggtgaagttgaactccctgatagggattgtggtgcagaggctacacccagtgggaaacctacattttcgctaatcaagccagattctatgggctcaatgagtgttacacctgcagggattcgtcttcatcatagagctgtggtggttgctgctgaaactggtggcgccttaggtggaatggttagacagttatccattgatcaatttgaaaatgagggacggcgtgtcagttatgggacaccagaaagtgcaacagcagcaaggaaactattagatcgacaaatgtcaatcaacagtgttccaaagaaggttatagctcatcttttgaagcctcgtggttggaagcctcctgttcgacggcagtttttcctagattgcaatgaaatagctgatctttgtgatagtgcagaacgtatcttcgcaagtgaaccgactgtattacagcttaaagctcctatcaaaatatttggtgatctgcatgggcagtttggggatcttatgcgcctttttgatgaatatggttcaccatctacagctggagacatatcatatatcgactacctcttcttaggggactatgttgatcggggtcaacacagtctagaaacaatctcccttctacttgcactaaaggttgagtaccagcataatgtacacttaattcggggaaaccatgaagctgcagatatcaatgccctttttggcttccggatagagtgtattgagcgaatgggtgaacgtgatggaatctgggtgtggcaccgaataaatcgtttattcaattggctacctcttgctgcatcgattgagaagaaaattatctgtatgcatgggggtattggtcgttctataaatcatgtggagcagatagaaaatattcaacgtccaattacaatggaagctggctccattgttcttatggatttattatggtcggatccaactgaaaatgacagtgtcgaaggtttaaggcccaatgctagaggccctggattggttacttttgggcctgaccgtgtcatggagttctgcaacaacaacgatcttcagttgattgtacgagcacacgaatgcgtaatggatggatttgagcgttttgctcaggggcatttgataacgctcttttctgctacaaactattgtggtactgcaaacaatgctggggctatcttggtactagggagagatcttgtagtggtacctaagctcattcatccgttacctccagcactttcatcgcctgaaacttcaccagaaagacatatagaagacacatggatgcaggagctgaacgcaaataggccagcgacgccaacccgaggacgcccacaaaattcaaatgaccgaggaggttctctggcttggatgtga

SEQ ID NO: 82049 - protein, 1004 aa, Arabidopsis thaliana
  peptide (1)..(1004): Ceres Seq. ID no. 12663067
  misc_feature (699)..(908): Pfam Name: Calcineurin-like phosphoesterase Pfam Description: Calcineurin-like phosphoesterase
  misc_feature (500)..(1004): Homolog of NCBI NO: 30679350 NR Description: phospho-ser/thr phosphatase -related [Arabidopsis
  misc_feature (85)..(439): Homolog of NCBI NO: 30679350 NR Description: phospho-ser/thr phosphatase -related [Arabidopsis
  misc_feature (500)..(1004): Homolog of NCBI NO: 22022522 NR Description: AT4g03080/T4I9_4 [Arabidopsis thaliana]
  misc_feature (85)..(439): Homolog of NCBI NO: 22022522 NR Description: AT4g03080/T4I9_4 [Arabidopsis thaliana]
  misc_feature (500)..(1004): Homolog of NCBI NO: 7488152 NR Description: probable phosphoprotein phosphatase (EC 3.1.3.16)
  misc_feature (85)..(439): Homolog of NCBI NO: 7488152 NR Description: probable phosphoprotein phosphatase (EC 3.1.3.16)
  misc_feature (651)..(982): Homolog of NCBI NO: 25513447 NR Description: probable phosphoprotein phosphatase (EC 3.1.3.16)
  misc_feature (32)..(278): Homolog of NCBI NO: 25513447 NR Description: probable phosphoprotein phosphatase (EC 3.1.3.16)
  misc_feature (562)..(615): Homolog of NCBI NO: 25513447 NR Description: probable phosphoprotein phosphatase (EC 3.1.3.16)
  misc_feature (207)..(408): Homolog of NCBI NO: 25513447 NR Description: probable phosphoprotein phosphatase (EC 3.1.3.16)
MDEDSSMVADNDQDREFQSLDGGQSPSPMERETPQQMNDQSPPPEGGSVPTPPPSDPNPATSQQQAAAVVGQEQQPALVVGPRCAPTYSVVDAMMDKKEDGPGPRCGHTLTAVPAVGDEGTPGYIGPRLVLFGGATALEGNSGGTGTPTSAGSAGIRLAGATADVHCYDVLSNKWTRLTPFGEPPTPRAAHVATAVGTMVVIQGGIGPAGLSAEDLHVLDLTQQRPRWHRVVVQGPGPGPRYGHVMALVGQRYLMAIGGNDGKRPLADVWALDTAAKPYEWRKLEPEGEGPPPCMYATASARSDGLLLLCGGRDANSVPLASAYGLAKHRDGRWEWAIAPGVSPSSRYQHAAVFVNARLHVSGGALGGGRMVEDSSSVAVLDTAAGVWCDTKSVVTSPRTGRYSADAAGGDASVELTRRCRHAAAAVGDLIFIYGGLRGAAATNSPPGRLPGRYGFSDERNRELSESAADGAVVLGSPVAPPVNGDMHTDISPENALLPGTRDEFSDNDPSPLCRRTNKGVEYLVEASAAEAEAISATLAAAKARQVNGEVELPDRDCGAEATPSGKPTFSLIKPDSMGSMSVTPAGIRLHHRAVVVAAETGGALGGMVRQLSIDQFENEGRRVSYGTPESATAARKLLDRQMSINSVPKKVIAHLLKPRGWKPPVRRQFFLDCNEIADLCDSAERIFASEPTVLQLKAPIKIFGDLHGQFGDLMRLFDEYGSPSTAGDISYIDYLFLGDYVDRGQHSLETISLLLALKVEYQHNVHLIRGNHEAADINALFGFRIECIERMGERDGIWVWHRINRLFNWLPLAASIEKKIICMHGGIGRSINHVEQIENIQRPITMEAGSIVLMDLLWSDPTENDSVEGLRPNARGPGLVTFGPDRVMEFCNNNDLQLIVRAHECVMDGFERFAQGHLITLFSATNYCGTANNAGAILVLGRDLVVVPKLIHPLPPALSSPETSPERHIEDTWMQELNANRPATPTRGRPQNSNDRGGSLAWM

SEQ ID NO: 82050 - protein, 998 aa, Arabidopsis thaliana
  peptide (1)..(998): Ceres Seq. ID no. 12663068
  misc_feature (693)..(902): Pfam Name: Calcineurin-like phosphoesterase Pfam Description: Calcineurin-like phosphoesterase
  misc_feature (494)..(998): Homolog of NCBI NO: 30679350 NR Description: phospho-ser/thr phosphatase -related [Arabidopsis
  misc_feature (79)..(433): Homolog of NCBI NO: 30679350 NR Description: phospho-ser/thr phosphatase -related [Arabidopsis
  misc_feature (494)..(998): Homolog of NCBI NO: 22022522 NR Description: AT4g03080/T4I9_4 [Arabidopsis thaliana]
  misc_feature (79)..(433): Homolog of NCBI NO: 22022522 NR Description: AT4g03080/T4I9_4 [Arabidopsis thaliana]
  misc_feature (494)..(998): Homolog of NCBI NO: 7488152 NR Description: probable phosphoprotein phosphatase (EC 3.1.3.16)
  misc_feature (79)..(433): Homolog of NCBI NO: 7488152 NR Description: probable phosphoprotein phosphatase (EC 3.1.3.16)
  misc_feature (645)..(976): Homolog of NCBI NO: 25513447 NR Description: probable phosphoprotein phosphatase (EC 3.1.3.16)
  misc_feature (26)..(272): Homolog of NCBI NO: 25513447 NR Description: probable phosphoprotein phosphatase (EC 3.1.3.16)
  misc_feature (556)..(609): Homolog of NCBI NO: 25513447 NR Description: probable phosphoprotein phosphatase (EC 3.1.3.16)
  misc_feature (201)..(402): Homolog of NCBI NO: 25513447 NR Description: probable phosphoprotein phosphatase (EC 3.1.3.16)
MVADNDQDREFQSLDGGQSPSPMERETPQQMNDQSPPPEGGSVPTPPPSDPNPATSQQQAAAVVGQEQQPALVVGPRCAPTYSVVDAMMDKKEDGPGPRCGHTLTAVPAVGDEGTPGYIGPRLVLFGGATALEGNSGGTGTPTSAGSAGIRLAGATADVHCYDVLSNKWTRLTPFGEPPTPRAAHVATAVGTMVVIQGGIGPAGLSAEDLHVLDLTQQRPRWHRVVVQGPGPGPRYGHVMALVGQRYLMAIGGNDGKRPLADVWALDTAAKPYEWRKLEPEGEGPPPCMYATASARSDGLLLLCGGRDANSVPLASAYGLAKHRDGRWEWAIAPGVSPSSRYQHAAVFVNARLHVSGGALGGGRMVEDSSSVAVLDTAAGVWCDTKSVVTSPRTGRYSADAAGGDASVELTRRCRHAAAAVGDLIFIYGGLRGAAATNSPPGRLPGRYGFSDERNRELSESAADGAVVLGSPVAPPVNGDMHTDISPENALLPGTRDEFSDNDPSPLCRRTNKGVEYLVEASAAEAEAISATLAAAKARQVNGEVELPDRDCGAEATPSGKPTFSLIKPDSMGSMSVTPAGIRLHHRAVVVAAETGGALGGMVRQLSIDQFENEGRRVSYGTPESATAARKLLDRQMSINSVPKKVIAHLLKPRGWKPPVRRQFFLDCNEIADLCDSAERIFASEPTVLQLKAPIKIFGDLHGQFGDLMRLFDEYGSPSTAGDISYIDYLFLGDYVDRGQHSLETISLLLALKVEYQHNVHLIRGNHEAADINALFGFRIECIERMGERDGIWVWHRINRLFNWLPLAASIEKKIICMHGGIGRSINHVEQIENIQRPITMEAGSIVLMDLLWSDPTENDSVEGLRPNARGPGLVTFGPDRVMEFCNNNDLQLIVRAHECVMDGFERFAQGHLITLFSATNYCGTANNAGAILVLGRDLVVVPKLIHPLPPALSSPETSPERHIEDTWMQELNANRPATPTRGRPQNSNDRGGSLAWM

SEQ ID NO: 82051 - protein, 976 aa, Arabidopsis thaliana
  peptide (1)..(976): Ceres Seq. ID no. 12663069
  misc_feature (671)..(880): Pfam Name: Calcineurin-like phosphoesterase Pfam Description: Calcineurin-like phosphoesterase
  misc_feature (472)..(976): Homolog of NCBI NO: 30679350 NR Description: phospho-ser/thr phosphatase -related [Arabidopsis
  misc_feature (57)..(411): Homolog of NCBI NO: 30679350 NR Description: phospho-ser/thr phosphatase -related [Arabidopsis
  misc_feature (472)..(976): Homolog of NCBI NO: 22022522 NR Description: AT4g03080/T4I9_4 [Arabidopsis thaliana]
  misc_feature (57)..(411): Homolog of NCBI NO: 22022522 NR Description: AT4g03080/T4I9_4 [Arabidopsis thaliana]
  misc_feature (472)..(976): Homolog of NCBI NO: 7488152 NR Description: probable phosphoprotein phosphatase (EC 3.1.3.16)
  misc_feature (57)..(411): Homolog of NCBI NO: 7488152 NR Description: probable phosphoprotein phosphatase (EC 3.1.3.16)
  misc_feature (623)..(954): Homolog of NCBI NO: 25513447 NR Description: probable phosphoprotein phosphatase (EC 3.1.3.16)
  misc_feature (4)..(250): Homolog of NCBI NO: 25513447 NR Description: probable phosphoprotein phosphatase (EC 3.1.3.16)
  misc_feature (534)..(587): Homolog of NCBI NO: 25513447 NR Description: probable phosphoprotein phosphatase (EC 3.1.3.16)
  misc_feature (179)..(380): Homolog of NCBI NO: 25513447 NR Description: probable phosphoprotein phosphatase (EC 3.1.3.16)
MERETPQQMNDQSPPPEGGSVPTPPPSDPNPATSQQQAAAVVGQEQQPALVVGPRCAPTYSVVDAMMDKKEDGPGPRCGHTLTAVPAVGDEGTPGYIGPRLVLFGGATALEGNSGGTGTPTSAGSAGIRLAGATADVHCYDVLSNKWTRLTPFGEPPTPRAAHVATAVGTMVVIQGGIGPAGLSAEDLHVLDLTQQRPRWHRVVVQGPGPGPRYGHVMALVGQRYLMAIGGNDGKRPLADVWALDTAAKPYEWRKLEPEGEGPPPCMYATASARSDGLLLLCGGRDANSVPLASAYGLAKHRDGRWEWAIAPGVSPSSRYQHAAVFVNARLHVSGGALGGGRMVEDSSSVAVLDTAAGVWCDTKSVVTSPRTGRYSADAAGGDASVELTRRCRHAAAAVGDLIFIYGGLRGAAATNSPPGRLPGRYGFSDERNRELSESAADGAVVLGSPVAPPVNGDMHTDISPENALLPGTRDEFSDNDPSPLCRRTNKGVEYLVEASAAEAEAISATLAAAKARQVNGEVELPDRDCGAEATPSGKPTFSLIKPDSMGSMSVTPAGIRLHHRAVVVAAETGGALGGMVRQLSIDQFENEGRRVSYGTPESATAARKLLDRQMSINSVPKKVIAHLLKPRGWKPPVRRQFFLDCNEIADLCDSAERIFASEPTVLQLKAPIKIFGDLHGQFGDLMRLFDEYGSPSTAGDISYIDYLFLGDYVDRGQHSLETISLLLALKVEYQHNVHLIRGNHEAADINALFGFRIECIERMGERDGIWVWHRINRLFNWLPLAASIEKKIICMHGGIGRSINHVEQIENIQRPITMEAGSIVLMDLLWSDPTENDSVEGLRPNARGPGLVTFGPDRVMEFCNNNDLQLIVRAHECVMDGFERFAQGHLITLFSATNYCGTANNAGAILVLGRDLVVVPKLIHPLPPALSSPETSPERHIEDTWMQELNANRPATPTRGRPQNSNDRGGSLAWM

SEQ ID NO: 82052 - DNA, 675 bp, Arabidopsis thaliana
  misc_feature (1)..(675): Ceres Seq. ID no. 12663147
  misc_feature: MA Experiment ID: 20000180 Result: Down-regulated in Transcription
  misc_feature: MA Experiment 20000180 PARAMETER Experiment Name: At_Germinating_Seeds_P Parameter: Age (hr) Value: 24 vs. 0
  misc_feature: MA Experiment 20000180 PARAMETER Experiment Name: At_Germinating_Seeds_P Parameter: Tissue Value: Germinating Seeds
  misc_feature: MA Experiment ID: 20000496 Result: Up-regulated in Transcription
  misc_feature: MA Experiment 20000496 PARAMETER Experiment Name: At_Guard_Cells_P Parameter: Harvest Date Value: 7/19/2002
  misc_feature: MA Experiment 20000496 PARAMETER Experiment Name: At_Guard_Cells_P Parameter: Organism Value: Canola
  misc_feature: MA Experiment 20000496 PARAMETER Experiment Name: At_Guard_Cells_P Parameter: Tissue Value: Guard Cells vs. Leaves
atggcgacggcgacggcgacggtgacgctttctttgagtgtagtatcctctgcaatatcaacccgtcgtgctctagccatcgatttccaggtggttgcagatataatgttgaagcaagtggttgccaagtattctataggtaaagcggcgatttatggaagtaacagagaaaagcttagacctttcatgtgccaaaccagttgtcgattccacaatggacggactgtttttgcaccaagaagcttctttggtgtagaagactacgtggatgacgacacaagccggccatacacataccaaaaagagaaaaagtcgaagaatccagacaagcatgtgtcgttcaagcaacgaacagttgcatacatggagccgttcactctagatgtcttcatctcaaagcgctttgtttcggcatctctcacgcaccgtgttacatgtaggcaagttgctgttgcgggaacaaactctaaagacgtaaaagctgttctgaggtcaagatgtgatatcccggcatgtatgtccatagggaggatcttgtctgagcgtgcaaaagaagctgatgtgtacacggcttcttatacgccaagggaccaagacaagtttgaagggaaaatcagagctgttgtccagtcccttattgataacggaattgatgttaaaatttatctcgattag

SEQ ID NO: 82053 - protein, 224 aa, Arabidopsis thaliana
  peptide (1)..(224): Ceres Seq. ID no. 12663148
  misc_feature (101)..(217): Pfam Name: Ribosomal L18p/L5e family Pfam Description: Ribosomal L18p/L5e family
  misc_feature (36)..(224): Homolog of NCBI NO: 30680844 NR Description: expressed protein [Arabidopsis thaliana] unknown protein [Arabidopsis thaliana]
  misc_feature (69)..(224): Homolog of NCBI NO: 37536826 NR Description: hypothetical protein [Oryza sativa (japonica group)] >gi|18873848|gb|AAL79794.1| hypothetical protein [Oryza >gi|31433497|gb|AAP55002.1| hypothetical protein [Oryza sativa
  misc_feature (106)..(223): Homolog of NCBI NO: 15229493 NR Description: hypothetical protein; protein id: At3g22450.1
  misc_feature (97)..(223): Homolog of NCBI NO: 22094358 NR Description: hypothetical protein [Oryza sativa (japonica
  misc_feature (105)..(217): Homolog of NCBI NO: 18402538 NR Description: expressed protein; protein id: At3g20230.1, by cDNA: 256294. [Arabidopsis thaliana] gene_id:MAL21.25~unknown protein [Arabidopsis thaliana]
  misc_feature (117)..(217): Homolog of NCBI NO: 15241056 NR Description: putative protein; protein id: At5g27820.1, by cDNA: 20143. [Arabidopsis thaliana]
MATATATVTLSLSVVSSAISTRRALAIDFQVVADIMLKQVVAKYSIGKAAIYGSNREKLRPFMCQTSCRFHNGRTVFAPRSFFGVEDYVDDDTSRPYTYQKEKKSKNPDKHVSFKQRTVAYMEPFTLDVFISKRFVSASLTHRVTCRQVAVAGTNSKDVKAVLRSRCDIPACMSIGRILSERAKEADVYTASYTPRDQDKFEGKIRAVVQSLIDNGIDVKIYLD

SEQ ID NO: 82054 - protein, 189 aa, Arabidopsis thaliana
  peptide (1)..(189): Ceres Seq. ID no. 12663149
  misc_feature (66)..(182): Pfam Name: Ribosomal L18p/L5e family Pfam Description: Ribosomal L18p/L5e family
  misc_feature (1)..(189): Homolog of NCBI NO: 30680844 NR Description: expressed protein [Arabidopsis thaliana] unknown protein [Arabidopsis thaliana]
  misc_feature (34)..(189): Homolog of NCBI NO: 37536826 NR Description: hypothetical protein [Oryza sativa (japonica group)] >gi|18873848|gb|AAL79794.1| hypothetical protein [Oryza >gi|31433497|gb|AAP55002.1| hypothetical protein [Oryza sativa
  misc_feature (71)..(188): Homolog of NCBI NO: 15229493 NR Description: hypothetical protein; protein id: At3g22450.1
  misc_feature (62)..(188): Homolog of NCBI NO: 22094358 NR Description: hypothetical protein [Oryza sativa (japonica
  misc_feature (70)..(182): Homolog of NCBI NO: 18402538 NR Description: expressed protein; protein id: At3g20230.1, by cDNA: 256294. [Arabidopsis thaliana] gene_id:MAL21.25~unknown protein [Arabidopsis thaliana]
  misc_feature (82)..(182): Homolog of NCBI NO: 15241056 NR Description: putative protein; protein id: At5g27820.1, by cDNA: 20143. [Arabidopsis thaliana]
MLKQVVAKYSIGKAAIYGSNREKLRPFMCQTSCRFHNGRTVFAPRSFFGVEDYVDDDTSRPYTYQKEKKSKNPDKHVSFKQRTVAYMEPFTLDVFISKRFVSASLTHRVTCRQVAVAGTNSKDVKAVLRSRCDIPACMSIGRILSERAKEADVYTASYTPRDQDKFEGKIRAVVQSLIDNGIDVKIYLD

SEQ ID NO: 82055 - protein, 162 aa, Arabidopsis thaliana
  peptide (1)..(162): Ceres Seq. ID no. 12663150
  misc_feature (39)..(155): Pfam Name: Ribosomal L18p/L5e family Pfam Description: Ribosomal L18p/L5e family
  misc_feature (1)..(162): Homolog of NCBI NO: 30680844 NR Description: expressed protein [Arabidopsis thaliana] unknown protein [Arabidopsis thaliana]
  misc_feature (7)..(162): Homolog of NCBI NO: 37536826 NR Description: hypothetical protein [Oryza sativa (japonica group)] >gi|18873848|gb|AAL79794.1| hypothetical protein [Oryza >gi|31433497|gb|AAP55002.1| hypothetical protein [Oryza sativa
  misc_feature (44)..(161): Homolog of NCBI NO: 15229493 NR Description: hypothetical protein; protein id: At3g22450.1
  misc_feature (35)..(161): Homolog of NCBI NO: 22094358 NR Description: hypothetical protein [Oryza sativa (japonica
  misc_feature (43)..(155): Homolog of NCBI NO: 18402538 NR Description: expressed protein; protein id: At3g20230.1, by cDNA: 256294. [Arabidopsis thaliana] gene_id:MAL21.25~unknown protein [Arabidopsis thaliana]
  misc_feature (55)..(155): Homolog of NCBI NO: 15241056 NR Description: putative protein; protein id: At5g27820.1, by cDNA: 20143. [Arabidopsis thaliana]
MCQTSCRFHNGRTVFAPRSFFGVEDYVDDDTSRPYTYQKEKKSKNPDKHVSFKQRTVAYMEPFTLDVFISKRFVSASLTHRVTCRQVAVAGTNSKDVKAVLRSRCDIPACMSIGRILSERAKEADVYTASYTPRDQDKFEGKIRAVVQSLIDNGIDVKIYLD

SEQ ID NO: 82056 - DNA, 1443 bp, Arabidopsis thaliana
  misc_feature (1)..(1443): Ceres Seq. ID no. 12663151
  misc_feature: MA Experiment ID: 20000173 Result: Down-regulated in Transcription
  misc_feature: MA Experiment 20000173 PARAMETER Experiment Name: At_42deg_Heat_P Parameter: Age (day) Value: 14
  misc_feature: MA Experiment 20000173 PARAMETER Experiment Name: At_42deg_Heat_P Parameter: Organism Value: A. thaliana
  misc_feature: MA Experiment 20000173 PARAMETER Experiment Name: At_42deg_Heat_P Parameter: Plant Line Value: WS
  misc_feature: MA Experiment 20000173 PARAMETER Experiment Name: At_42deg_Heat_P Parameter: Temperature (deg C) Value: 42 vs. 22
  misc_feature: MA Experiment 20000173 PARAMETER Experiment Name: At_42deg_Heat_P Parameter: Timepoint (hr) Value: 6
  misc_feature: MA Experiment 20000173 PARAMETER Experiment Name: At_42deg_Heat_P Parameter: Tissue Value: Aerial
  misc_feature: MA Experiment ID: 20000184 Result: Down-regulated in Transcription
  misc_feature: MA Experiment 20000184 PARAMETER Experiment Name: At_Shoots__P Parameter: Age (day) Value: 7
  misc_feature: MA Experiment 20000184 PARAMETER Experiment Name: At_Shoots__P Parameter: Tissue Value: Shoots vs. Whole Plant
  misc_feature: MA Experiment ID: 20000185 Result: Down-regulated in Transcription
  misc_feature: MA Experiment 20000185 PARAMETER Experiment Name: At_Roots__P Parameter: Age (day) Value: 7 vs. 21
  misc_feature: MA Experiment 20000185 PARAMETER Experiment Name: At_Roots__P Parameter: Organism Value: A. thaliana
  misc_feature: MA Experiment 20000185 PARAMETER Experiment Name: At_Roots__P Parameter: Tissue Value: Roots vs. Whole Plant
  misc_feature: MA Experiment ID: 20000227 Result: Down-regulated in Transcription
  misc_feature: MA Experiment 20000227 PARAMETER Experiment Name: At_Root-Tips-vs-Tops_P Parameter: Tissue Value: Root Tips vs. Root Tops
  misc_feature: MA Experiment ID: 20000234 Result: Down-regulated in Transcription
  misc_feature: MA Experiment 20000234 PARAMETER Experiment Name: At_Siliques_P Parameter: Age (day) Value: 21
  misc_feature: MA Experiment 20000234 PARAMETER Experiment Name: At_Siliques_P Parameter: Organism Value: A. thaliana
  misc_feature: MA Experiment 20000234 PARAMETER Experiment Name: At_Siliques_P Parameter: Plant Line Value: WS
  misc_feature: MA Experiment 20000234 PARAMETER Experiment Name: At_Siliques_P Parameter: Tissue Value: Less Than 5mm Siliques vs. Whole Plant
  misc_feature: MA Experiment ID: 20000265 Result: Down-regulated in Transcription
  misc_feature: MA Experiment 20000265 PARAMETER Experiment Name: At_Open_Flower_P Parameter: Age (day) Value: 21
  misc_feature: MA Experiment 20000265 PARAMETER Experiment Name: At_Open_Flower_P Parameter: Plant Line Value: WS
  misc_feature: MA Experiment 20000265 PARAMETER Experiment Name: At_Open_Flower_P Parameter: Tissue Value: Closed Flower vs. Whole Plant
  misc_feature: MA Experiment ID: 20000286 Result: Down-regulated in Transcription
  misc_feature: MA Experiment 20000286 PARAMETER Experiment Name: At_Open_Flower_P Parameter: Age (day) Value: 21
  misc_feature: MA Experiment 20000286 PARAMETER Experiment Name: At_Open_Flower_P Parameter: Plant Line Value: WS
  misc_feature: MA Experiment 20000286 PARAMETER Experiment Name: At_Open_Flower_P Parameter: Tissue Value: Half Open vs. Whole Plant
  misc_feature: MA Experiment ID: 20000439 Result: Down-regulated in Transcription
  misc_feature: MA Experiment 20000439 PARAMETER Experiment Name: At_Roots__P Parameter: Age (day) Value: 14 vs. 21
  misc_feature: MA Experiment 20000439 PARAMETER Experiment Name: At_Roots__P Parameter: Organism Value: A. thaliana
  misc_feature: MA Experiment 20000439 PARAMETER Experiment Name: At_Roots__P Parameter: Tissue Value: Roots vs. Whole Plant
  misc_feature: MA Experiment ID: 20000451 Result: Down-regulated in Transcription
  misc_feature: MA Experiment 20000451 PARAMETER Experiment Name: At_CS6879_Shoots-Roots_P Parameter: Age (day) Value: 14
  misc_feature: MA Experiment 20000451 PARAMETER Experiment Name: At_CS6879_Shoots-Roots_P Parameter: Organism Value: A. thaliana
  misc_feature: MA Experiment 20000451 PARAMETER Experiment Name: At_CS6879_Shoots-Roots_P Parameter: Plant Line Value: CS6879 vs. WS
  misc_feature: MA Experiment 20000451 PARAMETER Experiment Name: At_CS6879_Shoots-Roots_P Parameter: Tissue Value: Roots
  misc_feature: MA Experiment ID: 20000496 Result: Down-regulated in Transcription
  misc_feature: MA Experiment 20000496 PARAMETER Experiment Name: At_Guard_Cells_P Parameter: Harvest Date Value: 7/19/2002
  misc_feature: MA Experiment 20000496 PARAMETER Experiment Name: At_Guard_Cells_P Parameter: Organism Value: Canola
  misc_feature: MA Experiment 20000496 PARAMETER Experiment Name: At_Guard_Cells_P Parameter: Tissue Value: Guard Cells vs. Leaves
  misc_feature: MA Experiment ID: 20001557 Result: Down-regulated in Transcription
  misc_feature: MA Experiment 20001557 PARAMETER Experiment Name: At_Drought_Soil_Dry_P Parameter: Age (day) Value: 27
  misc_feature: MA Experiment 20001557 PARAMETER Experiment Name: At_Drought_Soil_Dry_P Parameter: Organism Value: A. thaliana
  misc_feature: MA Experiment 20001557 PARAMETER Experiment Name: At_Drought_Soil_Dry_P Parameter: Plant Line Value: WS
  misc_feature: MA Experiment 20001557 PARAMETER Experiment Name: At_Drought_Soil_Dry_P Parameter: Post Timepoint (hr) Value: 3
  misc_feature: MA Experiment 20001557 PARAMETER Experiment Name: At_Drought_Soil_Dry_P Parameter: Post-Treatment Value: Re-Water vs. No Drought
  misc_feature: MA Experiment 20001557 PARAMETER Experiment Name: At_Drought_Soil_Dry_P Parameter: Timepoint (day) Value: 13
  misc_feature: MA Experiment 20001557 PARAMETER Experiment Name: At_Drought_Soil_Dry_P Parameter: Treatment Value: Drought vs. No Drought
  misc_feature: MA Experiment ID: 20001558 Result: Down-regulated in Transcription
  misc_feature: MA Experiment 20001558 PARAMETER Experiment Name: At_Drought_Soil_Dry_P Parameter: Age (day) Value: 27
  misc_feature: MA Experiment 20001558 PARAMETER Experiment Name: At_Drought_Soil_Dry_P Parameter: Organism Value: A. thaliana
  misc_feature: MA Experiment 20001558 PARAMETER Experiment Name: At_Drought_Soil_Dry_P Parameter: Plant Line Value: WS
  misc_feature: MA Experiment 20001558 PARAMETER Experiment Name: At_Drought_Soil_Dry_P Parameter: Post Timepoint (hr) Value: 6
  misc_feature: MA Experiment 20001558 PARAMETER Experiment Name: At_Drought_Soil_Dry_P Parameter: Post-Treatment Value: Re-Water vs. No Drought
  misc_feature: MA Experiment 20001558 PARAMETER Experiment Name: At_Drought_Soil_Dry_P Parameter: Timepoint (day) Value: 13
  misc_feature: MA Experiment 20001558 PARAMETER Experiment Name: At_Drought_Soil_Dry_P Parameter: Treatment Value: Drought vs. No Drought
  misc_feature: MA Experiment ID: 20001560 Result: Down-regulated in Transcription
  misc_feature: MA Experiment 20001560 PARAMETER Experiment Name: At_Drought_Soil_Dry_P Parameter: Age (day) Value: 28
  misc_feature: MA Experiment 20001560 PARAMETER Experiment Name: At_Drought_Soil_Dry_P Parameter: Organism Value: A. thaliana
  misc_feature: MA Experiment 20001560 PARAMETER Experiment Name: At_Drought_Soil_Dry_P Parameter: Plant Line Value: WS
  misc_feature: MA Experiment 20001560 PARAMETER Experiment Name: At_Drought_Soil_Dry_P Parameter: Post Timepoint (hr) Value: None
  misc_feature: MA Experiment 20001560 PARAMETER Experiment Name: At_Drought_Soil_Dry_P Parameter: Post-Treatment Value: None
  misc_feature: MA Experiment 20001560 PARAMETER Experiment Name: At_Drought_Soil_Dry_P Parameter: Timepoint (day) Value: 14
  misc_feature: MA Experiment 20001560 PARAMETER Experiment Name: At_Drought_Soil_Dry_P Parameter: Treatment Value: Drought vs. No Drought
  misc_feature: MA Experiment ID: 20001905 Result: Down-regulated in Transcription
  misc_feature: MA Experiment 20001905 PARAMETER Experiment Name: At_Drought_Reproduction_P Parameter: Age (day) Value: 40
  misc_feature: MA Experiment 20001905 PARAMETER Experiment Name: At_Drought_Reproduction_P Parameter: Organism Value: A. thaliana
  misc_feature: MA Experiment 20001905 PARAMETER Experiment Name: At_Drought_Reproduction_P Parameter: Plant Line Value: WS
  misc_feature: MA Experiment 20001905 PARAMETER Experiment Name: At_Drought_Reproduction_P Parameter: Timepoint (day) Value: 10
  misc_feature: MA Experiment 20001905 PARAMETER Experiment Name: At_Drought_Reproduction_P Parameter: Tissue Value: Rosettes
  misc_feature: MA Experiment 20001905 PARAMETER Experiment Name: At_Drought_Reproduction_P Parameter: Treatment Value: Drought vs. No Drought
  misc_feature: MA Experiment ID: 20001906 Result: Down-regulated in Transcription
  misc_feature: MA Experiment 20001906 PARAMETER Experiment Name: At_Drought_Reproduction_P Parameter: Age (day) Value: 35
  misc_feature: MA Experiment 20001906 PARAMETER Experiment Name: At_Drought_Reproduction_P Parameter: Organism Value: A. thaliana
  misc_feature: MA Experiment 20001906 PARAMETER Experiment Name: At_Drought_Reproduction_P Parameter: Plant Line Value: WS
  misc_feature: MA Experiment 20001906 PARAMETER Experiment Name: At_Drought_Reproduction_P Parameter: Timepoint (day) Value: 5
  misc_feature: MA Experiment 20001906 PARAMETER Experiment Name: At_Drought_Reproduction_P Parameter: Tissue Value: Siliques
  misc_feature: MA Experiment 20001906 PARAMETER Experiment Name: At_Drought_Reproduction_P Parameter: Treatment Value: Drought vs. No Drought
atggaatctggaagtatgaaaacacctctggtgaataatcaagaagaagcaagaagctcttcttccatcacttgtggtcttcttcttagtacctccgtcgctgtcactggctctttcgtttatggctgcgcttgttcctcatggatctcaactaacatgcctcagattggaatttttatttttttaatcaaaatctgttttgaatttgttgatgtcaacttgtggcctaattttgtgcactatcataatttgaagatgtcatattcatcgcctgctcagtccaaaatcatggaagaactgggactttccgttgcagattattcgtttttcacatcggtaatgacattgggaggaatgattacggccgcgtttagtggaaaaattgctgcagttattggtcgtcgacagacaatgtggatcgcggatgttttctgcatctttggttggctcgctgtagcctttgcacatgataaaatgctgttaaatattggtcgaggcttcttggggtttggggttggtctcattagttatgtggttcctgtatatatagcagaaattacgcccaaagcatttcgtggaggattctctttttccaatcaacttctacaaagttttgggatatcgctcatgttcttcaccggaaacttttttcattggagaacattagctcttttaagtgcaatcccatgtggtatccaaatgatatgtttattttttattcctgaatcacctagatggctggctatgtatggtagagaacgagagcttgaggttactttgaagaggctaagaggagaaaatggtgatattctcgaagaagcagctgaaatcagagaaacagtggaaacctctagaagagaatctcgaagtggactaaaagatttgttcaatatgaaaaacgcacatccgttaatcattggattgggcctaatgctcttgcaacaattttgtgggagttcggcgataagtgcttatgctgctcgtattttcgacacagccggttttccaagcgacataggaacatccatccttgcagttattttggtaccgcaatctattattgtcatgtttgccgtcgaccgatgtggacgccgaccacttttgatgggttatgtcttatcctttggcattggtctaggtggactaccatgggttattatgtctgaggtgtttccggtgaatgtgaaaattaccgccggtagtcttgtaacagtgtcaaactggtttttcagttggattatcattttcagttttaatttcatgatgcaatggagtgctttcgaatattacacatctaacacaaaaatgctttatttcgacagaacatatttcatatttgctggagtttctctgatgtcattcgtatttgtatggactttggtgcctgagacgaaaggccgaacacttgaagatattcaacaatcactaggccaactttcataa

SEQ ID NO: 82057 - protein, 480 aa, Arabidopsis thaliana
  peptide (1)..(480): Ceres Seq. ID no. 12663152
  misc_feature (42)..(476): Pfam Name: Sugar (and other) transporter Pfam Description: Sugar (and other) transporter
  misc_feature (1)..(480): Homolog of NCBI NO: 25407059 NR Description: hypothetical protein [imported] - Arabidopsis >gi|2342689|gb|AAB70415.1| Similar to Beta integral membrane
  misc_feature (1)..(480): Homolog of NCBI NO: 30680852 NR Description: sugar transporter family [Arabidopsis thaliana]
  misc_feature (105)..(348): Homolog of NCBI NO: 6686831 NR Description: putative sugar transporter [Arabidopsis thaliana]
  misc_feature (89)..(341): Homolog of NCBI NO: 6686829 NR Description: putative sugar transporter [Arabidopsis thaliana]
  misc_feature (88)..(382): Homolog of NCBI NO: 30680865 NR Description: sugar transporter, putative [Arabidopsis thaliana]
  misc_feature (368)..(476): Homolog of NCBI NO: 30680865 NR Description: sugar transporter, putative [Arabidopsis thaliana]
  misc_feature (88)..(369): Homolog of NCBI NO: 18390957 NR Description: putative sugar transport protein, ERD6; protein At1g08920.1, supported by cDNA: gi_14194108 [Arabidopsis >gi|14194109|gb|AAK56249.1|AF367260_1 At1g08920/F7G19_20
  misc_feature (368)..(476): Homolog of NCBI NO: 18390957 NR Description: putative sugar transport protein, ERD6; protein At1g08920.1, supported by cDNA: gi_14194108 [Arabidopsis >gi|14194109|gb|AAK56249.1|AF367260_1 At1g08920/F7G19_20
  misc_feature (88)..(382): Homolog of NCBI NO: 6686827 NR Description: putative sugar transporter [Arabidopsis thaliana]
  misc_feature (368)..(476): Homolog of NCBI NO: 6686827 NR Description: putative sugar transporter [Arabidopsis thaliana]
MESGSMKTPLVNNQEEARSSSSITCGLLLSTSVAVTGSFVYGCACSSWISTNMPQIGIFIFLIKICFEFVDVNLWPNFVHYHNLKMSYSSPAQSKIMEELGLSVADYSFFTSVMTLGGMITAAFSGKIAAVIGRRQTMWIADVFCIFGWLAVAFAHDKMLLNIGRGFLGFGVGLISYVVPVYIAEITPKAFRGGFSFSNQLLQSFGISLMFFTGNFFHWRTLALLSAIPCGIQMICLFFIPESPRWLAMYGRERELEVTLKRLRGENGDILEEAAEIRETVETSRRESRSGLKDLFNMKNAHPLIIGLGLMLLQQFCGSSAISAYAARIFDTAGFPSDIGTSILAVILVPQSIIVMFAVDRCGRRPLLMGYVLSFGIGLGGLPWVIMSEVFPVNVKITAGSLVTVSNWFFSWIIIFSFNFMMQWSAFEYYTSNTKMLYFDRTYFIFAGVSLMSFVFVWTLVPETKGRTLEDIQQSLGQLS

SEQ ID NO: 82058 - protein, 475 aa, Arabidopsis thaliana
  peptide (1)..(475): Ceres Seq. ID no. 12663153
  misc_feature (37)..(471): Pfam Name: Sugar (and other) transporter Pfam Description: Sugar (and other) transporter
  misc_feature (1)..(475): Homolog of NCBI NO: 25407059 NR Description: hypothetical protein [imported] - Arabidopsis >gi|2342689|gb|AAB70415.1| Similar to Beta integral membrane
  misc_feature (1)..(475): Homolog of NCBI NO: 30680852 NR Description: sugar transporter family [Arabidopsis thaliana]
  misc_feature (100)..(343): Homolog of NCBI NO: 6686831 NR Description: putative sugar transporter [Arabidopsis thaliana]
  misc_feature (84)..(336): Homolog of NCBI NO: 6686829 NR Description: putative sugar transporter [Arabidopsis thaliana]
  misc_feature (83)..(377): Homolog of NCBI NO: 30680865 NR Description: sugar transporter, putative [Arabidopsis thaliana]
  misc_feature (363)..(471): Homolog of NCBI NO: 30680865 NR Description: sugar transporter, putative [Arabidopsis thaliana]
  misc_feature (83)..(364): Homolog of NCBI NO: 18390957 NR Description: putative sugar transport protein, ERD6; protein At1g08920.1, supported by cDNA: gi_14194108 [Arabidopsis >gi|14194109|gb|AAK56249.1|AF367260_1 At1g08920/F7G19_20
  misc_feature (363)..(471): Homolog of NCBI NO: 18390957 NR Description: putative sugar transport protein, ERD6; protein At1g08920.1, supported by cDNA: gi_14194108 [Arabidopsis >gi|14194109|gb|AAK56249.1|AF367260_1 At1g08920/F7G19_20
  misc_feature (83)..(377): Homolog of NCBI NO: 6686827 NR Description: putative sugar transporter [Arabidopsis thaliana]
  misc_feature (363)..(471): Homolog of NCBI NO: 6686827 NR Description: putative sugar transporter [Arabidopsis thaliana]
MKTPLVNNQEEARSSSSITCGLLLSTSVAVTGSFVYGCACSSWISTNMPQIGIFIFLIKICFEFVDVNLWPNFVHYHNLKMSYSSPAQSKIMEELGLSVADYSFFTSVMTLGGMITAAFSGKIAAVIGRRQTMWIADVFCIFGWLAVAFAHDKMLLNIGRGFLGFGVGLISYVVPVYIAEITPKAFRGGFSFSNQLLQSFGISLMFFTGNFFHWRTLALLSAIPCGIQMICLFFIPESPRWLAMYGRERELEVTLKRLRGENGDILEEAAEIRETVETSRRESRSGLKDLFNMKNAHPLIIGLGLMLLQQFCGSSAISAYAARIFDTAGFPSDIGTSILAVILVPQSIIVMFAVDRCGRRPLLMGYVLSFGIGLGGLPWVIMSEVFPVNVKITAGSLVTVSNWFFSWIIIFSFNFMMQWSAFEYYTSNTKMLYFDRTYFIFAGVSLMSFVFVWTLVPETKGRTLEDIQQSLGQLS

SEQ ID NO: 82059 - protein, 428 aa, Arabidopsis thaliana
  peptide (1)..(428): Ceres Seq. ID no. 12663154
  misc_feature (1)..(424): Pfam Name: Sugar (and other) transporter Pfam Description: Sugar (and other) transporter
  misc_feature (1)..(428): Homolog of NCBI NO: 25407059 NR Description: hypothetical protein [imported] - Arabidopsis >gi|2342689|gb|AAB70415.1| Similar to Beta integral membrane
  misc_feature (1)..(428): Homolog of NCBI NO: 30680852 NR Description: sugar transporter family [Arabidopsis thaliana]
  misc_feature (53)..(296): Homolog of NCBI NO: 6686831 NR Description: putative sugar transporter [Arabidopsis thaliana]
  misc_feature (37)..(289): Homolog of NCBI NO: 6686829 NR Description: putative sugar transporter [Arabidopsis thaliana]
  misc_feature (36)..(330): Homolog of NCBI NO: 30680865 NR Description: sugar transporter, putative [Arabidopsis thaliana]
  misc_feature (316)..(424): Homolog of NCBI NO: 30680865 NR Description: sugar transporter, putative [Arabidopsis thaliana]
  misc_feature (36)..(317): Homolog of NCBI NO: 18390957 NR Description: putative sugar transport protein, ERD6; protein At1g08920.1, supported by cDNA: gi_14194108 [Arabidopsis >gi|14194109|gb|AAK56249.1|AF367260_1 At1g08920/F7G19_20
  misc_feature (316)..(424): Homolog of NCBI NO: 18390957 NR Description: putative sugar transport protein, ERD6; protein At1g08920.1, supported by cDNA: gi_14194108 [Arabidopsis >gi|14194109|gb|AAK56249.1|AF367260_1 At1g08920/F7G19_20
  misc_feature (36)..(330): Homolog of NCBI NO: 6686827 NR Description: putative sugar transporter [Arabidopsis thaliana]
  misc_feature (316)..(424): Homolog of NCBI NO: 6686827 NR Description: putative sugar transporter [Arabidopsis thaliana]
MPQIGIFIFLIKICFEFVDVNLWPNFVHYHNLKMSYSSPAQSKIMEELGLSVADYSFFTSVMTLGGMITAAFSGKIAAVIGRRQTMWIADVFCIFGWLAVAFAHDKMLLNIGRGFLGFGVGLISYVVPVYIAEITPKAFRGGFSFSNQLLQSFGISLMFFTGNFFHWRTLALLSAIPCGIQMICLFFIPESPRWLAMYGRERELEVTLKRLRGENGDILEEAAEIRETVETSRRESRSGLKDLFNMKNAHPLIIGLGLMLLQQFCGSSAISAYAARIFDTAGFPSDIGTSILAVILVPQSIIVMFAVDRCGRRPLLMGYVLSFGIGLGGLPWVIMSEVFPVNVKITAGSLVTVSNWFFSWIIIFSFNFMMQWSAFEYYTSNTKMLYFDRTYFIFAGVSLMSFVFVWTLVPETKGRTLEDIQQSLGQLS

SEQ ID NO: 82060 - DNA, 2511 bp, Arabidopsis thaliana
  misc_feature (1)..(2511): Ceres Seq. ID no. 12663193
  misc_feature: MA Experiment ID: 20000267 Result: Down-regulated in Transcription
  misc_feature: MA Experiment 20000267 PARAMETER Experiment Name: At_Drought_P Parameter: Age (day) Value: 7
  misc_feature: MA Experiment 20000267 PARAMETER Experiment Name: At_Drought_P Parameter: Organism Value: A. thaliana
  misc_feature: MA Experiment 20000267 PARAMETER Experiment Name: At_Drought_P Parameter: Plant Line Value: WS
  misc_feature: MA Experiment 20000267 PARAMETER Experiment Name: At_Drought_P Parameter: Timepoint (hr) Value: 6
  misc_feature: MA Experiment 20000267 PARAMETER Experiment Name: At_Drought_P Parameter: Tissue Value: Whole Plant
  misc_feature: MA Experiment 20000267 PARAMETER Experiment Name: At_Drought_P Parameter: Treatment Value: Drought vs. No Drought
  misc_feature: MA Experiment ID: 20000527 Result: Down-regulated in Transcription
  misc_feature: MA Experiment 20000527 PARAMETER Experiment Name: At_10percent_PEG_P Parameter: Age (day) Value: 20
  misc_feature: MA Experiment 20000527 PARAMETER Experiment Name: At_10percent_PEG_P Parameter: Organism Value: A. thaliana
  misc_feature: MA Experiment 20000527 PARAMETER Experiment Name: At_10percent_PEG_P Parameter: Plant Line Value: WS
  misc_feature: MA Experiment 20000527 PARAMETER Experiment Name: At_10percent_PEG_P Parameter: Timepoint (day) Value: 20
  misc_feature: MA Experiment 20000527 PARAMETER Experiment Name: At_10percent_PEG_P Parameter: Tissue Value: Whole Plant
  misc_feature: MA Experiment 20000527 PARAMETER Experiment Name: At_10percent_PEG_P Parameter: Treatment Value: 10percent PEG vs. No Treatment
atgcgggaggaagaaatggaatcttcgtcagaaggtgagacaaacaagatttcccgatgcaaagccactggttcagacaatcctgatgaggactacgtcgagatcacactcgaagtgcgagacgaaaccatcaacacaatgaaggccaaggcgacacttcgttcggttctttccgggaggctgaaaacgatggttaagtcgctatcgtttgcttcacgccggctcgaccgtagtaagtcgttcggtgctatgtttgctcttcgagggttgaggttcattgccaaaaacgacgccgttggtagaggctgggatgaggttgcaatgaggtttgataagttggccgttgaagggaaactccctaaatccaaatttggacattgcataggaatggttgaatctagcgaatttgtgaacgagctttttgaggcgttggtccgaaggagagggactacgtcatcgtcaatcaccaaaactgaattgtttgaattctgggagcagatcacaggcaatagttttgatgatagggtggacaaaaatttggacggacgtattacaggagatgaggttaaggagataattgctttaagtgcttcggctaacaagctatcaaagattaaagaaaatgtagatgaatatgctgccttgatcatggaagaactagatcgcgacaacctcggatatattgagttacataacttggaaacattgcttctccaagttcctagccaatcaaataacagtccatcttccgcgaacaaacgtgcactcaacaagatgttgagccagaagctcataccaacaaaagatcgaaacccggtgaaaagatttgctatgaatatatcatacttcttcttggaaaattggaaaaggatttgggtgttaacattgtggatatccatttgcatcactctcttcacttggaaatttctccagtataaacgcaaaaccgtgttcgaggtgatgggctactgtgttaccgtggccaaaggcagtgcagagaccttgaaattcaacatggctctcattctcttgcccgtttgtaggaacactatcacttggctaaggaccaagtccaagcttattgggtctgttgttccatttgatgacaatatcaatttccacaaggttgttgcatttgggatcgcggttggaataggcttgcacgctatatctcacctggcatgtgatttcccgcgtttgctgcatgcaaaaaatgtagagtttgagccaatgaaaaagtttttcggagacgagaggcctgaaaattatggatggttcatgaaagggacagacgggtggaccggtgttaccatggtggttcttatgttagtggcctacgtcttggcgcagtcgtggttcagacgaaaccgggcaaacctaccaaaatcgttgaaacgattgactggtttcaacgcattttggtactcacaccatttgtttgtcatcgtttatgttcttctcatcgtgcatggctattttgtttatctctcaaaggaatggtaccacaagacgacgtggatgtatctggcagttcccgtactactatatgcatttgaacgattgattcgtgcatttagaccaggtgccaaggctgtcaaggttttgaaggtggcagtatatccaggaaatgtactttcactttacatgtcgaagcctaaaggtttcaagtacacaagtggacagtacatatatattaactgttctgacgtctcaccattacaatggcatccgttttcaattacttcggcttccggggatgattacctcagcgttcatatccgcacactcggagactggacatcgcaactcaaatccttatattccaaggtttgtcaacttccctcaacaagtcaaagtgggctcttcatagctgacataggtcaagccaacaatataaccaggtttccgaggctgttaatcgatggtccatatggtgcacccgcacaagattaccggaactacgatgtattgcttctagtaggtctagggatcggagcgacgccattaatcagcataatcagggacgtccttaacaacatcaagaaccagaattccatcgaacgaggcactaaccaacacataaaaaactatgttgccacaaaacgagcttatttttattgggtaacaagagagcaaggatcattggaatggttcagtgaggtcatgaacgaggtagctgagtatgatagtgaggggatgattgaactacataattactgcactagcgtgtatgaggaaggagatgcgaggtcagcactaatcaccatgttgcagtcattgcaccacgccaagagcggcattgacatcgtatcgggcactcgggtccgaacccatttcgctcgacccaattggcgtagtgtcttcaagcacgtcgcagtcaaccacgtcaatcaacgagttggggttttctactgtggtaatacatgcatcataggagagttaaagagactggctcaagatttctctaggaaaactacgaccaagtttgagttccacaaggaaaatttctag

SEQ ID NO: 82061 - protein, 836 aa, Arabidopsis thaliana
  peptide (1)..(836): Ceres Seq. ID no. 12663194
  misc_feature (321)..(835): Pfam Name: Ferric reductase like transmembrane component Pfam Description: Ferric reductase like transmembrane component
  misc_feature (21)..(694): Homolog of NCBI NO: 20805911 NR Description: NADPH oxidase [Nicotiana tabacum]
  misc_feature (679)..(836): Homolog of NCBI NO: 20805911 NR Description: NADPH oxidase [Nicotiana tabacum]
  misc_feature (21)..(694): Homolog of NCBI NO: 28268680 NR Description: respiratory burst oxidase homolog [Nicotiana
  misc_feature (679)..(836): Homolog of NCBI NO: 28268680 NR Description: respiratory burst oxidase homolog [Nicotiana
  misc_feature (15)..(836): Homolog of NCBI NO: 11358758 NR Description: respiratory burst oxidase protein D [imported] - thaliana >gi|3242789|gb|AAC39479.1| respiratory burst oxidase
  misc_feature (15)..(836): Homolog of NCBI NO: 15238842 NR Description: respiratory burst oxidase protein; protein id: supported by cDNA: gi_15983500, supported by cDNA: gi_3242788 thaliana] >gi|10177927|dbj|BAB11338.1| respiratory burst oxidase
  misc_feature (21)..(694): Homolog of NCBI NO: 19715905 NR Description: NADPH oxidase [Nicotiana tabacum]
  misc_feature (679)..(836): Homolog of NCBI NO: 19715905 NR Description: NADPH oxidase [Nicotiana tabacum]
  misc_feature (49)..(689): Homolog of NCBI NO: 8131846 NR Description: whitefly-induced gp91-phox [Lycopersicon
  misc_feature (695)..(836): Homolog of NCBI NO: 8131846 NR Description: whitefly-induced gp91-phox [Lycopersicon
MREEEMESSSEGETNKISRCKATGSDNPDEDYVEITLEVRDETINTMKAKATLRSVLSGRLKTMVKSLSFASRRLDRSKSFGAMFALRGLRFIAKNDAVGRGWDEVAMRFDKLAVEGKLPKSKFGHCIGMVESSEFVNELFEALVRRRGTTSSSITKTELFEFWEQITGNSFDDRVDKNLDGRITGDEVKEIIALSASANKLSKIKENVDEYAALIMEELDRDNLGYIELHNLETLLLQVPSQSNNSPSSANKRALNKMLSQKLIPTKDRNPVKRFAMNISYFFLENWKRIWVLTLWISICITLFTWKFLQYKRKTVFEVMGYCVTVAKGSAETLKFNMALILLPVCRNTITWLRTKSKLIGSVVPFDDNINFHKVVAFGIAVGIGLHAISHLACDFPRLLHAKNVEFEPMKKFFGDERPENYGWFMKGTDGWTGVTMVVLMLVAYVLAQSWFRRNRANLPKSLKRLTGFNAFWYSHHLFVIVYVLLIVHGYFVYLSKEWYHKTTWMYLAVPVLLYAFERLIRAFRPGAKAVKVLKVAVYPGNVLSLYMSKPKGFKYTSGQYIYINCSDVSPLQWHPFSITSASGDDYLSVHIRTLGDWTSQLKSLYSKVCQLPSTSQSGLFIADIGQANNITRFPRLLIDGPYGAPAQDYRNYDVLLLVGLGIGATPLISIIRDVLNNIKNQNSIERGTNQHIKNYVATKRAYFYWVTREQGSLEWFSEVMNEVAEYDSEGMIELHNYCTSVYEEGDARSALITMLQSLHHAKSGIDIVSGTRVRTHFARPNWRSVFKHVAVNHVNQRVGVFYCGNTCIIGELKRLAQDFSRKTTTKFEFHKENF

SEQ ID NO: 82062 - protein, 831 aa, Arabidopsis thaliana
  peptide (1)..(831): Ceres Seq. ID no. 12663195
  misc_feature (316)..(830): Pfam Name: Ferric reductase like transmembrane component Pfam Description: Ferric reductase like transmembrane component
  misc_feature (16)..(689): Homolog of NCBI NO: 20805911 NR Description: NADPH oxidase [Nicotiana tabacum]
  misc_feature (674)..(831): Homolog of NCBI NO: 20805911 NR Description: NADPH oxidase [Nicotiana tabacum]
  misc_feature (16)..(689): Homolog of NCBI NO: 28268680 NR Description: respiratory burst oxidase homolog [Nicotiana
  misc_feature (674)..(831): Homolog of NCBI NO: 28268680 NR Description: respiratory burst oxidase homolog [Nicotiana
  misc_feature (10)..(831): Homolog of NCBI NO: 11358758 NR Description: respiratory burst oxidase protein D [imported] - thaliana >gi|3242789|gb|AAC39479.1| respiratory burst oxidase
  misc_feature (10)..(831): Homolog of NCBI NO: 15238842 NR Description: respiratory burst oxidase protein; protein id: supported by cDNA: gi_15983500, supported by cDNA: gi_3242788 thaliana] >gi|10177927|dbj|BAB11338.1| respiratory burst oxidase
  misc_feature (16)..(689): Homolog of NCBI NO: 19715905 NR Description: NADPH oxidase [Nicotiana tabacum]
  misc_feature (674)..(831): Homolog of NCBI NO: 19715905 NR Description: NADPH oxidase [Nicotiana tabacum]
  misc_feature (44)..(684): Homolog of NCBI NO: 8131846 NR Description: whitefly-induced gp91-phox [Lycopersicon
  misc_feature (690)..(831): Homolog of NCBI NO: 8131846 NR Description: whitefly-induced gp91-phox [Lycopersicon
MESSSEGETNKISRCKATGSDNPDEDYVEITLEVRDETINTMKAKATLRSVLSGRLKTMVKSLSFASRRLDRSKSFGAMFALRGLRFIAKNDAVGRGWDEVAMRFDKLAVEGKLPKSKFGHCIGMVESSEFVNELFEALVRRRGTTSSSITKTELFEFWEQITGNSFDDRVDKNLDGRITGDEVKEIIALSASANKLSKIKENVDEYAALIMEELDRDNLGYIELHNLETLLLQVPSQSNNSPSSANKRALNKMLSQKLIPTKDRNPVKRFAMNISYFFLENWKRIWVLTLWISICITLFTWKFLQYKRKTVFEVMGYCVTVAKGSAETLKFNMALILLPVCRNTITWLRTKSKLIGSVVPFDDNINFHKVVAFGIAVGIGLHAISHLACDFPRLLHAKNVEFEPMKKFFGDERPENYGWFMKGTDGWTGVTMVVLMLVAYVLAQSWFRRNRANLPKSLKRLTGFNAFWYSHHLFVIVYVLLIVHGYFVYLSKEWYHKTTWMYLAVPVLLYAFERLIRAFRPGAKAVKVLKVAVYPGNVLSLYMSKPKGFKYTSGQYIYINCSDVSPLQWHPFSITSASGDDYLSVHIRTLGDWTSQLKSLYSKVCQLPSTSQSGLFIADIGQANNITRFPRLLIDGPYGAPAQDYRNYDVLLLVGLGIGATPLISIIRDVLNNIKNQNSIERGTNQHIKNYVATKRAYFYWVTREQGSLEWFSEVMNEVAEYDSEGMIELHNYCTSVYEEGDARSALITMLQSLHHAKSGIDIVSGTRVRTHFARPNWRSVFKHVAVNHVNQRVGVFYCGNTCIIGELKRLAQDFSRKTTTKFEFHKENF

SEQ ID NO: 82063 - protein, 790 aa, Arabidopsis thaliana
  peptide (1)..(790): Ceres Seq. ID no. 12663196
  misc_feature (275)..(789): Pfam Name: Ferric reductase like transmembrane component Pfam Description: Ferric reductase like transmembrane component
  misc_feature (1)..(648): Homolog of NCBI NO: 20805911 NR Description: NADPH oxidase [Nicotiana tabacum]
  misc_feature (633)..(790): Homolog of NCBI NO: 20805911 NR Description: NADPH oxidase [Nicotiana tabacum]
  misc_feature (1)..(648): Homolog of NCBI NO: 28268680 NR Description: respiratory burst oxidase homolog [Nicotiana
  misc_feature (633)..(790): Homolog of NCBI NO: 28268680 NR Description: respiratory burst oxidase homolog [Nicotiana
  misc_feature (1)..(790): Homolog of NCBI NO: 11358758 NR Description: respiratory burst oxidase protein D [imported] - thaliana >gi|3242789|gb|AAC39479.1| respiratory burst oxidase
  misc_feature (1)..(790): Homolog of NCBI NO: 15238842 NR Description: respiratory burst oxidase protein; protein id: supported by cDNA: gi_15983500, supported by cDNA: gi_3242788 thaliana] >gi|10177927|dbj|BAB11338.1| respiratory burst oxidase
  misc_feature (1)..(648): Homolog of NCBI NO: 19715905 NR Description: NADPH oxidase [Nicotiana tabacum]
  misc_feature (633)..(790): Homolog of NCBI NO: 19715905 NR Description: NADPH oxidase [Nicotiana tabacum]
  misc_feature (3)..(643): Homolog of NCBI NO: 8131846 NR Description: whitefly-induced gp91-phox [Lycopersicon
  misc_feature (649)..(790): Homolog of NCBI NO: 8131846 NR Description: whitefly-induced gp91-phox [Lycopersicon
MKAKATLRSVLSGRLKTMVKSLSFASRRLDRSKSFGAMFALRGLRFIAKNDAVGRGWDEVAMRFDKLAVEGKLPKSKFGHCIGMVESSEFVNELFEALVRRRGTTSSSITKTELFEFWEQITGNSFDDRVDKNLDGRITGDEVKEIIALSASANKLSKIKENVDEYAALIMEELDRDNLGYIELHNLETLLLQVPSQSNNSPSSANKRALNKMLSQKLIPTKDRNPVKRFAMNISYFFLENWKRIWVLTLWISICITLFTWKFLQYKRKTVFEVMGYCVTVAKGSAETLKFNMALILLPVCRNTITWLRTKSKLIGSVVPFDDNINFHKVVAFGIAVGIGLHAISHLACDFPRLLHAKNVEFEPMKKFFGDERPENYGWFMKGTDGWTGVTMVVLMLVAYVLAQSWFRRNRANLPKSLKRLTGFNAFWYSHHLFVIVYVLLIVHGYFVYLSKEWYHKTTWMYLAVPVLLYAFERLIRAFRPGAKAVKVLKVAVYPGNVLSLYMSKPKGFKYTSGQYIYINCSDVSPLQWHPFSITSASGDDYLSVHIRTLGDWTSQLKSLYSKVCQLPSTSQSGLFIADIGQANNITRFPRLLIDGPYGAPAQDYRNYDVLLLVGLGIGATPLISIIRDVLNNIKNQNSIERGTNQHIKNYVATKRAYFYWVTREQGSLEWFSEVMNEVAEYDSEGMIELHNYCTSVYEEGDARSALITMLQSLHHAKSGIDIVSGTRVRTHFARPNWRSVFKHVAVNHVNQRVGVFYCGNTCIIGELKRLAQDFSRKTTTKFEFHKENF

SEQ ID NO: 82064 - DNA, 1260 bp, Arabidopsis thaliana
  misc_feature (1)..(1260): Ceres Seq. ID no. 12663197
  misc_feature: MA Experiment ID: 20000307 Result: Down-regulated in Transcription
  misc_feature: MA Experiment 20000307 PARAMETER Experiment Name: At_Germinating_Seeds_Sub_P Parameter: Age (hr) Value: 24 vs. 0
  misc_feature: MA Experiment 20000307 PARAMETER Experiment Name: At_Germinating_Seeds_Sub_P Parameter: Organism Value: A. thaliana
  misc_feature: MA Experiment 20000307 PARAMETER Experiment Name: At_Germinating_Seeds_Sub_P Parameter: Plant Line Value: WS
  misc_feature: MA Experiment 20000307 PARAMETER Experiment Name: At_Germinating_Seeds_Sub_P Parameter: Tissue Value: Germinating Seeds
atggcggaggatacgagcttcgagggagaccaactagcttccatgactactgatgacatcggtagagcttctcgtctcttagccaacgagattcgcatcctcaaggaagaatcgcagaggacaaaccttgatttggaatcagtgaaggagaaaataaaggagaaccaggagaagattaagcttaacaaacagcttccttacttagttggcaatatcgttgagattcttgagatgagtccagaggatgatgcagaggaagatggagcgaatatcgatctggactctcagaggaagggaaagtgtgtcgttctaaaaacatcaactcgtcagaccatcttcctccctgttgttggacttgttgatccagatacattgaagcctggggacttagttggagttaacaaagatagttacttgattctggatactttaccttctgagtatgattcaagagtaaaagcaatggaggtcgacgaaaaacctactgaagactacaatgatatagggggactagaaaaacagatacaagaacttgttgaagccattgtgttgccaatgactcataaagagcagttcgaaaagttgggtatccgtccaccaaaaggtgtactcttgtatggtcctcctggaaccggaaagacgttgatggcccgagcttgtgcagcacagacaaatgcaactttcctcaaactagcagggccacaacttgttcagatgttcatcggagatggagcaaaacttgtccgtgatgctttcctgcttgcaaaagagaaatccccttgtattatattcatagatgagattgacgcaatagggacaaagcgttttgatagcgaagttagtggagaccgtgaggtacaaaggacaatgttggagctgctcaaccagcttgatggattcagcagcgatgatcgcattaaggttattgcagcgacaaatcgtgctgatatactagatcctgcccttatgcgttctggtcgtttggatcgtaaaatcgagtttccgcaccccactgaagaagctagaggcaggatcttacagatacattcaaggaaaatgaatgtgaatgcagacgtcaattttgaagagcttgctcggtcaacggatgatttcaatggagctcaactcaaagcagtgtgtgttgaagcgggtatgcttgccctgcgccgggatgcaactgaggtgaaccatgaggatttcaatgaaggtataattcaagtacaagccaagaagaaagcaagcttgaattactacgcctaa

SEQ ID NO: 82065 - protein, 419 aa, Arabidopsis thaliana; identical to SEQ ID NO: 44448
  peptide (1)..(419): Ceres Seq. ID no. 12663198
  misc_feature (202)..(389): Pfam Name: ATPase family associated with various cellular Pfam Description: ATPase family associated with various cellular
  misc_feature (1)..(419): Homolog of NCBI NO: 3024431 NR Description: 26S protease regulatory subunit 6A homolog
  misc_feature (1)..(419): Homolog of NCBI NO: 15217431 NR Description: 26S protease regulatory subunit 6A; protein id: supported by cDNA: gi_15215787, supported by cDNA: gi_15724309 thaliana] >gi|15215788|gb|AAK91439.1| At1g09100/F7G19_2
  misc_feature (1)..(419): Homolog of NCBI NO: 3024434 NR Description: 26S PROTEASE REGULATORY SUBUNIT 6A HOMOLOG
  misc_feature (1)..(419): Homolog of NCBI NO: 15230005 NR Description: 26S proteasome AAA-ATPase subunit RPT5a; protein At3g05530.1, supported by cDNA: gi_17065257, supported by cDNA:
  misc_feature (1)..(419): Homolog of NCBI NO: 12697589 NR Description: Tat binding protein like protein [Brassica rapa]
  misc_feature (1)..(419): Homolog of NCBI NO: 23197864 NR Description: 26S proteasome AAA-ATPase subunit RPT5a
  misc_feature (1)..(419): Homolog of NCBI NO: 5669047 NR Description: 19S proteasome regulatory complex subunit S6A
  misc_feature (1)..(419): Homolog of NCBI NO: 1729860 NR Description: 26S PROTEASE REGULATORY SUBUNIT 6A HOMOLOG
  misc_feature (1)..(419): Homolog of NCBI NO: 17297989 NR Description: 26S proteasome regulatory particle triple-A
  misc_feature (1)..(419): Homolog of NCBI NO: 1174613 NR Description: 26S PROTEASE REGULATORY SUBUNIT 6A HOMOLOG

SEQ ID NO: 82066 - protein, 405 aa, Arabidopsis thaliana; identical to SEQ ID NO: 44449
  peptide (1)..(405): Ceres Seq. ID no. 12663199
  misc_feature (188)..(375): Pfam Name: ATPase family associated with various cellular Pfam Description: ATPase family associated with various cellular
  misc_feature (1)..(405): Homolog of NCBI NO: 3024431 NR Description: 26S protease regulatory subunit 6A homolog
  misc_feature (1)..(405): Homolog of NCBI NO: 15217431 NR Description: 26S protease regulatory subunit 6A; protein id: supported by cDNA: gi_15215787, supported by cDNA: gi_15724309 thaliana] >gi|15215788|gb|AAK91439.1| At1g09100/F7G19_2
  misc_feature (1)..(405): Homolog of NCBI NO: 3024434 NR Description: 26S PROTEASE REGULATORY SUBUNIT 6A HOMOLOG
  misc_feature (1)..(405): Homolog of NCBI NO: 15230005 NR Description: 26S proteasome AAA-ATPase subunit RPT5a; protein At3g05530.1, supported by cDNA: gi_17065257, supported by cDNA:
  misc_feature (1)..(405): Homolog of NCBI NO: 12697589 NR Description: Tat binding protein like protein [Brassica rapa]
  misc_feature (1)..(405): Homolog of NCBI NO: 23197864 NR Description: 26S proteasome AAA-ATPase subunit RPT5a
  misc_feature (1)..(405): Homolog of NCBI NO: 5669047 NR Description: 19S proteasome regulatory complex subunit S6A
  misc_feature (1)..(405): Homolog of NCBI NO: 1729860 NR Description: 26S PROTEASE REGULATORY SUBUNIT 6A HOMOLOG
  misc_feature (1)..(405): Homolog of NCBI NO: 17297989 NR Description: 26S proteasome regulatory particle triple-A
  misc_feature (1)..(405): Homolog of NCBI NO: 1174613 NR Description: 26S PROTEASE REGULATORY SUBUNIT 6A HOMOLOG

SEQ ID NO: 82067 - protein, 342 aa, Arabidopsis thaliana
  peptide (1)..(342): Ceres Seq. ID no. 12663200
  misc_feature (125)..(312): Pfam Name: ATPase family associated with various cellular Pfam Description: ATPase family associated with various cellular
  misc_feature (1)..(342): Homolog of NCBI NO: 3024431 NR Description: 26S protease regulatory subunit 6A homolog
  misc_feature (1)..(342): Homolog of NCBI NO: 15217431 NR Description: 26S protease regulatory subunit 6A; protein id: supported by cDNA: gi_15215787, supported by cDNA: gi_15724309 thaliana] >gi|15215788|gb|AAK91439.1| At1g09100/F7G19_2
  misc_feature (1)..(342): Homolog of NCBI NO: 3024434 NR Description: 26S PROTEASE REGULATORY SUBUNIT 6A HOMOLOG
  misc_feature (1)..(342): Homolog of NCBI NO: 15230005 NR Description: 26S proteasome AAA-ATPase subunit RPT5a; protein At3g05530.1, supported by cDNA: gi_17065257, supported by cDNA:
  misc_feature (1)..(342): Homolog of NCBI NO: 12697589 NR Description: Tat binding protein like protein [Brassica rapa]
  misc_feature (1)..(342): Homolog of NCBI NO: 23197864 NR Description: 26S proteasome AAA-ATPase subunit RPT5a
  misc_feature (1)..(342): Homolog of NCBI NO: 5669047 NR Description: 19S proteasome regulatory complex subunit S6A
  misc_feature (1)..(342): Homolog of NCBI NO: 1729860 NR Description: 26S PROTEASE REGULATORY SUBUNIT 6A HOMOLOG
  misc_feature (1)..(342): Homolog of NCBI NO: 17297989 NR Description: 26S proteasome regulatory particle triple-A
  misc_feature (1)..(342): Homolog of NCBI NO: 1174613 NR Description: 26S PROTEASE REGULATORY SUBUNIT 6A HOMOLOG
MSPEDDAEEDGANIDLDSQRKGKCVVLKTSTRQTIFLPVVGLVDPDTLKPGDLVGVNKDSYLILDTLPSEYDSRVKAMEVDEKPTEDYNDIGGLEKQIQELVEAIVLPMTHKEQFEKLGIRPPKGVLLYGPPGTGKTLMARACAAQTNATFLKLAGPQLVQMFIGDGAKLVRDAFLLAKEKSPCIIFIDEIDAIGTKRFDSEVSGDREVQRTMLELLNQLDGFSSDDRIKVIAATNRADILDPALMRSGRLDRKIEFPHPTEEARGRILQIHSRKMNVNADVNFEELARSTDDFNGAQLKAVCVEAGMLALRRDATEVNHEDFNEGIIQVQAKKKASLNYYA

SEQ ID NO: 82068 - DNA, 1239 bp, Arabidopsis thaliana
  misc_feature (1)..(1239): Ceres Seq. ID no. 12663219
  misc_feature: MA Experiment ID: 20000180 Result: Down-regulated in Transcription
  misc_feature: MA Experiment 20000180 PARAMETER Experiment Name: At_Germinating_Seeds_P Parameter: Age (hr) Value: 24 vs. 0
  misc_feature: MA Experiment 20000180 PARAMETER Experiment Name: At_Germinating_Seeds_P Parameter: Tissue Value: Germinating Seeds
  misc_feature: MA Experiment ID: 20000184 Result: Down-regulated in Transcription
  misc_feature: MA Experiment 20000184 PARAMETER Experiment Name: At_Shoots__P Parameter: Age (day) Value: 7
  misc_feature: MA Experiment 20000184 PARAMETER Experiment Name: At_Shoots__P Parameter: Tissue Value: Shoots vs. Whole Plant
  misc_feature: MA Experiment ID: 20001247 Result: Down-regulated in Transcription
  misc_feature: MA Experiment 20001247 PARAMETER Experiment Name: At_Far-red-induction_P Parameter: Age (day) Value: 7
  misc_feature: MA Experiment 20001247 PARAMETER Experiment Name: At_Far-red-induction_P Parameter: Light Value: Far-red vs. White
  misc_feature: MA Experiment 20001247 PARAMETER Experiment Name: At_Far-red-induction_P Parameter: Organism Value: A. thaliana
  misc_feature: MA Experiment 20001247 PARAMETER Experiment Name: At_Far-red-induction_P Parameter: Plant Line Value: Columbia
  misc_feature: MA Experiment 20001247 PARAMETER Experiment Name: At_Far-red-induction_P Parameter: Timepoint (hr) Value: 1
  misc_feature: MA Experiment 20001247 PARAMETER Experiment Name: At_Far-red-induction_P Parameter: Tissue Value: Whole Plant
atgaatcaaaccttaaaatcatccaccagctccattcacacttcaccacttctgggtttcttctccttcatcagaagcaaaactctgggaaactttttctattcaatcctctgcttcgatgctattctcttggcgaaacccctcttcatgcttacttcctctacgaccaactccaacgactccatttcttgtctgatcacaataagaacagctttggttggtatgtatcttgttggtggaaacatgattgatgctcacaaagtgtttgatgaaatgcctgagagaaatccggtaacttggaatgtgatgatcactggccttactaatttgggagatttcgaaaaagctctttgctttttggagaagatgccgaatcggacggtagtgtcttggaccactatcattgatgggtatgcacgagtagataaacccaaggaagctatactcttgttttcaagaatggttgcttgcgacgcaataaagcccaacgagataaccattctcgccattctcccagctgtttggaacttgggagacttaaagatgtgcggatcagttcatgcttatgttgggaaaagagggtttgttccatgtgatatccgtgtgactaactctctcatcgacgcttatgcaaaatgtgggtgtattcaaagcgcgttcaagtttttcatagagattccaaacggaaggaagaatcttgtatcgtggacaacgatgatctcggcgtttgcaattcacggaatgggaaaagaagcggtcagtatgtttaaagacatggaaagattaggattgaagccgaacagagtgaccatgatcagtgttttgaacgcttgcagccatggaggtttagcagaagaagagtttctagagtttttcaacacgatggtaaacgagtacaagatcacgccggatgtgaagcactatggatgtctagtagatatgttgagaagaaaaggaagattagaagaagcagagaagattgctttggagattccaatagaagaaaaagctgtggtttggagaatgctgcttggagcttgtagcgtttatgatgatgctgaattggctgagagggttactagaaagctaatggagctagagagaagccatggaggagactatgtgcttatgtccaacatcttttgtggtactggaagatttttagatgcgcagagatttcggaaacagatggatgttagaggagtagctaaacttccaggacattcacaagtaacatag

SEQ ID NO: 82069 - protein, 412 aa, Arabidopsis thaliana
  peptide (1)..(412): Ceres Seq. ID no. 12663220
  misc_feature (67)..(101): Pfam Name: PPR repeat Pfam Description: PPR repeat
  misc_feature (1)..(412): Homolog of NCBI NO: 25402526 NR Description: protein T12M4.7 [imported] - Arabidopsis thaliana
  misc_feature (75)..(412): Homolog of NCBI NO: 15217460 NR Description: hypothetical protein; protein id: At1g09220.1
  misc_feature (66)..(411): Homolog of NCBI NO: 15241180 NR Description: putative protein; protein id: At5g56310.1 thaliana] >gi|10177829|dbj|BAB11258.1|
  misc_feature (17)..(409): Homolog of NCBI NO: 15241651 NR Description: putative protein; protein id: At5g08510.1 thaliana] >gi|9759345|dbj|BAB10000.1|
  misc_feature (66)..(411): Homolog of NCBI NO: 15225375 NR Description: unknown protein; protein id: At2g20540.1
  misc_feature (131)..(411): Homolog of NCBI NO: 15241714 NR Description: putative protein; protein id: At5g39350.1
  misc_feature (66)..(145): Homolog of NCBI NO: 15241714 NR Description: putative protein; protein id: At5g39350.1
  misc_feature (71)..(411): Homolog of NCBI NO: 34902972 NR Description: unnamed protein product [Oryza sativa (japonica group)] >gi|9558518|dbj|BAB03436.1| unnamed protein product
  misc_feature (71)..(412): Homolog of NCBI NO: 15239979 NR Description: selenium-binding protein-like; protein id:
  misc_feature (66)..(411): Homolog of NCBI NO: 9958072 NR Description: Hypothetical protein [Arabidopsis thaliana]
MNQTLKSSTSSIHTSPLLGFFSFIRSKTLGNFFYSILCFDAILLAKPLFMLTSSTTNSNDSISCLITIRTALVGMYLVGGNMIDAHKVFDEMPERNPVTWNVMITGLTNLGDFEKALCFLEKMPNRTVVSWTTIIDGYARVDKPKEAILLFSRMVACDAIKPNEITILAILPAVWNLGDLKMCGSVHAYVGKRGFVPCDIRVTNSLIDAYAKCGCIQSAFKFFIEIPNGRKNLVSWTTMISAFAIHGMGKEAVSMFKDMERLGLKPNRVTMISVLNACSHGGLAEEEFLEFFNTMVNEYKITPDVKHYGCLVDMLRRKGRLEEAEKIALEIPIEEKAVVWRMLLGACSVYDDAELAERVTRKLMELERSHGGDYVLMSNIFCGTGRFLDAQRFRKQMDVRGVAKLPGHSQVT

SEQ ID NO: 82070 - protein, 363 aa, Arabidopsis thaliana
  peptide (1)..(363): Ceres Seq. ID no. 12663221
  misc_feature (18)..(52): Pfam Name: PPR repeat Pfam Description: PPR repeat
  misc_feature (1)..(363): Homolog of NCBI NO: 25402526 NR Description: protein T12M4.7 [imported] - Arabidopsis thaliana
  misc_feature (26)..(363): Homolog of NCBI NO: 15217460 NR Description: hypothetical protein; protein id: At1g09220.1
  misc_feature (17)..(362): Homolog of NCBI NO: 15241180 NR Description: putative protein; protein id: At5g56310.1 thaliana] >gi|10177829|dbj|BAB11258.1|
  misc_feature (1)..(360): Homolog of NCBI NO: 15241651 NR Description: putative protein; protein id: At5g08510.1 thaliana] >gi|9759345|dbj|BAB10000.1|
  misc_feature (17)..(362): Homolog of NCBI NO: 15225375 NR Description: unknown protein; protein id: At2g20540.1
  misc_feature (82)..(362): Homolog of NCBI NO: 15241714 NR Description: putative protein; protein id: At5g39350.1
  misc_feature (17)..(96): Homolog of NCBI NO: 15241714 NR Description: putative protein; protein id: At5g39350.1
  misc_feature (22)..(362): Homolog of NCBI NO: 34902972 NR Description: unnamed protein product [Oryza sativa (japonica group)] >gi|9558518|dbj|BAB03436.1| unnamed protein product
  misc_feature (22)..(363): Homolog of NCBI NO: 15239979 NR Description: selenium-binding protein-like; protein id:
  misc_feature (17)..(362): Homolog of NCBI NO: 9958072 NR Description: Hypothetical protein [Arabidopsis thaliana]
MLTSSTTNSNDSISCLITIRTALVGMYLVGGNMIDAHKVFDEMPERNPVTWNVMITGLTNLGDFEKALCFLEKMPNRTVVSWTTIIDGYARVDKPKEAILLFSRMVACDAIKPNEITILAILPAVWNLGDLKMCGSVHAYVGKRGFVPCDIRVTNSLIDAYAKCGCIQSAFKFFIEIPNGRKNLVSWTTMISAFAIHGMGKEAVSMFKDMERLGLKPNRVTMISVLNACSHGGLAEEEFLEFFNTMVNEYKITPDVKHYGCLVDMLRRKGRLEEAEKIALEIPIEEKAVVWRMLLGACSVYDDAELAERVTRKLMELERSHGGDYVLMSNIFCGTGRFLDAQRFRKQMDVRGVAKLPGHSQVT

SEQ ID NO: 82071 - protein, 338 aa, Arabidopsis thaliana; identical to SEQ ID NO: 73962
  peptide (1)..(338): Ceres Seq. ID no. 12663222
  misc_feature (1)..(27): Pfam Name: PPR repeat Pfam Description: PPR repeat
  misc_feature (1)..(338): Homolog of NCBI NO: 25402526 NR Description: protein T12M4.7 [imported] - Arabidopsis thaliana
  misc_feature (1)..(338): Homolog of NCBI NO: 15217460 NR Description: hypothetical protein; protein id: At1g09220.1
  misc_feature (1)..(337): Homolog of NCBI NO: 15241180 NR Description: putative protein; protein id: At5g56310.1 thaliana] >gi|10177829|dbj|BAB11258.1|
  misc_feature (1)..(335): Homolog of NCBI NO: 15241651 NR Description: putative protein; protein id: At5g08510.1 thaliana] >gi|9759345|dbj|BAB10000.1|
  misc_feature (1)..(337): Homolog of NCBI NO: 15225375 NR Description: unknown protein; protein id: At2g20540.1
  misc_feature (57)..(337): Homolog of NCBI NO: 15241714 NR Description: putative protein; protein id: At5g39350.1
  misc_feature (1)..(71): Homolog of NCBI NO: 15241714 NR Description: putative protein; protein id: At5g39350.1
  misc_feature (1)..(337): Homolog of NCBI NO: 34902972 NR Description: unnamed protein product [Oryza sativa (japonica group)] >gi|9558518|dbj|BAB03436.1| unnamed protein product
  misc_feature (1)..(338): Homolog of NCBI NO: 15239979 NR Description: selenium-binding protein-like; protein id:
  misc_feature (1)..(337): Homolog of NCBI NO: 9958072 NR Description: Hypothetical protein [Arabidopsis thaliana]

SEQ ID NO: 82072 - DNA, 1401 bp, Arabidopsis thaliana
  misc_feature (1)..(1401): Ceres Seq. ID no. 12663242
  misc_feature: MA Experiment ID: 20000307 Result: Up-regulated in Transcription
  misc_feature: MA Experiment 20000307 PARAMETER Experiment Name: At_Germinating_Seeds_Sub_P Parameter: Age (hr) Value: 24 vs. 0
  misc_feature: MA Experiment 20000307 PARAMETER Experiment Name: At_Germinating_Seeds_Sub_P Parameter: Organism Value: A. thaliana
  misc_feature: MA Experiment 20000307 PARAMETER Experiment Name: At_Germinating_Seeds_Sub_P Parameter: Plant Line Value: WS
  misc_feature: MA Experiment 20000307 PARAMETER Experiment Name: At_Germinating_Seeds_Sub_P Parameter: Tissue Value: Germinating Seeds
  misc_feature: MA Experiment ID: 20000315 Result: Down-regulated in Transcription
  misc_feature: MA Experiment 20000315 PARAMETER Experiment Name: At_14day_Shoots-Roots_Sub_P Parameter: Age (day) Value: 14
  misc_feature: MA Experiment 20000315 PARAMETER Experiment Name: At_14day_Shoots-Roots_Sub_P Parameter: Organism Value: A. thaliana
  misc_feature: MA Experiment 20000315 PARAMETER Experiment Name: At_14day_Shoots-Roots_Sub_P Parameter: Plant Line Value: WS
  misc_feature: MA Experiment 20000315 PARAMETER Experiment Name: At_14day_Shoots-Roots_Sub_P Parameter: Tissue Value: Shoots vs. Whole Plant
  misc_feature: MA Experiment ID: 20000328 Result: Down-regulated in Transcription
  misc_feature: MA Experiment 20000328 PARAMETER Experiment Name: At_42deg_Heat_Sub_P Parameter: Age (day) Value: 14
  misc_feature: MA Experiment 20000328 PARAMETER Experiment Name: At_42deg_Heat_Sub_P Parameter: Organism Value: A. thaliana
  misc_feature: MA Experiment 20000328 PARAMETER Experiment Name: At_42deg_Heat_Sub_P Parameter: Plant Line Value: WS
  misc_feature: MA Experiment 20000328 PARAMETER Experiment Name: At_42deg_Heat_Sub_P Parameter: Temperature (deg C) Value: 42 vs. 22
  misc_feature: MA Experiment 20000328 PARAMETER Experiment Name: At_42deg_Heat_Sub_P Parameter: Timepoint (hr) Value: 6
  misc_feature: MA Experiment 20000328 PARAMETER Experiment Name: At_42deg_Heat_Sub_P Parameter: Tissue Value: Aerial
atggctggacttaagatctggcaagccatctttatcaccattgcactgatcatcattgtcgtactctctgttctttcattttgtctcatttggaaaaagaaatcaagaagatccaaaaccttaagtcttcccatcatacaaacccctgtggtgtcaaaggagatcaaggaagtcaggatcgagcatgttgtctcaacgagtagtaacttcgatcctcaggatgaaaacaacaatgaatctgacaaattcttgcttaatttggaaatggagaagaacagagagaatggtttgagtagtagccggtctggttcaggcaaagaaggttatttatgtgttgcaaaccggtctacttcatcattgtatgagatggctacaccatcaccatcacctctttctggtttacctgagtcacaccttggatggggtcattggtttactctgagagatcttgagatagcaacaaacagattctcaaaggaaaatgtgattggtgaaggaggctatggagttgtttaccgaggcgagttggtcaatgggagtcttgttgccgtgaaaaagatcctaaaccacttgggacaagcagagaaagagtttagagtagaggtagatgctataggtcatgtgcgtcacaagaacttggtacgtcttctaggatactgcattgaaggcacaaacaggatattggtttatgagtatatgaacaatgggaaccttgaagaatggcttcacggagcaatgaaacatcatggatatctaacttgggaagctcgaatgaaagttctcactggaacatccaaggctcttgcatatctacacgaggcaatcgaaccaaaagtggtgcatagagacatcaagtcgagcaacatcttgatcgatgatagattcaatgcaaagatttctgattttggccttgccaagttacttggagatgggaaaagccatgtgactactagagtcatgggaacatttgggtatgttgctcctgagtatgcgaataccggacttttgaatgaaaagagtgatgtgtacagctttggtgtcttggtcttagaagcaataaccggaagagatcctgtggattacgcgcggcctgctaatgaggtgaatttggttgagtggttgaagatgatggtaggatctaagagattagaagaagtcattgatccaaacatagcagttaggccagcgactagagcactgaaacgagtacttcttacagcacttagatgcattgatcctgattctgaaaagagacctaaaatgagtcaagttgtgcgtatgctggagtctgaggaatatcctgtaccaagagaggagcggagagtgcgcagaacgcaagaggaaaactcggataccgatagaagcagaccggtttcaagatcacagagcaagagactgtaa

SEQ ID NO: 82073 - protein, 466 aa, Arabidopsis thaliana
  peptide (1)..(466): Ceres Seq. ID no. 12663243
  misc_feature (157)..(428): Pfam Name: Protein kinase domain Pfam Description: Protein kinase domain
  misc_feature (1)..(466): Homolog of NCBI NO: 15217511 NR Description: putative ser/thr protein kinase; protein id: [Arabidopsis thaliana] >gi|25402546|pir||G86227 hypothetical
  misc_feature (3)..(465): Homolog of NCBI NO: 18405946 NR Description: expressed protein; protein id: At1g56720.1,
  misc_feature (3)..(465): Homolog of NCBI NO: 21593085 NR Description: Putative protein kinase [Arabidopsis thaliana]
  misc_feature (3)..(465): Homolog of NCBI NO: 25404144 NR Description: probable protein kinase F25P12.84 [imported] - thaliana >gi|9954741|gb|AAG09092.1|AC009323_3 Putative protein
  misc_feature (4)..(465): Homolog of NCBI NO: 34894708 NR Description: Putative protein kinase [Oryza sativa (japonica group)] >gi|12328581|dbj|BAB21240.1| Putative protein kinase
  misc_feature (3)..(456): Homolog of NCBI NO: 15238840 NR Description: Ser/Thr specific protein kinase - like protein;
  misc_feature (1)..(464): Homolog of NCBI NO: 15231637 NR Description: receptor-like protein kinase; protein id:
  misc_feature (1)..(464): Homolog of NCBI NO: 15228043 NR Description: putative protein kinase; protein id: At2g42960.1
  misc_feature (4)..(454): Homolog of NCBI NO: 22331140 NR Description: serine/threonine protein kinase, putative; id: At3g17420.1, supported by cDNA: gi_17529287, supported by gi_20465832 [Arabidopsis thaliana] >gi|11994680|dbj|BAB02918.1|
  misc_feature (133)..(441): Homolog of NCBI NO: 34897534 NR Description: OSJNBa0042L16.4 [Oryza sativa (japonica
MAGLKIWQAIFITIALIIIVVLSVLSFCLIWKKKSRRSKTLSLPIIQTPVVSKEIKEVRIEHVVSTSSNFDPQDENNNESDKFLLNLEMEKNRENGLSSSRSGSGKEGYLCVANRSTSSLYEMATPSPSPLSGLPESHLGWGHWFTLRDLEIATNRFSKENVIGEGGYGVVYRGELVNGSLVAVKKILNHLGQAEKEFRVEVDAIGHVRHKNLVRLLGYCIEGTNRILVYEYMNNGNLEEWLHGAMKHHGYLTWEARMKVLTGTSKALAYLHEAIEPKVVHRDIKSSNILIDDRFNAKISDFGLAKLLGDGKSHVTTRVMGTFGYVAPEYANTGLLNEKSDVYSFGVLVLEAITGRDPVDYARPANEVNLVEWLKMMVGSKRLEEVIDPNIAVRPATRALKRVLLTALRCIDPDSEKRPKMSQVVRMLESEEYPVPREERRVRRTQEENSDTDRSRPVSRSQSKRL

SEQ ID NO: 82074 - protein, 378 aa, Arabidopsis thaliana
  peptide (1)..(378): Ceres Seq. ID no. 12663244
  misc_feature (69)..(340): Pfam Name: Protein kinase domain Pfam Description: Protein kinase domain
  misc_feature (1)..(378): Homolog of NCBI NO: 15217511 NR Description: putative ser/thr protein kinase; protein id: [Arabidopsis thaliana] >gi|25402546|pir||G86227 hypothetical
  misc_feature (1)..(377): Homolog of NCBI NO: 18405946 NR Description: expressed protein; protein id: At1g56720.1,
  misc_feature (1)..(377): Homolog of NCBI NO: 21593085 NR Description: Putative protein kinase [Arabidopsis thaliana]
  misc_feature (1)..(377): Homolog of NCBI NO: 25404144 NR Description: probable protein kinase F25P12.84 [imported] - thaliana >gi|9954741|gb|AAG09092.1|AC009323_3 Putative protein
  misc_feature (1)..(377): Homolog of NCBI NO: 34894708 NR Description: Putative protein kinase [Oryza sativa (japonica group)] >gi|12328581|dbj|BAB21240.1| Putative protein kinase
  misc_feature (1)..(368): Homolog of NCBI NO: 15238840 NR Description: Ser/Thr specific protein kinase - like protein;
  misc_feature (1)..(376): Homolog of NCBI NO: 15231637 NR Description: receptor-like protein kinase; protein id:
  misc_feature (1)..(376): Homolog of NCBI NO: 15228043 NR Description: putative protein kinase; protein id: At2g42960.1
  misc_feature (1)..(366): Homolog of NCBI NO: 22331140 NR Description: serine/threonine protein kinase, putative; id: At3g17420.1, supported by cDNA: gi_17529287, supported by gi_20465832 [Arabidopsis thaliana] >gi|11994680|dbj|BAB02918.1|
  misc_feature (45)..(353): Homolog of NCBI NO: 34897534 NR Description: OSJNBa0042L16.4 [Oryza sativa (japonica
MEKNRENGLSSSRSGSGKEGYLCVANRSTSSLYEMATPSPSPLSGLPESHLGWGHWFTLRDLEIATNRFSKENVIGEGGYGVVYRGELVNGSLVAVKKILNHLGQAEKEFRVEVDAIGHVRHKNLVRLLGYCIEGTNRILVYEYMNNGNLEEWLHGAMKHHGYLTWEARMKVLTGTSKALAYLHEAIEPKVVHRDIKSSNILIDDRFNAKISDFGLAKLLGDGKSHVTTRVMGTFGYVAPEYANTGLLNEKSDVYSFGVLVLEAITGRDPVDYARPANEVNLVEWLKMMVGSKRLEEVIDPNIAVRPATRALKRVLLTALRCIDPDSEKRPKMSQVVRMLESEEYPVPREERRVRRTQEENSDTDRSRPVSRSQSKRL

SEQ ID NO: 82075 - protein, 344 aa, Arabidopsis thaliana
  peptide (1)..(344): Ceres Seq. ID no. 12663245
  misc_feature (35)..(306): Pfam Name: Protein kinase domain Pfam Description: Protein kinase domain
  misc_feature (1)..(344): Homolog of NCBI NO: 15217511 NR Description: putative ser/thr protein kinase; protein id: [Arabidopsis thaliana] >gi|25402546|pir||G86227 hypothetical
  misc_feature (1)..(343): Homolog of NCBI NO: 18405946 NR Description: expressed protein; protein id: At1g56720.1,
  misc_feature (1)..(343): Homolog of NCBI NO: 21593085 NR Description: Putative protein kinase [Arabidopsis thaliana]
  misc_feature (1)..(343): Homolog of NCBI NO: 25404144 NR Description: probable protein kinase F25P12.84 [imported] - thaliana >gi|9954741|gb|AAG09092.1|AC009323_3 Putative protein
  misc_feature (1)..(343): Homolog of NCBI NO: 34894708 NR Description: Putative protein kinase [Oryza sativa (japonica group)] >gi|12328581|dbj|BAB21240.1| Putative protein kinase
  misc_feature (1)..(334): Homolog of NCBI NO: 15238840 NR Description: Ser/Thr specific protein kinase - like protein;
  misc_feature (1)..(342): Homolog of NCBI NO: 15231637 NR Description: receptor-like protein kinase; protein id:
  misc_feature (1)..(342): Homolog of NCBI NO: 15228043 NR Description: putative protein kinase; protein id: At2g42960.1
  misc_feature (1)..(332): Homolog of NCBI NO: 22331140 NR Description: serine/threonine protein kinase, putative; id: At3g17420.1, supported by cDNA: gi_17529287, supported by gi_20465832 [Arabidopsis thaliana] >gi|11994680|dbj|BAB02918.1|
  misc_feature (11)..(319): Homolog of NCBI NO: 34897534 NR Description: OSJNBa0042L16.4 [Oryza sativa (japonica
MATPSPSPLSGLPESHLGWGHWFTLRDLEIATNRFSKENVIGEGGYGVVYRGELVNGSLVAVKKILNHLGQAEKEFRVEVDAIGHVRHKNLVRLLGYCIEGTNRILVYEYMNNGNLEEWLHGAMKHHGYLTWEARMKVLTGTSKALAYLHEAIEPKVVHRDIKSSNILIDDRFNAKISDFGLAKLLGDGKSHVTTRVMGTFGYVAPEYANTGLLNEKSDVYSFGVLVLEAITGRDPVDYARPANEVNLVEWLKMMVGSKRLEEVIDPNIAVRPATRALKRVLLTALRCIDPDSEKRPKMSQVVRMLESEEYPVPREERRVRRTQEENSDTDRSRPVSRSQSKRL

SEQ ID NO: 82076 - DNA, 1167 bp, Arabidopsis thaliana
  misc_feature (1)..(1167): Ceres Seq. ID no. 12663257
  misc_feature: MA Experiment ID: 20000440 Result: Down-regulated in Transcription
  misc_feature: MA Experiment 20000440 PARAMETER Experiment Name: At_Closed-Flower__Sub_P Parameter: Tissue Value: Closed Flower vs. Whole Plant
atgaaaacgcttttgtattggggttggagtagtctcgcaggactcattctcttcagcattcttgcacatggggaaatgaaaaccttcaacgagtccaatggaacaaatgcaaatgtcctgatggtaggactcacgctcgtccaagccgctgctgctaaaggagcggtgtgtctggatgggtcagtgcctggatatcatttgtgtcgcgggtatggttcaggagcaaacaactggatcattcagttgcagggaggtgcatggtgtgacagcatacaaaactgtcagagccgtaaagggagtggttatggatcatctaccttaatggagaaagagttggcatttttaggattactaagcaataaagccgctgaaaatccagacttttacaattggaacaaagtaaaagtccggtattgtgatggtgcatcctttgatggtgacagcgaaaacaaggcggcacaacttcagtatagaggaaagcgtatatttttagctgtcatggaagatttgatggaaaagggaatgcgtcaggcaaaacaggctttgctcagcggatgttcttctgggggtctttctgccattttacgatgcgatgatttcaataacttgtttcctcctaccaccacagtaaaatgcatgagcgatgctggcttcttcctcgacgccgttgatgtatctggaggtcattctttaaggcgtatgtattctggtgttgtgaacactcagggtttgcaaaacacacttcctcccacttgtacaagccatatcaaaccatttttgtgttttttccctcaatacataatcaaccaagtcaagaccccgttgtttattctcaactcgggatttgattcgtggcagattggaaatagtttagccccaccatctgctgataagagtggcagttggcataactgcagttttagctttaggtgcactgcctctcagatgcacttcttagaaggtttcaagatgagcatgttagatgcgttgaagaccttttcgaagtttagcaagaatggagttttaattacctcgggatgggctcattgtcaagcggagagacaagatacttggtttcctggatactctggagcgggcaaagctaaggggattgctgtggctgttggagattggtatttcgaaagaacaaaacagaatagctcatag

SEQ ID NO: 82077 - protein, 388 aa, Arabidopsis thaliana
  peptide (1)..(388): Ceres Seq. ID no. 12663258
  misc_feature (26)..(388): Pfam Name: Pectinacetylesterase Pfam Description: Pectinacetylesterase
  misc_feature (1)..(388): Homolog of NCBI NO: 30681218 NR Description: pectinacetylesterase, putative [Arabidopsis
  misc_feature (26)..(388): Homolog of NCBI NO: 25347291 NR Description: hypothetical protein [imported] - Arabidopsis >gi|3482930|gb|AAC33215.1| Similar to pectinacetylesterase
  misc_feature (1)..(382): Homolog of NCBI NO: 25347293 NR Description: probable pectinacetylesterase precursor T8L23.6 - Arabidopsis thaliana >gi|12321351|gb|AAG50747.1|AC079733_15
  misc_feature (1)..(382): Homolog of NCBI NO: 30696158 NR Description: pectinacetylesterase, putative [Arabidopsis
  misc_feature (1)..(382): Homolog of NCBI NO: 21703105 NR Description: At1g57590/T8L23_6 [Arabidopsis thaliana]
  misc_feature (35)..(384): Homolog of NCBI NO: 18397406 NR Description: pectinacetylesterase, putative; protein id: supported by cDNA: gi_15292826, supported by cDNA: gi_16226324, by cDNA: gi_20465792 [Arabidopsis thaliana]
  misc_feature (37)..(383): Homolog of NCBI NO: 15226462 NR Description: pectinacetylesterase, putative; protein id: supported by cDNA: gi_15450606 [Arabidopsis thaliana]
  misc_feature (35)..(384): Homolog of NCBI NO: 7487997 NR Description: pectin acetylesterase homolog F21E10.11 - thaliana >gi|3047082|gb|AAC13595.1| similar to Vigna radiata
  misc_feature (38)..(384): Homolog of NCBI NO: 28392968 NR Description: putative pectinacetylesterase [Arabidopsis >gi|28827554|gb|AAO50621.1| putative pectinacetylesterase
  misc_feature (9)..(382): Homolog of NCBI NO: 34913332 NR Description: putative pectin acetylesterase precursor [Oryza
MKTLLYWGWSSLAGLILFSILAHGEMKTFNESNGTNANVLMVGLTLVQAAAAKGAVCLDGSVPGYHLCRGYGSGANNWIIQLQGGAWCDSIQNCQSRKGSGYGSSTLMEKELAFLGLLSNKAAENPDFYNWNKVKVRYCDGASFDGDSENKAAQLQYRGKRIFLAVMEDLMEKGMRQAKQALLSGCSSGGLSAILRCDDFNNLFPPTTTVKCMSDAGFFLDAVDVSGGHSLRRMYSGVVNTQGLQNTLPPTCTSHIKPFLCFFPQYIINQVKTPLFILNSGFDSWQIGNSLAPPSADKSGSWHNCSFSFRCTASQMHFLEGFKMSMLDALKTFSKFSKNGVLITSGWAHCQAERQDTWFPGYSGAGKAKGIAVAVGDWYFERTKQNSS

SEQ ID NO: 82078 - protein, 363 aa, Arabidopsis thaliana; identical to SEQ ID NO: 81333
  peptide (1)..(363): Ceres Seq. ID no. 12663259
  misc_feature (1)..(363): Pfam Name: Pectinacetylesterase Pfam Description: Pectinacetylesterase
  misc_feature (1)..(363): Homolog of NCBI NO: 30681218 NR Description: pectinacetylesterase, putative [Arabidopsis
  misc_feature (1)..(363): Homolog of NCBI NO: 25347291 NR Description: hypothetical protein [imported] - Arabidopsis >gi|3482930|gb|AAC33215.1| Similar to pectinacetylesterase
  misc_feature (1)..(357): Homolog of NCBI NO: 25347293 NR Description: probable pectinacetylesterase precursor T8L23.6 - Arabidopsis thaliana >gi|12321351|gb|AAG50747.1|AC079733_15
  misc_feature (1)..(357): Homolog of NCBI NO: 30696158 NR Description: pectinacetylesterase, putative [Arabidopsis
  misc_feature (1)..(357): Homolog of NCBI NO: 21703105 NR Description: At1g57590/T8L23_6 [Arabidopsis thaliana]
  misc_feature (10)..(359): Homolog of NCBI NO: 18397406 NR Description: pectinacetylesterase, putative; protein id: supported by cDNA: gi_15292826, supported by cDNA: gi_16226324, by cDNA: gi_20465792 [Arabidopsis thaliana]
  misc_feature (12)..(358): Homolog of NCBI NO: 15226462 NR Description: pectinacetylesterase, putative; protein id: supported by cDNA: gi_15450606 [Arabidopsis thaliana]
  misc_feature (10)..(359): Homolog of NCBI NO: 7487997 NR Description: pectin acetylesterase homolog F21E10.11 - thaliana >gi|3047082|gb|AAC13595.1| similar to Vigna radiata
  misc_feature (13)..(359): Homolog of NCBI NO: 28392968 NR Description: putative pectinacetylesterase [Arabidopsis >gi|28827554|gb|AAO50621.1| putative pectinacetylesterase
  misc_feature (1)..(357): Homolog of NCBI NO: 34913332 NR Description: putative pectin acetylesterase precursor [Oryza

SEQ ID NO: 82079 - protein, 348 aa, Arabidopsis thaliana; identical to SEQ ID NO: 81334
  peptide (1)..(348): Ceres Seq. ID no. 12663260
  misc_feature (1)..(348): Pfam Name: Pectinacetylesterase Pfam Description: Pectinacetylesterase
  misc_feature (1)..(348): Homolog of NCBI NO: 30681218 NR Description: pectinacetylesterase, putative [Arabidopsis
  misc_feature (1)..(348): Homolog of NCBI NO: 25347291 NR Description: hypothetical protein [imported] - Arabidopsis >gi|3482930|gb|AAC33215.1| Similar to pectinacetylesterase
  misc_feature (1)..(342): Homolog of NCBI NO: 25347293 NR Description: probable pectinacetylesterase precursor T8L23.6 - Arabidopsis thaliana >gi|12321351|gb|AAG50747.1|AC079733_15
  misc_feature (1)..(342): Homolog of NCBI NO: 30696158 NR Description: pectinacetylesterase, putative [Arabidopsis
  misc_feature (1)..(342): Homolog of NCBI NO: 21703105 NR Description: At1g57590/T8L23_6 [Arabidopsis thaliana]
  misc_feature (1)..(344): Homolog of NCBI NO: 18397406 NR Description: pectinacetylesterase, putative; protein id: supported by cDNA: gi_15292826, supported by cDNA: gi_16226324, by cDNA: gi_20465792 [Arabidopsis thaliana]
  misc_feature (1)..(343): Homolog of NCBI NO: 15226462 NR Description: pectinacetylesterase, putative; protein id: supported by cDNA: gi_15450606 [Arabidopsis thaliana]
  misc_feature (1)..(344): Homolog of NCBI NO: 7487997 NR Description: pectin acetylesterase homolog F21E10.11 - thaliana >gi|3047082|gb|AAC13595.1| similar to Vigna radiata
  misc_feature (1)..(344): Homolog of NCBI NO: 28392968 NR Description: putative pectinacetylesterase [Arabidopsis >gi|28827554|gb|AAO50621.1| putative pectinacetylesterase
  misc_feature (1)..(342): Homolog of NCBI NO: 34913332 NR Description: putative pectin acetylesterase precursor [Oryza

SEQ ID NO: 82080 - DNA, 954 bp, Arabidopsis thaliana
  misc_feature (1)..(954): Ceres Seq. ID no. 12663277
  misc_feature: MA Experiment ID: 20000180 Result: Up-regulated in Transcription
  misc_feature: MA Experiment 20000180 PARAMETER Experiment Name: At_Germinating_Seeds_P Parameter: Age (hr) Value: 24 vs. 0
  misc_feature: MA Experiment 20000180 PARAMETER Experiment Name: At_Germinating_Seeds_P Parameter: Tissue Value: Germinating Seeds
  misc_feature: MA Experiment ID: 20000184 Result: Up-regulated in Transcription
  misc_feature: MA Experiment 20000184 PARAMETER Experiment Name: At_Shoots__P Parameter: Age (day) Value: 7
  misc_feature: MA Experiment 20000184 PARAMETER Experiment Name: At_Shoots__P Parameter: Tissue Value: Shoots vs. Whole Plant
  misc_feature: MA Experiment ID: 20000264 Result: Up-regulated in Transcription
  misc_feature: MA Experiment 20000264 PARAMETER Experiment Name: At_Open_Flower_P Parameter: Age (day) Value: 21
  misc_feature: MA Experiment 20000264 PARAMETER Experiment Name: At_Open_Flower_P Parameter: Plant Line Value: WS
  misc_feature: MA Experiment 20000264 PARAMETER Experiment Name: At_Open_Flower_P Parameter: Tissue Value: Open Flower vs. Whole Plant
  misc_feature: MA Experiment ID: 20000265 Result: Up-regulated in Transcription
  misc_feature: MA Experiment 20000265 PARAMETER Experiment Name: At_Open_Flower_P Parameter: Age (day) Value: 21
  misc_feature: MA Experiment 20000265 PARAMETER Experiment Name: At_Open_Flower_P Parameter: Plant Line Value: WS
  misc_feature: MA Experiment 20000265 PARAMETER Experiment Name: At_Open_Flower_P Parameter: Tissue Value: Closed Flower vs. Whole Plant
  misc_feature: MA Experiment ID: 20000286 Result: Up-regulated in Transcription
  misc_feature: MA Experiment 20000286 PARAMETER Experiment Name: At_Open_Flower_P Parameter: Age (day) Value: 21
  misc_feature: MA Experiment 20000286 PARAMETER Experiment Name: At_Open_Flower_P Parameter: Plant Line Value: WS
  misc_feature: MA Experiment 20000286 PARAMETER Experiment Name: At_Open_Flower_P Parameter: Tissue Value: Half Open vs. Whole Plant
  misc_feature: MA Experiment ID: 20000438 Result: Up-regulated in Transcription
  misc_feature: MA Experiment 20000438 PARAMETER Experiment Name: At_Shoots__P Parameter: Age (day) Value: 14
  misc_feature: MA Experiment 20000438 PARAMETER Experiment Name: At_Shoots__P Parameter: Tissue Value: Shoots vs. Whole Plant
  misc_feature: MA Experiment ID: 20000495 Result: Up-regulated in Transcription
  misc_feature: MA Experiment 20000495 PARAMETER Experiment Name: At_Guard_Cells_P Parameter: Harvest Date Value: 8/2/2002
  misc_feature: MA Experiment 20000495 PARAMETER Experiment Name: At_Guard_Cells_P Parameter: Organism Value: A. thaliana
  misc_feature: MA Experiment 20000495 PARAMETER Experiment Name: At_Guard_Cells_P Parameter: Tissue Value: Guard Cells vs. Leaves
atgggtcaatatgcaacagtgtgggatcaaaaagaagcaagtgagataatcaaagattggaatggcgttgaccaagtccttctcagaaacccacatggtgcttctgccaagataagtttacatggaggacaagtgatttcatggaggaatgaactaggcgaagagcttcttttcactagcaataaggctatattcaaacccccaaaatcaatgcgtggagggattcagatttgttatccgcagtttggggattgtggatcactggatcaacatgggtttgcaaggaacaaaatttgggtaatcgatgagaacccacctccacttaactcaaacgaatccttaggaaaatcctttgttgatcttcttttgaaaccatcagaagatgacttaaagcaatggcctcatagtttcgagttccgtcttagggtttcgcttgctgtagatggcgacttaacattgacttctcggattagaaacatcaatggcaagccttttagcttctcatttgcatatcacacctacctctctgtctctgacataagtgaagtgagaattgaagggttggagacattggactacttagacaacctcagccaaagacagcttttgactgaacaaggcgatgcaataacctttgaatccgagatggaccggacataccttagatcaccaaaggtggttgcagttcttgatcatgaacggaaaagaacatatgttatcggaaaggaaggacttccagacaccgtggtgtggaatccatgggagaagaaatcgaaaacaatggcggattttggtgatgaagagtacaaaagcatgctttgtgtggatggtgcagcagtggagagaccgatcactttgaagccaggagaagaatggaccggccggctaatattgaccgctgttaaatccagtttctgcttcgatcaactcgaactacagagcaagggattctga

SEQ ID NO: 82081 - protein, 317 aa, Arabidopsis thaliana
  peptide (1)..(317): Ceres Seq. ID no. 12663278
  misc_feature (24)..(299): Pfam Name: Aldose 1-epimerase Pfam Description: Aldose 1-epimerase
  misc_feature (1)..(317): Homolog of NCBI NO: 15233165 NR Description: putative protein; protein id: At3g61610.1
  misc_feature (9)..(304): Homolog of NCBI NO: 15236591 NR Description: putative protein; protein id: At4g23730.1, by cDNA: 21949. [Arabidopsis thaliana] >gi|7486738|pir||T05605
  misc_feature (15)..(311): Homolog of NCBI NO: 40253263 NR Description: putative Aldose 1-epimerase [Oryza sativa
  misc_feature (14)..(311): Homolog of NCBI NO: 2501555 NR Description: POSSIBLE APOSPORY-ASSOCIATED PROTEIN C
  misc_feature (15)..(311): Homolog of NCBI NO: 15242099 NR Description: apospory-associated protein C; protein id:
  misc_feature (2)..(311): Homolog of NCBI NO: 19387263 NR Description: putative apospory-associated protein C [Oryza
  misc_feature (10)..(311): Homolog of NCBI NO: 38344152 NR Description: OSJNBa0041A02.19 [Oryza sativa (japonica
  misc_feature (19)..(311): Homolog of NCBI NO: 18395868 NR Description: expressed protein; protein id: At3g01590.1, by cDNA: 41354., supported by cDNA: gi_16612257, supported by gi_20258972 [Arabidopsis thaliana]
  misc_feature (19)..(311): Homolog of NCBI NO: 16612258 NR Description: AT3g01590/F4P13_13 [Arabidopsis thaliana]
  misc_feature (16)..(311): Homolog of NCBI NO: 18417396 NR Description: putative protein; protein id: At5g14500.1,
MGQYATVWDQKEASEIIKDWNGVDQVLLRNPHGASAKISLHGGQVISWRNELGEELLFTSNKAIFKPPKSMRGGIQICYPQFGDCGSLDQHGFARNKIWVIDENPPPLNSNESLGKSFVDLLLKPSEDDLKQWPHSFEFRLRVSLAVDGDLTLTSRIRNINGKPFSFSFAYHTYLSVSDISEVRIEGLETLDYLDNLSQRQLLTEQGDAITFESEMDRTYLRSPKVVAVLDHERKRTYVIGKEGLPDTVVWNPWEKKSKTMADFGDEEYKSMLCVDGAAVERPITLKPGEEWTGRLILTAVKSSFCFDQLELQSKGF

SEQ ID NO: 82082 - protein, 247 aa, Arabidopsis thaliana
  peptide (1)..(247): Ceres Seq. ID no. 12663279
  misc_feature (1)..(229): Pfam Name: Aldose 1-epimerase Pfam Description: Aldose 1-epimerase
  misc_feature (1)..(247): Homolog of NCBI NO: 15233165 NR Description: putative protein; protein id: At3g61610.1
  misc_feature (1)..(234): Homolog of NCBI NO: 15236591 NR Description: putative protein; protein id: At4g23730.1, by cDNA: 21949. [Arabidopsis thaliana] >gi|7486738|pir||T05605
  misc_feature (1)..(241): Homolog of NCBI NO: 40253263 NR Description: putative Aldose 1-epimerase [Oryza sativa
  misc_feature (1)..(241): Homolog of NCBI NO: 2501555 NR Description: POSSIBLE APOSPORY-ASSOCIATED PROTEIN C
  misc_feature (1)..(241): Homolog of NCBI NO: 15242099 NR Description: apospory-associated protein C; protein id:
  misc_feature (1)..(241): Homolog of NCBI NO: 19387263 NR Description: putative apospory-associated protein C [Oryza
  misc_feature (1)..(241): Homolog of NCBI NO: 38344152 NR Description: OSJNBa0041A02.19 [Oryza sativa (japonica
  misc_feature (1)..(241): Homolog of NCBI NO: 18395868 NR Description: expressed protein; protein id: At3g01590.1, by cDNA: 41354., supported by cDNA: gi_16612257, supported by gi_20258972 [Arabidopsis thaliana]
  misc_feature (1)..(241): Homolog of NCBI NO: 16612258 NR Description: AT3g01590/F4P13_13 [Arabidopsis thaliana]
  misc_feature (1)..(241): Homolog of NCBI NO: 18417396 NR Description: putative protein; protein id: At5g14500.1,
MRGGIQICYPQFGDCGSLDQHGFARNKIWVIDENPPPLNSNESLGKSFVDLLLKPSEDDLKQWPHSFEFRLRVSLAVDGDLTLTSRIRNINGKPFSFSFAYHTYLSVSDISEVRIEGLETLDYLDNLSQRQLLTEQGDAITFESEMDRTYLRSPKVVAVLDHERKRTYVIGKEGLPDTVVWNPWEKKSKTMADFGDEEYKSMLCVDGAAVERPITLKPGEEWTGRLILTAVKSSFCFDQLELQSKGF

SEQ ID NO: 82083 - DNA, 2225 bp, Arabidopsis thaliana
  misc_feature (1)..(2225): Ceres Seq. ID no. 12663318
  misc_feature: MA Experiment ID: 20000439 Result: Up-regulated in Transcription
  misc_feature: MA Experiment 20000439 PARAMETER Experiment Name: At_Roots__P Parameter: Age (day) Value: 14 vs. 21
  misc_feature: MA Experiment 20000439 PARAMETER Experiment Name: At_Roots__P Parameter: Organism Value: A. thaliana
  misc_feature: MA Experiment 20000439 PARAMETER Experiment Name: At_Roots__P Parameter: Tissue Value: Roots vs. Whole Plant
  misc_feature: MA Experiment ID: 20000794 Result: Up-regulated in Transcription
  misc_feature: MA Experiment 20000794 PARAMETER Experiment Name: At_Petals_P Parameter: Age (day) Value: 23-25 days
  misc_feature: MA Experiment 20000794 PARAMETER Experiment Name: At_Petals_P Parameter: Plant Line Value: WS
  misc_feature: MA Experiment 20000794 PARAMETER Experiment Name: At_Petals_P Parameter: Tissue Value: Petals vs. Whole plant
aaaaacagttcgttgttcctttaatccgtaaaaaaaaacaaaaaaagttttgatttttctctgtgagtttgagtagtagtaattaatagaaacaatggaggttgattcaagcaaggatccgaaagtctaacgggtcaaaaccaaaaaattccggatggagtcggcacgacttgtgggtgactacgcacttggcccgagaattgggtctggttcgtttgcggtggtgtggttagcgaagcatcgatcttctggtttagaagttgccgtcaaagagattgataagaaacttcttagccctaaagtaagagataatcttcttaaagagatttcgatccttagcacaatcgatcatcctaatatcatccgattctacgaagcaatcgagactggagataggatatttcttgtgttggagtattgtagtggaggtgatcttgctggctatatcaatcgccatggcaaagtacctgaagctgttgctaaacattttatgaggcaattggctttagggttacaagtacttcaagagaagcattttattcaccgagatttaaagcctcagaatttacttttatcttccaaggaagtaactccattgctaaagataggagattttgggtttgcaaggtctctaacaccggagagcatggcggaaacattttgcggttctccattgtatatggctccagaaattatccggaatcaaaagtatgatgctaaggctgacttatggagtgccggtgcgattttgtttcaacttgttactgggaaaccaccttttgatggaaataatcacatacagctttttcataatattgtgagagacactgagctgaaatttcctgaagatactaggaatgagattcatccagattgtgttgatctgtgcagaagtcttctccgccgaaacccaattgaacgcttgacattccgagagttcttcaatcacatgttccttcgagagccaagacaaattccggatgttgagcattctggttttagtacctgtacggggaaatcactgttgccctccgcacaaccgagtactagtacaaaccgttttaaatcaagtgcagagaatgttcacaaacatgggagttcctctagtgcctcaaattctcaaatttcaatgccacatacctcttttgagaagactagaaaagatactgagggacaatgctcatcaaaccaatctggagttgttgattcactcgagctcatagagagagagtatgttcttgtaaaccgtccttctgcctcgctggaaggttcatcagattgtttcgacacatcattgcaagattccggttttcctaatatcttaccaaggaatgaaaaagtttcatcgagttcacttgaagcacagaaaccattatctgatgtgtcaggtccacgaccagcaagcgtttcatatctgctaacagaagtacaacgcttaacgattgtccatcctccaactaaactccaacttttgcatcagtatgcacaagcacttacagaactagctagcgagatgggcaatacagggcaggtaaaggaatcttttgctgttacgctcgtcgttttagctgtctggagaaaagccttagagatatgtgattcttggatgatgtccgttggagagaatgaagtgaacccagatccaaccacggctcctgagacttcgattccagatttgaattcacctgcaccagctaaaacgtgggtgacacaagagtttgttaccgcgttaaaccaagccgagaatttatcaactcaactaaacgaaacaagtgctgccactcatatgcctgacgccatggaaacaatatacgagagggcactagcatatggcaagagtggtggggctgaagaatatttgagtaacaaagaaagtgcagcaacattatacaagaaagcaattcttctactctcctttataatcgaggaagcagtgactctatctctaaacccctctttctcattaacccctgacgacaagaagcggattctctactacatctctaacttacagcatcgtcggtctcatctttagcgaaaatagaccgcgggcattgtatataagaaactttcctggctctgcttgggtcaagtctataacatttgtggcttttccttatattctcttgaaatttcgaaatggttactctatattgttgatgctgtgaccaaaaagtatttgcctccctcattgtatagtgccaatatcaataatagcttaaaat

SEQ ID NO: 82084 - protein, 626 aa, Arabidopsis thaliana
  peptide (1)..(626): Ceres Seq. ID no. 12663319
  misc_feature (10)..(268): Pfam Name: Protein kinase domain Pfam Description: Protein kinase domain
  misc_feature (3)..(309): Homolog of NCBI NO: 30687274 NR Description: protein kinase family [Arabidopsis thaliana]
  misc_feature (364)..(626): Homolog of NCBI NO: 30687274 NR Description: protein kinase family [Arabidopsis thaliana]
  misc_feature (3)..(309): Homolog of NCBI NO: 20268768 NR Description: unknown protein [Arabidopsis thaliana]
  misc_feature (364)..(626): Homolog of NCBI NO: 20268768 NR Description: unknown protein [Arabidopsis thaliana]
  misc_feature (3)..(330): Homolog of NCBI NO: 30693945 NR Description: protein kinase family [Arabidopsis thaliana]
  misc_feature (343)..(626): Homolog of NCBI NO: 30693945 NR Description: protein kinase family [Arabidopsis thaliana]
  misc_feature (343)..(626): Homolog of NCBI NO: 26452168 NR Description: unknown protein [Arabidopsis thaliana]
  misc_feature (46)..(330): Homolog of NCBI NO: 26452168 NR Description: unknown protein [Arabidopsis thaliana]
  misc_feature (343)..(626): Homolog of NCBI NO: 11357820 NR Description: hypothetical protein F5K20.230 - Arabidopsis >gi|7630013|emb|CAB88355.1| putative protein [Arabidopsis
  misc_feature (3)..(189): Homolog of NCBI NO: 11357820 NR Description: hypothetical protein F5K20.230 - Arabidopsis >gi|7630013|emb|CAB88355.1| putative protein [Arabidopsis
MESARLVGDYALGPRIGSGSFAVVWLAKHRSSGLEVAVKEIDKKLLSPKVRDNLLKEISILSTIDHPNIIRFYEAIETGDRIFLVLEYCSGGDLAGYINRHGKVPEAVAKHFMRQLALGLQVLQEKHFIHRDLKPQNLLLSSKEVTPLLKIGDFGFARSLTPESMAETFCGSPLYMAPEIIRNQKYDAKADLWSAGAILFQLVTGKPPFDGNNHIQLFHNIVRDTELKFPEDTRNEIHPDCVDLCRSLLRRNPIERLTFREFFNHMFLREPRQIPDVEHSGFSTCTGKSLLPSAQPSTSTNRFKSSAENVHKHGSSSSASNSQISMPHTSFEKTRKDTEGQCSSNQSGVVDSLELIEREYVLVNRPSASLEGSSDCFDTSLQDSGFPNILPRNEKVSSSSLEAQKPLSDVSGPRPASVSYLLTEVQRLTIVHPPTKLQLLHQYAQALTELASEMGNTGQVKESFAVTLVVLAVWRKALEICDSWMMSVGENEVNPDPTTAPETSIPDLNSPAPAKTWVTQEFVTALNQAENLSTQLNETSAATHMPDAMETIYERALAYGKSGGAEEYLSNKESAATLYKKAILLLSFIIEEAVTLSLNPSFSLTPDDKKRILYYISNLQHRRSHL

SEQ ID NO: 82085 - protein, 514 aa, Arabidopsis thaliana
  peptide (1)..(514): Ceres Seq. ID no. 12663320
  misc_feature (1)..(156): Pfam Name: Protein kinase domain Pfam Description: Protein kinase domain
  misc_feature (1)..(197): Homolog of NCBI NO: 30687274 NR Description: protein kinase family [Arabidopsis thaliana]
  misc_feature (252)..(514): Homolog of NCBI NO: 30687274 NR Description: protein kinase family [Arabidopsis thaliana]
  misc_feature (1)..(197): Homolog of NCBI NO: 20268768 NR Description: unknown protein [Arabidopsis thaliana]
  misc_feature (252)..(514): Homolog of NCBI NO: 20268768 NR Description: unknown protein [Arabidopsis thaliana]
  misc_feature (1)..(218): Homolog of NCBI NO: 30693945 NR Description: protein kinase family [Arabidopsis thaliana]
  misc_feature (231)..(514): Homolog of NCBI NO: 30693945 NR Description: protein kinase family [Arabidopsis thaliana]
  misc_feature (231)..(514): Homolog of NCBI NO: 26452168 NR Description: unknown protein [Arabidopsis thaliana]
  misc_feature (1)..(218): Homolog of NCBI NO: 26452168 NR Description: unknown protein [Arabidopsis thaliana]
  misc_feature (231)..(514): Homolog of NCBI NO: 11357820 NR Description: hypothetical protein F5K20.230 - Arabidopsis >gi|7630013|emb|CAB88355.1| putative protein [Arabidopsis
  misc_feature (1)..(77): Homolog of NCBI NO: 11357820 NR Description: hypothetical protein F5K20.230 - Arabidopsis >gi|7630013|emb|CAB88355.1| putative protein [Arabidopsis
MRQLALGLQVLQEKHFIHRDLKPQNLLLSSKEVTPLLKIGDFGFARSLTPESMAETFCGSPLYMAPEIIRNQKYDAKADLWSAGAILFQLVTGKPPFDGNNHIQLFHNIVRDTELKFPEDTRNEIHPDCVDLCRSLLRRNPIERLTFREFFNHMFLREPRQIPDVEHSGFSTCTGKSLLPSAQPSTSTNRFKSSAENVHKHGSSSSASNSQISMPHTSFEKTRKDTEGQCSSNQSGVVDSLELIEREYVLVNRPSASLEGSSDCFDTSLQDSGFPNILPRNEKVSSSSLEAQKPLSDVSGPRPASVSYLLTEVQRLTIVHPPTKLQLLHQYAQALTELASEMGNTGQVKESFAVTLVVLAVWRKALEICDSWMMSVGENEVNPDPTTAPETSIPDLNSPAPAKTWVTQEFVTALNQAENLSTQLNETSAATHMPDAMETIYERALAYGKSGGAEEYLSNKESAATLYKKAILLLSFIIEEAVTLSLNPSFSLTPDDKKRILYYISNLQHRRSHL

SEQ ID NO: 82086 - protein, 462 aa, Arabidopsis thaliana
  peptide (1)..(462): Ceres Seq. ID no. 12663321
  misc_feature (1)..(104): Pfam Name: Protein kinase domain Pfam Description: Protein kinase domain
  misc_feature (1)..(145): Homolog of NCBI NO: 30687274 NR Description: protein kinase family [Arabidopsis thaliana]
  misc_feature (200)..(462): Homolog of NCBI NO: 30687274 NR Description: protein kinase family [Arabidopsis thaliana]
  misc_feature (1)..(145): Homolog of NCBI NO: 20268768 NR Description: unknown protein [Arabidopsis thaliana]
  misc_feature (200)..(462): Homolog of NCBI NO: 20268768 NR Description: unknown protein [Arabidopsis thaliana]
  misc_feature (1)..(166): Homolog of NCBI NO: 30693945 NR Description: protein kinase family [Arabidopsis thaliana]
  misc_feature (179)..(462): Homolog of NCBI NO: 30693945 NR Description: protein kinase family [Arabidopsis thaliana]
  misc_feature (179)..(462): Homolog of NCBI NO: 26452168 NR Description: unknown protein [Arabidopsis thaliana]
  misc_feature (1)..(166): Homolog of NCBI NO: 26452168 NR Description: unknown protein [Arabidopsis thaliana]
  misc_feature (179)..(462): Homolog of NCBI NO: 11357820 NR Description: hypothetical protein F5K20.230 - Arabidopsis >gi|7630013|emb|CAB88355.1| putative protein [Arabidopsis
  misc_feature (1)..(25): Homolog of NCBI NO: 11357820 NR Description: hypothetical protein F5K20.230 - Arabidopsis >gi|7630013|emb|CAB88355.1| putative protein [Arabidopsis
MAETFCGSPLYMAPEIIRNQKYDAKADLWSAGAILFQLVTGKPPFDGNNHIQLFHNIVRDTELKFPEDTRNEIHPDCVDLCRSLLRRNPIERLTFREFFNHMFLREPRQIPDVEHSGFSTCTGKSLLPSAQPSTSTNRFKSSAENVHKHGSSSSASNSQISMPHTSFEKTRKDTEGQCSSNQSGVVDSLELIEREYVLVNRPSASLEGSSDCFDTSLQDSGFPNILPRNEKVSSSSLEAQKPLSDVSGPRPASVSYLLTEVQRLTIVHPPTKLQLLHQYAQALTELASEMGNTGQVKESFAVTLVVLAVWRKALEICDSWMMSVGENEVNPDPTTAPETSIPDLNSPAPAKTWVTQEFVTALNQAENLSTQLNETSAATHMPDAMETIYERALAYGKSGGAEEYLSNKESAATLYKKAILLLSFIIEEAVTLSLNPSFSLTPDDKKRILYYISNLQHRRSHL

SEQ ID NO: 82087 - DNA, 1106 bp, Arabidopsis thaliana
  misc_feature (1)..(1106): Ceres Seq. ID no. 12663322
  misc_feature: MA Experiment ID: 20000307 Result: Up-regulated in Transcription
  misc_feature: MA Experiment 20000307 PARAMETER Experiment Name: At_Germinating_Seeds_Sub_P Parameter: Age (hr) Value: 24 vs. 0
  misc_feature: MA Experiment 20000307 PARAMETER Experiment Name: At_Germinating_Seeds_Sub_P Parameter: Organism Value: A. thaliana
  misc_feature: MA Experiment 20000307 PARAMETER Experiment Name: At_Germinating_Seeds_Sub_P Parameter: Plant Line Value: WS
  misc_feature: MA Experiment 20000307 PARAMETER Experiment Name: At_Germinating_Seeds_Sub_P Parameter: Tissue Value: Germinating Seeds
  misc_feature: MA Experiment ID: 20000327 Result: Down-regulated in Transcription
  misc_feature: MA Experiment 20000327 PARAMETER Experiment Name: At_42deg_Heat_Sub_P Parameter: Age (day) Value: 14
  misc_feature: MA Experiment 20000327 PARAMETER Experiment Name: At_42deg_Heat_Sub_P Parameter: Organism Value: A. thaliana
  misc_feature: MA Experiment 20000327 PARAMETER Experiment Name: At_42deg_Heat_Sub_P Parameter: Plant Line Value: WS
  misc_feature: MA Experiment 20000327 PARAMETER Experiment Name: At_42deg_Heat_Sub_P Parameter: Temperature (deg C) Value: 42 vs. 22
  misc_feature: MA Experiment 20000327 PARAMETER Experiment Name: At_42deg_Heat_Sub_P Parameter: Timepoint (hr) Value: 1
  misc_feature: MA Experiment 20000327 PARAMETER Experiment Name: At_42deg_Heat_Sub_P Parameter: Tissue Value: Aerial
cccggtcagttttagtggggaagcagaagatgtcgaccggtttagctctgaatcgctgttcagtttcggtatgtagaacggccgttactttacttaaccggccaactgtctccgttgccaggagtttgaaattcagtcgccggctaatcggaaactgctcgatagcgccggcggatccttatgttgtggcggacgacgataagtacggtaacaaacaagttatcagtctcactcctcgcctttacgactatgtcctctccaacgtccgcgagcctaagattttgaggcaacttcgggaagagacttccaaaatgcgaggtagccaaatgcaggtgtcgcctgatcaagcgcagttgcttgcaatgcttgtacagatgcttgcagcagaaagatgtattgaagttggagtttacacgggatattcttcattggctgtggcgttagttctaccagaatcagggtgtttagttgcctgtgaaagagattctaactctcttgaagttgctaagaggtactacgagcttgctggagtctctcacaaggttaatgtgaaacaaggtcttgcagctgaatcattgaaatccatgattcagaacggtgaaggagccagctatgattttgcatttgtcgatgctgataagaggatgtatcaggactacttcgaattgcttcttcaacttgtcagagttggtggagtcattgtgatggataatgttctttggcatggacgagtttcggatcctatggtgaatgatgcgaagaccatcagcattaggaatttcaacaaaaagttaatggatgataaacgtgtaagcattagtatggtaccgatcggcgatggcatgacgatatgccgcaagagatagtcatcaggaaaaaccaattgggtcacagtgaacctgatccaagagagaagtcttttaaacatgaaaggatctccatgaagccaagatatacatgtttcaggatagggaatcatttcttttgttctgaatccattctcacaaacacttcgaagactcatctacttgggatggtaaccactaacgcatgtacttttgtcaaattgtttaactctttctgattagtggaaatagagttttgat

SEQ ID NO: 82088 - protein, 287 aa, Arabidopsis thaliana
  peptide (1)..(287): Ceres Seq. ID no. 12663323
  misc_feature (86)..(287): Pfam Name: O-methyltransferase Pfam Description: O-methyltransferase
  misc_feature (10)..(287): Homolog of NCBI NO: 15228652 NR Description: O-methyltransferase, family 3 family; protein id: supported by cDNA: gi_17979263, supported by cDNA: gi_20334815 thaliana] >gi|11357587|pir||T47992 hypothetical protein
  misc_feature (19)..(287): Homolog of NCBI NO: 15228651 NR Description: O-methyltransferase, family 3 family; protein id: supported by cDNA: 40117., supported by cDNA: gi_20260545 thaliana] >gi|11357586|pir||T47991 hypothetical protein
  misc_feature (19)..(287): Homolog of NCBI NO: 21593560 NR Description: unknown [Arabidopsis thaliana]
  misc_feature (72)..(286): Homolog of NCBI NO: 17232671 NR Description: O-methyltransferase [Nostoc sp. PCC 7120]
  misc_feature (72)..(287): Homolog of NCBI NO: 23126866 NR Description: hypothetical protein [Nostoc punctiforme]
  misc_feature (71)..(287): Homolog of NCBI NO: 23129851 NR Description: hypothetical protein [Nostoc punctiforme]
  misc_feature (70)..(287): Homolog of NCBI NO: 23043526 NR Description: hypothetical protein [Trichodesmium erythraeum
  misc_feature (74)..(287): Homolog of NCBI NO: 7463011 NR Description: probable O-methyltransferase (EC 2.1.1.-) safC -
  misc_feature (71)..(287): Homolog of NCBI NO: 16331769 NR Description: O-methyltransferase [Synechocystis sp. PCC 6803]
  misc_feature (76)..(287): Homolog of NCBI NO: 29654245 NR Description: O-methyltransferase [Coxiella burnetii RSA 493]
RSVLVGKQKMSTGLALNRCSVSVCRTAVTLLNRPTVSVARSLKFSRRLIGNCSIAPADPYVVADDDKYGNKQVISLTPRLYDYVLSNVREPKILRQLREETSKMRGSQMQVSPDQAQLLAMLVQMLAAERCIEVGVYTGYSSLAVALVLPESGCLVACERDSNSLEVAKRYYELAGVSHKVNVKQGLAAESLKSMIQNGEGASYDFAFVDADKRMYQDYFELLLQLVRVGGVIVMDNVLWHGRVSDPMVNDAKTISIRNFNKKLMDDKRVSISMVPIGDGMTICRKR

SEQ ID NO: 82089 - protein, 278 aa, Arabidopsis thaliana
  peptide (1)..(278): Ceres Seq. ID no. 12663324
  misc_feature (77)..(278): Pfam Name: O-methyltransferase Pfam Description: O-methyltransferase
  misc_feature (1)..(278): Homolog of NCBI NO: 15228652 NR Description: O-methyltransferase, family 3 family; protein id: supported by cDNA: gi_17979263, supported by cDNA: gi_20334815 thaliana] >gi|11357587|pir||T47992 hypothetical protein
  misc_feature (10)..(278): Homolog of NCBI NO: 15228651 NR Description: O-methyltransferase, family 3 family; protein id: supported by cDNA: 40117., supported by cDNA: gi_20260545 thaliana] >gi|11357586|pir||T47991 hypothetical protein
  misc_feature (10)..(278): Homolog of NCBI NO: 21593560 NR Description: unknown [Arabidopsis thaliana]
  misc_feature (63)..(277): Homolog of NCBI NO: 17232671 NR Description: O-methyltransferase [Nostoc sp. PCC 7120]
  misc_feature (63)..(278): Homolog of NCBI NO: 23126866 NR Description: hypothetical protein [Nostoc punctiforme]
  misc_feature (62)..(278): Homolog of NCBI NO: 23129851 NR Description: hypothetical protein [Nostoc punctiforme]
  misc_feature (61)..(278): Homolog of NCBI NO: 23043526 NR Description: hypothetical protein [Trichodesmium erythraeum
  misc_feature (65)..(278): Homolog of NCBI NO: 7463011 NR Description: probable O-methyltransferase (EC 2.1.1.-) safC -
  misc_feature (62)..(278): Homolog of NCBI NO: 16331769 NR Description: O-methyltransferase [Synechocystis sp. PCC 6803]
  misc_feature (67)..(278): Homolog of NCBI NO: 29654245 NR Description: O-methyltransferase [Coxiella burnetii RSA 493]
MSTGLALNRCSVSVCRTAVTLLNRPTVSVARSLKFSRRLIGNCSIAPADPYVVADDDKYGNKQVISLTPRLYDYVLSNVREPKILRQLREETSKMRGSQMQVSPDQAQLLAMLVQMLAAERCIEVGVYTGYSSLAVALVLPESGCLVACERDSNSLEVAKRYYELAGVSHKVNVKQGLAAESLKSMIQNGEGASYDFAFVDADKRMYQDYFELLLQLVRVGGVIVMDNVLWHGRVSDPMVNDAKTISIRNFNKKLMDDKRVSISMVPIGDGMTICRKR

SEQ ID NO: 82090 - protein, 184 aa, Arabidopsis thaliana
  peptide (1)..(184): Ceres Seq. ID no. 12663325
  misc_feature (1)..(184): Pfam Name: O-methyltransferase Pfam Description: O-methyltransferase
  misc_feature (1)..(184): Homolog of NCBI NO: 15228652 NR Description: O-methyltransferase, family 3 family; protein id: supported by cDNA: gi_17979263, supported by cDNA: gi_20334815 thaliana] >gi|11357587|pir||T47992 hypothetical protein
  misc_feature (1)..(184): Homolog of NCBI NO: 15228651 NR Description: O-methyltransferase, family 3 family; protein id: supported by cDNA: 40117., supported by cDNA: gi_20260545 thaliana] >gi|11357586|pir||T47991 hypothetical protein
  misc_feature (1)..(184): Homolog of NCBI NO: 21593560 NR Description: unknown [Arabidopsis thaliana]
  misc_feature (1)..(183): Homolog of NCBI NO: 17232671 NR Description: O-methyltransferase [Nostoc sp. PCC 7120]
  misc_feature (1)..(184): Homolog of NCBI NO: 23126866 NR Description: hypothetical protein [Nostoc punctiforme]
  misc_feature (1)..(184): Homolog of NCBI NO: 23129851 NR Description: hypothetical protein [Nostoc punctiforme]
  misc_feature (1)..(184): Homolog of NCBI NO: 23043526 NR Description: hypothetical protein [Trichodesmium erythraeum
  misc_feature (1)..(184): Homolog of NCBI NO: 7463011 NR Description: probable O-methyltransferase (EC 2.1.1.-) safC -
  misc_feature (1)..(184): Homolog of NCBI NO: 16331769 NR Description: O-methyltransferase [Synechocystis sp. PCC 6803]
  misc_feature (1)..(184): Homolog of NCBI NO: 29654245 NR Description: O-methyltransferase [Coxiella burnetii RSA 493]
MRGSQMQVSPDQAQLLAMLVQMLAAERCIEVGVYTGYSSLAVALVLPESGCLVACERDSNSLEVAKRYYELAGVSHKVNVKQGLAAESLKSMIQNGEGASYDFAFVDADKRMYQDYFELLLQLVRVGGVIVMDNVLWHGRVSDPMVNDAKTISIRNFNKKLMDDKRVSISMVPIGDGMTICRKR

SEQ ID NO: 82091 - DNA, 687 bp, Arabidopsis thaliana
  misc_feature (1)..(687): Ceres Seq. ID no. 12663334
  misc_feature: MA Experiment ID: 20000182 Result: Down-regulated in Transcription
  misc_feature: MA Experiment 20000182 PARAMETER Experiment Name: At_2mM_SA_P Parameter: Age (day) Value: 14
  misc_feature: MA Experiment 20000182 PARAMETER Experiment Name: At_2mM_SA_P Parameter: Organism Value: A. thaliana
  misc_feature: MA Experiment 20000182 PARAMETER Experiment Name: At_2mM_SA_P Parameter: Plant Line Value: WS
  misc_feature: MA Experiment 20000182 PARAMETER Experiment Name: At_2mM_SA_P Parameter: Timepoint (hr) Value: 6
  misc_feature: MA Experiment 20000182 PARAMETER Experiment Name: At_2mM_SA_P Parameter: Tissue Value: Aerial
  misc_feature: MA Experiment 20000182 PARAMETER Experiment Name: At_2mM_SA_P Parameter: Treatment Value: 2mM SA vs. No Treatment
  misc_feature: MA Experiment ID: 20000185 Result: Down-regulated in Transcription
  misc_feature: MA Experiment 20000185 PARAMETER Experiment Name: At_Roots__P Parameter: Age (day) Value: 7 vs. 21
  misc_feature: MA Experiment 20000185 PARAMETER Experiment Name: At_Roots__P Parameter: Organism Value: A. thaliana
  misc_feature: MA Experiment 20000185 PARAMETER Experiment Name: At_Roots__P Parameter: Tissue Value: Roots vs. Whole Plant
  misc_feature: MA Experiment ID: 20000213 Result: Down-regulated in Transcription
  misc_feature: MA Experiment 20000213 PARAMETER Experiment Name: At_4deg_Cold_P Parameter: Timepoint (hr) Value: 2
  misc_feature: MA Experiment ID: 20000234 Result: Down-regulated in Transcription
  misc_feature: MA Experiment 20000234 PARAMETER Experiment Name: At_Siliques_P Parameter: Age (day) Value: 21
  misc_feature: MA Experiment 20000234 PARAMETER Experiment Name: At_Siliques_P Parameter: Organism Value: A. thaliana
  misc_feature: MA Experiment 20000234 PARAMETER Experiment Name: At_Siliques_P Parameter: Plant Line Value: WS
  misc_feature: MA Experiment 20000234 PARAMETER Experiment Name: At_Siliques_P Parameter: Tissue Value: Less Than 5mm Siliques vs. Whole Plant
  misc_feature: MA Experiment ID: 20000264 Result: Down-regulated in Transcription
  misc_feature: MA Experiment 20000264 PARAMETER Experiment Name: At_Open_Flower_P Parameter: Age (day) Value: 21
  misc_feature: MA Experiment 20000264 PARAMETER Experiment Name: At_Open_Flower_P Parameter: Plant Line Value: WS
  misc_feature: MA Experiment 20000264 PARAMETER Experiment Name: At_Open_Flower_P Parameter: Tissue Value: Open Flower vs. Whole Plant
  misc_feature: MA Experiment ID: 20000265 Result: Down-regulated in Transcription
  misc_feature: MA Experiment 20000265 PARAMETER Experiment Name: At_Open_Flower_P Parameter: Age (day) Value: 21
  misc_feature: MA Experiment 20000265 PARAMETER Experiment Name: At_Open_Flower_P Parameter: Plant Line Value: WS
  misc_feature: MA Experiment 20000265 PARAMETER Experiment Name: At_Open_Flower_P Parameter: Tissue Value: Closed Flower vs. Whole Plant
  misc_feature: MA Experiment ID: 20000286 Result: Down-regulated in Transcription
  misc_feature: MA Experiment 20000286 PARAMETER Experiment Name: At_Open_Flower_P Parameter: Age (day) Value: 21
  misc_feature: MA Experiment 20000286 PARAMETER Experiment Name: At_Open_Flower_P Parameter: Plant Line Value: WS
  misc_feature: MA Experiment 20000286 PARAMETER Experiment Name: At_Open_Flower_P Parameter: Tissue Value: Half Open vs. Whole Plant
  misc_feature: MA Experiment ID: 20000308 Result: Down-regulated in Transcription
  misc_feature: MA Experiment 20000308 PARAMETER Experiment Name: At_100mM_NaCl__P Parameter: Age (day) Value: 17
  misc_feature: MA Experiment 20000308 PARAMETER Experiment Name: At_100mM_NaCl__P Parameter: Organism Value: A. thaliana
  misc_feature: MA Experiment 20000308 PARAMETER Experiment Name: At_100mM_NaCl__P Parameter: Plant Line Value: WS
  misc_feature: MA Experiment 20000308 PARAMETER Experiment Name: At_100mM_NaCl__P Parameter: Timepoint (hr) Value: 72
  misc_feature: MA Experiment 20000308 PARAMETER Experiment Name: At_100mM_NaCl__P Parameter: Tissue Value: Whole Plant
  misc_feature: MA Experiment 20000308 PARAMETER Experiment Name: At_100mM_NaCl__P Parameter: Treatment Value: 100mM NaCl vs. No Treatment
  misc_feature: MA Experiment ID: 20000437 Result: Down-regulated in Transcription
  misc_feature: MA Experiment 20000437 PARAMETER Experiment Name: At_Drought_P Parameter: Age (day) Value: 8
  misc_feature: MA Experiment 20000437 PARAMETER Experiment Name: At_Drought_P Parameter: Organism Value: A. thaliana
  misc_feature: MA Experiment 20000437 PARAMETER Experiment Name: At_Drought_P Parameter: Plant Line Value: WS
  misc_feature: MA Experiment 20000437 PARAMETER Experiment Name: At_Drought_P Parameter: Timepoint (hr) Value: 24
  misc_feature: MA Experiment 20000437 PARAMETER Experiment Name: At_Drought_P Parameter: Tissue Value: Whole Plant
  misc_feature: MA Experiment 20000437 PARAMETER Experiment Name: At_Drought_P Parameter: Treatment Value: Drought vs. No Drought
  misc_feature: MA Experiment ID: 20000439 Result: Down-regulated in Transcription
  misc_feature: MA Experiment 20000439 PARAMETER Experiment Name: At_Roots__P Parameter: Age (day) Value: 14 vs. 21
  misc_feature: MA Experiment 20000439 PARAMETER Experiment Name: At_Roots__P Parameter: Organism Value: A. thaliana
  misc_feature: MA Experiment 20000439 PARAMETER Experiment Name: At_Roots__P Parameter: Tissue Value: Roots vs. Whole Plant
  misc_feature: MA Experiment ID: 20000460 Result: Up-regulated in Transcription
  misc_feature: MA Experiment 20000460 PARAMETER Experiment Name: At_10percent_PEG_P Parameter: Age (day) Value: 12
  misc_feature: MA Experiment 20000460 PARAMETER Experiment Name: At_10percent_PEG_P Parameter: Organism Value: A. thaliana
  misc_feature: MA Experiment 20000460 PARAMETER Experiment Name: At_10percent_PEG_P Parameter: Plant Line Value: WS
  misc_feature: MA Experiment 20000460 PARAMETER Experiment Name: At_10percent_PEG_P Parameter: Timepoint (day) Value: 12
  misc_feature: MA Experiment 20000460 PARAMETER Experiment Name: At_10percent_PEG_P Parameter: Tissue Value: Whole Plant
  misc_feature: MA Experiment 20000460 PARAMETER Experiment Name: At_10percent_PEG_P Parameter: Treatment Value: 10percent PEG vs. No Treatment
  misc_feature: MA Experiment ID: 20000527 Result: Up-regulated in Transcription
  misc_feature: MA Experiment 20000527 PARAMETER Experiment Name: At_10percent_PEG_P Parameter: Age (day) Value: 20
  misc_feature: MA Experiment 20000527 PARAMETER Experiment Name: At_10percent_PEG_P Parameter: Organism Value: A. thaliana
  misc_feature: MA Experiment 20000527 PARAMETER Experiment Name: At_10percent_PEG_P Parameter: Plant Line Value: WS
  misc_feature: MA Experiment 20000527 PARAMETER Experiment Name: At_10percent_PEG_P Parameter: Timepoint (day) Value: 20
  misc_feature: MA Experiment 20000527 PARAMETER Experiment Name: At_10percent_PEG_P Parameter: Tissue Value: Whole Plant
  misc_feature: MA Experiment 20000527 PARAMETER Experiment Name: At_10percent_PEG_P Parameter: Treatment Value: 10percent PEG vs. No Treatment
  misc_feature: MA Experiment ID: 20000574 Result: Down-regulated in Transcription
  misc_feature: MA Experiment 20000574 PARAMETER Experiment Name: At_100uM_ABA_Mutants__P Parameter: Organism Value: A. thaliana
  misc_feature: MA Experiment 20000574 PARAMETER Experiment Name: At_100uM_ABA_Mutants__P Parameter: Plant Line Value: CS23 vs. Ler wt
  misc_feature: MA Experiment 20000574 PARAMETER Experiment Name: At_100uM_ABA_Mutants__P Parameter: Timepoint (hr) Value: N/A
  misc_feature: MA Experiment 20000574 PARAMETER Experiment Name: At_100uM_ABA_Mutants__P Parameter: Tissue Value: Whole Plant
  misc_feature: MA Experiment 20000574 PARAMETER Experiment Name: At_100uM_ABA_Mutants__P Parameter: Treatment Value: None
  misc_feature: MA Experiment ID: 20001247 Result: Up-regulated in Transcription
  misc_feature: MA Experiment 20001247 PARAMETER Experiment Name: At_Far-red-induction_P Parameter: Age (day) Value: 7
  misc_feature: MA Experiment 20001247 PARAMETER Experiment Name: At_Far-red-induction_P Parameter: Light Value: Far-red vs. White
  misc_feature: MA Experiment 20001247 PARAMETER Experiment Name: At_Far-red-induction_P Parameter: Organism Value: A. thaliana
  misc_feature: MA Experiment 20001247 PARAMETER Experiment Name: At_Far-red-induction_P Parameter: Plant Line Value: Columbia
  misc_feature: MA Experiment 20001247 PARAMETER Experiment Name: At_Far-red-induction_P Parameter: Timepoint (hr) Value: 1
  misc_feature: MA Experiment 20001247 PARAMETER Experiment Name: At_Far-red-induction_P Parameter: Tissue Value: Whole Plant
  misc_feature: MA Experiment ID: 20001451 Result: Up-regulated in Transcription
  misc_feature: MA Experiment 20001451 PARAMETER Experiment Name: At_Far-red-induction_P Parameter: Age (day) Value: 7
  misc_feature: MA Experiment 20001451 PARAMETER Experiment Name: At_Far-red-induction_P Parameter: Light Value: Far-red vs. White
  misc_feature: MA Experiment 20001451 PARAMETER Experiment Name: At_Far-red-induction_P Parameter: Organism Value: A. thaliana
  misc_feature: MA Experiment 20001451 PARAMETER Experiment Name: At_Far-red-induction_P Parameter: Plant Line Value: Columbia
  misc_feature: MA Experiment 20001451 PARAMETER Experiment Name: At_Far-red-induction_P Parameter: Timepoint (hr) Value: 24
  misc_feature: MA Experiment 20001451 PARAMETER Experiment Name: At_Far-red-induction_P Parameter: Tissue Value: Whole Plant
  misc_feature: MA Experiment ID: 20001557 Result: Down-regulated in Transcription
  misc_feature: MA Experiment 20001557 PARAMETER Experiment Name: At_Drought_Soil_Dry_P Parameter: Age (day) Value: 27
  misc_feature: MA Experiment 20001557 PARAMETER Experiment Name: At_Drought_Soil_Dry_P Parameter: Organism Value: A. thaliana
  misc_feature: MA Experiment 20001557 PARAMETER Experiment Name: At_Drought_Soil_Dry_P Parameter: Plant Line Value: WS
  misc_feature: MA Experiment 20001557 PARAMETER Experiment Name: At_Drought_Soil_Dry_P Parameter: Post Timepoint (hr) Value: 3
  misc_feature: MA Experiment 20001557 PARAMETER Experiment Name: At_Drought_Soil_Dry_P Parameter: Post-Treatment Value: Re-Water vs. No Drought
  misc_feature: MA Experiment 20001557 PARAMETER Experiment Name: At_Drought_Soil_Dry_P Parameter: Timepoint (day) Value: 13
  misc_feature: MA Experiment 20001557 PARAMETER Experiment Name: At_Drought_Soil_Dry_P Parameter: Treatment Value: Drought vs. No Drought
atggcgttcgaagagagcttagtaatggtttcttctttgtcgagattgtctatatgtacgagctctgcttacgacgaagcagccacgaagaatcaaccagattcgtgtgtttccacatctctggagaatttcgacggagcagaggcggatggggaagtttccgatgatggagaaggaaaagagaacgttcgagagtcagattccgacaaagagacacgtgggttttactctcttccggtgactccatctcgccggagaagaaaacttacagtttccggcgagttagatgcgaatgagagtaacaaaaatggcagtaagtgtagtttacggaggcaaaggagggaaaagaagaaaaagggagttaacggagagtgtgacgtcggtggaagagaaggcttaacggtgttgacgagagcaagaggtggagataggtcgttgaggatggggttacaagaagtgaaagcttgtagagatctcgggttcgaattagaggttccggttccgggtcggatatctgtgtcaacaaccgggtcgaatttcgatactcagactagtagcggcggcgactcacccatcgccacctggcgtatctccagtcctggtgatgatccaaaggaggtcaaggcgaggttgaaagtgtgggcacaagcggtagctttagcttctgcgacacgtcaagcttcttag

SEQ ID NO: 82092 - protein, 228 aa, Arabidopsis thaliana
  peptide (1)..(228): Ceres Seq. ID no. 12663335
  misc_feature (1)..(228): Homolog of NCBI NO: 15228678 NR Description: putative protein; protein id: At3g62070.1
  misc_feature (11)..(202): Homolog of NCBI NO: 15226471 NR Description: unknown protein; protein id: At2g46940.1
  misc_feature (12)..(224): Homolog of NCBI NO: 30678941 NR Description: expressed protein [Arabidopsis thaliana]
  misc_feature (109)..(228): Homolog of NCBI NO: 34902536 NR Description: P0581F09.27 [Oryza sativa (japonica >gi|13486734|dbj|BAB39969.1| hypothetical protein [Oryza sativa
  misc_feature (12)..(201): Homolog of NCBI NO: 25334719 NR Description: hypothetical protein AT4g01670 [imported] - thaliana >gi|7268210|emb|CAB77737.1| hypothetical protein
  misc_feature (190)..(219): Homolog of NCBI NO: 26451183 NR Description: unknown protein [Arabidopsis thaliana]
MAFEESLVMVSSLSRLSICTSSAYDEAATKNQPDSCVSTSLENFDGAEADGEVSDDGEGKENVRESDSDKETRGFYSLPVTPSRRRRKLTVSGELDANESNKNGSKCSLRRQRREKKKKGVNGECDVGGREGLTVLTRARGGDRSLRMGLQEVKACRDLGFELEVPVPGRISVSTTGSNFDTQTSSGGDSPIATWRISSPGDDPKEVKARLKVWAQAVALASATRQAS

SEQ ID NO: 82093 - protein, 220 aa, Arabidopsis thaliana
  peptide (1)..(220): Ceres Seq. ID no. 12663336
  misc_feature (1)..(220): Homolog of NCBI NO: 15228678 NR Description: putative protein; protein id: At3g62070.1
  misc_feature (3)..(194): Homolog of NCBI NO: 15226471 NR Description: unknown protein; protein id: At2g46940.1
  misc_feature (4)..(216): Homolog of NCBI NO: 30678941 NR Description: expressed protein [Arabidopsis thaliana]
  misc_feature (101)..(220): Homolog of NCBI NO: 34902536 NR Description: P0581F09.27 [Oryza sativa (japonica >gi|13486734|dbj|BAB39969.1| hypothetical protein [Oryza sativa
  misc_feature (4)..(193): Homolog of NCBI NO: 25334719 NR Description: hypothetical protein AT4g01670 [imported] - thaliana >gi|7268210|emb|CAB77737.1| hypothetical protein
  misc_feature (182)..(211): Homolog of NCBI NO: 26451183 NR Description: unknown protein [Arabidopsis thaliana]
MVSSLSRLSICTSSAYDEAATKNQPDSCVSTSLENFDGAEADGEVSDDGEGKENVRESDSDKETRGFYSLPVTPSRRRRKLTVSGELDANESNKNGSKCSLRRQRREKKKKGVNGECDVGGREGLTVLTRARGGDRSLRMGLQEVKACRDLGFELEVPVPGRISVSTTGSNFDTQTSSGGDSPIATWRISSPGDDPKEVKARLKVWAQAVALASATRQAS

SEQ ID NO: 82094 - DNA, 1287 bp, Arabidopsis thaliana
  misc_feature (1)..(1287): Ceres Seq. ID no. 12663349
  misc_feature: MA Experiment ID: 20000185 Result: Up-regulated in Transcription
  misc_feature: MA Experiment 20000185 PARAMETER Experiment Name: At_Roots__P Parameter: Age (day) Value: 7 vs. 21
  misc_feature: MA Experiment 20000185 PARAMETER Experiment Name: At_Roots__P Parameter: Organism Value: A. thaliana
  misc_feature: MA Experiment 20000185 PARAMETER Experiment Name: At_Roots__P Parameter: Tissue Value: Roots vs. Whole Plant
  misc_feature: MA Experiment ID: 20000234 Result: Up-regulated in Transcription
  misc_feature: MA Experiment 20000234 PARAMETER Experiment Name: At_Siliques_P Parameter: Age (day) Value: 21
  misc_feature: MA Experiment 20000234 PARAMETER Experiment Name: At_Siliques_P Parameter: Organism Value: A. thaliana
  misc_feature: MA Experiment 20000234 PARAMETER Experiment Name: At_Siliques_P Parameter: Plant Line Value: WS
  misc_feature: MA Experiment 20000234 PARAMETER Experiment Name: At_Siliques_P Parameter: Tissue Value: Less Than 5mm Siliques vs. Whole Plant
  misc_feature: MA Experiment ID: 20000235 Result: Up-regulated in Transcription
  misc_feature: MA Experiment 20000235 PARAMETER Experiment Name: At_Siliques_P Parameter: Age (day) Value: 21
  misc_feature: MA Experiment 20000235 PARAMETER Experiment Name: At_Siliques_P Parameter: Organism Value: A. thaliana
  misc_feature: MA Experiment 20000235 PARAMETER Experiment Name: At_Siliques_P Parameter: Plant Line Value: WS
  misc_feature: MA Experiment 20000235 PARAMETER Experiment Name: At_Siliques_P Parameter: Tissue Value: 5-10mm Siliques vs. Whole Plant
  misc_feature: MA Experiment ID: 20000439 Result: Up-regulated in Transcription
  misc_feature: MA Experiment 20000439 PARAMETER Experiment Name: At_Roots__P Parameter: Age (day) Value: 14 vs. 21
  misc_feature: MA Experiment 20000439 PARAMETER Experiment Name: At_Roots__P Parameter: Organism Value: A. thaliana
  misc_feature: MA Experiment 20000439 PARAMETER Experiment Name: At_Roots__P Parameter: Tissue Value: Roots vs. Whole Plant
  misc_feature: MA Experiment ID: 20001555 Result: Down-regulated in Transcription
  misc_feature: MA Experiment 20001555 PARAMETER Experiment Name: At_Drought_Soil_Dry_P Parameter: Age (day) Value: 24
  misc_feature: MA Experiment 20001555 PARAMETER Experiment Name: At_Drought_Soil_Dry_P Parameter: Organism Value: A. thaliana
  misc_feature: MA Experiment 20001555 PARAMETER Experiment Name: At_Drought_Soil_Dry_P Parameter: Plant Line Value: WS
  misc_feature: MA Experiment 20001555 PARAMETER Experiment Name: At_Drought_Soil_Dry_P Parameter: Post Timepoint (hr) Value: None
  misc_feature: MA Experiment 20001555 PARAMETER Experiment Name: At_Drought_Soil_Dry_P Parameter: Post-Treatment Value: None
  misc_feature: MA Experiment 20001555 PARAMETER Experiment Name: At_Drought_Soil_Dry_P Parameter: Timepoint (day) Value: 10
  misc_feature: MA Experiment 20001555 PARAMETER Experiment Name: At_Drought_Soil_Dry_P Parameter: Treatment Value: Drought vs. No Drought
  misc_feature: MA Experiment ID: 20001556 Result: Down-regulated in Transcription
  misc_feature: MA Experiment 20001556 PARAMETER Experiment Name: At_Drought_Soil_Dry_P Parameter: Age (day) Value: 26
  misc_feature: MA Experiment 20001556 PARAMETER Experiment Name: At_Drought_Soil_Dry_P Parameter: Organism Value: A. thaliana
  misc_feature: MA Experiment 20001556 PARAMETER Experiment Name: At_Drought_Soil_Dry_P Parameter: Plant Line Value: WS
  misc_feature: MA Experiment 20001556 PARAMETER Experiment Name: At_Drought_Soil_Dry_P Parameter: Post Timepoint (hr) Value: None
  misc_feature: MA Experiment 20001556 PARAMETER Experiment Name: At_Drought_Soil_Dry_P Parameter: Post-Treatment Value: None
  misc_feature: MA Experiment 20001556 PARAMETER Experiment Name: At_Drought_Soil_Dry_P Parameter: Timepoint (day) Value: 12
  misc_feature: MA Experiment 20001556 PARAMETER Experiment Name: At_Drought_Soil_Dry_P Parameter: Treatment Value: Drought vs. No Drought
  misc_feature: MA Experiment ID: 20001907 Result: Down-regulated in Transcription
  misc_feature: MA Experiment 20001907 PARAMETER Experiment Name: At_Drought_Reproduction_P Parameter: Age (day) Value: 37
  misc_feature: MA Experiment 20001907 PARAMETER Experiment Name: At_Drought_Reproduction_P Parameter: Organism Value: A. thaliana
  misc_feature: MA Experiment 20001907 PARAMETER Experiment Name: At_Drought_Reproduction_P Parameter: Plant Line Value: WS
  misc_feature: MA Experiment 20001907 PARAMETER Experiment Name: At_Drought_Reproduction_P Parameter: Timepoint (day) Value: 7
  misc_feature: MA Experiment 20001907 PARAMETER Experiment Name: At_Drought_Reproduction_P Parameter: Tissue Value: Siliques
  misc_feature: MA Experiment 20001907 PARAMETER Experiment Name: At_Drought_Reproduction_P Parameter: Treatment Value: Drought vs. No Drought
  misc_feature: MA Experiment ID: 20001910 Result: Down-regulated in Transcription
  misc_feature: MA Experiment 20001910 PARAMETER Experiment Name: At_Drought_Reproduction_P Parameter: Age (day) Value: 37
  misc_feature: MA Experiment 20001910 PARAMETER Experiment Name: At_Drought_Reproduction_P Parameter: Organism Value: A. thaliana
  misc_feature: MA Experiment 20001910 PARAMETER Experiment Name: At_Drought_Reproduction_P Parameter: Plant Line Value: WS
  misc_feature: MA Experiment 20001910 PARAMETER Experiment Name: At_Drought_Reproduction_P Parameter: Timepoint (day) Value: 7
  misc_feature: MA Experiment 20001910 PARAMETER Experiment Name: At_Drought_Reproduction_P Parameter: Tissue Value: Flowers
  misc_feature: MA Experiment 20001910 PARAMETER Experiment Name: At_Drought_Reproduction_P Parameter: Treatment Value: Drought vs. No Drought
atggctttttcattaaccagagtaaaccgagttcttattcaagcatgtgaaacgaccccatcagtagtgttggatctgtccttaatcgataatattccggttctacgatgtttcgctagaacaatacatgtgtttactcatggacctgatgcagctagagccatacaagaggcattggctaaagcacttgtctcttactatcccttgtccggtagattgaaagagttaaaccaaggtaaacttcagatcgattgtaccgggaaaactggaatttggttcgttgatgcggttactgatgttaagctagagagtgttggttatttcgacaatctaatggaaataccttacgatgatctccttcctgatcaaatccctaaagatgatgatgcagaaccgcttgtccaaatgcaggtgacccaattctcttgcggcggtttcgtaatgggccttagattttgccacgcaatttgtgacggccttggagcggcccaattccttaccgcggtcggagaaatcgcctgcggccaaacgaatctcggcgtctctcccgtctggcatagagatttcattccacagcagcaccgtgcgaatgatgtcatatctccggcaatccctccgccgtttccaccggcgtttccagaatacaagctagagcacttaagctttgatatcccatcagatttgatcgaacggttcaaacgtgagtttcgtgcgtcgaccggagagatttgttcagccttcgaggtcatcgccgcttgtttctggaaacttcgtacggaagcgataaatctgagagaggatacagaagtgaagctcgtattcttcgctaactgtcgtcatcttgttaatccgccgctcccgattggtttctacggcaactgcttcttcccggtgaaaatctccgccgaaagccacgaaatctcgaaggagaaatcagtgttcgatgtggtgaaattgatcaaacaagcgaaaacgaagctaccggaggaatttgaaaagttcgtcagcggcgacggagacgatccgtttgcgccggcggtgggatataatacgctgtttttatcggagtggggaaaattaggattcaatcaggtggattatggatggggtccaccattacacgtggcaccaatccaagggttgagtattgtccctgctggcatcgtaggatctgtgccgttgccgaagaaaggtgtacgtttgatgacgtggtgcgtcgaggagactcattgccaattgttcgatgatttgatgacaaataaattgacatctaacaaaaccgaataa

SEQ ID NO: 82095 - protein, 428 aa, Arabidopsis thaliana
  peptide (1)..(428): Ceres Seq. ID no. 12663350
  misc_feature (3)..(421): Pfam Name: Transferase family Pfam Description: Transferase family
  misc_feature (1)..(428): Homolog of NCBI NO: 15228696 NR Description: putative protein; protein id: At3g62160.1
  misc_feature (2)..(414): Homolog of NCBI NO: 34906304 NR Description: unnamed protein product [Oryza sativa (japonica group)] >gi|9558426|dbj|BAB03362.1| unnamed protein product
  misc_feature (2)..(416): Homolog of NCBI NO: 34906150 NR Description: putative 0-deacetylbaccatin III-10-O-acetyl
  misc_feature (2)..(416): Homolog of NCBI NO: 34912654 NR Description: putative acetyl transferase [Oryza sativa
  misc_feature (12)..(416): Homolog of NCBI NO: 34912652 NR Description: putative acetyl transferase [Oryza sativa
  misc_feature (145)..(414): Homolog of NCBI NO: 18558566 NR Description: putative 0-deacetylbaccatin III-10-O-acetyl
  misc_feature (3)..(421): Homolog of NCBI NO: 28558099 NR Description: 10-deacetylbaccatin III 10-O-acetyltransferase
  misc_feature (4)..(404): Homolog of NCBI NO: 18034655 NR Description: 10-deacetylbaccatin III-10-O-acetyl transferase
  misc_feature (3)..(418): Homolog of NCBI NO: 28558088 NR Description: 3'-N-debenzoyl-2'-deoxytaxol N-benzoyltransferase
  misc_feature (10)..(379): Homolog of NCBI NO: 28380187 NR Description: Taxadien-5-alpha-ol O-acetyltransferase
MAFSLTRVNRVLIQACETTPSVVLDLSLIDNIPVLRCFARTIHVFTHGPDAARAIQEALAKALVSYYPLSGRLKELNQGKLQIDCTGKTGIWFVDAVTDVKLESVGYFDNLMEIPYDDLLPDQIPKDDDAEPLVQMQVTQFSCGGFVMGLRFCHAICDGLGAAQFLTAVGEIACGQTNLGVSPVWHRDFIPQQHRANDVISPAIPPPFPPAFPEYKLEHLSFDIPSDLIERFKREFRASTGEICSAFEVIAACFWKLRTEAINLREDTEVKLVFFANCRHLVNPPLPIGFYGNCFFPVKISAESHEISKEKSVFDVVKLIKQAKTKLPEEFEKFVSGDGDDPFAPAVGYNTLFLSEWGKLGFNQVDYGWGPPLHVAPIQGLSIVPAGIVGSVPLPKKGVRLMTWCVEETHCQLFDDLMTNKLTSNKTE

SEQ ID NO: 82096 - protein, 317 aa, Arabidopsis thaliana
  peptide (1)..(317): Ceres Seq. ID no. 12663351
  misc_feature (1)..(310): Pfam Name: Transferase family Pfam Description: Transferase family
  misc_feature (1)..(317): Homolog of NCBI NO: 15228696 NR Description: putative protein; protein id: At3g62160.1
  misc_feature (1)..(303): Homolog of NCBI NO: 34906304 NR Description: unnamed protein product [Oryza sativa (japonica group)] >gi|9558426|dbj|BAB03362.1| unnamed protein product
  misc_feature (1)..(305): Homolog of NCBI NO: 34906150 NR Description: putative 0-deacetylbaccatin III-10-O-acetyl
  misc_feature (1)..(305): Homolog of NCBI NO: 34912654 NR Description: putative acetyl transferase [Oryza sativa
  misc_feature (1)..(305): Homolog of NCBI NO: 34912652 NR Description: putative acetyl transferase [Oryza sativa
  misc_feature (34)..(303): Homolog of NCBI NO: 18558566 NR Description: putative 0-deacetylbaccatin III-10-O-acetyl
  misc_feature (1)..(310): Homolog of NCBI NO: 28558099 NR Description: 10-deacetylbaccatin III 10-O-acetyltransferase
  misc_feature (1)..(293): Homolog of NCBI NO: 18034655 NR Description: 10-deacetylbaccatin III-10-O-acetyl transferase
  misc_feature (1)..(307): Homolog of NCBI NO: 28558088 NR Description: 3'-N-debenzoyl-2'-deoxytaxol N-benzoyltransferase
  misc_feature (1)..(268): Homolog of NCBI NO: 28380187 NR Description: Taxadien-5-alpha-ol O-acetyltransferase
MEIPYDDLLPDQIPKDDDAEPLVQMQVTQFSCGGFVMGLRFCHAICDGLGAAQFLTAVGEIACGQTNLGVSPVWHRDFIPQQHRANDVISPAIPPPFPPAFPEYKLEHLSFDIPSDLIERFKREFRASTGEICSAFEVIAACFWKLRTEAINLREDTEVKLVFFANCRHLVNPPLPIGFYGNCFFPVKISAESHEISKEKSVFDVVKLIKQAKTKLPEEFEKFVSGDGDDPFAPAVGYNTLFLSEWGKLGFNQVDYGWGPPLHVAPIQGLSIVPAGIVGSVPLPKKGVRLMTWCVEETHCQLFDDLMTNKLTSNKTE

SEQ ID NO: 82097 - protein, 293 aa, Arabidopsis thaliana
  peptide (1)..(293): Ceres Seq. ID no. 12663352
  misc_feature (1)..(286): Pfam Name: Transferase family Pfam Description: Transferase family
  misc_feature (1)..(293): Homolog of NCBI NO: 15228696 NR Description: putative protein; protein id: At3g62160.1
  misc_feature (1)..(279): Homolog of NCBI NO: 34906304 NR Description: unnamed protein product [Oryza sativa (japonica group)] >gi|9558426|dbj|BAB03362.1| unnamed protein product
  misc_feature (1)..(281): Homolog of NCBI NO: 34906150 NR Description: putative 0-deacetylbaccatin III-10-O-acetyl
  misc_feature (1)..(281): Homolog of NCBI NO: 34912654 NR Description: putative acetyl transferase [Oryza sativa
  misc_feature (1)..(281): Homolog of NCBI NO: 34912652 NR Description: putative acetyl transferase [Oryza sativa
  misc_feature (10)..(279): Homolog of NCBI NO: 18558566 NR Description: putative 0-deacetylbaccatin III-10-O-acetyl
  misc_feature (1)..(286): Homolog of NCBI NO: 28558099 NR Description: 10-deacetylbaccatin III 10-O-acetyltransferase
  misc_feature (1)..(269): Homolog of NCBI NO: 18034655 NR Description: 10-deacetylbaccatin III-10-O-acetyl transferase
  misc_feature (1)..(283): Homolog of NCBI NO: 28558088 NR Description: 3'-N-debenzoyl-2'-deoxytaxol N-benzoyltransferase
  misc_feature (1)..(244): Homolog of NCBI NO: 28380187 NR Description: Taxadien-5-alpha-ol O-acetyltransferase
MQVTQFSCGGFVMGLRFCHAICDGLGAAQFLTAVGEIACGQTNLGVSPVWHRDFIPQQHRANDVISPAIPPPFPPAFPEYKLEHLSFDIPSDLIERFKREFRASTGEICSAFEVIAACFWKLRTEAINLREDTEVKLVFFANCRHLVNPPLPIGFYGNCFFPVKISAESHEISKEKSVFDVVKLIKQAKTKLPEEFEKFVSGDGDDPFAPAVGYNTLFLSEWGKLGFNQVDYGWGPPLHVAPIQGLSIVPAGIVGSVPLPKKGVRLMTWCVEETHCQLFDDLMTNKLTSNKTE

SEQ ID NO: 82098 - DNA, 1800 bp, Arabidopsis thaliana
  misc_feature (1)..(1800): Ceres Seq. ID no. 12663390
  misc_feature: MA Experiment ID: 20000315 Result: Down-regulated in Transcription
  misc_feature: MA Experiment 20000315 PARAMETER Experiment Name: At_14day_Shoots-Roots_Sub_P Parameter: Age (day) Value: 14
  misc_feature: MA Experiment 20000315 PARAMETER Experiment Name: At_14day_Shoots-Roots_Sub_P Parameter: Organism Value: A. thaliana
  misc_feature: MA Experiment 20000315 PARAMETER Experiment Name: At_14day_Shoots-Roots_Sub_P Parameter: Plant Line Value: WS
  misc_feature: MA Experiment 20000315 PARAMETER Experiment Name: At_14day_Shoots-Roots_Sub_P Parameter: Tissue Value: Shoots vs. Whole Plant
atggctgctgctccatggctccatctctctaggagaagaagctccactcagacttcattaagaagcttcctcatttgctcttcttcattcgattcggatgaattcatttccagtcaaagccgcgtaatcggcgggagaggagaagaggaagtacgattttccggtgctctcttctctcgtatgattcattcttctacttatcatccttaccgtcaaattccattgccacactcctctgtacaactgcttgatgcgagtcttgggtgtagaggtttctctagtggtagttctaatgttagtgatggatgtgatgaagaagttgaatctgaatgcgataatgatgaagaaactggggtcagttgtgttgaatcaagtactaatccggaagaagtagagagagtctgcaaagtgattgatgaattgtttgcgttagatagaaatatggaagctgttcttgatgaaatgaaactagatttatcacatgatctcatcgttgaggttttagaacgttttcgacatgctaggaagcctgcatttaggttcttctgttgggctgcagagagacaaggatttgctcatgactcaagaacatataactccatgatgagtattttagcaaagactagacagttcgagacgatggtttcggttctcgaagagatgggtacgaaaggtctattgacgatggagacattcactatcgcgatgaaagctttcgctgctgcgaaagagaggaagaaagctgttggtatctttgagttgatgaagaagtacaagtttaagattggtgttgaaaccattaattgcttgcttgatagtcttggcagggctaagcttggaaaagaagctcaggttctgtttgataagctgaaggagaggtttacacctaatatgatgacttacactgttctactcaatggttggtgcagggtgaggaacttgatagaagcagctagaatctggaatgatatgattgatcagggattgaaacctgacattgtagctcacaacgtaatgcttgaagggttgttgaggagtaggaaaaaatcagatgcgatcaaattgttccatgttatgaaatccaagggaccttgccctaatgtccgtagctataccatcatgatccgtgacttctgcaaacagtcgagcatggaaactgccattgaatactttgatgacatggttgattccgggttgcaacctgatgcagcggtttacacgtgtctgatcacggggtttgggactcagaagaagctggatactgtttacgaactgctcaaggagatgcaagaaaagggacatcctccggatggcaaaacgtataatgcgttgatcaaactgatggcgaaccagaaaatgccggaacatgccacaaggatctacaacaagatgatccagaacgaaattgagccatcgatacacacattcaacatgataatgaaatcatacttcatggcgagaaactatgagatggggagagcagtttgggaagagatgatcaagaaagggatttgtcctgacgataactcctacacggttttgatcagagggcttataggtgaaggcaagtcgagagaggcatgcagatacttagaggagatgcttgacaaaggaatgaaaacccctttgattgattataacaagtttgcagctgatttccacagaggggggcaaccggagatatttgaggaattggcacagagagctaagttctcaggtaagtttgctgcagcagagatctttgcgagatgggctcagatgactagaaggagattcaaacagaggttcatggaagattga

SEQ ID NO: 82099 - protein, 599 aa, Arabidopsis thaliana
  peptide (1)..(599): Ceres Seq. ID no. 12663391
  misc_feature (474)..(508): Pfam Name: PPR repeat Pfam Description: PPR repeat
  misc_feature (1)..(599): Homolog of NCBI NO: 15241508 NR Description: putative protein; protein id: At5g14820.1
  misc_feature (292)..(599): Homolog of NCBI NO: 11357982 NR Description: hypothetical protein T12C14.240 - Arabidopsis (fragment) >gi|7340725|emb|CAB82968.1| putative protein
  misc_feature (116)..(542): Homolog of NCBI NO: 15223927 NR Description: hypothetical protein; protein id: At1g71060.1
  misc_feature (124)..(548): Homolog of NCBI NO: 15223926 NR Description: hypothetical protein; protein id: At1g77360.1
  misc_feature (127)..(595): Homolog of NCBI NO: 15222719 NR Description: hypothetical protein; protein id: At1g26500.1
  misc_feature (148)..(568): Homolog of NCBI NO: 14488357 NR Description: unknown protein [Oryza sativa (japonica
  misc_feature (141)..(591): Homolog of NCBI NO: 15219461 NR Description: hypothetical protein; protein id: At1g73400.1
  misc_feature (107)..(539): Homolog of NCBI NO: 15229604 NR Description: putative protein; protein id: At3g49730.1
  misc_feature (131)..(542): Homolog of NCBI NO: 34895880 NR Description: P0009G03.20 [Oryza sativa (japonica
  misc_feature (130)..(539): Homolog of NCBI NO: 15239161 NR Description: putative protein; protein id: At5g65820.1
MAAAPWLHLSRRRSSTQTSLRSFLICSSSFDSDEFISSQSRVIGGRGEEEVRFSGALFSRMIHSSTYHPYRQIPLPHSSVQLLDASLGCRGFSSGSSNVSDGCDEEVESECDNDEETGVSCVESSTNPEEVERVCKVIDELFALDRNMEAVLDEMKLDLSHDLIVEVLERFRHARKPAFRFFCWAAERQGFAHDSRTYNSMMSILAKTRQFETMVSVLEEMGTKGLLTMETFTIAMKAFAAAKERKKAVGIFELMKKYKFKIGVETINCLLDSLGRAKLGKEAQVLFDKLKERFTPNMMTYTVLLNGWCRVRNLIEAARIWNDMIDQGLKPDIVAHNVMLEGLLRSRKKSDAIKLFHVMKSKGPCPNVRSYTIMIRDFCKQSSMETAIEYFDDMVDSGLQPDAAVYTCLITGFGTQKKLDTVYELLKEMQEKGHPPDGKTYNALIKLMANQKMPEHATRIYNKMIQNEIEPSIHTFNMIMKSYFMARNYEMGRAVWEEMIKKGICPDDNSYTVLIRGLIGEGKSREACRYLEEMLDKGMKTPLIDYNKFAADFHRGGQPEIFEELAQRAKFSGKFAAAEIFARWAQMTRRRFKQRFMED

SEQ ID NO: 82100 - protein, 539 aa, Arabidopsis thaliana
  peptide (1)..(539): Ceres Seq. ID no. 12663392
  misc_feature (414)..(448): Pfam Name: PPR repeat Pfam Description: PPR repeat
  misc_feature (1)..(539): Homolog of NCBI NO: 15241508 NR Description: putative protein; protein id: At5g14820.1
  misc_feature (232)..(539): Homolog of NCBI NO: 11357982 NR Description: hypothetical protein T12C14.240 - Arabidopsis (fragment) >gi|7340725|emb|CAB82968.1| putative protein
  misc_feature (56)..(482): Homolog of NCBI NO: 15223927 NR Description: hypothetical protein; protein id: At1g71060.1
  misc_feature (64)..(488): Homolog of NCBI NO: 15223926 NR Description: hypothetical protein; protein id: At1g77360.1
  misc_feature (67)..(535): Homolog of NCBI NO: 15222719 NR Description: hypothetical protein; protein id: At1g26500.1
  misc_feature (88)..(508): Homolog of NCBI NO: 14488357 NR Description: unknown protein [Oryza sativa (japonica
  misc_feature (81)..(531): Homolog of NCBI NO: 15219461 NR Description: hypothetical protein; protein id: At1g73400.1
  misc_feature (47)..(479): Homolog of NCBI NO: 15229604 NR Description: putative protein; protein id: At3g49730.1
  misc_feature (71)..(482): Homolog of NCBI NO: 34895880 NR Description: P0009G03.20 [Oryza sativa (japonica
  misc_feature (70)..(479): Homolog of NCBI NO: 15239161 NR Description: putative protein; protein id: At5g65820.1
MIHSSTYHPYRQIPLPHSSVQLLDASLGCRGFSSGSSNVSDGCDEEVESECDNDEETGVSCVESSTNPEEVERVCKVIDELFALDRNMEAVLDEMKLDLSHDLIVEVLERFRHARKPAFRFFCWAAERQGFAHDSRTYNSMMSILAKTRQFETMVSVLEEMGTKGLLTMETFTIAMKAFAAAKERKKAVGIFELMKKYKFKIGVETINCLLDSLGRAKLGKEAQVLFDKLKERFTPNMMTYTVLLNGWCRVRNLIEAARIWNDMIDQGLKPDIVAHNVMLEGLLRSRKKSDAIKLFHVMKSKGPCPNVRSYTIMIRDFCKQSSMETAIEYFDDMVDSGLQPDAAVYTCLITGFGTQKKLDTVYELLKEMQEKGHPPDGKTYNALIKLMANQKMPEHATRIYNKMIQNEIEPSIHTFNMIMKSYFMARNYEMGRAVWEEMIKKGICPDDNSYTVLIRGLIGEGKSREACRYLEEMLDKGMKTPLIDYNKFAADFHRGGQPEIFEELAQRAKFSGKFAAAEIFARWAQMTRRRFKQRFMED

SEQ ID NO: 82101 - protein, 452 aa, Arabidopsis thaliana
  peptide (1)..(452): Ceres Seq. ID no. 12663393
  misc_feature (327)..(361): Pfam Name: PPR repeat Pfam Description: PPR repeat
  misc_feature (1)..(452): Homolog of NCBI NO: 15241508 NR Description: putative protein; protein id: At5g14820.1
  misc_feature (145)..(452): Homolog of NCBI NO: 11357982 NR Description: hypothetical protein T12C14.240 - Arabidopsis (fragment) >gi|7340725|emb|CAB82968.1| putative protein
  misc_feature (1)..(395): Homolog of NCBI NO: 15223927 NR Description: hypothetical protein; protein id: At1g71060.1
  misc_feature (1)..(401): Homolog of NCBI NO: 15223926 NR Description: hypothetical protein; protein id: At1g77360.1
  misc_feature (1)..(448): Homolog of NCBI NO: 15222719 NR Description: hypothetical protein; protein id: At1g26500.1
  misc_feature (1)..(421): Homolog of NCBI NO: 14488357 NR Description: unknown protein [Oryza sativa (japonica
  misc_feature (1)..(444): Homolog of NCBI NO: 15219461 NR Description: hypothetical protein; protein id: At1g73400.1
  misc_feature (1)..(392): Homolog of NCBI NO: 15229604 NR Description: putative protein; protein id: At3g49730.1
  misc_feature (1)..(395): Homolog of NCBI NO: 34895880 NR Description: P0009G03.20 [Oryza sativa (japonica
  misc_feature (1)..(392): Homolog of NCBI NO: 15239161 NR Description: putative protein; protein id: At5g65820.1
MEAVLDEMKLDLSHDLIVEVLERFRHARKPAFRFFCWAAERQGFAHDSRTYNSMMSILAKTRQFETMVSVLEEMGTKGLLTMETFTIAMKAFAAAKERKKAVGIFELMKKYKFKIGVETINCLLDSLGRAKLGKEAQVLFDKLKERFTPNMMTYTVLLNGWCRVRNLIEAARIWNDMIDQGLKPDIVAHNVMLEGLLRSRKKSDAIKLFHVMKSKGPCPNVRSYTIMIRDFCKQSSMETAIEYFDDMVDSGLQPDAAVYTCLITGFGTQKKLDTVYELLKEMQEKGHPPDGKTYNALIKLMANQKMPEHATRIYNKMIQNEIEPSIHTFNMIMKSYFMARNYEMGRAVWEEMIKKGICPDDNSYTVLIRGLIGEGKSREACRYLEEMLDKGMKTPLIDYNKFAADFHRGGQPEIFEELAQRAKFSGKFAAAEIFARWAQMTRRRFKQRFMED

SEQ ID NO: 82102 - DNA, 1077 bp, Arabidopsis thaliana
  misc_feature (1)..(1077): Ceres Seq. ID no. 12663426
  misc_feature: MA Experiment ID: 20000184 Result: Down-regulated in Transcription
  misc_feature: MA Experiment 20000184 PARAMETER Experiment Name: At_Shoots__P Parameter: Age (day) Value: 7
  misc_feature: MA Experiment 20000184 PARAMETER Experiment Name: At_Shoots__P Parameter: Tissue Value: Shoots vs. Whole Plant
  misc_feature: MA Experiment ID: 20000264 Result: Down-regulated in Transcription
  misc_feature: MA Experiment 20000264 PARAMETER Experiment Name: At_Open_Flower_P Parameter: Age (day) Value: 21
  misc_feature: MA Experiment 20000264 PARAMETER Experiment Name: At_Open_Flower_P Parameter: Plant Line Value: WS
  misc_feature: MA Experiment 20000264 PARAMETER Experiment Name: At_Open_Flower_P Parameter: Tissue Value: Open Flower vs. Whole Plant
  misc_feature: MA Experiment ID: 20000267 Result: Up-regulated in Transcription
  misc_feature: MA Experiment 20000267 PARAMETER Experiment Name: At_Drought_P Parameter: Age (day) Value: 7
  misc_feature: MA Experiment 20000267 PARAMETER Experiment Name: At_Drought_P Parameter: Organism Value: A. thaliana
  misc_feature: MA Experiment 20000267 PARAMETER Experiment Name: At_Drought_P Parameter: Plant Line Value: WS
  misc_feature: MA Experiment 20000267 PARAMETER Experiment Name: At_Drought_P Parameter: Timepoint (hr) Value: 6
  misc_feature: MA Experiment 20000267 PARAMETER Experiment Name: At_Drought_P Parameter: Tissue Value: Whole Plant
  misc_feature: MA Experiment 20000267 PARAMETER Experiment Name: At_Drought_P Parameter: Treatment Value: Drought vs. No Drought
  misc_feature: MA Experiment ID: 20000268 Result: Up-regulated in Transcription
  misc_feature: MA Experiment 20000268 PARAMETER Experiment Name: At_100mM_NaCl__P Parameter: Age (day) Value: 14
  misc_feature: MA Experiment 20000268 PARAMETER Experiment Name: At_100mM_NaCl__P Parameter: Organism Value: A. thaliana
  misc_feature: MA Experiment 20000268 PARAMETER Experiment Name: At_100mM_NaCl__P Parameter: Plant Line Value: WS
  misc_feature: MA Experiment 20000268 PARAMETER Experiment Name: At_100mM_NaCl__P Parameter: Timepoint (hr) Value: 6
  misc_feature: MA Experiment 20000268 PARAMETER Experiment Name: At_100mM_NaCl__P Parameter: Tissue Value: Whole Plant
  misc_feature: MA Experiment 20000268 PARAMETER Experiment Name: At_100mM_NaCl__P Parameter: Treatment Value: 100mM NaCl vs. No Treatment
  misc_feature: MA Experiment ID: 20000286 Result: Down-regulated in Transcription
  misc_feature: MA Experiment 20000286 PARAMETER Experiment Name: At_Open_Flower_P Parameter: Age (day) Value: 21
  misc_feature: MA Experiment 20000286 PARAMETER Experiment Name: At_Open_Flower_P Parameter: Plant Line Value: WS
  misc_feature: MA Experiment 20000286 PARAMETER Experiment Name: At_Open_Flower_P Parameter: Tissue Value: Half Open vs. Whole Plant
  misc_feature: MA Experiment ID: 20000436 Result: Up-regulated in Transcription
  misc_feature: MA Experiment 20000436 PARAMETER Experiment Name: At_Drought_P Parameter: Age (day) Value: 7
  misc_feature: MA Experiment 20000436 PARAMETER Experiment Name: At_Drought_P Parameter: Organism Value: A. thaliana
  misc_feature: MA Experiment 20000436 PARAMETER Experiment Name: At_Drought_P Parameter: Plant Line Value: WS
  misc_feature: MA Experiment 20000436 PARAMETER Experiment Name: At_Drought_P Parameter: Timepoint (hr) Value: 12
  misc_feature: MA Experiment 20000436 PARAMETER Experiment Name: At_Drought_P Parameter: Tissue Value: Whole Plant
  misc_feature: MA Experiment 20000436 PARAMETER Experiment Name: At_Drought_P Parameter: Treatment Value: Drought vs. No Drought
  misc_feature: MA Experiment ID: 20000437 Result: Up-regulated in Transcription
  misc_feature: MA Experiment 20000437 PARAMETER Experiment Name: At_Drought_P Parameter: Age (day) Value: 8
  misc_feature: MA Experiment 20000437 PARAMETER Experiment Name: At_Drought_P Parameter: Organism Value: A. thaliana
  misc_feature: MA Experiment 20000437 PARAMETER Experiment Name: At_Drought_P Parameter: Plant Line Value: WS
  misc_feature: MA Experiment 20000437 PARAMETER Experiment Name: At_Drought_P Parameter: Timepoint (hr) Value: 24
  misc_feature: MA Experiment 20000437 PARAMETER Experiment Name: At_Drought_P Parameter: Tissue Value: Whole Plant
  misc_feature: MA Experiment 20000437 PARAMETER Experiment Name: At_Drought_P Parameter: Treatment Value: Drought vs. No Drought
  misc_feature: MA Experiment ID: 20000438 Result: Down-regulated in Transcription
  misc_feature: MA Experiment 20000438 PARAMETER Experiment Name: At_Shoots__P Parameter: Age (day) Value: 14
  misc_feature: MA Experiment 20000438 PARAMETER Experiment Name: At_Shoots__P Parameter: Tissue Value: Shoots vs. Whole Plant
  misc_feature: MA Experiment ID: 20000794 Result: Down-regulated in Transcription
  misc_feature: MA Experiment 20000794 PARAMETER Experiment Name: At_Petals_P Parameter: Age (day) Value: 23-25 days
  misc_feature: MA Experiment 20000794 PARAMETER Experiment Name: At_Petals_P Parameter: Plant Line Value: WS
  misc_feature: MA Experiment 20000794 PARAMETER Experiment Name: At_Petals_P Parameter: Tissue Value: Petals vs. Whole plant
  misc_feature: MA Experiment ID: 20001554 Result: Up-regulated in Transcription
  misc_feature: MA Experiment 20001554 PARAMETER Experiment Name: At_Drought_Soil_Dry_P Parameter: Age (day) Value: 21
  misc_feature: MA Experiment 20001554 PARAMETER Experiment Name: At_Drought_Soil_Dry_P Parameter: Organism Value: A. thaliana
  misc_feature: MA Experiment 20001554 PARAMETER Experiment Name: At_Drought_Soil_Dry_P Parameter: Plant Line Value: WS
  misc_feature: MA Experiment 20001554 PARAMETER Experiment Name: At_Drought_Soil_Dry_P Parameter: Post Timepoint (hr) Value: None
  misc_feature: MA Experiment 20001554 PARAMETER Experiment Name: At_Drought_Soil_Dry_P Parameter: Post-Treatment Value: None
  misc_feature: MA Experiment 20001554 PARAMETER Experiment Name: At_Drought_Soil_Dry_P Parameter: Timepoint (day) Value: 7
  misc_feature: MA Experiment 20001554 PARAMETER Experiment Name: At_Drought_Soil_Dry_P Parameter: Treatment Value: Drought vs. No Drought
  misc_feature: MA Experiment ID: 20001555 Result: Up-regulated in Transcription
  misc_feature: MA Experiment 20001555 PARAMETER Experiment Name: At_Drought_Soil_Dry_P Parameter: Age (day) Value: 24
  misc_feature: MA Experiment 20001555 PARAMETER Experiment Name: At_Drought_Soil_Dry_P Parameter: Organism Value: A. thaliana
  misc_feature: MA Experiment 20001555 PARAMETER Experiment Name: At_Drought_Soil_Dry_P Parameter: Plant Line Value: WS
  misc_feature: MA Experiment 20001555 PARAMETER Experiment Name: At_Drought_Soil_Dry_P Parameter: Post Timepoint (hr) Value: None
  misc_feature: MA Experiment 20001555 PARAMETER Experiment Name: At_Drought_Soil_Dry_P Parameter: Post-Treatment Value: None
  misc_feature: MA Experiment 20001555 PARAMETER Experiment Name: At_Drought_Soil_Dry_P Parameter: Timepoint (day) Value: 10
  misc_feature: MA Experiment 20001555 PARAMETER Experiment Name: At_Drought_Soil_Dry_P Parameter: Treatment Value: Drought vs. No Drought
  misc_feature: MA Experiment ID: 20001905 Result: Up-regulated in Transcription
  misc_feature: MA Experiment 20001905 PARAMETER Experiment Name: At_Drought_Reproduction_P Parameter: Age (day) Value: 40
  misc_feature: MA Experiment 20001905 PARAMETER Experiment Name: At_Drought_Reproduction_P Parameter: Organism Value: A. thaliana
  misc_feature: MA Experiment 20001905 PARAMETER Experiment Name: At_Drought_Reproduction_P Parameter: Plant Line Value: WS
  misc_feature: MA Experiment 20001905 PARAMETER Experiment Name: At_Drought_Reproduction_P Parameter: Timepoint (day) Value: 10
  misc_feature: MA Experiment 20001905 PARAMETER Experiment Name: At_Drought_Reproduction_P Parameter: Tissue Value: Rosettes
  misc_feature: MA Experiment 20001905 PARAMETER Experiment Name: At_Drought_Reproduction_P Parameter: Treatment Value: Drought vs. No Drought
  misc_feature: MA Experiment ID: 20001906 Result: Up-regulated in Transcription
  misc_feature: MA Experiment 20001906 PARAMETER Experiment Name: At_Drought_Reproduction_P Parameter: Age (day) Value: 35
  misc_feature: MA Experiment 20001906 PARAMETER Experiment Name: At_Drought_Reproduction_P Parameter: Organism Value: A. thaliana
  misc_feature: MA Experiment 20001906 PARAMETER Experiment Name: At_Drought_Reproduction_P Parameter: Plant Line Value: WS
  misc_feature: MA Experiment 20001906 PARAMETER Experiment Name: At_Drought_Reproduction_P Parameter: Timepoint (day) Value: 5
  misc_feature: MA Experiment 20001906 PARAMETER Experiment Name: At_Drought_Reproduction_P Parameter: Tissue Value: Siliques
  misc_feature: MA Experiment 20001906 PARAMETER Experiment Name: At_Drought_Reproduction_P Parameter: Treatment Value: Drought vs. No Drought
  misc_feature: MA Experiment ID: 20001908 Result: Up-regulated in Transcription
  misc_feature: MA Experiment 20001908 PARAMETER Experiment Name: At_Drought_Reproduction_P Parameter: Age (day) Value: 40
  misc_feature: MA Experiment 20001908 PARAMETER Experiment Name: At_Drought_Reproduction_P Parameter: Organism Value: A. thaliana
  misc_feature: MA Experiment 20001908 PARAMETER Experiment Name: At_Drought_Reproduction_P Parameter: Plant Line Value: WS
  misc_feature: MA Experiment 20001908 PARAMETER Experiment Name: At_Drought_Reproduction_P Parameter: Timepoint (day) Value: 10
  misc_feature: MA Experiment 20001908 PARAMETER Experiment Name: At_Drought_Reproduction_P Parameter: Tissue Value: Siliques
  misc_feature: MA Experiment 20001908 PARAMETER Experiment Name: At_Drought_Reproduction_P Parameter: Treatment Value: Drought vs. No Drought
  misc_feature: MA Experiment ID: 20001911 Result: Up-regulated in Transcription
  misc_feature: MA Experiment 20001911 PARAMETER Experiment Name: At_Drought_Reproduction_P Parameter: Age (day) Value: 40
  misc_feature: MA Experiment 20001911 PARAMETER Experiment Name: At_Drought_Reproduction_P Parameter: Organism Value: A. thaliana
  misc_feature: MA Experiment 20001911 PARAMETER Experiment Name: At_Drought_Reproduction_P Parameter: Plant Line Value: WS
  misc_feature: MA Experiment 20001911 PARAMETER Experiment Name: At_Drought_Reproduction_P Parameter: Timepoint (day) Value: 10
  misc_feature: MA Experiment 20001911 PARAMETER Experiment Name: At_Drought_Reproduction_P Parameter: Tissue Value: Flowers
  misc_feature: MA Experiment 20001911 PARAMETER Experiment Name: At_Drought_Reproduction_P Parameter: Treatment Value: Drought vs. No Drought
agacataaattattagagagacgaaaggaaaagcatgtttaaactctgtctcgttctcgtcttggttattgcagtagatgcaaatccggctaagtccggttcttgtagttgctccgggaatatatcagcgagcgatgtcgatcgagttcatttcgcgatgaacttggagttcaccgaggccgagttcttcttaaaaggggctaccggaaaaggacttgatgcctataacgcgacacttgctaaaggcggaccaccgccgataggggccaagaaagccaaccttgatcctataactaatcgaatcatcgaggagtttggttatcaagaaatcggtcatcttagggcgattacggatatgacgggaggaattccacgtccgctaataaatctgacgagagagaatttcgcagtgtttatggatagagcggttggacgcaaatctaatccgcggtttgatccttacgccaactcactcaactatctcttagcttcatattatatcccttatgttggccttaccggttatgtcggaaccatcccttaccttgtctacttcaatatcaaaaagctagtggcgggtctattgggggtggaatcgggtcaagacgcagtgataagaacgcttctgtacgagagacagaatgagaaggtggaggaatacggtggagtcacggtggctgagctgaccaatgagatatctaacctccgtaatgaactcggtatgtgcgggatcaaggacgaaggcttgtgcgtgccgttgtggctaggagcggagaatcgcaccaccagcaacatcctctccgctgatccttactctctctcttatgaccggacagcacaagagatcctcagggttatgtacggcaccggtgatgagcaccgacctggcgggttttggccgtgtggtgccaatggaaggatcgctaggatgtttcttgatgaagggtgttatggtgaatattgcgttgtatgttcacatgacaattaaaagtttccattgatacaattcactagaaaataaaatcgtgattaagattgtaatagtgatctcattaatttaatactggtgattattag

SEQ ID NO: 82103 - protein, 317 aa, Arabidopsis thaliana
  peptide (1)..(317): Ceres Seq. ID no. 12663427
  misc_feature (1)..(317): Homolog of NCBI NO: 15228845 NR Description: putative protein; protein id: At3g62730.1, by cDNA: gi_15294283, supported by cDNA: gi_20147274 [Arabidopsis
  misc_feature (1)..(301): Homolog of NCBI NO: 18401988 NR Description: dessication-related protein, putative; protein
  misc_feature (1)..(301): Homolog of NCBI NO: 21593191 NR Description: dessication-related protein, putative
  misc_feature (23)..(301): Homolog of NCBI NO: 25357137 NR Description: hypothetical protein T2J15.11 [imported] -
  misc_feature (21)..(301): Homolog of NCBI NO: 38346151 NR Description: OSJNBb0118P14.11 [Oryza sativa (japonica
  misc_feature (24)..(295): Homolog of NCBI NO: 118926 NR Description: Desiccation-related protein PCC13-62 precursor
  misc_feature (16)..(170): Homolog of NCBI NO: 12083528 NR Description: similar to Arabidopsis thaliana hypothetical
  misc_feature (178)..(300): Homolog of NCBI NO: 12083528 NR Description: similar to Arabidopsis thaliana hypothetical
  misc_feature (1)..(296): Homolog of NCBI NO: 22984403 NR Description: hypothetical protein [Burkholderia fungorum]
  misc_feature (48)..(296): Homolog of NCBI NO: 16263242 NR Description: Conserved hypothetical protein [Sinorhizobium
MFKLCLVLVLVIAVDANPAKSGSCSCSGNISASDVDRVHFAMNLEFTEAEFFLKGATGKGLDAYNATLAKGGPPPIGAKKANLDPITNRIIEEFGYQEIGHLRAITDMTGGIPRPLINLTRENFAVFMDRAVGRKSNPRFDPYANSLNYLLASYYIPYVGLTGYVGTIPYLVYFNIKKLVAGLLGVESGQDAVIRTLLYERQNEKVEEYGGVTVAELTNEISNLRNELGMCGIKDEGLCVPLWLGAENRTTSNILSADPYSLSYDRTAQEILRVMYGTGDEHRPGGFWPCGANGRIARMFLDEGCYGEYCVVCSHDN

SEQ ID NO: 82104 - protein, 276 aa, Arabidopsis thaliana
  peptide (1)..(276): Ceres Seq. ID no. 12663428
  misc_feature (1)..(276): Homolog of NCBI NO: 15228845 NR Description: putative protein; protein id: At3g62730.1, by cDNA: gi_15294283, supported by cDNA: gi_20147274 [Arabidopsis
  misc_feature (1)..(260): Homolog of NCBI NO: 18401988 NR Description: dessication-related protein, putative; protein
  misc_feature (1)..(260): Homolog of NCBI NO: 21593191 NR Description: dessication-related protein, putative
  misc_feature (1)..(260): Homolog of NCBI NO: 25357137 NR Description: hypothetical protein T2J15.11 [imported] -
  misc_feature (1)..(260): Homolog of NCBI NO: 38346151 NR Description: OSJNBb0118P14.11 [Oryza sativa (japonica
  misc_feature (1)..(254): Homolog of NCBI NO: 118926 NR Description: Desiccation-related protein PCC13-62 precursor
  misc_feature (1)..(129): Homolog of NCBI NO: 12083528 NR Description: similar to Arabidopsis thaliana hypothetical
  misc_feature (137)..(259): Homolog of NCBI NO: 12083528 NR Description: similar to Arabidopsis thaliana hypothetical
  misc_feature (1)..(255): Homolog of NCBI NO: 22984403 NR Description: hypothetical protein [Burkholderia fungorum]
  misc_feature (7)..(255): Homolog of NCBI NO: 16263242 NR Description: Conserved hypothetical protein [Sinorhizobium
MNLEFTEAEFFLKGATGKGLDAYNATLAKGGPPPIGAKKANLDPITNRIIEEFGYQEIGHLRAITDMTGGIPRPLINLTRENFAVFMDRAVGRKSNPRFDPYANSLNYLLASYYIPYVGLTGYVGTIPYLVYFNIKKLVAGLLGVESGQDAVIRTLLYERQNEKVEEYGGVTVAELTNEISNLRNELGMCGIKDEGLCVPLWLGAENRTTSNILSADPYSLSYDRTAQEILRVMYGTGDEHRPGGFWPCGANGRIARMFLDEGCYGEYCVVCSHDN

SEQ ID NO: 82105 - protein, 210 aa, Arabidopsis thaliana
  peptide (1)..(210): Ceres Seq. ID no. 12663429
  misc_feature (1)..(210): Homolog of NCBI NO: 15228845 NR Description: putative protein; protein id: At3g62730.1, by cDNA: gi_15294283, supported by cDNA: gi_20147274 [Arabidopsis
  misc_feature (1)..(194): Homolog of NCBI NO: 18401988 NR Description: dessication-related protein, putative; protein
  misc_feature (1)..(194): Homolog of NCBI NO: 21593191 NR Description: dessication-related protein, putative
  misc_feature (1)..(194): Homolog of NCBI NO: 25357137 NR Description: hypothetical protein T2J15.11 [imported] -
  misc_feature (1)..(194): Homolog of NCBI NO: 38346151 NR Description: OSJNBb0118P14.11 [Oryza sativa (japonica
  misc_feature (1)..(188): Homolog of NCBI NO: 118926 NR Description: Desiccation-related protein PCC13-62 precursor
  misc_feature (1)..(63): Homolog of NCBI NO: 12083528 NR Description: similar to Arabidopsis thaliana hypothetical
  misc_feature (71)..(193): Homolog of NCBI NO: 12083528 NR Description: similar to Arabidopsis thaliana hypothetical
  misc_feature (1)..(189): Homolog of NCBI NO: 22984403 NR Description: hypothetical protein [Burkholderia fungorum]
  misc_feature (1)..(189): Homolog of NCBI NO: 16263242 NR Description: Conserved hypothetical protein [Sinorhizobium
MTGGIPRPLINLTRENFAVFMDRAVGRKSNPRFDPYANSLNYLLASYYIPYVGLTGYVGTIPYLVYFNIKKLVAGLLGVESGQDAVIRTLLYERQNEKVEEYGGVTVAELTNEISNLRNELGMCGIKDEGLCVPLWLGAENRTTSNILSADPYSLSYDRTAQEILRVMYGTGDEHRPGGFWPCGANGRIARMFLDEGCYGEYCVVCSHDN

SEQ ID NO: 82106 - DNA, 1461 bp, Arabidopsis thaliana
  misc_feature (1)..(1461): Ceres Seq. ID no. 12663430
  misc_feature: MA Experiment ID: 20000171 Result: Down-regulated in Transcription
  misc_feature: MA Experiment 20000171 PARAMETER Experiment Name: At_42deg_Heat_P Parameter: Age (day) Value: 14
  misc_feature: MA Experiment 20000171 PARAMETER Experiment Name: At_42deg_Heat_P Parameter: Organism Value: A. thaliana
  misc_feature: MA Experiment 20000171 PARAMETER Experiment Name: At_42deg_Heat_P Parameter: Plant Line Value: WS
  misc_feature: MA Experiment 20000171 PARAMETER Experiment Name: At_42deg_Heat_P Parameter: Temperature (deg C) Value: 42 vs. 22
  misc_feature: MA Experiment 20000171 PARAMETER Experiment Name: At_42deg_Heat_P Parameter: Timepoint (hr) Value: 1
  misc_feature: MA Experiment 20000171 PARAMETER Experiment Name: At_42deg_Heat_P Parameter: Tissue Value: Aerial
  misc_feature: MA Experiment ID: 20000173 Result: Down-regulated in Transcription
  misc_feature: MA Experiment 20000173 PARAMETER Experiment Name: At_42deg_Heat_P Parameter: Age (day) Value: 14
  misc_feature: MA Experiment 20000173 PARAMETER Experiment Name: At_42deg_Heat_P Parameter: Organism Value: A. thaliana
  misc_feature: MA Experiment 20000173 PARAMETER Experiment Name: At_42deg_Heat_P Parameter: Plant Line Value: WS
  misc_feature: MA Experiment 20000173 PARAMETER Experiment Name: At_42deg_Heat_P Parameter: Temperature (deg C) Value: 42 vs. 22
  misc_feature: MA Experiment 20000173 PARAMETER Experiment Name: At_42deg_Heat_P Parameter: Timepoint (hr) Value: 6
  misc_feature: MA Experiment 20000173 PARAMETER Experiment Name: At_42deg_Heat_P Parameter: Tissue Value: Aerial
  misc_feature: MA Experiment ID: 20000180 Result: Up-regulated in Transcription
  misc_feature: MA Experiment 20000180 PARAMETER Experiment Name: At_Germinating_Seeds_P Parameter: Age (hr) Value: 24 vs. 0
  misc_feature: MA Experiment 20000180 PARAMETER Experiment Name: At_Germinating_Seeds_P Parameter: Tissue Value: Germinating Seeds
  misc_feature: MA Experiment ID: 20000182 Result: Down-regulated in Transcription
  misc_feature: MA Experiment 20000182 PARAMETER Experiment Name: At_2mM_SA_P Parameter: Age (day) Value: 14
  misc_feature: MA Experiment 20000182 PARAMETER Experiment Name: At_2mM_SA_P Parameter: Organism Value: A. thaliana
  misc_feature: MA Experiment 20000182 PARAMETER Experiment Name: At_2mM_SA_P Parameter: Plant Line Value: WS
  misc_feature: MA Experiment 20000182 PARAMETER Experiment Name: At_2mM_SA_P Parameter: Timepoint (hr) Value: 6
  misc_feature: MA Experiment 20000182 PARAMETER Experiment Name: At_2mM_SA_P Parameter: Tissue Value: Aerial
  misc_feature: MA Experiment 20000182 PARAMETER Experiment Name: At_2mM_SA_P Parameter: Treatment Value: 2mM SA vs. No Treatment
  misc_feature: MA Experiment ID: 20000184 Result: Down-regulated in Transcription
  misc_feature: MA Experiment 20000184 PARAMETER Experiment Name: At_Shoots__P Parameter: Age (day) Value: 7
  misc_feature: MA Experiment 20000184 PARAMETER Experiment Name: At_Shoots__P Parameter: Tissue Value: Shoots vs. Whole Plant
  misc_feature: MA Experiment ID: 20000185 Result: Down-regulated in Transcription
  misc_feature: MA Experiment 20000185 PARAMETER Experiment Name: At_Roots__P Parameter: Age (day) Value: 7 vs. 21
  misc_feature: MA Experiment 20000185 PARAMETER Experiment Name: At_Roots__P Parameter: Organism Value: A. thaliana
  misc_feature: MA Experiment 20000185 PARAMETER Experiment Name: At_Roots__P Parameter: Tissue Value: Roots vs. Whole Plant
  misc_feature: MA Experiment ID: 20000234 Result: Down-regulated in Transcription
  misc_feature: MA Experiment 20000234 PARAMETER Experiment Name: At_Siliques_P Parameter: Age (day) Value: 21
  misc_feature: MA Experiment 20000234 PARAMETER Experiment Name: At_Siliques_P Parameter: Organism Value: A. thaliana
  misc_feature: MA Experiment 20000234 PARAMETER Experiment Name: At_Siliques_P Parameter: Plant Line Value: WS
  misc_feature: MA Experiment 20000234 PARAMETER Experiment Name: At_Siliques_P Parameter: Tissue Value: Less Than 5mm Siliques vs. Whole Plant
  misc_feature: MA Experiment ID: 20000265 Result: Up-regulated in Transcription
  misc_feature: MA Experiment 20000265 PARAMETER Experiment Name: At_Open_Flower_P Parameter: Age (day) Value: 21
  misc_feature: MA Experiment 20000265 PARAMETER Experiment Name: At_Open_Flower_P Parameter: Plant Line Value: WS
  misc_feature: MA Experiment 20000265 PARAMETER Experiment Name: At_Open_Flower_P Parameter: Tissue Value: Closed Flower vs. Whole Plant
  misc_feature: MA Experiment ID: 20000438 Result: Up-regulated in Transcription
  misc_feature: MA Experiment 20000438 PARAMETER Experiment Name: At_Shoots__P Parameter: Age (day) Value: 14
  misc_feature: MA Experiment 20000438 PARAMETER Experiment Name: At_Shoots__P Parameter: Tissue Value: Shoots vs. Whole Plant
  misc_feature: MA Experiment ID: 20000439 Result: Down-regulated in Transcription
  misc_feature: MA Experiment 20000439 PARAMETER Experiment Name: At_Roots__P Parameter: Age (day) Value: 14 vs. 21
  misc_feature: MA Experiment 20000439 PARAMETER Experiment Name: At_Roots__P Parameter: Organism Value: A. thaliana
  misc_feature: MA Experiment 20000439 PARAMETER Experiment Name: At_Roots__P Parameter: Tissue Value: Roots vs. Whole Plant
  misc_feature: MA Experiment ID: 20001248 Result: Down-regulated in Transcription
  misc_feature: MA Experiment 20001248 PARAMETER Experiment Name: At_Far-red-induction_P Parameter: Age (day) Value: 7
  misc_feature: MA Experiment 20001248 PARAMETER Experiment Name: At_Far-red-induction_P Parameter: Light Value: Far-red vs. White
  misc_feature: MA Experiment 20001248 PARAMETER Experiment Name: At_Far-red-induction_P Parameter: Organism Value: A. thaliana
  misc_feature: MA Experiment 20001248 PARAMETER Experiment Name: At_Far-red-induction_P Parameter: Plant Line Value: Columbia
  misc_feature: MA Experiment 20001248 PARAMETER Experiment Name: At_Far-red-induction_P Parameter: Timepoint (hr) Value: 4
  misc_feature: MA Experiment 20001248 PARAMETER Experiment Name: At_Far-red-induction_P Parameter: Tissue Value: Whole Plant
  misc_feature: MA Experiment ID: 20001451 Result: Down-regulated in Transcription
  misc_feature: MA Experiment 20001451 PARAMETER Experiment Name: At_Far-red-induction_P Parameter: Age (day) Value: 7
  misc_feature: MA Experiment 20001451 PARAMETER Experiment Name: At_Far-red-induction_P Parameter: Light Value: Far-red vs. White
  misc_feature: MA Experiment 20001451 PARAMETER Experiment Name: At_Far-red-induction_P Parameter: Organism Value: A. thaliana
  misc_feature: MA Experiment 20001451 PARAMETER Experiment Name: At_Far-red-induction_P Parameter: Plant Line Value: Columbia
  misc_feature: MA Experiment 20001451 PARAMETER Experiment Name: At_Far-red-induction_P Parameter: Timepoint (hr) Value: 24
  misc_feature: MA Experiment 20001451 PARAMETER Experiment Name: At_Far-red-induction_P Parameter: Tissue Value: Whole Plant
  misc_feature: MA Experiment ID: 20001557 Result: Down-regulated in Transcription
  misc_feature: MA Experiment 20001557 PARAMETER Experiment Name: At_Drought_Soil_Dry_P Parameter: Age (day) Value: 27
  misc_feature: MA Experiment 20001557 PARAMETER Experiment Name: At_Drought_Soil_Dry_P Parameter: Organism Value: A. thaliana
  misc_feature: MA Experiment 20001557 PARAMETER Experiment Name: At_Drought_Soil_Dry_P Parameter: Plant Line Value: WS
  misc_feature: MA Experiment 20001557 PARAMETER Experiment Name: At_Drought_Soil_Dry_P Parameter: Post Timepoint (hr) Value: 3
  misc_feature: MA Experiment 20001557 PARAMETER Experiment Name: At_Drought_Soil_Dry_P Parameter: Post-Treatment Value: Re-Water vs. No Drought
  misc_feature: MA Experiment 20001557 PARAMETER Experiment Name: At_Drought_Soil_Dry_P Parameter: Timepoint (day) Value: 13
  misc_feature: MA Experiment 20001557 PARAMETER Experiment Name: At_Drought_Soil_Dry_P Parameter: Treatment Value: Drought vs. No Drought
  misc_feature: MA Experiment ID: 20001904 Result: Down-regulated in Transcription
  misc_feature: MA Experiment 20001904 PARAMETER Experiment Name: At_Drought_Reproduction_P Parameter: Age (day) Value: 37
  misc_feature: MA Experiment 20001904 PARAMETER Experiment Name: At_Drought_Reproduction_P Parameter: Organism Value: A. thaliana
  misc_feature: MA Experiment 20001904 PARAMETER Experiment Name: At_Drought_Reproduction_P Parameter: Plant Line Value: WS
  misc_feature: MA Experiment 20001904 PARAMETER Experiment Name: At_Drought_Reproduction_P Parameter: Timepoint (day) Value: 7
  misc_feature: MA Experiment 20001904 PARAMETER Experiment Name: At_Drought_Reproduction_P Parameter: Tissue Value: Rosettes
  misc_feature: MA Experiment 20001904 PARAMETER Experiment Name: At_Drought_Reproduction_P Parameter: Treatment Value: Drought vs. No Drought
  misc_feature: MA Experiment ID: 20001905 Result: Down-regulated in Transcription
  misc_feature: MA Experiment 20001905 PARAMETER Experiment Name: At_Drought_Reproduction_P Parameter: Age (day) Value: 40
  misc_feature: MA Experiment 20001905 PARAMETER Experiment Name: At_Drought_Reproduction_P Parameter: Organism Value: A. thaliana
  misc_feature: MA Experiment 20001905 PARAMETER Experiment Name: At_Drought_Reproduction_P Parameter: Plant Line Value: WS
  misc_feature: MA Experiment 20001905 PARAMETER Experiment Name: At_Drought_Reproduction_P Parameter: Timepoint (day) Value: 10
  misc_feature: MA Experiment 20001905 PARAMETER Experiment Name: At_Drought_Reproduction_P Parameter: Tissue Value: Rosettes
  misc_feature: MA Experiment 20001905 PARAMETER Experiment Name: At_Drought_Reproduction_P Parameter: Treatment Value: Drought vs. No Drought
  misc_feature: MA Experiment ID: 20001906 Result: Down-regulated in Transcription
  misc_feature: MA Experiment 20001906 PARAMETER Experiment Name: At_Drought_Reproduction_P Parameter: Age (day) Value: 35
  misc_feature: MA Experiment 20001906 PARAMETER Experiment Name: At_Drought_Reproduction_P Parameter: Organism Value: A. thaliana
  misc_feature: MA Experiment 20001906 PARAMETER Experiment Name: At_Drought_Reproduction_P Parameter: Plant Line Value: WS
  misc_feature: MA Experiment 20001906 PARAMETER Experiment Name: At_Drought_Reproduction_P Parameter: Timepoint (day) Value: 5
  misc_feature: MA Experiment 20001906 PARAMETER Experiment Name: At_Drought_Reproduction_P Parameter: Tissue Value: Siliques
  misc_feature: MA Experiment 20001906 PARAMETER Experiment Name: At_Drought_Reproduction_P Parameter: Treatment Value: Drought vs. No Drought
  misc_feature: MA Experiment ID: 20001911 Result: Down-regulated in Transcription
  misc_feature: MA Experiment 20001911 PARAMETER Experiment Name: At_Drought_Reproduction_P Parameter: Age (day) Value: 40
  misc_feature: MA Experiment 20001911 PARAMETER Experiment Name: At_Drought_Reproduction_P Parameter: Organism Value: A. thaliana
  misc_feature: MA Experiment 20001911 PARAMETER Experiment Name: At_Drought_Reproduction_P Parameter: Plant Line Value: WS
  misc_feature: MA Experiment 20001911 PARAMETER Experiment Name: At_Drought_Reproduction_P Parameter: Timepoint (day) Value: 10
  misc_feature: MA Experiment 20001911 PARAMETER Experiment Name: At_Drought_Reproduction_P Parameter: Tissue Value: Flowers
  misc_feature: MA Experiment 20001911 PARAMETER Experiment Name: At_Drought_Reproduction_P Parameter: Treatment Value: Drought vs. No Drought
  misc_feature: Pfam Name: Glyco_hydro_1 Pfam Description: Glycosyl hydrolase family 1
atgaaacatttcaatctgttatccattattctggttatcgttttggcgacaagctacattgatgccttcaccagaaacgattttccagaggatttcctcttcggagccggtacttctgcttatcagtgggaaggagctgctaatgaagacggaagaactcctagcgtctgggatacaacctcccactgttataatggaagtaatggagatatagcatgtgatgggtatcacaaatacaaggaagatgttaagttgatggcagaaatgggcttagaatcattcagattctctatctcctggtcaagacttatacctaatggaagaggacgcattaacccaaaaggtttattgttttacaagaatctcatcaaagagctacgaagccatggaatcgaacctcacgttacactttaccactacgatcttcctcagtctcttgaagatgagtatggaggatggatcaaccacaaaatcatagaagactttacagcttttgcagatgtatgcttcagagagtttggggaggatgtgaagttatggactacaatcaacgaagctacaatcttcgcctttgctttttatggcaaagacgttaggtatggaaattgtactacaggaaattattgtatggaaacatatattgcaggccataacatgttgctagctcatgcctctgcttcaaatttgtataaactaaagtacaagagtaagcaaagaggatccataggccttagtatatttgcattggggttaactccttatacaaactccaaggacgatgaaatcgcaactcaaagagctaaagctttcctctatggatggatgttgaagcctttggtatttggggactatccggatgaaatgaagagaaccttgggatcgagattaccggttttctcagaggaagaatcagagcaagttaaaggatcatctgactttgtaggaattatacattacacgacagtttatgtcacaaaccagcccgcaccttatatctttcccagcagcactaacaaagacttctttacagacatgggcgcccactgggaactcttcatcattcgtggtaagtttgatgctgttccatggggtctggaaggtgttcttcagcatataaagcatcgctataacaatcctccaatctacattcttgaaaatggttcaccgatgaaacacgattcgatgctacaagacacaccaagagttgaatacattcaagcttacattggtgctgtcctcaacgctatcaagtatggtcatcctttttcaaattttagtcctcacgttggatataaaagcagcttcggaatgtactatgtcaattttagcgatcctggtcgcaagaggtcgccaaagctctctgcttcttggtacactggttttctcaatggtacaattgatgttgcttctcaagatatgactcagttgcagagaaatttctctggctcttcttcactgtaa

SEQ ID NO: 82107 - protein, 486 aa, Arabidopsis thaliana
  peptide (1)..(486): Ceres Seq. ID no. 12663431
  misc_feature: Pfam Name: Glyco_hydro_1 Pfam Description: Glycosyl hydrolase family 1
  misc_feature (1)..(486): Homolog of NCBI NO: 22331910 NR Description: glycosyl hydrolase family 1; protein id:
  misc_feature (244)..(486): Homolog of NCBI NO: 11264268 NR Description: beta-glucosidase-like protein - Arabidopsis
  misc_feature (1)..(198): Homolog of NCBI NO: 11264268 NR Description: beta-glucosidase-like protein - Arabidopsis
  misc_feature (1)..(486): Homolog of NCBI NO: 7435451 NR Description: beta-glucosidase homolog T27E11.60 - Arabidopsis
  misc_feature (1)..(388): Homolog of NCBI NO: 7435452 NR Description: beta-glucosidase homolog T27E11.70 - Arabidopsis
  misc_feature (384)..(486): Homolog of NCBI NO: 7435452 NR Description: beta-glucosidase homolog T27E11.70 - Arabidopsis
  misc_feature (1)..(486): Homolog of NCBI NO: 15228847 NR Description: glycosyl hydrolase family 1; protein id:
  misc_feature (1)..(419): Homolog of NCBI NO: 18417073 NR Description: glycosyl hydrolase family 1; protein id: supported by cDNA: gi_15982821 [Arabidopsis thaliana] AT4g27830/T27E11_70 [Arabidopsis thaliana]
  misc_feature (1)..(419): Homolog of NCBI NO: 30687750 NR Description: glycosyl hydrolase family 1 [Arabidopsis thaliana]
  misc_feature (6)..(397): Homolog of NCBI NO: 22330338 NR Description: glycosyl hydrolase family 1; protein id:
MKHFNLLSIILVIVLATSYIDAFTRNDFPEDFLFGAGTSAYQWEGAANEDGRTPSVWDTTSHCYNGSNGDIACDGYHKYKEDVKLMAEMGLESFRFSISWSRLIPNGRGRINPKGLLFYKNLIKELRSHGIEPHVTLYHYDLPQSLEDEYGGWINHKIIEDFTAFADVCFREFGEDVKLWTTINEATIFAFAFYGKDVRYGNCTTGNYCMETYIAGHNMLLAHASASNLYKLKYKSKQRGSIGLSIFALGLTPYTNSKDDEIATQRAKAFLYGWMLKPLVFGDYPDEMKRTLGSRLPVFSEEESEQVKGSSDFVGIIHYTTVYVTNQPAPYIFPSSTNKDFFTDMGAHWELFIIRGKFDAVPWGLEGVLQHIKHRYNNPPIYILENGSPMKHDSMLQDTPRVEYIQAYIGAVLNAIKYGHPFSNFSPHVGYKSSFGMYYVNFSDPGRKRSPKLSASWYTGFLNGTIDVASQDMTQLQRNFSGSSSL

SEQ ID NO: 82108 - protein, 401 aa, Arabidopsis thaliana
  peptide (1)..(401): Ceres Seq. ID no. 12663432
  misc_feature: Pfam Name: Glyco_hydro_1 Pfam Description: Glycosyl hydrolase family 1
  misc_feature (1)..(401): Homolog of NCBI NO: 22331910 NR Description: glycosyl hydrolase family 1; protein id:
  misc_feature (159)..(401): Homolog of NCBI NO: 11264268 NR Description: beta-glucosidase-like protein - Arabidopsis
  misc_feature (1)..(113): Homolog of NCBI NO: 11264268 NR Description: beta-glucosidase-like protein - Arabidopsis
  misc_feature (1)..(401): Homolog of NCBI NO: 7435451 NR Description: beta-glucosidase homolog T27E11.60 - Arabidopsis
  misc_feature (1)..(303): Homolog of NCBI NO: 7435452 NR Description: beta-glucosidase homolog T27E11.70 - Arabidopsis
  misc_feature (299)..(401): Homolog of NCBI NO: 7435452 NR Description: beta-glucosidase homolog T27E11.70 - Arabidopsis
  misc_feature (1)..(401): Homolog of NCBI NO: 15228847 NR Description: glycosyl hydrolase family 1; protein id:
  misc_feature (1)..(334): Homolog of NCBI NO: 18417073 NR Description: glycosyl hydrolase family 1; protein id: supported by cDNA: gi_15982821 [Arabidopsis thaliana] AT4g27830/T27E11_70 [Arabidopsis thaliana]
  misc_feature (1)..(334): Homolog of NCBI NO: 30687750 NR Description: glycosyl hydrolase family 1 [Arabidopsis thaliana]
  misc_feature (1)..(312): Homolog of NCBI NO: 22330338 NR Description: glycosyl hydrolase family 1; protein id:
MAEMGLESFRFSISWSRLIPNGRGRINPKGLLFYKNLIKELRSHGIEPHVTLYHYDLPQSLEDEYGGWINHKIIEDFTAFADVCFREFGEDVKLWTTINEATIFAFAFYGKDVRYGNCTTGNYCMETYIAGHNMLLAHASASNLYKLKYKSKQRGSIGLSIFALGLTPYTNSKDDEIATQRAKAFLYGWMLKPLVFGDYPDEMKRTLGSRLPVFSEEESEQVKGSSDFVGIIHYTTVYVTNQPAPYIFPSSTNKDFFTDMGAHWELFIIRGKFDAVPWGLEGVLQHIKHRYNNPPIYILENGSPMKHDSMLQDTPRVEYIQAYIGAVLNAIKYGHPFSNFSPHVGYKSSFGMYYVNFSDPGRKRSPKLSASWYTGFLNGTIDVASQDMTQLQRNFSGSSSL

SEQ ID NO: 82109 - protein, 398 aa, Arabidopsis thaliana
  peptide (1)..(398): Ceres Seq. ID no. 12663433
  misc_feature: Pfam Name: Glyco_hydro_1 Pfam Description: Glycosyl hydrolase family 1
  misc_feature (1)..(398): Homolog of NCBI NO: 22331910 NR Description: glycosyl hydrolase family 1; protein id:
  misc_feature (156)..(398): Homolog of NCBI NO: 11264268 NR Description: beta-glucosidase-like protein - Arabidopsis
  misc_feature (1)..(110): Homolog of NCBI NO: 11264268 NR Description: beta-glucosidase-like protein - Arabidopsis
  misc_feature (1)..(398): Homolog of NCBI NO: 7435451 NR Description: beta-glucosidase homolog T27E11.60 - Arabidopsis
  misc_feature (1)..(300): Homolog of NCBI NO: 7435452 NR Description: beta-glucosidase homolog T27E11.70 - Arabidopsis
  misc_feature (296)..(398): Homolog of NCBI NO: 7435452 NR Description: beta-glucosidase homolog T27E11.70 - Arabidopsis
  misc_feature (1)..(398): Homolog of NCBI NO: 15228847 NR Description: glycosyl hydrolase family 1; protein id:
  misc_feature (1)..(331): Homolog of NCBI NO: 18417073 NR Description: glycosyl hydrolase family 1; protein id: supported by cDNA: gi_15982821 [Arabidopsis thaliana] AT4g27830/T27E11_70 [Arabidopsis thaliana]
  misc_feature (1)..(331): Homolog of NCBI NO: 30687750 NR Description: glycosyl hydrolase family 1 [Arabidopsis thaliana]
  misc_feature (1)..(309): Homolog of NCBI NO: 22330338 NR Description: glycosyl hydrolase family 1; protein id:
MGLESFRFSISWSRLIPNGRGRINPKGLLFYKNLIKELRSHGIEPHVTLYHYDLPQSLEDEYGGWINHKIIEDFTAFADVCFREFGEDVKLWTTINEATIFAFAFYGKDVRYGNCTTGNYCMETYIAGHNMLLAHASASNLYKLKYKSKQRGSIGLSIFALGLTPYTNSKDDEIATQRAKAFLYGWMLKPLVFGDYPDEMKRTLGSRLPVFSEEESEQVKGSSDFVGIIHYTTVYVTNQPAPYIFPSSTNKDFFTDMGAHWELFIIRGKFDAVPWGLEGVLQHIKHRYNNPPIYILENGSPMKHDSMLQDTPRVEYIQAYIGAVLNAIKYGHPFSNFSPHVGYKSSFGMYYVNFSDPGRKRSPKLSASWYTGFLNGTIDVASQDMTQLQRNFSGSSSL

SEQ ID NO: 82110 - DNA, 660 bp, Arabidopsis thaliana
  misc_feature (1)..(660): Ceres Seq. ID no. 12663434
  misc_feature: MA Experiment ID: 20000227 Result: Up-regulated in Transcription
  misc_feature: MA Experiment 20000227 PARAMETER Experiment Name: At_Root-Tips-vs-Tops_P Parameter: Tissue Value: Root Tips vs. Root Tops
atggcgatgaagctatatggagatgagatgtcagcgtgcgtggcacgtgttcttctctgccttcatgagaagaacactgagttcgagcttgtccctgtcaatctctttgcttgccaccacaagctcccttcttttctctccatgaacccctttggcaaagttccagctctacaagatgacgatcttaccctttttgagtcgagggcaatcactgcatatatagcagagaagcatagagacaaaggaacggatttgacaagacacgaagaccctaaagaagcagcgattgtgaagttatggtcggaagtggaggctcaccacttcaaccctgcgatctccgccgtcatccaccagctcatcgtcgtgccgcttcaaggtgagtctcctaatgcagccatcgtggaggagaatctggagaatctagggaaaatacttgacgtgtacgaagagagacttgggaagacaaaatacttagccggagatacttacacactcgccgatctccaccacgtgccttacacttactacttcatgaagacgattcatgccggtttgatcaacgaccgtcctaatgtcaaggcgtggtgggaagatctctgttctcgtccggctttccttaaagtctctccaggcttgaccgttgctcccaccacaaattga

SEQ ID NO: 82111 - protein, 219 aa, Arabidopsis thaliana
  peptide (1)..(219): Ceres Seq. ID no. 12663435
  misc_feature (1)..(219): Homolog of NCBI NO: 15228853 NR Description: glutathione transferase, putative; protein id:
MAMKLYGDEMSACVARVLLCLHEKNTEFELVPVNLFACHHKLPSFLSMNPFGKVPALQDDDLTLFESRAITAYIAEKHRDKGTDLTRHEDPKEAAIVKLWSEVEAHHFNPAISAVIHQLIVVPLQGESPNAAIVEENLENLGKILDVYEERLGKTKYLAGDTYTLADLHHVPYTYYFMKTIHAGLINDRPNVKAWWEDLCSRPAFLKVSPGLTVAPTTN

SEQ ID NO: 82112 - protein, 217 aa, Arabidopsis thaliana
  peptide (1)..(217): Ceres Seq. ID no. 12663436
  misc_feature (1)..(217): Homolog of NCBI NO: 15228853 NR Description: glutathione transferase, putative; protein id:
MKLYGDEMSACVARVLLCLHEKNTEFELVPVNLFACHHKLPSFLSMNPFGKVPALQDDDLTLFESRAITAYIAEKHRDKGTDLTRHEDPKEAAIVKLWSEVEAHHFNPAISAVIHQLIVVPLQGESPNAAIVEENLENLGKILDVYEERLGKTKYLAGDTYTLADLHHVPYTYYFMKTIHAGLINDRPNVKAWWEDLCSRPAFLKVSPGLTVAPTTN

SEQ ID NO: 82113 - protein, 210 aa, Arabidopsis thaliana
  peptide (1)..(210): Ceres Seq. ID no. 12663437
  misc_feature (1)..(210): Homolog of NCBI NO: 15228853 NR Description: glutathione transferase, putative; protein id:
MSACVARVLLCLHEKNTEFELVPVNLFACHHKLPSFLSMNPFGKVPALQDDDLTLFESRAITAYIAEKHRDKGTDLTRHEDPKEAAIVKLWSEVEAHHFNPAISAVIHQLIVVPLQGESPNAAIVEENLENLGKILDVYEERLGKTKYLAGDTYTLADLHHVPYTYYFMKTIHAGLINDRPNVKAWWEDLCSRPAFLKVSPGLTVAPTTN

SEQ ID NO: 82114 - DNA, 1077 bp, Arabidopsis thaliana
  misc_feature (1)..(1077): Ceres Seq. ID no. 12663464
  misc_feature: MA Experiment ID: 20000182 Result: Up-regulated in Transcription
  misc_feature: MA Experiment 20000182 PARAMETER Experiment Name: At_2mM_SA_P Parameter: Age (day) Value: 14
  misc_feature: MA Experiment 20000182 PARAMETER Experiment Name: At_2mM_SA_P Parameter: Organism Value: A. thaliana
  misc_feature: MA Experiment 20000182 PARAMETER Experiment Name: At_2mM_SA_P Parameter: Plant Line Value: WS
  misc_feature: MA Experiment 20000182 PARAMETER Experiment Name: At_2mM_SA_P Parameter: Timepoint (hr) Value: 6
  misc_feature: MA Experiment 20000182 PARAMETER Experiment Name: At_2mM_SA_P Parameter: Tissue Value: Aerial
  misc_feature: MA Experiment 20000182 PARAMETER Experiment Name: At_2mM_SA_P Parameter: Treatment Value: 2mM SA vs. No Treatment
  misc_feature: MA Experiment ID: 20000235 Result: Down-regulated in Transcription
  misc_feature: MA Experiment 20000235 PARAMETER Experiment Name: At_Siliques_P Parameter: Age (day) Value: 21
  misc_feature: MA Experiment 20000235 PARAMETER Experiment Name: At_Siliques_P Parameter: Organism Value: A. thaliana
  misc_feature: MA Experiment 20000235 PARAMETER Experiment Name: At_Siliques_P Parameter: Plant Line Value: WS
  misc_feature: MA Experiment 20000235 PARAMETER Experiment Name: At_Siliques_P Parameter: Tissue Value: 5-10mm Siliques vs. Whole Plant
  misc_feature: MA Experiment ID: 20000265 Result: Down-regulated in Transcription
  misc_feature: MA Experiment 20000265 PARAMETER Experiment Name: At_Open_Flower_P Parameter: Age (day) Value: 21
  misc_feature: MA Experiment 20000265 PARAMETER Experiment Name: At_Open_Flower_P Parameter: Plant Line Value: WS
  misc_feature: MA Experiment 20000265 PARAMETER Experiment Name: At_Open_Flower_P Parameter: Tissue Value: Closed Flower vs. Whole Plant
  misc_feature: MA Experiment ID: 20000436 Result: Up-regulated in Transcription
  misc_feature: MA Experiment 20000436 PARAMETER Experiment Name: At_Drought_P Parameter: Age (day) Value: 7
  misc_feature: MA Experiment 20000436 PARAMETER Experiment Name: At_Drought_P Parameter: Organism Value: A. thaliana
  misc_feature: MA Experiment 20000436 PARAMETER Experiment Name: At_Drought_P Parameter: Plant Line Value: WS
  misc_feature: MA Experiment 20000436 PARAMETER Experiment Name: At_Drought_P Parameter: Timepoint (hr) Value: 12
  misc_feature: MA Experiment 20000436 PARAMETER Experiment Name: At_Drought_P Parameter: Tissue Value: Whole Plant
  misc_feature: MA Experiment 20000436 PARAMETER Experiment Name: At_Drought_P Parameter: Treatment Value: Drought vs. No Drought
  misc_feature: MA Experiment ID: 20000439 Result: Up-regulated in Transcription
  misc_feature: MA Experiment 20000439 PARAMETER Experiment Name: At_Roots__P Parameter: Age (day) Value: 14 vs. 21
  misc_feature: MA Experiment 20000439 PARAMETER Experiment Name: At_Roots__P Parameter: Organism Value: A. thaliana
  misc_feature: MA Experiment 20000439 PARAMETER Experiment Name: At_Roots__P Parameter: Tissue Value: Roots vs. Whole Plant
  misc_feature: MA Experiment ID: 20001904 Result: Up-regulated in Transcription
  misc_feature: MA Experiment 20001904 PARAMETER Experiment Name: At_Drought_Reproduction_P Parameter: Age (day) Value: 37
  misc_feature: MA Experiment 20001904 PARAMETER Experiment Name: At_Drought_Reproduction_P Parameter: Organism Value: A. thaliana
  misc_feature: MA Experiment 20001904 PARAMETER Experiment Name: At_Drought_Reproduction_P Parameter: Plant Line Value: WS
  misc_feature: MA Experiment 20001904 PARAMETER Experiment Name: At_Drought_Reproduction_P Parameter: Timepoint (day) Value: 7
  misc_feature: MA Experiment 20001904 PARAMETER Experiment Name: At_Drought_Reproduction_P Parameter: Tissue Value: Rosettes
  misc_feature: MA Experiment 20001904 PARAMETER Experiment Name: At_Drought_Reproduction_P Parameter: Treatment Value: Drought vs. No Drought
  misc_feature: MA Experiment ID: 20001905 Result: Up-regulated in Transcription
  misc_feature: MA Experiment 20001905 PARAMETER Experiment Name: At_Drought_Reproduction_P Parameter: Age (day) Value: 40
  misc_feature: MA Experiment 20001905 PARAMETER Experiment Name: At_Drought_Reproduction_P Parameter: Organism Value: A. thaliana
  misc_feature: MA Experiment 20001905 PARAMETER Experiment Name: At_Drought_Reproduction_P Parameter: Plant Line Value: WS
  misc_feature: MA Experiment 20001905 PARAMETER Experiment Name: At_Drought_Reproduction_P Parameter: Timepoint (day) Value: 10
  misc_feature: MA Experiment 20001905 PARAMETER Experiment Name: At_Drought_Reproduction_P Parameter: Tissue Value: Rosettes
  misc_feature: MA Experiment 20001905 PARAMETER Experiment Name: At_Drought_Reproduction_P Parameter: Treatment Value: Drought vs. No Drought
  misc_feature: MA Experiment ID: 20001911 Result: Up-regulated in Transcription
  misc_feature: MA Experiment 20001911 PARAMETER Experiment Name: At_Drought_Reproduction_P Parameter: Age (day) Value: 40
  misc_feature: MA Experiment 20001911 PARAMETER Experiment Name: At_Drought_Reproduction_P Parameter: Organism Value: A. thaliana
  misc_feature: MA Experiment 20001911 PARAMETER Experiment Name: At_Drought_Reproduction_P Parameter: Plant Line Value: WS
  misc_feature: MA Experiment 20001911 PARAMETER Experiment Name: At_Drought_Reproduction_P Parameter: Timepoint (day) Value: 10
  misc_feature: MA Experiment 20001911 PARAMETER Experiment Name: At_Drought_Reproduction_P Parameter: Tissue Value: Flowers
  misc_feature: MA Experiment 20001911 PARAMETER Experiment Name: At_Drought_Reproduction_P Parameter: Treatment Value: Drought vs. No Drought
atggctggtggtaacgaagtcaaccttaacgaatgcaagagaattgtcccactcaacacatgggtcctcatttccaatttcaagcttgcttacaaagtcctccgtcgccctgacggttctttcaaccgcgacctcgccgagttccttgaccgtaaagttcccgccaactctttccccctcgacggcgttttctccttcgaccacgtcgactcaacaactaaccttctcaccagaatctaccaacctgcgtctctccttcatcagacccgtcacggaaccctcgagctaaccaaacctctcagtactacagagatcgtccctgttctcattttcttccatggaggcagcttcactcattcctccgccaatagtgctatctacgacactttctgccgacgccttgtcaccatttgcggtgttgttgttgtctctgttgattaccggagatcccctgagcatcgctacccttgtgcttacgacgatggatggaacgctctcaactgggtcaagtccagagtctggcttcagagtggtaaagactccaatgtttatgtttatttggctggagatagctctggaggcaacattgctcacaatgtcgctgtcagagctaccaatgaaggagtcaaagtgttggggaacattcttcttcatccaatgtttggtggacaggagaggactcagtctgagaagacccttgatggcaaatactttgtgactatacaagatcgagattggtattggagggcttatctaccggaaggtgaagatagagatcatccagcatgtaatccctttggcccgagaggtcaaagccttaaaggagtcaactttccaaagagtcttgttgttgtcgctggtttagatcttgttcaagattggcaattagcctatgtggatgggcttaagaagactggtcttgaagtcaatcttttgtatttgaaacaagctaccattggcttttacttcttgcctaacaatgatcactttcattgtcttatggaagagttgaataagtttgtgcactccatagaggattctcaaagcaagtcaagtcctgtgcttcttactccttag

SEQ ID NO: 82115 - protein, 358 aa, Arabidopsis thaliana
  peptide (1)..(358): Ceres Seq. ID no. 12663465
  misc_feature (106)..(151): Pfam Name: Carboxylesterase Pfam Description: Carboxylesterase
  misc_feature (1)..(358): Homolog of NCBI NO: 15229371 NR Description: putative protein; protein id: At3g63010.1
  misc_feature (1)..(343): Homolog of NCBI NO: 15240483 NR Description: putative protein; protein id: At5g27320.1, by cDNA: gi_15451145 [Arabidopsis thaliana] Unknown protein [Arabidopsis thaliana]
  misc_feature (1)..(343): Homolog of NCBI NO: 15229905 NR Description: unknown protein; protein id: At3g05120.1 thaliana] >gi|6729022|gb|AAF27018.1|AC009177_8 unknown protein thaliana] >gi|22530934|gb|AAM96971.1| unknown protein
  misc_feature (17)..(341): Homolog of NCBI NO: 34904770 NR Description: similar to carboxylesterase [Oryza sativa
  misc_feature (13)..(341): Homolog of NCBI NO: 21618039 NR Description: unknown [Arabidopsis thaliana]
  misc_feature (13)..(341): Homolog of NCBI NO: 15237783 NR Description: putative protein; protein id: At5g23530.1, by cDNA: 9482. [Arabidopsis thaliana] >gi|8809707|dbj|BAA97248.1| similarity to unknown protein~gb|AAF27018.1~gene_id:MQM1.21
  misc_feature (16)..(343): Homolog of NCBI NO: 34393714 NR Description: putative esterase [Oryza sativa (japonica
  misc_feature (16)..(343): Homolog of NCBI NO: 34904774 NR Description: similar to carboxylesterase [Oryza sativa
  misc_feature (30)..(343): Homolog of NCBI NO: 34904760 NR Description: similar to carboxylesterase [Oryza sativa
  misc_feature (45)..(345): Homolog of NCBI NO: 5487873 NR Description: PrMC3 [Pinus radiata]
MAGGNEVNLNECKRIVPLNTWVLISNFKLAYKVLRRPDGSFNRDLAEFLDRKVPANSFPLDGVFSFDHVDSTTNLLTRIYQPASLLHQTRHGTLELTKPLSTTEIVPVLIFFHGGSFTHSSANSAIYDTFCRRLVTICGVVVVSVDYRRSPEHRYPCAYDDGWNALNWVKSRVWLQSGKDSNVYVYLAGDSSGGNIAHNVAVRATNEGVKVLGNILLHPMFGGQERTQSEKTLDGKYFVTIQDRDWYWRAYLPEGEDRDHPACNPFGPRGQSLKGVNFPKSLVVVAGLDLVQDWQLAYVDGLKKTGLEVNLLYLKQATIGFYFLPNNDHFHCLMEELNKFVHSIEDSQSKSSPVLLTP

SEQ ID NO: 82116 - DNA, 720 bp, Arabidopsis thaliana
  misc_feature (1)..(720): Ceres Seq. ID no. 12663485
  misc_feature: MA Experiment ID: 20000171 Result: Up-regulated in Transcription
  misc_feature: MA Experiment 20000171 PARAMETER Experiment Name: At_42deg_Heat_P Parameter: Age (day) Value: 14
  misc_feature: MA Experiment 20000171 PARAMETER Experiment Name: At_42deg_Heat_P Parameter: Organism Value: A. thaliana
  misc_feature: MA Experiment 20000171 PARAMETER Experiment Name: At_42deg_Heat_P Parameter: Plant Line Value: WS
  misc_feature: MA Experiment 20000171 PARAMETER Experiment Name: At_42deg_Heat_P Parameter: Temperature (deg C) Value: 42 vs. 22
  misc_feature: MA Experiment 20000171 PARAMETER Experiment Name: At_42deg_Heat_P Parameter: Timepoint (hr) Value: 1
  misc_feature: MA Experiment 20000171 PARAMETER Experiment Name: At_42deg_Heat_P Parameter: Tissue Value: Aerial
  misc_feature: MA Experiment ID: 20000173 Result: Up-regulated in Transcription
  misc_feature: MA Experiment 20000173 PARAMETER Experiment Name: At_42deg_Heat_P Parameter: Age (day) Value: 14
  misc_feature: MA Experiment 20000173 PARAMETER Experiment Name: At_42deg_Heat_P Parameter: Organism Value: A. thaliana
  misc_feature: MA Experiment 20000173 PARAMETER Experiment Name: At_42deg_Heat_P Parameter: Plant Line Value: WS
  misc_feature: MA Experiment 20000173 PARAMETER Experiment Name: At_42deg_Heat_P Parameter: Temperature (deg C) Value: 42 vs. 22
  misc_feature: MA Experiment 20000173 PARAMETER Experiment Name: At_42deg_Heat_P Parameter: Timepoint (hr) Value: 6
  misc_feature: MA Experiment 20000173 PARAMETER Experiment Name: At_42deg_Heat_P Parameter: Tissue Value: Aerial
  misc_feature: MA Experiment ID: 20000234 Result: Down-regulated in Transcription
  misc_feature: MA Experiment 20000234 PARAMETER Experiment Name: At_Siliques_P Parameter: Age (day) Value: 21
  misc_feature: MA Experiment 20000234 PARAMETER Experiment Name: At_Siliques_P Parameter: Organism Value: A. thaliana
  misc_feature: MA Experiment 20000234 PARAMETER Experiment Name: At_Siliques_P Parameter: Plant Line Value: WS
  misc_feature: MA Experiment 20000234 PARAMETER Experiment Name: At_Siliques_P Parameter: Tissue Value: Less Than 5mm Siliques vs. Whole Plant
  misc_feature: MA Experiment ID: 20000235 Result: Down-regulated in Transcription
  misc_feature: MA Experiment 20000235 PARAMETER Experiment Name: At_Siliques_P Parameter: Age (day) Value: 21
  misc_feature: MA Experiment 20000235 PARAMETER Experiment Name: At_Siliques_P Parameter: Organism Value: A. thaliana
  misc_feature: MA Experiment 20000235 PARAMETER Experiment Name: At_Siliques_P Parameter: Plant Line Value: WS
  misc_feature: MA Experiment 20000235 PARAMETER Experiment Name: At_Siliques_P Parameter: Tissue Value: 5-10mm Siliques vs. Whole Plant
  misc_feature: MA Experiment ID: 20001911 Result: Up-regulated in Transcription
  misc_feature: MA Experiment 20001911 PARAMETER Experiment Name: At_Drought_Reproduction_P Parameter: Age (day) Value: 40
  misc_feature: MA Experiment 20001911 PARAMETER Experiment Name: At_Drought_Reproduction_P Parameter: Organism Value: A. thaliana
  misc_feature: MA Experiment 20001911 PARAMETER Experiment Name: At_Drought_Reproduction_P Parameter: Plant Line Value: WS
  misc_feature: MA Experiment 20001911 PARAMETER Experiment Name: At_Drought_Reproduction_P Parameter: Timepoint (day) Value: 10
  misc_feature: MA Experiment 20001911 PARAMETER Experiment Name: At_Drought_Reproduction_P Parameter: Tissue Value: Flowers
  misc_feature: MA Experiment 20001911 PARAMETER Experiment Name: At_Drought_Reproduction_P Parameter: Treatment Value: Drought vs. No Drought
atgtggaatcagaagcatgatttggagtcggctcagacgcctctctacccgatgatgtcggagagcccggagctccgatggtctttcatccgcaaggtctattccatcatctccatccagctgctcgttacaatcgccgtcgctgccaccgtcgttaaggttcattctatttctgtattcttcaccaccaccaccgccggcttcgctctctacatacttcttatattgactccattgatcgttatgtgtcctttgtattactatcaccagaagcaccctgtgaactatctgttactcgggattttcaccgtcgctcttgcctttgcggttggcttgacctgcgcctttacaagcgggaaggtgattctggaatctgtgattttgaccgctgttgtggtcatatccctcactctatacactttctgggcggccaaaagaggccatgacttcaacttcctcggacctttcttgttcggtgctgtcattgtcctcatggtgttttccttcatccagattctcttccctttaggaaagatctctgtgatgatctatggttgtttggcatccatcatcttctgtggctacattgtatatgataccgacaacttgatcaagaggcactcctatgacgagtacatctgggctgctgtttctctttatttggatgtcattaatctcttcctatctctcctcactctcttaagggctgttgatagttag

SEQ ID NO: 82117 - protein, 239 aa, Arabidopsis thaliana
  peptide (1)..(239): Ceres Seq. ID no. 12663486
  misc_feature (22)..(238): Pfam Name: Uncharacterised protein family UPF0005 Pfam Description: Uncharacterised protein family UPF0005
  misc_feature (1)..(239): Homolog of NCBI NO: 15229411 NR Description: putative protein; protein id: At3g63310.1
  misc_feature (2)..(238): Homolog of NCBI NO: 15218701 NR Description: putative glutamate/aspartate-binding peptide;
  misc_feature (2)..(237): Homolog of NCBI NO: 15235466 NR Description: putative glutamate-/aspartate-binding peptide; id: At4g02690.1 [Arabidopsis thaliana] >gi|7486855|pir||T01080
  misc_feature (14)..(239): Homolog of NCBI NO: 14626300 NR Description: putative receptor-associated protein [Oryza
  misc_feature (15)..(238): Homolog of NCBI NO: 34393841 NR Description: putative z-protein [Oryza sativa (japonica
  misc_feature (7)..(239): Homolog of NCBI NO: 18414455 NR Description: Expressed protein; protein id: At4g15470.1, by cDNA: gi_15215826, supported by cDNA: gi_15810200, supported cDNA: gi_20453266 [Arabidopsis thaliana]
  misc_feature (19)..(239): Homolog of NCBI NO: 34393840 NR Description: putative z-protein [Oryza sativa (japonica
  misc_feature (7)..(199): Homolog of NCBI NO: 15810201 NR Description: AT4g15470/dl3775w [Arabidopsis thaliana]
  misc_feature (7)..(82): Homolog of NCBI NO: 7485070 NR Description: hypothetical protein - Arabidopsis thaliana hypothetical protein [Arabidopsis thaliana]
  misc_feature (119)..(190): Homolog of NCBI NO: 7485070 NR Description: hypothetical protein - Arabidopsis thaliana hypothetical protein [Arabidopsis thaliana]
MWNQKHDLESAQTPLYPMMSESPELRWSFIRKVYSIISIQLLVTIAVAATVVKVHSISVFFTTTTAGFALYILLILTPLIVMCPLYYYHQKHPVNYLLLGIFTVALAFAVGLTCAFTSGKVILESVILTAVVVISLTLYTFWAAKRGHDFNFLGPFLFGAVIVLMVFSFIQILFPLGKISVMIYGCLASIIFCGYIVYDTDNLIKRHSYDEYIWAAVSLYLDVINLFLSLLTLLRAVDS

SEQ ID NO: 82118 - protein, 222 aa, Arabidopsis thaliana
  peptide (1)..(222): Ceres Seq. ID no. 12663487
  misc_feature (5)..(221): Pfam Name: Uncharacterised protein family UPF0005 Pfam Description: Uncharacterised protein family UPF0005
  misc_feature (1)..(222): Homolog of NCBI NO: 15229411 NR Description: putative protein; protein id: At3g63310.1
  misc_feature (1)..(221): Homolog of NCBI NO: 15218701 NR Description: putative glutamate/aspartate-binding peptide;
  misc_feature (1)..(220): Homolog of NCBI NO: 15235466 NR Description: putative glutamate-/aspartate-binding peptide; id: At4g02690.1 [Arabidopsis thaliana] >gi|7486855|pir||T01080
  misc_feature (1)..(222): Homolog of NCBI NO: 14626300 NR Description: putative receptor-associated protein [Oryza
  misc_feature (1)..(221): Homolog of NCBI NO: 34393841 NR Description: putative z-protein [Oryza sativa (japonica
  misc_feature (1)..(222): Homolog of NCBI NO: 18414455 NR Description: Expressed protein; protein id: At4g15470.1, by cDNA: gi_15215826, supported by cDNA: gi_15810200, supported cDNA: gi_20453266 [Arabidopsis thaliana]
  misc_feature (2)..(222): Homolog of NCBI NO: 34393840 NR Description: putative z-protein [Oryza sativa (japonica
  misc_feature (1)..(182): Homolog of NCBI NO: 15810201 NR Description: AT4g15470/dl3775w [Arabidopsis thaliana]
  misc_feature (1)..(65): Homolog of NCBI NO: 7485070 NR Description: hypothetical protein - Arabidopsis thaliana hypothetical protein [Arabidopsis thaliana]
  misc_feature (102)..(173): Homolog of NCBI NO: 7485070 NR Description: hypothetical protein - Arabidopsis thaliana hypothetical protein [Arabidopsis thaliana]
MMSESPELRWSFIRKVYSIISIQLLVTIAVAATVVKVHSISVFFTTTTAGFALYILLILTPLIVMCPLYYYHQKHPVNYLLLGIFTVALAFAVGLTCAFTSGKVILESVILTAVVVISLTLYTFWAAKRGHDFNFLGPFLFGAVIVLMVFSFIQILFPLGKISVMIYGCLASIIFCGYIVYDTDNLIKRHSYDEYIWAAVSLYLDVINLFLSLLTLLRAVDS

SEQ ID NO: 82119 - protein, 221 aa, Arabidopsis thaliana
  peptide (1)..(221): Ceres Seq. ID no. 12663488
  misc_feature (4)..(220): Pfam Name: Uncharacterised protein family UPF0005 Pfam Description: Uncharacterised protein family UPF0005
  misc_feature (1)..(221): Homolog of NCBI NO: 15229411 NR Description: putative protein; protein id: At3g63310.1
  misc_feature (1)..(220): Homolog of NCBI NO: 15218701 NR Description: putative glutamate/aspartate-binding peptide;
  misc_feature (1)..(219): Homolog of NCBI NO: 15235466 NR Description: putative glutamate-/aspartate-binding peptide; id: At4g02690.1 [Arabidopsis thaliana] >gi|7486855|pir||T01080
  misc_feature (1)..(221): Homolog of NCBI NO: 14626300 NR Description: putative receptor-associated protein [Oryza
  misc_feature (1)..(220): Homolog of NCBI NO: 34393841 NR Description: putative z-protein [Oryza sativa (japonica
  misc_feature (1)..(221): Homolog of NCBI NO: 18414455 NR Description: Expressed protein; protein id: At4g15470.1, by cDNA: gi_15215826, supported by cDNA: gi_15810200, supported cDNA: gi_20453266 [Arabidopsis thaliana]
  misc_feature (1)..(221): Homolog of NCBI NO: 34393840 NR Description: putative z-protein [Oryza sativa (japonica
  misc_feature (1)..(181): Homolog of NCBI NO: 15810201 NR Description: AT4g15470/dl3775w [Arabidopsis thaliana]
  misc_feature (1)..(64): Homolog of NCBI NO: 7485070 NR Description: hypothetical protein - Arabidopsis thaliana hypothetical protein [Arabidopsis thaliana]
  misc_feature (101)..(172): Homolog of NCBI NO: 7485070 NR Description: hypothetical protein - Arabidopsis thaliana hypothetical protein [Arabidopsis thaliana]
MSESPELRWSFIRKVYSIISIQLLVTIAVAATVVKVHSISVFFTTTTAGFALYILLILTPLIVMCPLYYYHQKHPVNYLLLGIFTVALAFAVGLTCAFTSGKVILESVILTAVVVISLTLYTFWAAKRGHDFNFLGPFLFGAVIVLMVFSFIQILFPLGKISVMIYGCLASIIFCGYIVYDTDNLIKRHSYDEYIWAAVSLYLDVINLFLSLLTLLRAVDS

SEQ ID NO: 82120 - DNA, 1563 bp, Arabidopsis thaliana
  misc_feature (1)..(1563): Ceres Seq. ID no. 12663530
  misc_feature: MA Experiment ID: 20000184 Result: Up-regulated in Transcription
  misc_feature: MA Experiment 20000184 PARAMETER Experiment Name: At_Shoots__P Parameter: Age (day) Value: 7
  misc_feature: MA Experiment 20000184 PARAMETER Experiment Name: At_Shoots__P Parameter: Tissue Value: Shoots vs. Whole Plant
  misc_feature: MA Experiment ID: 20000438 Result: Up-regulated in Transcription
  misc_feature: MA Experiment 20000438 PARAMETER Experiment Name: At_Shoots__P Parameter: Age (day) Value: 14
  misc_feature: MA Experiment 20000438 PARAMETER Experiment Name: At_Shoots__P Parameter: Tissue Value: Shoots vs. Whole Plant
  misc_feature: MA Experiment ID: 20000495 Result: Down-regulated in Transcription
  misc_feature: MA Experiment 20000495 PARAMETER Experiment Name: At_Guard_Cells_P Parameter: Harvest Date Value: 8/2/2002
  misc_feature: MA Experiment 20000495 PARAMETER Experiment Name: At_Guard_Cells_P Parameter: Organism Value: A. thaliana
  misc_feature: MA Experiment 20000495 PARAMETER Experiment Name: At_Guard_Cells_P Parameter: Tissue Value: Guard Cells vs. Leaves
  misc_feature: MA Experiment ID: 20001247 Result: Down-regulated in Transcription
  misc_feature: MA Experiment 20001247 PARAMETER Experiment Name: At_Far-red-induction_P Parameter: Age (day) Value: 7
  misc_feature: MA Experiment 20001247 PARAMETER Experiment Name: At_Far-red-induction_P Parameter: Light Value: Far-red vs. White
  misc_feature: MA Experiment 20001247 PARAMETER Experiment Name: At_Far-red-induction_P Parameter: Organism Value: A. thaliana
  misc_feature: MA Experiment 20001247 PARAMETER Experiment Name: At_Far-red-induction_P Parameter: Plant Line Value: Columbia
  misc_feature: MA Experiment 20001247 PARAMETER Experiment Name: At_Far-red-induction_P Parameter: Timepoint (hr) Value: 1
  misc_feature: MA Experiment 20001247 PARAMETER Experiment Name: At_Far-red-induction_P Parameter: Tissue Value: Whole Plant
  misc_feature: MA Experiment ID: 20001248 Result: Down-regulated in Transcription
  misc_feature: MA Experiment 20001248 PARAMETER Experiment Name: At_Far-red-induction_P Parameter: Age (day) Value: 7
  misc_feature: MA Experiment 20001248 PARAMETER Experiment Name: At_Far-red-induction_P Parameter: Light Value: Far-red vs. White
  misc_feature: MA Experiment 20001248 PARAMETER Experiment Name: At_Far-red-induction_P Parameter: Organism Value: A. thaliana
  misc_feature: MA Experiment 20001248 PARAMETER Experiment Name: At_Far-red-induction_P Parameter: Plant Line Value: Columbia
  misc_feature: MA Experiment 20001248 PARAMETER Experiment Name: At_Far-red-induction_P Parameter: Timepoint (hr) Value: 4
  misc_feature: MA Experiment 20001248 PARAMETER Experiment Name: At_Far-red-induction_P Parameter: Tissue Value: Whole Plant
  misc_feature: MA Experiment ID: 20001450 Result: Down-regulated in Transcription
  misc_feature: MA Experiment 20001450 PARAMETER Experiment Name: At_Far-red-induction_P Parameter: Age (day) Value: 7
  misc_feature: MA Experiment 20001450 PARAMETER Experiment Name: At_Far-red-induction_P Parameter: Light Value: Far-red vs. White
  misc_feature: MA Experiment 20001450 PARAMETER Experiment Name: At_Far-red-induction_P Parameter: Organism Value: A. thaliana
  misc_feature: MA Experiment 20001450 PARAMETER Experiment Name: At_Far-red-induction_P Parameter: Plant Line Value: Columbia
  misc_feature: MA Experiment 20001450 PARAMETER Experiment Name: At_Far-red-induction_P Parameter: Timepoint (hr) Value: 8
  misc_feature: MA Experiment 20001450 PARAMETER Experiment Name: At_Far-red-induction_P Parameter: Tissue Value: Whole Plant
  misc_feature: MA Experiment ID: 20001451 Result: Down-regulated in Transcription
  misc_feature: MA Experiment 20001451 PARAMETER Experiment Name: At_Far-red-induction_P Parameter: Age (day) Value: 7
  misc_feature: MA Experiment 20001451 PARAMETER Experiment Name: At_Far-red-induction_P Parameter: Light Value: Far-red vs. White
  misc_feature: MA Experiment 20001451 PARAMETER Experiment Name: At_Far-red-induction_P Parameter: Organism Value: A. thaliana
  misc_feature: MA Experiment 20001451 PARAMETER Experiment Name: At_Far-red-induction_P Parameter: Plant Line Value: Columbia
  misc_feature: MA Experiment 20001451 PARAMETER Experiment Name: At_Far-red-induction_P Parameter: Timepoint (hr) Value: 24
  misc_feature: MA Experiment 20001451 PARAMETER Experiment Name: At_Far-red-induction_P Parameter: Tissue Value: Whole Plant
  misc_feature: MA Experiment ID: 20001560 Result: Down-regulated in Transcription
  misc_feature: MA Experiment 20001560 PARAMETER Experiment Name: At_Drought_Soil_Dry_P Parameter: Age (day) Value: 28
  misc_feature: MA Experiment 20001560 PARAMETER Experiment Name: At_Drought_Soil_Dry_P Parameter: Organism Value: A. thaliana
  misc_feature: MA Experiment 20001560 PARAMETER Experiment Name: At_Drought_Soil_Dry_P Parameter: Plant Line Value: WS
  misc_feature: MA Experiment 20001560 PARAMETER Experiment Name: At_Drought_Soil_Dry_P Parameter: Post Timepoint (hr) Value: None
  misc_feature: MA Experiment 20001560 PARAMETER Experiment Name: At_Drought_Soil_Dry_P Parameter: Post-Treatment Value: None
  misc_feature: MA Experiment 20001560 PARAMETER Experiment Name: At_Drought_Soil_Dry_P Parameter: Timepoint (day) Value: 14
  misc_feature: MA Experiment 20001560 PARAMETER Experiment Name: At_Drought_Soil_Dry_P Parameter: Treatment Value: Drought vs. No Drought
  misc_feature: MA Experiment ID: 20001757 Result: Up-regulated in Transcription
  misc_feature: MA Experiment 20001757 PARAMETER Experiment Name: At_50mM_NH4NO3_L-to-H_P Parameter: Timepoint (hr) Value: 6
  misc_feature: MA Experiment 20001757 PARAMETER Experiment Name: At_50mM_NH4NO3_L-to-H_P Parameter: Tissue Value: Leaf
  misc_feature: MA Experiment 20001757 PARAMETER Experiment Name: At_50mM_NH4NO3_L-to-H_P Parameter: Treatment Value: 50mM NH4NO3 vs 100mM Mannitol
atgtctatgctttcaaatctcttccccgacaacgcaatcagtctcactccttacgcttacgcagtactcattctcacagctaccttctcgattctatggtacatcttcaaacgctcgccgcaaccgcctctaccacctggaccgcgagggctacctatagtcggaaaccttcccttccttgacccggatcttcacacctacttcacaaaactcgctcaaagtcatggtccaatcttcaaactcaatcttggctcaaaactaactgtcgtggtaaactctccatcgctggctagcgagatccttaaagatcaagatatcaatttctcaaaccatgacgtccctctcacggcccgagccgttacttatggtggtctggaccttgtatggttaccatacggtgccgaatggagaatgcttagaaaagtttgtgctgccaaactttttagccgcaaaactttggattccttttatgagcttcgacgcaaagaaatccgagaaagaacgagatgtttgtaccagaaaggtctagaaaaatcaccggtgaatgttggagagcagttgtttttgacgatgatgaatctaatgatgaatatgttatggggagggtcagtgaaagcagaggatatggagagtgttggaacagagtttaaaggagtgatttctgagataactaggcttttgggtgtgcctaatgtttctgattttttcccgatgctagctagattcgatcttcaagggcttgttaagaagatgcatttgtatgctcgagatctcgatgcgatactcgatcgagccatcgagcagatgcaacggctaagaagtagggatggtgatgatggtgaatgtaaagattttttacaacacttgatgaagttaagggaccaagaagctgactcggacgtccctattacaatgaaccatgtcaaagccgtactcatggatatggtagttggtggtacagagtcatcaaccaacacgatagagtttgtgatggctgaactaataagtaacccagagttgatgagaagagcgcaacaagagctagatgaagttgtgggcaaagacaacattgttgaagaatcacatatcactagccttccttacatattagccgttttgaaagaaacacttagactttatccaaccattcctttgctagtccctcaccgtccgtctgaaaccgcgctggtcggcggctacaccatcccaaaaaacactaagatcttcatcaatgtttggtctatccagagagacccaaatgtgtgggagtatccgactgagtttcgtcccgagaggtttcttgataagaagtcttgtgatttcactggaactgattatagctatcttccgtttggatctggcaggagaatttgcgcaggtatagcactcgccgagaggatgattttgtacactctcgcgactctattgcattcattcgattggacgattccggatggacacgtgttggatttggaagagaagtttgggattgtcttgaagctcaagacccctcttgttgccttgcccattccaaggttgtccaattccaatttttatttctaa

SEQ ID NO: 82121 - protein, 520 aa, Arabidopsis thaliana
  peptide (1)..(520): Ceres Seq. ID no. 12663531
  misc_feature (45)..(508): Pfam Name: Cytochrome P450 Pfam Description: Cytochrome P450
  misc_feature (1)..(520): Homolog of NCBI NO: 15234517 NR Description: cytochrome p450, putative; protein id: At4g12310.1
  misc_feature (1)..(519): Homolog of NCBI NO: 15234514 NR Description: cytochrome p450 family; protein id: At4g12300.1
  misc_feature (19)..(519): Homolog of NCBI NO: 11345411 NR Description: putative cytochrome P450 [Matthiola incana]
  misc_feature (82)..(519): Homolog of NCBI NO: 15234519 NR Description: cytochrome p450 family; protein id: At4g12320.1 thaliana] >gi|11249505|pir||T48142 cytochrome P450 homolog
  misc_feature (1)..(519): Homolog of NCBI NO: 15241541 NR Description: cytochrome p450 family; protein id: At5g44620.1, by cDNA: gi_16226349 [Arabidopsis thaliana]
  misc_feature (18)..(519): Homolog of NCBI NO: 15234521 NR Description: cytochrome p450 family; protein id: At4g12330.1, by cDNA: gi_20260371 [Arabidopsis thaliana]
  misc_feature (17)..(519): Homolog of NCBI NO: 7430667 NR Description: cytochrome P450 homolog T12H17.80 - Arabidopsis >gi|2827546|emb|CAA16554.1| cytochrome P450 like protein thaliana] >gi|7269115|emb|CAB79224.1| cytochrome P450 like
  misc_feature (17)..(519): Homolog of NCBI NO: 15235775 NR Description: cytochrome p450 family; protein id: At4g22710.1
  misc_feature (17)..(519): Homolog of NCBI NO: 30685891 NR Description: cytochrome P450 family [Arabidopsis thaliana]
  misc_feature (17)..(519): Homolog of NCBI NO: 15810341 NR Description: putative cytochrome P450 protein [Arabidopsis
MSMLSNLFPDNAISLTPYAYAVLILTATFSILWYIFKRSPQPPLPPGPRGLPIVGNLPFLDPDLHTYFTKLAQSHGPIFKLNLGSKLTVVVNSPSLASEILKDQDINFSNHDVPLTARAVTYGGLDLVWLPYGAEWRMLRKVCAAKLFSRKTLDSFYELRRKEIRERTRCLYQKGLEKSPVNVGEQLFLTMMNLMMNMLWGGSVKAEDMESVGTEFKGVISEITRLLGVPNVSDFFPMLARFDLQGLVKKMHLYARDLDAILDRAIEQMQRLRSRDGDDGECKDFLQHLMKLRDQEADSDVPITMNHVKAVLMDMVVGGTESSTNTIEFVMAELISNPELMRRAQQELDEVVGKDNIVEESHITSLPYILAVLKETLRLYPTIPLLVPHRPSETALVGGYTIPKNTKIFINVWSIQRDPNVWEYPTEFRPERFLDKKSCDFTGTDYSYLPFGSGRRICAGIALAERMILYTLATLLHSFDWTIPDGHVLDLEEKFGIVLKLKTPLVALPIPRLSNSNFYF

SEQ ID NO: 82122 - protein, 518 aa, Arabidopsis thaliana
  peptide (1)..(518): Ceres Seq. ID no. 12663532
  misc_feature (43)..(506): Pfam Name: Cytochrome P450 Pfam Description: Cytochrome P450
  misc_feature (1)..(518): Homolog of NCBI NO: 15234517 NR Description: cytochrome p450, putative; protein id: At4g12310.1
  misc_feature (1)..(517): Homolog of NCBI NO: 15234514 NR Description: cytochrome p450 family; protein id: At4g12300.1
  misc_feature (17)..(517): Homolog of NCBI NO: 11345411 NR Description: putative cytochrome P450 [Matthiola incana]
  misc_feature (80)..(517): Homolog of NCBI NO: 15234519 NR Description: cytochrome p450 family; protein id: At4g12320.1 thaliana] >gi|11249505|pir||T48142 cytochrome P450 homolog
  misc_feature (1)..(517): Homolog of NCBI NO: 15241541 NR Description: cytochrome p450 family; protein id: At5g44620.1, by cDNA: gi_16226349 [Arabidopsis thaliana]
  misc_feature (16)..(517): Homolog of NCBI NO: 15234521 NR Description: cytochrome p450 family; protein id: At4g12330.1, by cDNA: gi_20260371 [Arabidopsis thaliana]
  misc_feature (15)..(517): Homolog of NCBI NO: 7430667 NR Description: cytochrome P450 homolog T12H17.80 - Arabidopsis >gi|2827546|emb|CAA16554.1| cytochrome P450 like protein thaliana] >gi|7269115|emb|CAB79224.1| cytochrome P450 like
  misc_feature (15)..(517): Homolog of NCBI NO: 15235775 NR Description: cytochrome p450 family; protein id: At4g22710.1
  misc_feature (15)..(517): Homolog of NCBI NO: 30685891 NR Description: cytochrome P450 family [Arabidopsis thaliana]
  misc_feature (15)..(517): Homolog of NCBI NO: 15810341 NR Description: putative cytochrome P450 protein [Arabidopsis
MLSNLFPDNAISLTPYAYAVLILTATFSILWYIFKRSPQPPLPPGPRGLPIVGNLPFLDPDLHTYFTKLAQSHGPIFKLNLGSKLTVVVNSPSLASEILKDQDINFSNHDVPLTARAVTYGGLDLVWLPYGAEWRMLRKVCAAKLFSRKTLDSFYELRRKEIRERTRCLYQKGLEKSPVNVGEQLFLTMMNLMMNMLWGGSVKAEDMESVGTEFKGVISEITRLLGVPNVSDFFPMLARFDLQGLVKKMHLYARDLDAILDRAIEQMQRLRSRDGDDGECKDFLQHLMKLRDQEADSDVPITMNHVKAVLMDMVVGGTESSTNTIEFVMAELISNPELMRRAQQELDEVVGKDNIVEESHITSLPYILAVLKETLRLYPTIPLLVPHRPSETALVGGYTIPKNTKIFINVWSIQRDPNVWEYPTEFRPERFLDKKSCDFTGTDYSYLPFGSGRRICAGIALAERMILYTLATLLHSFDWTIPDGHVLDLEEKFGIVLKLKTPLVALPIPRLSNSNFYF

SEQ ID NO: 82123 - protein, 383 aa, Arabidopsis thaliana
  peptide (1)..(383): Ceres Seq. ID no. 12663533
  misc_feature (1)..(371): Pfam Name: Cytochrome P450 Pfam Description: Cytochrome P450
  misc_feature (1)..(383): Homolog of NCBI NO: 15234517 NR Description: cytochrome p450, putative; protein id: At4g12310.1
  misc_feature (1)..(382): Homolog of NCBI NO: 15234514 NR Description: cytochrome p450 family; protein id: At4g12300.1
  misc_feature (1)..(382): Homolog of NCBI NO: 11345411 NR Description: putative cytochrome P450 [Matthiola incana]
  misc_feature (1)..(382): Homolog of NCBI NO: 15234519 NR Description: cytochrome p450 family; protein id: At4g12320.1 thaliana] >gi|11249505|pir||T48142 cytochrome P450 homolog
  misc_feature (1)..(382): Homolog of NCBI NO: 15241541 NR Description: cytochrome p450 family; protein id: At5g44620.1, by cDNA: gi_16226349 [Arabidopsis thaliana]
  misc_feature (1)..(382): Homolog of NCBI NO: 15234521 NR Description: cytochrome p450 family; protein id: At4g12330.1, by cDNA: gi_20260371 [Arabidopsis thaliana]
  misc_feature (1)..(382): Homolog of NCBI NO: 7430667 NR Description: cytochrome P450 homolog T12H17.80 - Arabidopsis >gi|2827546|emb|CAA16554.1| cytochrome P450 like protein thaliana] >gi|7269115|emb|CAB79224.1| cytochrome P450 like
  misc_feature (1)..(382): Homolog of NCBI NO: 15235775 NR Description: cytochrome p450 family; protein id: At4g22710.1
  misc_feature (1)..(382): Homolog of NCBI NO: 30685891 NR Description: cytochrome P450 family [Arabidopsis thaliana]
  misc_feature (1)..(382): Homolog of NCBI NO: 15810341 NR Description: putative cytochrome P450 protein [Arabidopsis
MLRKVCAAKLFSRKTLDSFYELRRKEIRERTRCLYQKGLEKSPVNVGEQLFLTMMNLMMNMLWGGSVKAEDMESVGTEFKGVISEITRLLGVPNVSDFFPMLARFDLQGLVKKMHLYARDLDAILDRAIEQMQRLRSRDGDDGECKDFLQHLMKLRDQEADSDVPITMNHVKAVLMDMVVGGTESSTNTIEFVMAELISNPELMRRAQQELDEVVGKDNIVEESHITSLPYILAVLKETLRLYPTIPLLVPHRPSETALVGGYTIPKNTKIFINVWSIQRDPNVWEYPTEFRPERFLDKKSCDFTGTDYSYLPFGSGRRICAGIALAERMILYTLATLLHSFDWTIPDGHVLDLEEKFGIVLKLKTPLVALPIPRLSNSNFYF

SEQ ID NO: 82124 - DNA, 1739 bp, Arabidopsis thaliana
  misc_feature (1)..(1739): Ceres Seq. ID no. 12663534
  misc_feature: MA Experiment ID: 20000171 Result: Down-regulated in Transcription
  misc_feature: MA Experiment 20000171 PARAMETER Experiment Name: At_42deg_Heat_P Parameter: Age (day) Value: 14
  misc_feature: MA Experiment 20000171 PARAMETER Experiment Name: At_42deg_Heat_P Parameter: Organism Value: A. thaliana
  misc_feature: MA Experiment 20000171 PARAMETER Experiment Name: At_42deg_Heat_P Parameter: Plant Line Value: WS
  misc_feature: MA Experiment 20000171 PARAMETER Experiment Name: At_42deg_Heat_P Parameter: Temperature (deg C) Value: 42 vs. 22
  misc_feature: MA Experiment 20000171 PARAMETER Experiment Name: At_42deg_Heat_P Parameter: Timepoint (hr) Value: 1
  misc_feature: MA Experiment 20000171 PARAMETER Experiment Name: At_42deg_Heat_P Parameter: Tissue Value: Aerial
  misc_feature: MA Experiment ID: 20000182 Result: Down-regulated in Transcription
  misc_feature: MA Experiment 20000182 PARAMETER Experiment Name: At_2mM_SA_P Parameter: Age (day) Value: 14
  misc_feature: MA Experiment 20000182 PARAMETER Experiment Name: At_2mM_SA_P Parameter: Organism Value: A. thaliana
  misc_feature: MA Experiment 20000182 PARAMETER Experiment Name: At_2mM_SA_P Parameter: Plant Line Value: WS
  misc_feature: MA Experiment 20000182 PARAMETER Experiment Name: At_2mM_SA_P Parameter: Timepoint (hr) Value: 6
  misc_feature: MA Experiment 20000182 PARAMETER Experiment Name: At_2mM_SA_P Parameter: Tissue Value: Aerial
  misc_feature: MA Experiment 20000182 PARAMETER Experiment Name: At_2mM_SA_P Parameter: Treatment Value: 2mM SA vs. No Treatment
  misc_feature: MA Experiment ID: 20000184 Result: Up-regulated in Transcription
  misc_feature: MA Experiment 20000184 PARAMETER Experiment Name: At_Shoots__P Parameter: Age (day) Value: 7
  misc_feature: MA Experiment 20000184 PARAMETER Experiment Name: At_Shoots__P Parameter: Tissue Value: Shoots vs. Whole Plant
  misc_feature: MA Experiment ID: 20000267 Result: Down-regulated in Transcription
  misc_feature: MA Experiment 20000267 PARAMETER Experiment Name: At_Drought_P Parameter: Age (day) Value: 7
  misc_feature: MA Experiment 20000267 PARAMETER Experiment Name: At_Drought_P Parameter: Organism Value: A. thaliana
  misc_feature: MA Experiment 20000267 PARAMETER Experiment Name: At_Drought_P Parameter: Plant Line Value: WS
  misc_feature: MA Experiment 20000267 PARAMETER Experiment Name: At_Drought_P Parameter: Timepoint (hr) Value: 6
  misc_feature: MA Experiment 20000267 PARAMETER Experiment Name: At_Drought_P Parameter: Tissue Value: Whole Plant
  misc_feature: MA Experiment 20000267 PARAMETER Experiment Name: At_Drought_P Parameter: Treatment Value: Drought vs. No Drought
  misc_feature: MA Experiment ID: 20000286 Result: Down-regulated in Transcription
  misc_feature: MA Experiment 20000286 PARAMETER Experiment Name: At_Open_Flower_P Parameter: Age (day) Value: 21
  misc_feature: MA Experiment 20000286 PARAMETER Experiment Name: At_Open_Flower_P Parameter: Plant Line Value: WS
  misc_feature: MA Experiment 20000286 PARAMETER Experiment Name: At_Open_Flower_P Parameter: Tissue Value: Half Open vs. Whole Plant
  misc_feature: MA Experiment ID: 20000436 Result: Down-regulated in Transcription
  misc_feature: MA Experiment 20000436 PARAMETER Experiment Name: At_Drought_P Parameter: Age (day) Value: 7
  misc_feature: MA Experiment 20000436 PARAMETER Experiment Name: At_Drought_P Parameter: Organism Value: A. thaliana
  misc_feature: MA Experiment 20000436 PARAMETER Experiment Name: At_Drought_P Parameter: Plant Line Value: WS
  misc_feature: MA Experiment 20000436 PARAMETER Experiment Name: At_Drought_P Parameter: Timepoint (hr) Value: 12
  misc_feature: MA Experiment 20000436 PARAMETER Experiment Name: At_Drought_P Parameter: Tissue Value: Whole Plant
  misc_feature: MA Experiment 20000436 PARAMETER Experiment Name: At_Drought_P Parameter: Treatment Value: Drought vs. No Drought
  misc_feature: MA Experiment ID: 20000437 Result: Down-regulated in Transcription
  misc_feature: MA Experiment 20000437 PARAMETER Experiment Name: At_Drought_P Parameter: Age (day) Value: 8
  misc_feature: MA Experiment 20000437 PARAMETER Experiment Name: At_Drought_P Parameter: Organism Value: A. thaliana
  misc_feature: MA Experiment 20000437 PARAMETER Experiment Name: At_Drought_P Parameter: Plant Line Value: WS
  misc_feature: MA Experiment 20000437 PARAMETER Experiment Name: At_Drought_P Parameter: Timepoint (hr) Value: 24
  misc_feature: MA Experiment 20000437 PARAMETER Experiment Name: At_Drought_P Parameter: Tissue Value: Whole Plant
  misc_feature: MA Experiment 20000437 PARAMETER Experiment Name: At_Drought_P Parameter: Treatment Value: Drought vs. No Drought
  misc_feature: MA Experiment ID: 20000438 Result: Up-regulated in Transcription
  misc_feature: MA Experiment 20000438 PARAMETER Experiment Name: At_Shoots__P Parameter: Age (day) Value: 14
  misc_feature: MA Experiment 20000438 PARAMETER Experiment Name: At_Shoots__P Parameter: Tissue Value: Shoots vs. Whole Plant
  misc_feature: MA Experiment ID: 20000455 Result: Up-regulated in Transcription
  misc_feature: MA Experiment 20000455 PARAMETER Experiment Name: At_100uM_ABA_P Parameter: Age (day) Value: 16
  misc_feature: MA Experiment 20000455 PARAMETER Experiment Name: At_100uM_ABA_P Parameter: Organism Value: A. thaliana
  misc_feature: MA Experiment 20000455 PARAMETER Experiment Name: At_100uM_ABA_P Parameter: Plant Line Value: WS
  misc_feature: MA Experiment 20000455 PARAMETER Experiment Name: At_100uM_ABA_P Parameter: Timepoint (hr) Value: 48
  misc_feature: MA Experiment 20000455 PARAMETER Experiment Name: At_100uM_ABA_P Parameter: Tissue Value: Aerial
  misc_feature: MA Experiment 20000455 PARAMETER Experiment Name: At_100uM_ABA_P Parameter: Treatment Value: 100uM ABA vs. No Treatment
  misc_feature: MA Experiment ID: 20000495 Result: Down-regulated in Transcription
  misc_feature: MA Experiment 20000495 PARAMETER Experiment Name: At_Guard_Cells_P Parameter: Harvest Date Value: 8/2/2002
  misc_feature: MA Experiment 20000495 PARAMETER Experiment Name: At_Guard_Cells_P Parameter: Organism Value: A. thaliana
  misc_feature: MA Experiment 20000495 PARAMETER Experiment Name: At_Guard_Cells_P Parameter: Tissue Value: Guard Cells vs. Leaves
  misc_feature: MA Experiment ID: 20000573 Result: Down-regulated in Transcription
  misc_feature: MA Experiment 20000573 PARAMETER Experiment Name: At_100uM_ABA_Mutants__P Parameter: Organism Value: A. thaliana
  misc_feature: MA Experiment 20000573 PARAMETER Experiment Name: At_100uM_ABA_Mutants__P Parameter: Plant Line Value: CS22 vs. Ler wt
  misc_feature: MA Experiment 20000573 PARAMETER Experiment Name: At_100uM_ABA_Mutants__P Parameter: Timepoint (hr) Value: N/A
  misc_feature: MA Experiment 20000573 PARAMETER Experiment Name: At_100uM_ABA_Mutants__P Parameter: Tissue Value: Whole Plant
  misc_feature: MA Experiment 20000573 PARAMETER Experiment Name: At_100uM_ABA_Mutants__P Parameter: Treatment Value: None
  misc_feature: MA Experiment ID: 20001247 Result: Down-regulated in Transcription
  misc_feature: MA Experiment 20001247 PARAMETER Experiment Name: At_Far-red-induction_P Parameter: Age (day) Value: 7
  misc_feature: MA Experiment 20001247 PARAMETER Experiment Name: At_Far-red-induction_P Parameter: Light Value: Far-red vs. White
  misc_feature: MA Experiment 20001247 PARAMETER Experiment Name: At_Far-red-induction_P Parameter: Organism Value: A. thaliana
  misc_feature: MA Experiment 20001247 PARAMETER Experiment Name: At_Far-red-induction_P Parameter: Plant Line Value: Columbia
  misc_feature: MA Experiment 20001247 PARAMETER Experiment Name: At_Far-red-induction_P Parameter: Timepoint (hr) Value: 1
  misc_feature: MA Experiment 20001247 PARAMETER Experiment Name: At_Far-red-induction_P Parameter: Tissue Value: Whole Plant
  misc_feature: MA Experiment ID: 20001248 Result: Down-regulated in Transcription
  misc_feature: MA Experiment 20001248 PARAMETER Experiment Name: At_Far-red-induction_P Parameter: Age (day) Value: 7
  misc_feature: MA Experiment 20001248 PARAMETER Experiment Name: At_Far-red-induction_P Parameter: Light Value: Far-red vs. White
  misc_feature: MA Experiment 20001248 PARAMETER Experiment Name: At_Far-red-induction_P Parameter: Organism Value: A. thaliana
  misc_feature: MA Experiment 20001248 PARAMETER Experiment Name: At_Far-red-induction_P Parameter: Plant Line Value: Columbia
  misc_feature: MA Experiment 20001248 PARAMETER Experiment Name: At_Far-red-induction_P Parameter: Timepoint (hr) Value: 4
  misc_feature: MA Experiment 20001248 PARAMETER Experiment Name: At_Far-red-induction_P Parameter: Tissue Value: Whole Plant
  misc_feature: MA Experiment ID: 20001450 Result: Down-regulated in Transcription
  misc_feature: MA Experiment 20001450 PARAMETER Experiment Name: At_Far-red-induction_P Parameter: Age (day) Value: 7
  misc_feature: MA Experiment 20001450 PARAMETER Experiment Name: At_Far-red-induction_P Parameter: Light Value: Far-red vs. White
  misc_feature: MA Experiment 20001450 PARAMETER Experiment Name: At_Far-red-induction_P Parameter: Organism Value: A. thaliana
  misc_feature: MA Experiment 20001450 PARAMETER Experiment Name: At_Far-red-induction_P Parameter: Plant Line Value: Columbia
  misc_feature: MA Experiment 20001450 PARAMETER Experiment Name: At_Far-red-induction_P Parameter: Timepoint (hr) Value: 8
  misc_feature: MA Experiment 20001450 PARAMETER Experiment Name: At_Far-red-induction_P Parameter: Tissue Value: Whole Plant
  misc_feature: MA Experiment ID: 20001451 Result: Down-regulated in Transcription
  misc_feature: MA Experiment 20001451 PARAMETER Experiment Name: At_Far-red-induction_P Parameter: Age (day) Value: 7
  misc_feature: MA Experiment 20001451 PARAMETER Experiment Name: At_Far-red-induction_P Parameter: Light Value: Far-red vs. White
  misc_feature: MA Experiment 20001451 PARAMETER Experiment Name: At_Far-red-induction_P Parameter: Organism Value: A. thaliana
  misc_feature: MA Experiment 20001451 PARAMETER Experiment Name: At_Far-red-induction_P Parameter: Plant Line Value: Columbia
  misc_feature: MA Experiment 20001451 PARAMETER Experiment Name: At_Far-red-induction_P Parameter: Timepoint (hr) Value: 24
  misc_feature: MA Experiment 20001451 PARAMETER Experiment Name: At_Far-red-induction_P Parameter: Tissue Value: Whole Plant
  misc_feature: MA Experiment ID: 20001560 Result: Down-regulated in Transcription
  misc_feature: MA Experiment 20001560 PARAMETER Experiment Name: At_Drought_Soil_Dry_P Parameter: Age (day) Value: 28
  misc_feature: MA Experiment 20001560 PARAMETER Experiment Name: At_Drought_Soil_Dry_P Parameter: Organism Value: A. thaliana
  misc_feature: MA Experiment 20001560 PARAMETER Experiment Name: At_Drought_Soil_Dry_P Parameter: Plant Line Value: WS
  misc_feature: MA Experiment 20001560 PARAMETER Experiment Name: At_Drought_Soil_Dry_P Parameter: Post Timepoint (hr) Value: None
  misc_feature: MA Experiment 20001560 PARAMETER Experiment Name: At_Drought_Soil_Dry_P Parameter: Post-Treatment Value: None
  misc_feature: MA Experiment 20001560 PARAMETER Experiment Name: At_Drought_Soil_Dry_P Parameter: Timepoint (day) Value: 14
  misc_feature: MA Experiment 20001560 PARAMETER Experiment Name: At_Drought_Soil_Dry_P Parameter: Treatment Value: Drought vs. No Drought
  misc_feature: MA Experiment ID: 20001757 Result: Up-regulated in Transcription
  misc_feature: MA Experiment 20001757 PARAMETER Experiment Name: At_50mM_NH4NO3_L-to-H_P Parameter: Timepoint (hr) Value: 6
  misc_feature: MA Experiment 20001757 PARAMETER Experiment Name: At_50mM_NH4NO3_L-to-H_P Parameter: Tissue Value: Leaf
  misc_feature: MA Experiment 20001757 PARAMETER Experiment Name: At_50mM_NH4NO3_L-to-H_P Parameter: Treatment Value: 50mM NH4NO3 vs 100mM Mannitol
ctacaaaacagctgtgaataatgtctcccatatcaaatctcttcgctggcaacacaatcaatctcactccttacgcaattctcattctcattgctatcttctcgatactatggtacctcttcaaacgctcgccgcaaccgcatctaccccctggaccgcgagggctacctattgtcggaaaccttccctttcttgacccggaccttcacacctacttcacaaaacttgctgaaagttatggtccaatcttcaaactccaatcttggctcaaaactaactgtcgtggtcaacactccatcgctggctcgagagatcttgaaagatcaagatatcaatttctcaaaccatgacgtccctctcacagcccgagccgttacctatggcggtctcgaccttgtctggttaccatacggtgctgaatggaggatgcttaggaaagtttgcgttcttaagcttcttagccacagaacgttgaattctttctacgagcttcgacgtaaagaaatccgggaaagaacgagatatttgtaccagaaaggtcaagaagaatcaccggtgaatgttggagaacaggtctttttgacgatgatgaatctaactatgaatatgttatggggaggttctgtgaaagcagaggaaatggagagtgttggaacagagtttaaagaagtgatttctgaaattactaggcttttgggagagcctaatgtttctgactttttcccacggttagcgagattcgatcttcaaggacttgtgaagaagatgcatgtgtgtgctcgggagctcgatgccatacttgatcgagccatcgagcagatgcaactactaagaactagggatggtgatgatggtgaatgtaaagactttttgcaacatttgatgaagttaaaggaccaagaagctgactcggaggttcccattacggttaaccatgtcaaagccgtactcgtggatttggtggttggtggtacggatacatcgaccaacacaatagagtttgcaatggccgaactaataagaaagccggagttgatgaagagagcacaacaagagctagacgaagttgtaggcaaagataacattattgaagaatcacacatcactagattgcctttcatatcagccataatgaaagaaacacttagactttatccaaccattcccctgctagtccctcaccgtccgtctgaaaccgcgctggtcggcggctacaccatcccaaaaaacactaagatcttcatcaatgtttggtctatccagagagacccaaatgtgtgggagtatccgactgagtttcgtcccgagaggtttcttgataagaagtcttgtgatttcactggaactgattatagctatcttccgtttggatctggcaggagaatttgcgcaggtatagcactcgccgagaggatgattttgtacactctcgcgacgctattgcattcgtttgattggaagataccggaaggccacattttggatttgaaagagaagtttgggattgtcttgaagctcaagtcccctcttgttgccttgcccgttccgaggttgtccaattcgaatctttatttataaacgctatactcgttacttttccttaaaaaaaggaaaaagatttttatattgaacatttttatgatagacaaaaataacgcctggttttatttagttttttcttttctgaagtttttaatcatcatataagttagtaatgagaatcatacatcggtttctat

SEQ ID NO: 82125 - protein, 446 aa, Arabidopsis thaliana
  peptide (1)..(446): Ceres Seq. ID no. 12663535
  misc_feature (8)..(445): Homolog of NCBI NO: 15234517 NR Description: cytochrome p450, putative; protein id: At4g12310.1
  misc_feature (1)..(446): Homolog of NCBI NO: 15234514 NR Description: cytochrome p450 family; protein id: At4g12300.1
  misc_feature (1)..(446): Homolog of NCBI NO: 15234519 NR Description: cytochrome p450 family; protein id: At4g12320.1 thaliana] >gi|11249505|pir||T48142 cytochrome P450 homolog
  misc_feature (1)..(446): Homolog of NCBI NO: 11345411 NR Description: putative cytochrome P450 [Matthiola incana]
  misc_feature (1)..(446): Homolog of NCBI NO: 15241541 NR Description: cytochrome p450 family; protein id: At5g44620.1, by cDNA: gi_16226349 [Arabidopsis thaliana]
  misc_feature (9)..(446): Homolog of NCBI NO: 15234521 NR Description: cytochrome p450 family; protein id: At4g12330.1, by cDNA: gi_20260371 [Arabidopsis thaliana]
  misc_feature (8)..(445): Homolog of NCBI NO: 15235775 NR Description: cytochrome p450 family; protein id: At4g22710.1
  misc_feature (8)..(445): Homolog of NCBI NO: 7430667 NR Description: cytochrome P450 homolog T12H17.80 - Arabidopsis >gi|2827546|emb|CAA16554.1| cytochrome P450 like protein thaliana] >gi|7269115|emb|CAB79224.1| cytochrome P450 like
  misc_feature (8)..(445): Homolog of NCBI NO: 30685891 NR Description: cytochrome P450 family [Arabidopsis thaliana]
  misc_feature (8)..(445): Homolog of NCBI NO: 15810341 NR Description: putative cytochrome P450 protein [Arabidopsis
MVQSSNSNLGSKLTVVVNTPSLAREILKDQDINFSNHDVPLTARAVTYGGLDLVWLPYGAEWRMLRKVCVLKLLSHRTLNSFYELRRKEIRERTRYLYQKGQEESPVNVGEQVFLTMMNLTMNMLWGGSVKAEEMESVGTEFKEVISEITRLLGEPNVSDFFPRLARFDLQGLVKKMHVCARELDAILDRAIEQMQLLRTRDGDDGECKDFLQHLMKLKDQEADSEVPITVNHVKAVLVDLVVGGTDTSTNTIEFAMAELIRKPELMKRAQQELDEVVGKDNIIEESHITRLPFISAIMKETLRLYPTIPLLVPHRPSETALVGGYTIPKNTKIFINVWSIQRDPNVWEYPTEFRPERFLDKKSCDFTGTDYSYLPFGSGRRICAGIALAERMILYTLATLLHSFDWKIPEGHILDLKEKFGIVLKLKSPLVALPVPRLSNSNLYL

SEQ ID NO: 82126 - protein, 383 aa, Arabidopsis thaliana
  peptide (1)..(383): Ceres Seq. ID no. 12663536
  misc_feature (1)..(382): Homolog of NCBI NO: 15234517 NR Description: cytochrome p450, putative; protein id: At4g12310.1
  misc_feature (1)..(383): Homolog of NCBI NO: 15234514 NR Description: cytochrome p450 family; protein id: At4g12300.1
  misc_feature (1)..(383): Homolog of NCBI NO: 15234519 NR Description: cytochrome p450 family; protein id: At4g12320.1 thaliana] >gi|11249505|pir||T48142 cytochrome P450 homolog
  misc_feature (1)..(383): Homolog of NCBI NO: 11345411 NR Description: putative cytochrome P450 [Matthiola incana]
  misc_feature (1)..(383): Homolog of NCBI NO: 15241541 NR Description: cytochrome p450 family; protein id: At5g44620.1, by cDNA: gi_16226349 [Arabidopsis thaliana]
  misc_feature (1)..(383): Homolog of NCBI NO: 15234521 NR Description: cytochrome p450 family; protein id: At4g12330.1, by cDNA: gi_20260371 [Arabidopsis thaliana]
  misc_feature (1)..(382): Homolog of NCBI NO: 15235775 NR Description: cytochrome p450 family; protein id: At4g22710.1
  misc_feature (1)..(382): Homolog of NCBI NO: 7430667 NR Description: cytochrome P450 homolog T12H17.80 - Arabidopsis >gi|2827546|emb|CAA16554.1| cytochrome P450 like protein thaliana] >gi|7269115|emb|CAB79224.1| cytochrome P450 like
  misc_feature (1)..(382): Homolog of NCBI NO: 30685891 NR Description: cytochrome P450 family [Arabidopsis thaliana]
  misc_feature (1)..(382): Homolog of NCBI NO: 15810341 NR Description: putative cytochrome P450 protein [Arabidopsis
MLRKVCVLKLLSHRTLNSFYELRRKEIRERTRYLYQKGQEESPVNVGEQVFLTMMNLTMNMLWGGSVKAEEMESVGTEFKEVISEITRLLGEPNVSDFFPRLARFDLQGLVKKMHVCARELDAILDRAIEQMQLLRTRDGDDGECKDFLQHLMKLKDQEADSEVPITVNHVKAVLVDLVVGGTDTSTNTIEFAMAELIRKPELMKRAQQELDEVVGKDNIIEESHITRLPFISAIMKETLRLYPTIPLLVPHRPSETALVGGYTIPKNTKIFINVWSIQRDPNVWEYPTEFRPERFLDKKSCDFTGTDYSYLPFGSGRRICAGIALAERMILYTLATLLHSFDWKIPEGHILDLKEKFGIVLKLKSPLVALPVPRLSNSNLYL

SEQ ID NO: 82127 - protein, 330 aa, Arabidopsis thaliana
  peptide (1)..(330): Ceres Seq. ID no. 12663537
  misc_feature (1)..(329): Homolog of NCBI NO: 15234517 NR Description: cytochrome p450, putative; protein id: At4g12310.1
  misc_feature (1)..(330): Homolog of NCBI NO: 15234514 NR Description: cytochrome p450 family; protein id: At4g12300.1
  misc_feature (1)..(330): Homolog of NCBI NO: 15234519 NR Description: cytochrome p450 family; protein id: At4g12320.1 thaliana] >gi|11249505|pir||T48142 cytochrome P450 homolog
  misc_feature (1)..(330): Homolog of NCBI NO: 11345411 NR Description: putative cytochrome P450 [Matthiola incana]
  misc_feature (1)..(330): Homolog of NCBI NO: 15241541 NR Description: cytochrome p450 family; protein id: At5g44620.1, by cDNA: gi_16226349 [Arabidopsis thaliana]
  misc_feature (1)..(330): Homolog of NCBI NO: 15234521 NR Description: cytochrome p450 family; protein id: At4g12330.1, by cDNA: gi_20260371 [Arabidopsis thaliana]
  misc_feature (1)..(329): Homolog of NCBI NO: 15235775 NR Description: cytochrome p450 family; protein id: At4g22710.1
  misc_feature (1)..(329): Homolog of NCBI NO: 7430667 NR Description: cytochrome P450 homolog T12H17.80 - Arabidopsis >gi|2827546|emb|CAA16554.1| cytochrome P450 like protein thaliana] >gi|7269115|emb|CAB79224.1| cytochrome P450 like
  misc_feature (1)..(329): Homolog of NCBI NO: 30685891 NR Description: cytochrome P450 family [Arabidopsis thaliana]
  misc_feature (1)..(329): Homolog of NCBI NO: 15810341 NR Description: putative cytochrome P450 protein [Arabidopsis
MMNLTMNMLWGGSVKAEEMESVGTEFKEVISEITRLLGEPNVSDFFPRLARFDLQGLVKKMHVCARELDAILDRAIEQMQLLRTRDGDDGECKDFLQHLMKLKDQEADSEVPITVNHVKAVLVDLVVGGTDTSTNTIEFAMAELIRKPELMKRAQQELDEVVGKDNIIEESHITRLPFISAIMKETLRLYPTIPLLVPHRPSETALVGGYTIPKNTKIFINVWSIQRDPNVWEYPTEFRPERFLDKKSCDFTGTDYSYLPFGSGRRICAGIALAERMILYTLATLLHSFDWKIPEGHILDLKEKFGIVLKLKSPLVALPVPRLSNSNLYL

SEQ ID NO: 82128 - DNA, 1853 bp, Arabidopsis thaliana
  misc_feature (1)..(1853): Ceres Seq. ID no. 12663538
  misc_feature: MA Experiment ID: 20000184 Result: Up-regulated in Transcription
  misc_feature: MA Experiment 20000184 PARAMETER Experiment Name: At_Shoots__P Parameter: Age (day) Value: 7
  misc_feature: MA Experiment 20000184 PARAMETER Experiment Name: At_Shoots__P Parameter: Tissue Value: Shoots vs. Whole Plant
  misc_feature: MA Experiment ID: 20000185 Result: Up-regulated in Transcription
  misc_feature: MA Experiment 20000185 PARAMETER Experiment Name: At_Roots__P Parameter: Age (day) Value: 7 vs. 21
  misc_feature: MA Experiment 20000185 PARAMETER Experiment Name: At_Roots__P Parameter: Organism Value: A. thaliana
  misc_feature: MA Experiment 20000185 PARAMETER Experiment Name: At_Roots__P Parameter: Tissue Value: Roots vs. Whole Plant
  misc_feature: MA Experiment ID: 20000234 Result: Up-regulated in Transcription
  misc_feature: MA Experiment 20000234 PARAMETER Experiment Name: At_Siliques_P Parameter: Age (day) Value: 21
  misc_feature: MA Experiment 20000234 PARAMETER Experiment Name: At_Siliques_P Parameter: Organism Value: A. thaliana
  misc_feature: MA Experiment 20000234 PARAMETER Experiment Name: At_Siliques_P Parameter: Plant Line Value: WS
  misc_feature: MA Experiment 20000234 PARAMETER Experiment Name: At_Siliques_P Parameter: Tissue Value: Less Than 5mm Siliques vs. Whole Plant
  misc_feature: MA Experiment ID: 20000264 Result: Up-regulated in Transcription
  misc_feature: MA Experiment 20000264 PARAMETER Experiment Name: At_Open_Flower_P Parameter: Age (day) Value: 21
  misc_feature: MA Experiment 20000264 PARAMETER Experiment Name: At_Open_Flower_P Parameter: Plant Line Value: WS
  misc_feature: MA Experiment 20000264 PARAMETER Experiment Name: At_Open_Flower_P Parameter: Tissue Value: Open Flower vs. Whole Plant
  misc_feature: MA Experiment ID: 20000265 Result: Up-regulated in Transcription
  misc_feature: MA Experiment 20000265 PARAMETER Experiment Name: At_Open_Flower_P Parameter: Age (day) Value: 21
  misc_feature: MA Experiment 20000265 PARAMETER Experiment Name: At_Open_Flower_P Parameter: Plant Line Value: WS
  misc_feature: MA Experiment 20000265 PARAMETER Experiment Name: At_Open_Flower_P Parameter: Tissue Value: Closed Flower vs. Whole Plant
  misc_feature: MA Experiment ID: 20000286 Result: Up-regulated in Transcription
  misc_feature: MA Experiment 20000286 PARAMETER Experiment Name: At_Open_Flower_P Parameter: Age (day) Value: 21
  misc_feature: MA Experiment 20000286 PARAMETER Experiment Name: At_Open_Flower_P Parameter: Plant Line Value: WS
  misc_feature: MA Experiment 20000286 PARAMETER Experiment Name: At_Open_Flower_P Parameter: Tissue Value: Half Open vs. Whole Plant
  misc_feature: MA Experiment ID: 20000439 Result: Up-regulated in Transcription
  misc_feature: MA Experiment 20000439 PARAMETER Experiment Name: At_Roots__P Parameter: Age (day) Value: 14 vs. 21
  misc_feature: MA Experiment 20000439 PARAMETER Experiment Name: At_Roots__P Parameter: Organism Value: A. thaliana
  misc_feature: MA Experiment 20000439 PARAMETER Experiment Name: At_Roots__P Parameter: Tissue Value: Roots vs. Whole Plant
  misc_feature: MA Experiment ID: 20000794 Result: Up-regulated in Transcription
  misc_feature: MA Experiment 20000794 PARAMETER Experiment Name: At_Petals_P Parameter: Age (day) Value: 23-25 days
  misc_feature: MA Experiment 20000794 PARAMETER Experiment Name: At_Petals_P Parameter: Plant Line Value: WS
  misc_feature: MA Experiment 20000794 PARAMETER Experiment Name: At_Petals_P Parameter: Tissue Value: Petals vs. Whole plant
acaaagagaaaaacattggaacaattaaaagaaacaaaatttccaaattgattcttgtgttttctacataaacaagaaccaatgacagatattttcactttctttacgatccaaaatcgtaatgaccacttcgactttgttttagctacaatagtcatatcctctgttttttggtatatatgggtttacgtcaaatcgaaacgactgtttccaccgttaccaccgggacctcggggtcttcccatcgtcggaaacctcccattcctccacccggagcttcacacctactttcacagtctagctcaaaaacacggacccgttttcaaactatggctcggcgcaaaactaaccatcgtgataacctcttccgaagcaacgcgggatattctaagaactaatgacgtcatctttgcgaacgacgacgttcccgtcgcaggctcactcagcacgtatggtggcgtagacattgtctggtcaccgtacggaccagaatggccaatgctaagaaaaatctgcattaacaaaatgttaagcaacgccacgttggattcaaattcttttagtgcacttcgccgccaggagaccaggcgaacagtccggtatttggcagaccgggctcgggccgggttggcggttaacgttggagaacaaatatttgtcacgatattaaatgtggtgactcagatgttgtggggagaaactgttgcggacgacgaggagagagagaaagttggagctgaatttttggaattgattacggaaataattgatgttgtgggaaagccaaatgtctctgattttttcccggttttgagccggtttgaccttcagggtttggctaagcgtgtgcgtagatcggctcagaggatggaccggatgttcgaccggattataagtcaacggatgggaatggataagggaagtaaagggaacggtggagattttttgatggttttgttgaatgctaaggatgaagatgaaaacatgtccatgaaccatgtcaaggccttgctaatggatatggtgcttggtggtacagacacatctttgaacacaatagagttcgcaatggcagagcttataaacaaactggagatcatgaagagagctcaacaagagcttgacaaggttgtggggaaaaacaacatcgtcgaagaaaaacatatcactaaacttccatacattctctccattatgaaagaaaccctaaggcttcacccagctcttcctcttctaatacctcgctgcccatctgaaaccacggttataggtggctacacaattcctaatgattctaaggttttcatcaatgtgtgggcgattcatagaaatccgaacgtatgggagaatccgttggagtttaatcctgataggtttcttgataaaggttacgactttagtggtaatgactatagttatttcccgtttggatctggccggagaatttgtgcgggaatggccatggccgagaaagttgttctttacaatcttgcaacgcttttgcattcttttgattggagaattggggaaggagagaaagtggagctcgaggagaagtttgggattttattgaagttgaagaatccacttgttgcaacacccgtgctaagattgtcggatccaaacctttttctttaacagtttaagtgaaaggagaaaagtaattgctctttttgtttatgtgaacttatataatgttcaatgtgacggtgtcttatctaatgccgtattatgtattgttacatatatgatgattccacctatattttagtactatgcatgatgtaatatgtgttttagacatggtcgcatggactatatatgtccacatatccaaatccaagtgatttcat

SEQ ID NO: 82129 - protein, 518 aa, Arabidopsis thaliana
  peptide (1)..(518): Ceres Seq. ID no. 12663539
  misc_feature (1)..(518): Homolog of NCBI NO: 15234521 NR Description: cytochrome p450 family; protein id: At4g12330.1, by cDNA: gi_20260371 [Arabidopsis thaliana]
  misc_feature (1)..(518): Homolog of NCBI NO: 15241541 NR Description: cytochrome p450 family; protein id: At5g44620.1, by cDNA: gi_16226349 [Arabidopsis thaliana]
  misc_feature (1)..(478): Homolog of NCBI NO: 16226350 NR Description: AT5g44620/K15C23_6 [Arabidopsis thaliana]
  misc_feature (26)..(518): Homolog of NCBI NO: 11345411 NR Description: putative cytochrome P450 [Matthiola incana]
  misc_feature (1)..(518): Homolog of NCBI NO: 15234514 NR Description: cytochrome p450 family; protein id: At4g12300.1
  misc_feature (19)..(517): Homolog of NCBI NO: 15234517 NR Description: cytochrome p450, putative; protein id: At4g12310.1
  misc_feature (1)..(517): Homolog of NCBI NO: 30685891 NR Description: cytochrome P450 family [Arabidopsis thaliana]
  misc_feature (1)..(517): Homolog of NCBI NO: 7430667 NR Description: cytochrome P450 homolog T12H17.80 - Arabidopsis >gi|2827546|emb|CAA16554.1| cytochrome P450 like protein thaliana] >gi|7269115|emb|CAB79224.1| cytochrome P450 like
  misc_feature (1)..(517): Homolog of NCBI NO: 15810341 NR Description: putative cytochrome P450 protein [Arabidopsis
  misc_feature (10)..(517): Homolog of NCBI NO: 15235775 NR Description: cytochrome p450 family; protein id: At4g22710.1
MTDIFTFFTIQNRNDHFDFVLATIVISSVFWYIWVYVKSKRLFPPLPPGPRGLPIVGNLPFLHPELHTYFHSLAQKHGPVFKLWLGAKLTIVITSSEATRDILRTNDVIFANDDVPVAGSLSTYGGVDIVWSPYGPEWPMLRKICINKMLSNATLDSNSFSALRRQETRRTVRYLADRARAGLAVNVGEQIFVTILNVVTQMLWGETVADDEEREKVGAEFLELITEIIDVVGKPNVSDFFPVLSRFDLQGLAKRVRRSAQRMDRMFDRIISQRMGMDKGSKGNGGDFLMVLLNAKDEDENMSMNHVKALLMDMVLGGTDTSLNTIEFAMAELINKLEIMKRAQQELDKVVGKNNIVEEKHITKLPYILSIMKETLRLHPALPLLIPRCPSETTVIGGYTIPNDSKVFINVWAIHRNPNVWENPLEFNPDRFLDKGYDFSGNDYSYFPFGSGRRICAGMAMAEKVVLYNLATLLHSFDWRIGEGEKVELEEKFGILLKLKNPLVATPVLRLSDPNLFL

SEQ ID NO: 82130 - protein, 379 aa, Arabidopsis thaliana
  peptide (1)..(379): Ceres Seq. ID no. 12663540
  misc_feature (1)..(379): Homolog of NCBI NO: 15234521 NR Description: cytochrome p450 family; protein id: At4g12330.1, by cDNA: gi_20260371 [Arabidopsis thaliana]
  misc_feature (1)..(379): Homolog of NCBI NO: 15241541 NR Description: cytochrome p450 family; protein id: At5g44620.1, by cDNA: gi_16226349 [Arabidopsis thaliana]
  misc_feature (1)..(339): Homolog of NCBI NO: 16226350 NR Description: AT5g44620/K15C23_6 [Arabidopsis thaliana]
  misc_feature (1)..(379): Homolog of NCBI NO: 11345411 NR Description: putative cytochrome P450 [Matthiola incana]
  misc_feature (1)..(379): Homolog of NCBI NO: 15234514 NR Description: cytochrome p450 family; protein id: At4g12300.1
  misc_feature (1)..(378): Homolog of NCBI NO: 15234517 NR Description: cytochrome p450, putative; protein id: At4g12310.1
  misc_feature (1)..(378): Homolog of NCBI NO: 30685891 NR Description: cytochrome P450 family [Arabidopsis thaliana]
  misc_feature (1)..(378): Homolog of NCBI NO: 7430667 NR Description: cytochrome P450 homolog T12H17.80 - Arabidopsis >gi|2827546|emb|CAA16554.1| cytochrome P450 like protein thaliana] >gi|7269115|emb|CAB79224.1| cytochrome P450 like
  misc_feature (1)..(378): Homolog of NCBI NO: 15810341 NR Description: putative cytochrome P450 protein [Arabidopsis
  misc_feature (1)..(378): Homolog of NCBI NO: 15235775 NR Description: cytochrome p450 family; protein id: At4g22710.1
MLRKICINKMLSNATLDSNSFSALRRQETRRTVRYLADRARAGLAVNVGEQIFVTILNVVTQMLWGETVADDEEREKVGAEFLELITEIIDVVGKPNVSDFFPVLSRFDLQGLAKRVRRSAQRMDRMFDRIISQRMGMDKGSKGNGGDFLMVLLNAKDEDENMSMNHVKALLMDMVLGGTDTSLNTIEFAMAELINKLEIMKRAQQELDKVVGKNNIVEEKHITKLPYILSIMKETLRLHPALPLLIPRCPSETTVIGGYTIPNDSKVFINVWAIHRNPNVWENPLEFNPDRFLDKGYDFSGNDYSYFPFGSGRRICAGMAMAEKVVLYNLATLLHSFDWRIGEGEKVELEEKFGILLKLKNPLVATPVLRLSDPNLFL

SEQ ID NO: 82131 - protein, 370 aa, Arabidopsis thaliana
  peptide (1)..(370): Ceres Seq. ID no. 12663541
  misc_feature (1)..(370): Homolog of NCBI NO: 15234521 NR Description: cytochrome p450 family; protein id: At4g12330.1, by cDNA: gi_20260371 [Arabidopsis thaliana]
  misc_feature (1)..(370): Homolog of NCBI NO: 15241541 NR Description: cytochrome p450 family; protein id: At5g44620.1, by cDNA: gi_16226349 [Arabidopsis thaliana]
  misc_feature (1)..(330): Homolog of NCBI NO: 16226350 NR Description: AT5g44620/K15C23_6 [Arabidopsis thaliana]
  misc_feature (1)..(370): Homolog of NCBI NO: 11345411 NR Description: putative cytochrome P450 [Matthiola incana]
  misc_feature (1)..(370): Homolog of NCBI NO: 15234514 NR Description: cytochrome p450 family; protein id: At4g12300.1
  misc_feature (1)..(369): Homolog of NCBI NO: 15234517 NR Description: cytochrome p450, putative; protein id: At4g12310.1
  misc_feature (1)..(369): Homolog of NCBI NO: 30685891 NR Description: cytochrome P450 family [Arabidopsis thaliana]
  misc_feature (1)..(369): Homolog of NCBI NO: 7430667 NR Description: cytochrome P450 homolog T12H17.80 - Arabidopsis >gi|2827546|emb|CAA16554.1| cytochrome P450 like protein thaliana] >gi|7269115|emb|CAB79224.1| cytochrome P450 like
  misc_feature (1)..(369): Homolog of NCBI NO: 15810341 NR Description: putative cytochrome P450 protein [Arabidopsis
  misc_feature (1)..(369): Homolog of NCBI NO: 15235775 NR Description: cytochrome p450 family; protein id: At4g22710.1
MLSNATLDSNSFSALRRQETRRTVRYLADRARAGLAVNVGEQIFVTILNVVTQMLWGETVADDEEREKVGAEFLELITEIIDVVGKPNVSDFFPVLSRFDLQGLAKRVRRSAQRMDRMFDRIISQRMGMDKGSKGNGGDFLMVLLNAKDEDENMSMNHVKALLMDMVLGGTDTSLNTIEFAMAELINKLEIMKRAQQELDKVVGKNNIVEEKHITKLPYILSIMKETLRLHPALPLLIPRCPSETTVIGGYTIPNDSKVFINVWAIHRNPNVWENPLEFNPDRFLDKGYDFSGNDYSYFPFGSGRRICAGMAMAEKVVLYNLATLLHSFDWRIGEGEKVELEEKFGILLKLKNPLVATPVLRLSDPNLFL

SEQ ID NO: 82132 - DNA, 828 bp, Arabidopsis thaliana
  misc_feature (1)..(828): Ceres Seq. ID no. 12663560
  misc_feature: MA Experiment ID: 20000169 Result: Down-regulated in Transcription
  misc_feature: MA Experiment 20000169 PARAMETER Experiment Name: At_100uM_ABA_P Parameter: Age (day) Value: 14
  misc_feature: MA Experiment 20000169 PARAMETER Experiment Name: At_100uM_ABA_P Parameter: Organism Value: A. thaliana
  misc_feature: MA Experiment 20000169 PARAMETER Experiment Name: At_100uM_ABA_P Parameter: Plant Line Value: WS
  misc_feature: MA Experiment 20000169 PARAMETER Experiment Name: At_100uM_ABA_P Parameter: Timepoint (hr) Value: 6
  misc_feature: MA Experiment 20000169 PARAMETER Experiment Name: At_100uM_ABA_P Parameter: Tissue Value: Aerial
  misc_feature: MA Experiment 20000169 PARAMETER Experiment Name: At_100uM_ABA_P Parameter: Treatment Value: 100uM ABA vs. No Treatment
  misc_feature: MA Experiment ID: 20000182 Result: Up-regulated in Transcription
  misc_feature: MA Experiment 20000182 PARAMETER Experiment Name: At_2mM_SA_P Parameter: Age (day) Value: 14
  misc_feature: MA Experiment 20000182 PARAMETER Experiment Name: At_2mM_SA_P Parameter: Organism Value: A. thaliana
  misc_feature: MA Experiment 20000182 PARAMETER Experiment Name: At_2mM_SA_P Parameter: Plant Line Value: WS
  misc_feature: MA Experiment 20000182 PARAMETER Experiment Name: At_2mM_SA_P Parameter: Timepoint (hr) Value: 6
  misc_feature: MA Experiment 20000182 PARAMETER Experiment Name: At_2mM_SA_P Parameter: Tissue Value: Aerial
  misc_feature: MA Experiment 20000182 PARAMETER Experiment Name: At_2mM_SA_P Parameter: Treatment Value: 2mM SA vs. No Treatment
  misc_feature: MA Experiment ID: 20000185 Result: Up-regulated in Transcription
  misc_feature: MA Experiment 20000185 PARAMETER Experiment Name: At_Roots__P Parameter: Age (day) Value: 7 vs. 21
  misc_feature: MA Experiment 20000185 PARAMETER Experiment Name: At_Roots__P Parameter: Organism Value: A. thaliana
  misc_feature: MA Experiment 20000185 PARAMETER Experiment Name: At_Roots__P Parameter: Tissue Value: Roots vs. Whole Plant
  misc_feature: MA Experiment ID: 20000227 Result: Down-regulated in Transcription
  misc_feature: MA Experiment 20000227 PARAMETER Experiment Name: At_Root-Tips-vs-Tops_P Parameter: Tissue Value: Root Tips vs. Root Tops
  misc_feature: MA Experiment ID: 20000234 Result: Down-regulated in Transcription
  misc_feature: MA Experiment 20000234 PARAMETER Experiment Name: At_Siliques_P Parameter: Age (day) Value: 21
  misc_feature: MA Experiment 20000234 PARAMETER Experiment Name: At_Siliques_P Parameter: Organism Value: A. thaliana
  misc_feature: MA Experiment 20000234 PARAMETER Experiment Name: At_Siliques_P Parameter: Plant Line Value: WS
  misc_feature: MA Experiment 20000234 PARAMETER Experiment Name: At_Siliques_P Parameter: Tissue Value: Less Than 5mm Siliques vs. Whole Plant
  misc_feature: MA Experiment ID: 20000264 Result: Down-regulated in Transcription
  misc_feature: MA Experiment 20000264 PARAMETER Experiment Name: At_Open_Flower_P Parameter: Age (day) Value: 21
  misc_feature: MA Experiment 20000264 PARAMETER Experiment Name: At_Open_Flower_P Parameter: Plant Line Value: WS
  misc_feature: MA Experiment 20000264 PARAMETER Experiment Name: At_Open_Flower_P Parameter: Tissue Value: Open Flower vs. Whole Plant
  misc_feature: MA Experiment ID: 20000265 Result: Down-regulated in Transcription
  misc_feature: MA Experiment 20000265 PARAMETER Experiment Name: At_Open_Flower_P Parameter: Age (day) Value: 21
  misc_feature: MA Experiment 20000265 PARAMETER Experiment Name: At_Open_Flower_P Parameter: Plant Line Value: WS
  misc_feature: MA Experiment 20000265 PARAMETER Experiment Name: At_Open_Flower_P Parameter: Tissue Value: Closed Flower vs. Whole Plant
  misc_feature: MA Experiment ID: 20000267 Result: Down-regulated in Transcription
  misc_feature: MA Experiment 20000267 PARAMETER Experiment Name: At_Drought_P Parameter: Age (day) Value: 7
  misc_feature: MA Experiment 20000267 PARAMETER Experiment Name: At_Drought_P Parameter: Organism Value: A. thaliana
  misc_feature: MA Experiment 20000267 PARAMETER Experiment Name: At_Drought_P Parameter: Plant Line Value: WS
  misc_feature: MA Experiment 20000267 PARAMETER Experiment Name: At_Drought_P Parameter: Timepoint (hr) Value: 6
  misc_feature: MA Experiment 20000267 PARAMETER Experiment Name: At_Drought_P Parameter: Tissue Value: Whole Plant
  misc_feature: MA Experiment 20000267 PARAMETER Experiment Name: At_Drought_P Parameter: Treatment Value: Drought vs. No Drought
  misc_feature: MA Experiment ID: 20000268 Result: Down-regulated in Transcription
  misc_feature: MA Experiment 20000268 PARAMETER Experiment Name: At_100mM_NaCl__P Parameter: Age (day) Value: 14
  misc_feature: MA Experiment 20000268 PARAMETER Experiment Name: At_100mM_NaCl__P Parameter: Organism Value: A. thaliana
  misc_feature: MA Experiment 20000268 PARAMETER Experiment Name: At_100mM_NaCl__P Parameter: Plant Line Value: WS
  misc_feature: MA Experiment 20000268 PARAMETER Experiment Name: At_100mM_NaCl__P Parameter: Timepoint (hr) Value: 6
  misc_feature: MA Experiment 20000268 PARAMETER Experiment Name: At_100mM_NaCl__P Parameter: Tissue Value: Whole Plant
  misc_feature: MA Experiment 20000268 PARAMETER Experiment Name: At_100mM_NaCl__P Parameter: Treatment Value: 100mM NaCl vs. No Treatment
  misc_feature: MA Experiment ID: 20000286 Result: Down-regulated in Transcription
  misc_feature: MA Experiment 20000286 PARAMETER Experiment Name: At_Open_Flower_P Parameter: Age (day) Value: 21
  misc_feature: MA Experiment 20000286 PARAMETER Experiment Name: At_Open_Flower_P Parameter: Plant Line Value: WS
  misc_feature: MA Experiment 20000286 PARAMETER Experiment Name: At_Open_Flower_P Parameter: Tissue Value: Half Open vs. Whole Plant
  misc_feature: MA Experiment ID: 20000436 Result: Down-regulated in Transcription
  misc_feature: MA Experiment 20000436 PARAMETER Experiment Name: At_Drought_P Parameter: Age (day) Value: 7
  misc_feature: MA Experiment 20000436 PARAMETER Experiment Name: At_Drought_P Parameter: Organism Value: A. thaliana
  misc_feature: MA Experiment 20000436 PARAMETER Experiment Name: At_Drought_P Parameter: Plant Line Value: WS
  misc_feature: MA Experiment 20000436 PARAMETER Experiment Name: At_Drought_P Parameter: Timepoint (hr) Value: 12
  misc_feature: MA Experiment 20000436 PARAMETER Experiment Name: At_Drought_P Parameter: Tissue Value: Whole Plant
  misc_feature: MA Experiment 20000436 PARAMETER Experiment Name: At_Drought_P Parameter: Treatment Value: Drought vs. No Drought
  misc_feature: MA Experiment ID: 20000437 Result: Down-regulated in Transcription
  misc_feature: MA Experiment 20000437 PARAMETER Experiment Name: At_Drought_P Parameter: Age (day) Value: 8
  misc_feature: MA Experiment 20000437 PARAMETER Experiment Name: At_Drought_P Parameter: Organism Value: A. thaliana
  misc_feature: MA Experiment 20000437 PARAMETER Experiment Name: At_Drought_P Parameter: Plant Line Value: WS
  misc_feature: MA Experiment 20000437 PARAMETER Experiment Name: At_Drought_P Parameter: Timepoint (hr) Value: 24
  misc_feature: MA Experiment 20000437 PARAMETER Experiment Name: At_Drought_P Parameter: Tissue Value: Whole Plant
  misc_feature: MA Experiment 20000437 PARAMETER Experiment Name: At_Drought_P Parameter: Treatment Value: Drought vs. No Drought
  misc_feature: MA Experiment ID: 20000439 Result: Up-regulated in Transcription
  misc_feature: MA Experiment 20000439 PARAMETER Experiment Name: At_Roots__P Parameter: Age (day) Value: 14 vs. 21
  misc_feature: MA Experiment 20000439 PARAMETER Experiment Name: At_Roots__P Parameter: Organism Value: A. thaliana
  misc_feature: MA Experiment 20000439 PARAMETER Experiment Name: At_Roots__P Parameter: Tissue Value: Roots vs. Whole Plant
  misc_feature: MA Experiment ID: 20000455 Result: Down-regulated in Transcription
  misc_feature: MA Experiment 20000455 PARAMETER Experiment Name: At_100uM_ABA_P Parameter: Age (day) Value: 16
  misc_feature: MA Experiment 20000455 PARAMETER Experiment Name: At_100uM_ABA_P Parameter: Organism Value: A. thaliana
  misc_feature: MA Experiment 20000455 PARAMETER Experiment Name: At_100uM_ABA_P Parameter: Plant Line Value: WS
  misc_feature: MA Experiment 20000455 PARAMETER Experiment Name: At_100uM_ABA_P Parameter: Timepoint (hr) Value: 48
  misc_feature: MA Experiment 20000455 PARAMETER Experiment Name: At_100uM_ABA_P Parameter: Tissue Value: Aerial
  misc_feature: MA Experiment 20000455 PARAMETER Experiment Name: At_100uM_ABA_P Parameter: Treatment Value: 100uM ABA vs. No Treatment
  misc_feature: MA Experiment ID: 20000506 Result: Up-regulated in Transcription
  misc_feature: MA Experiment 20000506 PARAMETER Experiment Name: At_Wounding_P Parameter: Organism Value: A. thaliana
  misc_feature: MA Experiment 20000506 PARAMETER Experiment Name: At_Wounding_P Parameter: Plant Line Value: WS
  misc_feature: MA Experiment 20000506 PARAMETER Experiment Name: At_Wounding_P Parameter: Timepoint (hr) Value: 6
  misc_feature: MA Experiment 20000506 PARAMETER Experiment Name: At_Wounding_P Parameter: Tissue Value: Aerial
  misc_feature: MA Experiment 20000506 PARAMETER Experiment Name: At_Wounding_P Parameter: Treatment Value: Wounding vs. No Wounding
  misc_feature: MA Experiment ID: 20000573 Result: Up-regulated in Transcription
  misc_feature: MA Experiment 20000573 PARAMETER Experiment Name: At_100uM_ABA_Mutants__P Parameter: Organism Value: A. thaliana
  misc_feature: MA Experiment 20000573 PARAMETER Experiment Name: At_100uM_ABA_Mutants__P Parameter: Plant Line Value: CS22 vs. Ler wt
  misc_feature: MA Experiment 20000573 PARAMETER Experiment Name: At_100uM_ABA_Mutants__P Parameter: Timepoint (hr) Value: N/A
  misc_feature: MA Experiment 20000573 PARAMETER Experiment Name: At_100uM_ABA_Mutants__P Parameter: Tissue Value: Whole Plant
  misc_feature: MA Experiment 20000573 PARAMETER Experiment Name: At_100uM_ABA_Mutants__P Parameter: Treatment Value: None
  misc_feature: MA Experiment ID: 20000794 Result: Down-regulated in Transcription
  misc_feature: MA Experiment 20000794 PARAMETER Experiment Name: At_Petals_P Parameter: Age (day) Value: 23-25 days
  misc_feature: MA Experiment 20000794 PARAMETER Experiment Name: At_Petals_P Parameter: Plant Line Value: WS
  misc_feature: MA Experiment 20000794 PARAMETER Experiment Name: At_Petals_P Parameter: Tissue Value: Petals vs. Whole plant
  misc_feature: MA Experiment ID: 20001247 Result: Down-regulated in Transcription
  misc_feature: MA Experiment 20001247 PARAMETER Experiment Name: At_Far-red-induction_P Parameter: Age (day) Value: 7
  misc_feature: MA Experiment 20001247 PARAMETER Experiment Name: At_Far-red-induction_P Parameter: Light Value: Far-red vs. White
  misc_feature: MA Experiment 20001247 PARAMETER Experiment Name: At_Far-red-induction_P Parameter: Organism Value: A. thaliana
  misc_feature: MA Experiment 20001247 PARAMETER Experiment Name: At_Far-red-induction_P Parameter: Plant Line Value: Columbia
  misc_feature: MA Experiment 20001247 PARAMETER Experiment Name: At_Far-red-induction_P Parameter: Timepoint (hr) Value: 1
  misc_feature: MA Experiment 20001247 PARAMETER Experiment Name: At_Far-red-induction_P Parameter: Tissue Value: Whole Plant
  misc_feature: MA Experiment ID: 20001248 Result: Down-regulated in Transcription
  misc_feature: MA Experiment 20001248 PARAMETER Experiment Name: At_Far-red-induction_P Parameter: Age (day) Value: 7
  misc_feature: MA Experiment 20001248 PARAMETER Experiment Name: At_Far-red-induction_P Parameter: Light Value: Far-red vs. White
  misc_feature: MA Experiment 20001248 PARAMETER Experiment Name: At_Far-red-induction_P Parameter: Organism Value: A. thaliana
  misc_feature: MA Experiment 20001248 PARAMETER Experiment Name: At_Far-red-induction_P Parameter: Plant Line Value: Columbia
  misc_feature: MA Experiment 20001248 PARAMETER Experiment Name: At_Far-red-induction_P Parameter: Timepoint (hr) Value: 4
  misc_feature: MA Experiment 20001248 PARAMETER Experiment Name: At_Far-red-induction_P Parameter: Tissue Value: Whole Plant
  misc_feature: MA Experiment ID: 20001451 Result: Down-regulated in Transcription
  misc_feature: MA Experiment 20001451 PARAMETER Experiment Name: At_Far-red-induction_P Parameter: Age (day) Value: 7
  misc_feature: MA Experiment 20001451 PARAMETER Experiment Name: At_Far-red-induction_P Parameter: Light Value: Far-red vs. White
  misc_feature: MA Experiment 20001451 PARAMETER Experiment Name: At_Far-red-induction_P Parameter: Organism Value: A. thaliana
  misc_feature: MA Experiment 20001451 PARAMETER Experiment Name: At_Far-red-induction_P Parameter: Plant Line Value: Columbia
  misc_feature: MA Experiment 20001451 PARAMETER Experiment Name: At_Far-red-induction_P Parameter: Timepoint (hr) Value: 24
  misc_feature: MA Experiment 20001451 PARAMETER Experiment Name: At_Far-red-induction_P Parameter: Tissue Value: Whole Plant
  misc_feature: MA Experiment ID: 20001504 Result: Down-regulated in Transcription
  misc_feature: MA Experiment 20001504 PARAMETER Experiment Name: At_Far-red-enriched_P Parameter: Age (day) Value: 10
  misc_feature: MA Experiment 20001504 PARAMETER Experiment Name: At_Far-red-enriched_P Parameter: Light Value: Far-red enriched vs. White
  misc_feature: MA Experiment 20001504 PARAMETER Experiment Name: At_Far-red-enriched_P Parameter: Organism Value: A. thaliana
  misc_feature: MA Experiment 20001504 PARAMETER Experiment Name: At_Far-red-enriched_P Parameter: Plant Line Value: Columbia
  misc_feature: MA Experiment 20001504 PARAMETER Experiment Name: At_Far-red-enriched_P Parameter: Timepoint (day) Value: 6
  misc_feature: MA Experiment 20001504 PARAMETER Experiment Name: At_Far-red-enriched_P Parameter: Tissue Value: Whole Plant
  misc_feature: MA Experiment ID: 20001554 Result: Down-regulated in Transcription
  misc_feature: MA Experiment 20001554 PARAMETER Experiment Name: At_Drought_Soil_Dry_P Parameter: Age (day) Value: 21
  misc_feature: MA Experiment 20001554 PARAMETER Experiment Name: At_Drought_Soil_Dry_P Parameter: Organism Value: A. thaliana
  misc_feature: MA Experiment 20001554 PARAMETER Experiment Name: At_Drought_Soil_Dry_P Parameter: Plant Line Value: WS
  misc_feature: MA Experiment 20001554 PARAMETER Experiment Name: At_Drought_Soil_Dry_P Parameter: Post Timepoint (hr) Value: None
  misc_feature: MA Experiment 20001554 PARAMETER Experiment Name: At_Drought_Soil_Dry_P Parameter: Post-Treatment Value: None
  misc_feature: MA Experiment 20001554 PARAMETER Experiment Name: At_Drought_Soil_Dry_P Parameter: Timepoint (day) Value: 7
  misc_feature: MA Experiment 20001554 PARAMETER Experiment Name: At_Drought_Soil_Dry_P Parameter: Treatment Value: Drought vs. No Drought
  misc_feature: MA Experiment ID: 20001555 Result: Down-regulated in Transcription
  misc_feature: MA Experiment 20001555 PARAMETER Experiment Name: At_Drought_Soil_Dry_P Parameter: Age (day) Value: 24
  misc_feature: MA Experiment 20001555 PARAMETER Experiment Name: At_Drought_Soil_Dry_P Parameter: Organism Value: A. thaliana
  misc_feature: MA Experiment 20001555 PARAMETER Experiment Name: At_Drought_Soil_Dry_P Parameter: Plant Line Value: WS
  misc_feature: MA Experiment 20001555 PARAMETER Experiment Name: At_Drought_Soil_Dry_P Parameter: Post Timepoint (hr) Value: None
  misc_feature: MA Experiment 20001555 PARAMETER Experiment Name: At_Drought_Soil_Dry_P Parameter: Post-Treatment Value: None
  misc_feature: MA Experiment 20001555 PARAMETER Experiment Name: At_Drought_Soil_Dry_P Parameter: Timepoint (day) Value: 10
  misc_feature: MA Experiment 20001555 PARAMETER Experiment Name: At_Drought_Soil_Dry_P Parameter: Treatment Value: Drought vs. No Drought
  misc_feature: MA Experiment ID: 20001556 Result: Down-regulated in Transcription
  misc_feature: MA Experiment 20001556 PARAMETER Experiment Name: At_Drought_Soil_Dry_P Parameter: Age (day) Value: 26
  misc_feature: MA Experiment 20001556 PARAMETER Experiment Name: At_Drought_Soil_Dry_P Parameter: Organism Value: A. thaliana
  misc_feature: MA Experiment 20001556 PARAMETER Experiment Name: At_Drought_Soil_Dry_P Parameter: Plant Line Value: WS
  misc_feature: MA Experiment 20001556 PARAMETER Experiment Name: At_Drought_Soil_Dry_P Parameter: Post Timepoint (hr) Value: None
  misc_feature: MA Experiment 20001556 PARAMETER Experiment Name: At_Drought_Soil_Dry_P Parameter: Post-Treatment Value: None
  misc_feature: MA Experiment 20001556 PARAMETER Experiment Name: At_Drought_Soil_Dry_P Parameter: Timepoint (day) Value: 12
  misc_feature: MA Experiment 20001556 PARAMETER Experiment Name: At_Drought_Soil_Dry_P Parameter: Treatment Value: Drought vs. No Drought
  misc_feature: MA Experiment ID: 20001557 Result: Down-regulated in Transcription
  misc_feature: MA Experiment 20001557 PARAMETER Experiment Name: At_Drought_Soil_Dry_P Parameter: Age (day) Value: 27
  misc_feature: MA Experiment 20001557 PARAMETER Experiment Name: At_Drought_Soil_Dry_P Parameter: Organism Value: A. thaliana
  misc_feature: MA Experiment 20001557 PARAMETER Experiment Name: At_Drought_Soil_Dry_P Parameter: Plant Line Value: WS
  misc_feature: MA Experiment 20001557 PARAMETER Experiment Name: At_Drought_Soil_Dry_P Parameter: Post Timepoint (hr) Value: 3
  misc_feature: MA Experiment 20001557 PARAMETER Experiment Name: At_Drought_Soil_Dry_P Parameter: Post-Treatment Value: Re-Water vs. No Drought
  misc_feature: MA Experiment 20001557 PARAMETER Experiment Name: At_Drought_Soil_Dry_P Parameter: Timepoint (day) Value: 13
  misc_feature: MA Experiment 20001557 PARAMETER Experiment Name: At_Drought_Soil_Dry_P Parameter: Treatment Value: Drought vs. No Drought
  misc_feature: MA Experiment ID: 20001559 Result: Down-regulated in Transcription
  misc_feature: MA Experiment 20001559 PARAMETER Experiment Name: At_Drought_Soil_Dry_P Parameter: Age (day) Value: 28
  misc_feature: MA Experiment 20001559 PARAMETER Experiment Name: At_Drought_Soil_Dry_P Parameter: Organism Value: A. thaliana
  misc_feature: MA Experiment 20001559 PARAMETER Experiment Name: At_Drought_Soil_Dry_P Parameter: Plant Line Value: WS
  misc_feature: MA Experiment 20001559 PARAMETER Experiment Name: At_Drought_Soil_Dry_P Parameter: Post Timepoint (hr) Value: 29
  misc_feature: MA Experiment 20001559 PARAMETER Experiment Name: At_Drought_Soil_Dry_P Parameter: Post-Treatment Value: Re-Water vs. No Drought
  misc_feature: MA Experiment 20001559 PARAMETER Experiment Name: At_Drought_Soil_Dry_P Parameter: Timepoint (day) Value: 14
  misc_feature: MA Experiment 20001559 PARAMETER Experiment Name: At_Drought_Soil_Dry_P Parameter: Treatment Value: Drought vs. No Drought
  misc_feature: MA Experiment ID: 20001904 Result: Down-regulated in Transcription
  misc_feature: MA Experiment 20001904 PARAMETER Experiment Name: At_Drought_Reproduction_P Parameter: Age (day) Value: 37
  misc_feature: MA Experiment 20001904 PARAMETER Experiment Name: At_Drought_Reproduction_P Parameter: Organism Value: A. thaliana
  misc_feature: MA Experiment 20001904 PARAMETER Experiment Name: At_Drought_Reproduction_P Parameter: Plant Line Value: WS
  misc_feature: MA Experiment 20001904 PARAMETER Experiment Name: At_Drought_Reproduction_P Parameter: Timepoint (day) Value: 7
  misc_feature: MA Experiment 20001904 PARAMETER Experiment Name: At_Drought_Reproduction_P Parameter: Tissue Value: Rosettes
  misc_feature: MA Experiment 20001904 PARAMETER Experiment Name: At_Drought_Reproduction_P Parameter: Treatment Value: Drought vs. No Drought
  misc_feature: MA Experiment ID: 20001905 Result: Down-regulated in Transcription
  misc_feature: MA Experiment 20001905 PARAMETER Experiment Name: At_Drought_Reproduction_P Parameter: Age (day) Value: 40
  misc_feature: MA Experiment 20001905 PARAMETER Experiment Name: At_Drought_Reproduction_P Parameter: Organism Value: A. thaliana
  misc_feature: MA Experiment 20001905 PARAMETER Experiment Name: At_Drought_Reproduction_P Parameter: Plant Line Value: WS
  misc_feature: MA Experiment 20001905 PARAMETER Experiment Name: At_Drought_Reproduction_P Parameter: Timepoint (day) Value: 10
  misc_feature: MA Experiment 20001905 PARAMETER Experiment Name: At_Drought_Reproduction_P Parameter: Tissue Value: Rosettes
  misc_feature: MA Experiment 20001905 PARAMETER Experiment Name: At_Drought_Reproduction_P Parameter: Treatment Value: Drought vs. No Drought
atctctcactctctcaaagacactgaataaatccttaaaacaaacttttgaaagaaaaaaatggcttcaaagaactcagcctctattgctcttttcttcgcccttaacatcatattcttcaccttaaccgctgcaacagattgtggttgcaacccaagtcctaagcacaagcctgtcccaagtcctaaacccaagccggtcccaagtcccaaacccaagccggtcccaagtccttcagtaccaagtccttcggtcccaagtcctaaccctaggccggtcacgcctccgagaacccctggctcatctggaaactgtcctatcgatgctctcagactcggtgtatgtgcgaacgttttaagcagtctactcaacattcaattgggtcagccatcagctcaaccatgttgctcgctcatccaaggtttggttgacctcgacgctgccatttgtctttgcactgcgcttagggctaacgttcttggtatcaaccttaacgtcccgatatctctcagtgttcttctcaacgtttgtaacagaaaggttccgtctggcttccaatgtgcttgaaggatatcagctatgcatacgatgtgatgcccgtgcacaaatatcttcttcgaaattgttacagtatgaataaatgcatgtaagctatagagtttatgttttaaattttgaatttgttaaagtgaaataaccaatgtgtgagagtgagactttcttagttttttttttccgtcaacgttcctgtattccggtcttgtatgcttttgtagcaatctattactattttcaacccgtttaataaaagagattttgtactcattt

SEQ ID NO: 82133 - protein, 168 aa, Arabidopsis thaliana
  peptide (1)..(168): Ceres Seq. ID no. 12663561
  misc_feature (85)..(167): Pfam Name: Protease inhibitor/seed storage/LTP family Pfam Description: Protease inhibitor/seed storage/LTP family
  misc_feature (1)..(168): Homolog of NCBI NO: 15235386 NR Description: pEARLI 1; protein id: At4g12480.1, supported by
  misc_feature (1)..(168): Homolog of NCBI NO: 15235390 NR Description: pEARLI 1-like protein; protein id: At4g12500.1
  misc_feature (1)..(168): Homolog of NCBI NO: 15235388 NR Description: pEARLI 1-like protein; protein id: At4g12490.1, by cDNA: gi_15450470, supported by cDNA: gi_16974458 [Arabidopsis >gi|7487995|pir||T07641 pEARLI 1 protein homolog T1P17.80
  misc_feature (1)..(168): Homolog of NCBI NO: 15235383 NR Description: pEARLI 1-like protein; protein id: At4g12470.1, by cDNA: gi_20260265 [Arabidopsis thaliana]
  misc_feature (1)..(168): Homolog of NCBI NO: 4103618 NR Description: HyPRP [Fragaria x ananassa]
  misc_feature (1)..(168): Homolog of NCBI NO: 7488729 NR Description: CIC protein, cold-inducible - alfalfa
MASKNSASIALFFALNIIFFTLTAATDCGCNPSPKHKPVPSPKPKPVPSPKPKPVPSPSVPSPSVPSPNPRPVTPPRTPGSSGNCPIDALRLGVCANVLSSLLNIQLGQPSAQPCCSLIQGLVDLDAAICLCTALRANVLGINLNVPISLSVLLNVCNRKVPSGFQCA

SEQ ID NO: 82134 - DNA, 771 bp, Arabidopsis thaliana
  misc_feature (1)..(771): Ceres Seq. ID no. 12663562
  misc_feature: MA Experiment ID: 20000171 Result: Up-regulated in Transcription
  misc_feature: MA Experiment 20000171 PARAMETER Experiment Name: At_42deg_Heat_P Parameter: Age (day) Value: 14
  misc_feature: MA Experiment 20000171 PARAMETER Experiment Name: At_42deg_Heat_P Parameter: Organism Value: A. thaliana
  misc_feature: MA Experiment 20000171 PARAMETER Experiment Name: At_42deg_Heat_P Parameter: Plant Line Value: WS
  misc_feature: MA Experiment 20000171 PARAMETER Experiment Name: At_42deg_Heat_P Parameter: Temperature (deg C) Value: 42 vs. 22
  misc_feature: MA Experiment 20000171 PARAMETER Experiment Name: At_42deg_Heat_P Parameter: Timepoint (hr) Value: 1
  misc_feature: MA Experiment 20000171 PARAMETER Experiment Name: At_42deg_Heat_P Parameter: Tissue Value: Aerial
  misc_feature: MA Experiment ID: 20000185 Result: Down-regulated in Transcription
  misc_feature: MA Experiment 20000185 PARAMETER Experiment Name: At_Roots__P Parameter: Age (day) Value: 7 vs. 21
  misc_feature: MA Experiment 20000185 PARAMETER Experiment Name: At_Roots__P Parameter: Organism Value: A. thaliana
  misc_feature: MA Experiment 20000185 PARAMETER Experiment Name: At_Roots__P Parameter: Tissue Value: Roots vs. Whole Plant
  misc_feature: MA Experiment ID: 20000265 Result: Down-regulated in Transcription
  misc_feature: MA Experiment 20000265 PARAMETER Experiment Name: At_Open_Flower_P Parameter: Age (day) Value: 21
  misc_feature: MA Experiment 20000265 PARAMETER Experiment Name: At_Open_Flower_P Parameter: Plant Line Value: WS
  misc_feature: MA Experiment 20000265 PARAMETER Experiment Name: At_Open_Flower_P Parameter: Tissue Value: Closed Flower vs. Whole Plant
  misc_feature: MA Experiment ID: 20000286 Result: Down-regulated in Transcription
  misc_feature: MA Experiment 20000286 PARAMETER Experiment Name: At_Open_Flower_P Parameter: Age (day) Value: 21
  misc_feature: MA Experiment 20000286 PARAMETER Experiment Name: At_Open_Flower_P Parameter: Plant Line Value: WS
  misc_feature: MA Experiment 20000286 PARAMETER Experiment Name: At_Open_Flower_P Parameter: Tissue Value: Half Open vs. Whole Plant
  misc_feature: MA Experiment ID: 20000308 Result: Up-regulated in Transcription
  misc_feature: MA Experiment 20000308 PARAMETER Experiment Name: At_100mM_NaCl__P Parameter: Age (day) Value: 17
  misc_feature: MA Experiment 20000308 PARAMETER Experiment Name: At_100mM_NaCl__P Parameter: Organism Value: A. thaliana
  misc_feature: MA Experiment 20000308 PARAMETER Experiment Name: At_100mM_NaCl__P Parameter: Plant Line Value: WS
  misc_feature: MA Experiment 20000308 PARAMETER Experiment Name: At_100mM_NaCl__P Parameter: Timepoint (hr) Value: 72
  misc_feature: MA Experiment 20000308 PARAMETER Experiment Name: At_100mM_NaCl__P Parameter: Tissue Value: Whole Plant
  misc_feature: MA Experiment 20000308 PARAMETER Experiment Name: At_100mM_NaCl__P Parameter: Treatment Value: 100mM NaCl vs. No Treatment
  misc_feature: MA Experiment ID: 20000437 Result: Down-regulated in Transcription
  misc_feature: MA Experiment 20000437 PARAMETER Experiment Name: At_Drought_P Parameter: Age (day) Value: 8
  misc_feature: MA Experiment 20000437 PARAMETER Experiment Name: At_Drought_P Parameter: Organism Value: A. thaliana
  misc_feature: MA Experiment 20000437 PARAMETER Experiment Name: At_Drought_P Parameter: Plant Line Value: WS
  misc_feature: MA Experiment 20000437 PARAMETER Experiment Name: At_Drought_P Parameter: Timepoint (hr) Value: 24
  misc_feature: MA Experiment 20000437 PARAMETER Experiment Name: At_Drought_P Parameter: Tissue Value: Whole Plant
  misc_feature: MA Experiment 20000437 PARAMETER Experiment Name: At_Drought_P Parameter: Treatment Value: Drought vs. No Drought
  misc_feature: MA Experiment ID: 20000451 Result: Up-regulated in Transcription
  misc_feature: MA Experiment 20000451 PARAMETER Experiment Name: At_CS6879_Shoots-Roots_P Parameter: Age (day) Value: 14
  misc_feature: MA Experiment 20000451 PARAMETER Experiment Name: At_CS6879_Shoots-Roots_P Parameter: Organism Value: A. thaliana
  misc_feature: MA Experiment 20000451 PARAMETER Experiment Name: At_CS6879_Shoots-Roots_P Parameter: Plant Line Value: CS6879 vs. WS
  misc_feature: MA Experiment 20000451 PARAMETER Experiment Name: At_CS6879_Shoots-Roots_P Parameter: Tissue Value: Roots
  misc_feature: MA Experiment ID: 20000453 Result: Down-regulated in Transcription
  misc_feature: MA Experiment 20000453 PARAMETER Experiment Name: At_100uM_ABA_P Parameter: Age (day) Value: 15
  misc_feature: MA Experiment 20000453 PARAMETER Experiment Name: At_100uM_ABA_P Parameter: Organism Value: A. thaliana
  misc_feature: MA Experiment 20000453 PARAMETER Experiment Name: At_100uM_ABA_P Parameter: Plant Line Value: WS
  misc_feature: MA Experiment 20000453 PARAMETER Experiment Name: At_100uM_ABA_P Parameter: Timepoint (hr) Value: 24
  misc_feature: MA Experiment 20000453 PARAMETER Experiment Name: At_100uM_ABA_P Parameter: Tissue Value: Aerial
  misc_feature: MA Experiment 20000453 PARAMETER Experiment Name: At_100uM_ABA_P Parameter: Treatment Value: 100uM ABA vs. No Treatment
  misc_feature: MA Experiment ID: 20000573 Result: Up-regulated in Transcription
  misc_feature: MA Experiment 20000573 PARAMETER Experiment Name: At_100uM_ABA_Mutants__P Parameter: Organism Value: A. thaliana
  misc_feature: MA Experiment 20000573 PARAMETER Experiment Name: At_100uM_ABA_Mutants__P Parameter: Plant Line Value: CS22 vs. Ler wt
  misc_feature: MA Experiment 20000573 PARAMETER Experiment Name: At_100uM_ABA_Mutants__P Parameter: Timepoint (hr) Value: N/A
  misc_feature: MA Experiment 20000573 PARAMETER Experiment Name: At_100uM_ABA_Mutants__P Parameter: Tissue Value: Whole Plant
  misc_feature: MA Experiment 20000573 PARAMETER Experiment Name: At_100uM_ABA_Mutants__P Parameter: Treatment Value: None
  misc_feature: MA Experiment ID: 20000574 Result: Up-regulated in Transcription
  misc_feature: MA Experiment 20000574 PARAMETER Experiment Name: At_100uM_ABA_Mutants__P Parameter: Organism Value: A. thaliana
  misc_feature: MA Experiment 20000574 PARAMETER Experiment Name: At_100uM_ABA_Mutants__P Parameter: Plant Line Value: CS23 vs. Ler wt
  misc_feature: MA Experiment 20000574 PARAMETER Experiment Name: At_100uM_ABA_Mutants__P Parameter: Timepoint (hr) Value: N/A
  misc_feature: MA Experiment 20000574 PARAMETER Experiment Name: At_100uM_ABA_Mutants__P Parameter: Tissue Value: Whole Plant
  misc_feature: MA Experiment 20000574 PARAMETER Experiment Name: At_100uM_ABA_Mutants__P Parameter: Treatment Value: None
  misc_feature: MA Experiment ID: 20000576 Result: Down-regulated in Transcription
  misc_feature: MA Experiment 20000576 PARAMETER Experiment Name: At_100uM_ABA_Mutants__P Parameter: Organism Value: A. thaliana
  misc_feature: MA Experiment 20000576 PARAMETER Experiment Name: At_100uM_ABA_Mutants__P Parameter: Plant Line Value: CS23
  misc_feature: MA Experiment 20000576 PARAMETER Experiment Name: At_100uM_ABA_Mutants__P Parameter: Timepoint (hr) Value: 6
  misc_feature: MA Experiment 20000576 PARAMETER Experiment Name: At_100uM_ABA_Mutants__P Parameter: Tissue Value: Whole Plant
  misc_feature: MA Experiment 20000576 PARAMETER Experiment Name: At_100uM_ABA_Mutants__P Parameter: Treatment Value: 1uM ABA vs. No Treatment
  misc_feature: MA Experiment ID: 20001451 Result: Down-regulated in Transcription
  misc_feature: MA Experiment 20001451 PARAMETER Experiment Name: At_Far-red-induction_P Parameter: Age (day) Value: 7
  misc_feature: MA Experiment 20001451 PARAMETER Experiment Name: At_Far-red-induction_P Parameter: Light Value: Far-red vs. White
  misc_feature: MA Experiment 20001451 PARAMETER Experiment Name: At_Far-red-induction_P Parameter: Organism Value: A. thaliana
  misc_feature: MA Experiment 20001451 PARAMETER Experiment Name: At_Far-red-induction_P Parameter: Plant Line Value: Columbia
  misc_feature: MA Experiment 20001451 PARAMETER Experiment Name: At_Far-red-induction_P Parameter: Timepoint (hr) Value: 24
  misc_feature: MA Experiment 20001451 PARAMETER Experiment Name: At_Far-red-induction_P Parameter: Tissue Value: Whole Plant
  misc_feature: MA Experiment ID: 20001554 Result: Down-regulated in Transcription
  misc_feature: MA Experiment 20001554 PARAMETER Experiment Name: At_Drought_Soil_Dry_P Parameter: Age (day) Value: 21
  misc_feature: MA Experiment 20001554 PARAMETER Experiment Name: At_Drought_Soil_Dry_P Parameter: Organism Value: A. thaliana
  misc_feature: MA Experiment 20001554 PARAMETER Experiment Name: At_Drought_Soil_Dry_P Parameter: Plant Line Value: WS
  misc_feature: MA Experiment 20001554 PARAMETER Experiment Name: At_Drought_Soil_Dry_P Parameter: Post Timepoint (hr) Value: None
  misc_feature: MA Experiment 20001554 PARAMETER Experiment Name: At_Drought_Soil_Dry_P Parameter: Post-Treatment Value: None
  misc_feature: MA Experiment 20001554 PARAMETER Experiment Name: At_Drought_Soil_Dry_P Parameter: Timepoint (day) Value: 7
  misc_feature: MA Experiment 20001554 PARAMETER Experiment Name: At_Drought_Soil_Dry_P Parameter: Treatment Value: Drought vs. No Drought
  misc_feature: MA Experiment ID: 20001556 Result: Down-regulated in Transcription
  misc_feature: MA Experiment 20001556 PARAMETER Experiment Name: At_Drought_Soil_Dry_P Parameter: Age (day) Value: 26
  misc_feature: MA Experiment 20001556 PARAMETER Experiment Name: At_Drought_Soil_Dry_P Parameter: Organism Value: A. thaliana
  misc_feature: MA Experiment 20001556 PARAMETER Experiment Name: At_Drought_Soil_Dry_P Parameter: Plant Line Value: WS
  misc_feature: MA Experiment 20001556 PARAMETER Experiment Name: At_Drought_Soil_Dry_P Parameter: Post Timepoint (hr) Value: None
  misc_feature: MA Experiment 20001556 PARAMETER Experiment Name: At_Drought_Soil_Dry_P Parameter: Post-Treatment Value: None
  misc_feature: MA Experiment 20001556 PARAMETER Experiment Name: At_Drought_Soil_Dry_P Parameter: Timepoint (day) Value: 12
  misc_feature: MA Experiment 20001556 PARAMETER Experiment Name: At_Drought_Soil_Dry_P Parameter: Treatment Value: Drought vs. No Drought
  misc_feature: MA Experiment ID: 20001558 Result: Down-regulated in Transcription
  misc_feature: MA Experiment 20001558 PARAMETER Experiment Name: At_Drought_Soil_Dry_P Parameter: Age (day) Value: 27
  misc_feature: MA Experiment 20001558 PARAMETER Experiment Name: At_Drought_Soil_Dry_P Parameter: Organism Value: A. thaliana
  misc_feature: MA Experiment 20001558 PARAMETER Experiment Name: At_Drought_Soil_Dry_P Parameter: Plant Line Value: WS
  misc_feature: MA Experiment 20001558 PARAMETER Experiment Name: At_Drought_Soil_Dry_P Parameter: Post Timepoint (hr) Value: 6
  misc_feature: MA Experiment 20001558 PARAMETER Experiment Name: At_Drought_Soil_Dry_P Parameter: Post-Treatment Value: Re-Water vs. No Drought
  misc_feature: MA Experiment 20001558 PARAMETER Experiment Name: At_Drought_Soil_Dry_P Parameter: Timepoint (day) Value: 13
  misc_feature: MA Experiment 20001558 PARAMETER Experiment Name: At_Drought_Soil_Dry_P Parameter: Treatment Value: Drought vs. No Drought
  misc_feature: MA Experiment ID: 20001904 Result: Down-regulated in Transcription
  misc_feature: MA Experiment 20001904 PARAMETER Experiment Name: At_Drought_Reproduction_P Parameter: Age (day) Value: 37
  misc_feature: MA Experiment 20001904 PARAMETER Experiment Name: At_Drought_Reproduction_P Parameter: Organism Value: A. thaliana
  misc_feature: MA Experiment 20001904 PARAMETER Experiment Name: At_Drought_Reproduction_P Parameter: Plant Line Value: WS
  misc_feature: MA Experiment 20001904 PARAMETER Experiment Name: At_Drought_Reproduction_P Parameter: Timepoint (day) Value: 7
  misc_feature: MA Experiment 20001904 PARAMETER Experiment Name: At_Drought_Reproduction_P Parameter: Tissue Value: Rosettes
  misc_feature: MA Experiment 20001904 PARAMETER Experiment Name: At_Drought_Reproduction_P Parameter: Treatment Value: Drought vs. No Drought
atctctcactcaaacattctccataacaatggcttcaaagaactcagcctctcttgctcttttctttgccctcaacatcctttttttcaccttaaccgctggtactaattgtagatgcaacccgagtcctaagcctaggccgctcccaaatcctaaggtcccaagtcctaaggtcccaactccttcggtcccaagtccatatgttccaactccttcggtcccaagtccttccgtaccaactccttcggtcccaagtccttccgtaccaagtcctaaccctacgccagtcattcctccgagaacccctggttcatccggaaactgtcctatcgatgctctcagactcggtgtatgtgcgaatgtgctaagcggtctacttaacgtgcagttgggacagccatcacctcaaccatgctgctcactcattcaaggtttggttgaccttgacgctgcggtttgcctatgcactgctcttagggctaacgttcttggcatcaaccttaacgttcctatatctctcagtgttcttctcaacgtttgcaacagaaggcttccgtctaatttccaatgtgcttgagggatatcaattacacatacgacgcacacagtttactctttaaaataatcacagtttgaataattgcatgcatgtatgcaagttaagggttcaatgtttcaatcttttgtttaagtgtgaggcgttatctttttccgcgcatatatgtttttgttgtaacttttattgtttaaatgaaagacgtttcatagtcc

SEQ ID NO: 82135 - protein, 191 aa, Arabidopsis thaliana
  peptide (1)..(191): Ceres Seq. ID no. 12663563
  misc_feature (108)..(190): Pfam Name: Protease inhibitor/seed storage/LTP family Pfam Description: Protease inhibitor/seed storage/LTP family
  misc_feature (10)..(191): Homolog of NCBI NO: 15235388 NR Description: pEARLI 1-like protein; protein id: At4g12490.1, by cDNA: gi_15450470, supported by cDNA: gi_16974458 [Arabidopsis >gi|7487995|pir||T07641 pEARLI 1 protein homolog T1P17.80
  misc_feature (10)..(191): Homolog of NCBI NO: 15235390 NR Description: pEARLI 1-like protein; protein id: At4g12500.1
  misc_feature (10)..(191): Homolog of NCBI NO: 15235386 NR Description: pEARLI 1; protein id: At4g12480.1, supported by
  misc_feature (59)..(191): Homolog of NCBI NO: 15235383 NR Description: pEARLI 1-like protein; protein id: At4g12470.1, by cDNA: gi_20260265 [Arabidopsis thaliana]
  misc_feature (10)..(191): Homolog of NCBI NO: 7488729 NR Description: CIC protein, cold-inducible - alfalfa
  misc_feature (59)..(191): Homolog of NCBI NO: 4103618 NR Description: HyPRP [Fragaria x ananassa]
  misc_feature (10)..(190): Homolog of NCBI NO: 38568018 NR Description: OSJNBa0070C17.10 [Oryza sativa (japonica
  misc_feature (106)..(190): Homolog of NCBI NO: 7959089 NR Description: glycine-rich protein [Nicotiana tabacum]
  misc_feature (10)..(43): Homolog of NCBI NO: 7959089 NR Description: glycine-rich protein [Nicotiana tabacum]
  misc_feature (71)..(190): Homolog of NCBI NO: 15221484 NR Description: similar to 14KD proline-rich protein DC2.15 (sp|P14009); similar to ESTs emb|Z17709 and emb|Z47685; protein
SLTQTFSITMASKNSASLALFFALNILFFTLTAGTNCRCNPSPKPRPLPNPKVPSPKVPTPSVPSPYVPTPSVPSPSVPTPSVPSPSVPSPNPTPVIPPRTPGSSGNCPIDALRLGVCANVLSGLLNVQLGQPSPQPCCSLIQGLVDLDAAVCLCTALRANVLGINLNVPISLSVLLNVCNRRLPSNFQCA

SEQ ID NO: 82136 - protein, 182 aa, Arabidopsis thaliana
  peptide (1)..(182): Ceres Seq. ID no. 12663564
  misc_feature (99)..(181): Pfam Name: Protease inhibitor/seed storage/LTP family Pfam Description: Protease inhibitor/seed storage/LTP family
  misc_feature (1)..(182): Homolog of NCBI NO: 15235388 NR Description: pEARLI 1-like protein; protein id: At4g12490.1, by cDNA: gi_15450470, supported by cDNA: gi_16974458 [Arabidopsis >gi|7487995|pir||T07641 pEARLI 1 protein homolog T1P17.80
  misc_feature (1)..(182): Homolog of NCBI NO: 15235390 NR Description: pEARLI 1-like protein; protein id: At4g12500.1
  misc_feature (1)..(182): Homolog of NCBI NO: 15235386 NR Description: pEARLI 1; protein id: At4g12480.1, supported by
  misc_feature (50)..(182): Homolog of NCBI NO: 15235383 NR Description: pEARLI 1-like protein; protein id: At4g12470.1, by cDNA: gi_20260265 [Arabidopsis thaliana]
  misc_feature (1)..(182): Homolog of NCBI NO: 7488729 NR Description: CIC protein, cold-inducible - alfalfa
  misc_feature (50)..(182): Homolog of NCBI NO: 4103618 NR Description: HyPRP [Fragaria x ananassa]
  misc_feature (1)..(181): Homolog of NCBI NO: 38568018 NR Description: OSJNBa0070C17.10 [Oryza sativa (japonica
  misc_feature (97)..(181): Homolog of NCBI NO: 7959089 NR Description: glycine-rich protein [Nicotiana tabacum]
  misc_feature (1)..(34): Homolog of NCBI NO: 7959089 NR Description: glycine-rich protein [Nicotiana tabacum]
  misc_feature (62)..(181): Homolog of NCBI NO: 15221484 NR Description: similar to 14KD proline-rich protein DC2.15 (sp|P14009); similar to ESTs emb|Z17709 and emb|Z47685; protein
MASKNSASLALFFALNILFFTLTAGTNCRCNPSPKPRPLPNPKVPSPKVPTPSVPSPYVPTPSVPSPSVPTPSVPSPSVPSPNPTPVIPPRTPGSSGNCPIDALRLGVCANVLSGLLNVQLGQPSPQPCCSLIQGLVDLDAAVCLCTALRANVLGINLNVPISLSVLLNVCNRRLPSNFQCA

SEQ ID NO: 82137 - DNA, 1686 bp, Arabidopsis thaliana
  misc_feature (1)..(1686): Ceres Seq. ID no. 12663575
  misc_feature: MA Experiment ID: 20000179 Result: Up-regulated in Transcription
  misc_feature: MA Experiment 20000179 PARAMETER Experiment Name: At_Germinating_Seeds_P Parameter: Age (hr) Value: 6 vs. 0
  misc_feature: MA Experiment 20000179 PARAMETER Experiment Name: At_Germinating_Seeds_P Parameter: Tissue Value: Germinating Seeds
  misc_feature: MA Experiment ID: 20000180 Result: Up-regulated in Transcription
  misc_feature: MA Experiment 20000180 PARAMETER Experiment Name: At_Germinating_Seeds_P Parameter: Age (hr) Value: 24 vs. 0
  misc_feature: MA Experiment 20000180 PARAMETER Experiment Name: At_Germinating_Seeds_P Parameter: Tissue Value: Germinating Seeds
  misc_feature: MA Experiment ID: 20000185 Result: Up-regulated in Transcription
  misc_feature: MA Experiment 20000185 PARAMETER Experiment Name: At_Roots__P Parameter: Age (day) Value: 7 vs. 21
  misc_feature: MA Experiment 20000185 PARAMETER Experiment Name: At_Roots__P Parameter: Organism Value: A. thaliana
  misc_feature: MA Experiment 20000185 PARAMETER Experiment Name: At_Roots__P Parameter: Tissue Value: Roots vs. Whole Plant
  misc_feature: MA Experiment ID: 20000227 Result: Up-regulated in Transcription
  misc_feature: MA Experiment 20000227 PARAMETER Experiment Name: At_Root-Tips-vs-Tops_P Parameter: Tissue Value: Root Tips vs. Root Tops
  misc_feature: MA Experiment ID: 20000234 Result: Up-regulated in Transcription
  misc_feature: MA Experiment 20000234 PARAMETER Experiment Name: At_Siliques_P Parameter: Age (day) Value: 21
  misc_feature: MA Experiment 20000234 PARAMETER Experiment Name: At_Siliques_P Parameter: Organism Value: A. thaliana
  misc_feature: MA Experiment 20000234 PARAMETER Experiment Name: At_Siliques_P Parameter: Plant Line Value: WS
  misc_feature: MA Experiment 20000234 PARAMETER Experiment Name: At_Siliques_P Parameter: Tissue Value: Less Than 5mm Siliques vs. Whole Plant
  misc_feature: MA Experiment ID: 20000235 Result: Up-regulated in Transcription
  misc_feature: MA Experiment 20000235 PARAMETER Experiment Name: At_Siliques_P Parameter: Age (day) Value: 21
  misc_feature: MA Experiment 20000235 PARAMETER Experiment Name: At_Siliques_P Parameter: Organism Value: A. thaliana
  misc_feature: MA Experiment 20000235 PARAMETER Experiment Name: At_Siliques_P Parameter: Plant Line Value: WS
  misc_feature: MA Experiment 20000235 PARAMETER Experiment Name: At_Siliques_P Parameter: Tissue Value: 5-10mm Siliques vs. Whole Plant
  misc_feature: MA Experiment ID: 20000265 Result: Up-regulated in Transcription
  misc_feature: MA Experiment 20000265 PARAMETER Experiment Name: At_Open_Flower_P Parameter: Age (day) Value: 21
  misc_feature: MA Experiment 20000265 PARAMETER Experiment Name: At_Open_Flower_P Parameter: Plant Line Value: WS
  misc_feature: MA Experiment 20000265 PARAMETER Experiment Name: At_Open_Flower_P Parameter: Tissue Value: Closed Flower vs. Whole Plant
  misc_feature: MA Experiment ID: 20000286 Result: Up-regulated in Transcription
  misc_feature: MA Experiment 20000286 PARAMETER Experiment Name: At_Open_Flower_P Parameter: Age (day) Value: 21
  misc_feature: MA Experiment 20000286 PARAMETER Experiment Name: At_Open_Flower_P Parameter: Plant Line Value: WS
  misc_feature: MA Experiment 20000286 PARAMETER Experiment Name: At_Open_Flower_P Parameter: Tissue Value: Half Open vs. Whole Plant
  misc_feature: MA Experiment ID: 20000438 Result: Up-regulated in Transcription
  misc_feature: MA Experiment 20000438 PARAMETER Experiment Name: At_Shoots__P Parameter: Age (day) Value: 14
  misc_feature: MA Experiment 20000438 PARAMETER Experiment Name: At_Shoots__P Parameter: Tissue Value: Shoots vs. Whole Plant
atgtcaggaagatctgcattttccagaaccggaggtttccgacctgagaatctagggcaaaacgcagtatccttaatcggaagcataggcttctctgtactcgtaatcggagtcgtagttttcaccattatcgctgctacatatgaaccagaagatccactatttcacccatctgacaaaatcacaactttcctcacatccaattcaaacgctactcttaaatccgacgacagtattgtcaaaaccggtgaagatttcatggcggcgaaccaaaccgcgtttggcggattcatcaatatagctgatgttgaaacatctgagaatgactctgatggtaatcaattggattgtgataccaatatcccaattgattgcaaagatcctgaagtttttcacttgatgatgaaagctactatggagaagtttaaagacagtcacttttataagtttggtaaacctgtgattgtggaaggtagtagtagttcttgtgatatggcttggcgttatagacctaaggatggtaaagcggctgcgttttataaggattataggaggtttgtgattgaaaagtctgggaattgtagtgttagtgtgatggggattggtgagtatcattcgggtgtgaatgcgaggaagcggaagaggcccgggtttcgaaattcgagtggtggtaaggttgatgatttcgcattgcctgtagttggtgaagcagtgaatgattcacttcctgttgttgagtctgaaaatgtgtttaaagaaggtcattacttggtttattctggtggaggagataggtgtaagagtatgaaccatttcttgtggagtttcttgtgtgctttaggggaagctcagtatttgaatagaacattagtgatggatttgactctttgtttgtcttctgtttatacattgtctggtcaaaacgaggaagggaaggactttaggttttactttgatttcgagcatttgaaagaggctgcttctatgttagaccaggtgcagttttgggctgattgggggaaatggtataagaagaatggattaaagcttcatcttgtggaagattttcgggtcacaccgatgaagcttgttgatgtgaaggacacgttgataatgaggaagttcgggacagtagaaccagataactattggtatagagtatgcgaaggggagacagaatctgttgtgcaaaggccttggaatctattgtggaaatctaaacgactgatggagattgtttctgcgattgcttcgaggttaaactgggattatgatgctattcacattgagagaggagacaaggcgagaaacaaggaagtttggcctaatcttgaaaaggatacttcaccaagctccattttatctaccctccaggacaaaatcgaacaaggaaggaatctttatattgcaacaaatgaaccagagttatctttctttaaccccttgaaagacaagtacaaaccccattttctggatgagtttaaggatctctgggacgagagcagcgaatggtattcagagacaacgaagcttaatggaggaaacccagttgagtttgacggttacatgagagcgtctgttgatacagaggtgttcttgagagggaagaagcagattgaaacattcaatgatcttaccaatgactgtagagatggaatcggcacttgcaacgtagcagcaagctga

SEQ ID NO: 82138 - protein, 561 aa, Arabidopsis thaliana
  peptide (1)..(561): Ceres Seq. ID no. 12663576
  misc_feature (1)..(561): Homolog of NCBI NO: 15235454 NR Description: putative protein; protein id: At4g12700.1
  misc_feature (1)..(561): Homolog of NCBI NO: 18395698 NR Description: expressed protein; protein id: At2g04280.1, by cDNA: gi_15810336 [Arabidopsis thaliana]
  misc_feature (233)..(556): Homolog of NCBI NO: 37534994 NR Description: unknown protein [Oryza sativa (japonica
  misc_feature (46)..(233): Homolog of NCBI NO: 37534994 NR Description: unknown protein [Oryza sativa (japonica
  misc_feature (27)..(89): Homolog of NCBI NO: 37534994 NR Description: unknown protein [Oryza sativa (japonica
  misc_feature (16)..(556): Homolog of NCBI NO: 15236611 NR Description: putative protein; protein id: At4g08810.1, by cDNA: gi_15912228 [Arabidopsis thaliana]
  misc_feature (18)..(558): Homolog of NCBI NO: 34913308 NR Description: P0519E12.32 [Oryza sativa (japonica
  misc_feature (105)..(217): Homolog of NCBI NO: 34909040 NR Description: P0034E02.33 [Oryza sativa (japonica
  misc_feature (464)..(540): Homolog of NCBI NO: 34909040 NR Description: P0034E02.33 [Oryza sativa (japonica
  misc_feature (384)..(499): Homolog of NCBI NO: 15229000 NR Description: putative protein; protein id: At3g56750.1, by cDNA: gi_16648896, supported by cDNA: gi_20453218 [Arabidopsis
MSGRSAFSRTGGFRPENLGQNAVSLIGSIGFSVLVIGVVVFTIIAATYEPEDPLFHPSDKITTFLTSNSNATLKSDDSIVKTGEDFMAANQTAFGGFINIADVETSENDSDGNQLDCDTNIPIDCKDPEVFHLMMKATMEKFKDSHFYKFGKPVIVEGSSSSCDMAWRYRPKDGKAAAFYKDYRRFVIEKSGNCSVSVMGIGEYHSGVNARKRKRPGFRNSSGGKVDDFALPVVGEAVNDSLPVVESENVFKEGHYLVYSGGGDRCKSMNHFLWSFLCALGEAQYLNRTLVMDLTLCLSSVYTLSGQNEEGKDFRFYFDFEHLKEAASMLDQVQFWADWGKWYKKNGLKLHLVEDFRVTPMKLVDVKDTLIMRKFGTVEPDNYWYRVCEGETESVVQRPWNLLWKSKRLMEIVSAIASRLNWDYDAIHIERGDKARNKEVWPNLEKDTSPSSILSTLQDKIEQGRNLYIATNEPELSFFNPLKDKYKPHFLDEFKDLWDESSEWYSETTKLNGGNPVEFDGYMRASVDTEVFLRGKKQIETFNDLTNDCRDGIGTCNVAAS

SEQ ID NO: 82139 - protein, 475 aa, Arabidopsis thaliana
  peptide (1)..(475): Ceres Seq. ID no. 12663577
  misc_feature (1)..(475): Homolog of NCBI NO: 15235454 NR Description: putative protein; protein id: At4g12700.1
  misc_feature (1)..(475): Homolog of NCBI NO: 18395698 NR Description: expressed protein; protein id: At2g04280.1, by cDNA: gi_15810336 [Arabidopsis thaliana]
  misc_feature (147)..(470): Homolog of NCBI NO: 37534994 NR Description: unknown protein [Oryza sativa (japonica
  misc_feature (1)..(147): Homolog of NCBI NO: 37534994 NR Description: unknown protein [Oryza sativa (japonica
  misc_feature (1)..(470): Homolog of NCBI NO: 15236611 NR Description: putative protein; protein id: At4g08810.1, by cDNA: gi_15912228 [Arabidopsis thaliana]
  misc_feature (1)..(472): Homolog of NCBI NO: 34913308 NR Description: P0519E12.32 [Oryza sativa (japonica
  misc_feature (19)..(131): Homolog of NCBI NO: 34909040 NR Description: P0034E02.33 [Oryza sativa (japonica
  misc_feature (378)..(454): Homolog of NCBI NO: 34909040 NR Description: P0034E02.33 [Oryza sativa (japonica
  misc_feature (298)..(413): Homolog of NCBI NO: 15229000 NR Description: putative protein; protein id: At3g56750.1, by cDNA: gi_16648896, supported by cDNA: gi_20453218 [Arabidopsis
  misc_feature (178)..(220): Homolog of NCBI NO: 15229000 NR Description: putative protein; protein id: At3g56750.1, by cDNA: gi_16648896, supported by cDNA: gi_20453218 [Arabidopsis
MAANQTAFGGFINIADVETSENDSDGNQLDCDTNIPIDCKDPEVFHLMMKATMEKFKDSHFYKFGKPVIVEGSSSSCDMAWRYRPKDGKAAAFYKDYRRFVIEKSGNCSVSVMGIGEYHSGVNARKRKRPGFRNSSGGKVDDFALPVVGEAVNDSLPVVESENVFKEGHYLVYSGGGDRCKSMNHFLWSFLCALGEAQYLNRTLVMDLTLCLSSVYTLSGQNEEGKDFRFYFDFEHLKEAASMLDQVQFWADWGKWYKKNGLKLHLVEDFRVTPMKLVDVKDTLIMRKFGTVEPDNYWYRVCEGETESVVQRPWNLLWKSKRLMEIVSAIASRLNWDYDAIHIERGDKARNKEVWPNLEKDTSPSSILSTLQDKIEQGRNLYIATNEPELSFFNPLKDKYKPHFLDEFKDLWDESSEWYSETTKLNGGNPVEFDGYMRASVDTEVFLRGKKQIETFNDLTNDCRDGIGTCNVAAS

SEQ ID NO: 82140 - protein, 428 aa, Arabidopsis thaliana
  peptide (1)..(428): Ceres Seq. ID no. 12663578
  misc_feature (1)..(428): Homolog of NCBI NO: 15235454 NR Description: putative protein; protein id: At4g12700.1
  misc_feature (1)..(428): Homolog of NCBI NO: 18395698 NR Description: expressed protein; protein id: At2g04280.1, by cDNA: gi_15810336 [Arabidopsis thaliana]
  misc_feature (100)..(423): Homolog of NCBI NO: 37534994 NR Description: unknown protein [Oryza sativa (japonica
  misc_feature (1)..(100): Homolog of NCBI NO: 37534994 NR Description: unknown protein [Oryza sativa (japonica
  misc_feature (1)..(423): Homolog of NCBI NO: 15236611 NR Description: putative protein; protein id: At4g08810.1, by cDNA: gi_15912228 [Arabidopsis thaliana]
  misc_feature (1)..(425): Homolog of NCBI NO: 34913308 NR Description: P0519E12.32 [Oryza sativa (japonica
  misc_feature (1)..(84): Homolog of NCBI NO: 34909040 NR Description: P0034E02.33 [Oryza sativa (japonica
  misc_feature (331)..(407): Homolog of NCBI NO: 34909040 NR Description: P0034E02.33 [Oryza sativa (japonica
  misc_feature (251)..(366): Homolog of NCBI NO: 15229000 NR Description: putative protein; protein id: At3g56750.1, by cDNA: gi_16648896, supported by cDNA: gi_20453218 [Arabidopsis
  misc_feature (131)..(173): Homolog of NCBI NO: 15229000 NR Description: putative protein; protein id: At3g56750.1, by cDNA: gi_16648896, supported by cDNA: gi_20453218 [Arabidopsis
MMKATMEKFKDSHFYKFGKPVIVEGSSSSCDMAWRYRPKDGKAAAFYKDYRRFVIEKSGNCSVSVMGIGEYHSGVNARKRKRPGFRNSSGGKVDDFALPVVGEAVNDSLPVVESENVFKEGHYLVYSGGGDRCKSMNHFLWSFLCALGEAQYLNRTLVMDLTLCLSSVYTLSGQNEEGKDFRFYFDFEHLKEAASMLDQVQFWADWGKWYKKNGLKLHLVEDFRVTPMKLVDVKDTLIMRKFGTVEPDNYWYRVCEGETESVVQRPWNLLWKSKRLMEIVSAIASRLNWDYDAIHIERGDKARNKEVWPNLEKDTSPSSILSTLQDKIEQGRNLYIATNEPELSFFNPLKDKYKPHFLDEFKDLWDESSEWYSETTKLNGGNPVEFDGYMRASVDTEVFLRGKKQIETFNDLTNDCRDGIGTCNVAAS

SEQ ID NO: 82141 - DNA, 696 bp, Arabidopsis thaliana
  misc_feature (1)..(696): Ceres Seq. ID no. 12663591
  misc_feature: MA Experiment ID: 20001247 Result: Down-regulated in Transcription
  misc_feature: MA Experiment 20001247 PARAMETER Experiment Name: At_Far-red-induction_P Parameter: Age (day) Value: 7
  misc_feature: MA Experiment 20001247 PARAMETER Experiment Name: At_Far-red-induction_P Parameter: Light Value: Far-red vs. White
  misc_feature: MA Experiment 20001247 PARAMETER Experiment Name: At_Far-red-induction_P Parameter: Organism Value: A. thaliana
  misc_feature: MA Experiment 20001247 PARAMETER Experiment Name: At_Far-red-induction_P Parameter: Plant Line Value: Columbia
  misc_feature: MA Experiment 20001247 PARAMETER Experiment Name: At_Far-red-induction_P Parameter: Timepoint (hr) Value: 1
  misc_feature: MA Experiment 20001247 PARAMETER Experiment Name: At_Far-red-induction_P Parameter: Tissue Value: Whole Plant
atggcttcttcttcttcgttggcttcttcaaccaagcttgtattctttgcttgcctcctcctattcacattctcatcacacaatctcgtggctggagaatccgacaaagtaaagctcaatctttactatgaatcactttgtccttcttgtcagaatttcatcgtccatcatctaggcaaaatctttaacactgatctccacacaatcaccgatctcaagctcattccattcggtaacgcccatgtctccgatgatcttaccgtcacttgccagcatggtgaagaagaatgcaaattaaacgcccttgaagcttgcgccataagaacttggcctaatcagagattgcactacaagttcattcggtgcgttgaaactaacacgaatgcttgggaatcttgtgttaagaagtatggaggtgaaaaagcgataaatgattgttacaatggtgatctctctaaagagctgatacttgggtatgcaaaccagacattgagtttgaaaccggagcataaatacgtaccatggatgacactcaacggcgaaccactctacgaaaatattggtgattttgtggacttagtctgcaaagcgtataaaggaaaggctgctctccctaaactctgttattcctctgtcttgtctcagaggacaatgatgcttgaattctcctatgttgatgaagctatcaatcactaa

SEQ ID NO: 82142 - protein, 231 aa, Arabidopsis thaliana
  peptide (1)..(231): Ceres Seq. ID no. 12663592
  misc_feature (37)..(141): Pfam Name: Gamma interferon inducible lysosomal thiol Pfam Description: Gamma interferon inducible lysosomal thiol
  misc_feature (1)..(231): Homolog of NCBI NO: 15235523 NR Description: putative protein; protein id: At4g12900.1
  misc_feature (1)..(230): Homolog of NCBI NO: 18413888 NR Description: putative protein; protein id: At4g12890.1,
  misc_feature (10)..(231): Homolog of NCBI NO: 22328587 NR Description: putative protein; protein id: At4g12870.1, by cDNA: gi_18252994 [Arabidopsis thaliana] putative protein [Arabidopsis thaliana]
  misc_feature (8)..(231): Homolog of NCBI NO: 21593852 NR Description: unknown [Arabidopsis thaliana]
  misc_feature (1)..(230): Homolog of NCBI NO: 21593076 NR Description: unknown [Arabidopsis thaliana]
  misc_feature (8)..(231): Homolog of NCBI NO: 15235540 NR Description: putative protein; protein id: At4g12960.1, by cDNA: 516., supported by cDNA: gi_16648686 [Arabidopsis
  misc_feature (1)..(185): Homolog of NCBI NO: 7487272 NR Description: hypothetical protein T20K18.240 - Arabidopsis >gi|4586265|emb|CAB41006.1| putative protein [Arabidopsis >gi|7267991|emb|CAB78331.1| putative protein [Arabidopsis
  misc_feature (54)..(230): Homolog of NCBI NO: 18252829 NR Description: putative protein [Arabidopsis thaliana]
  misc_feature (10)..(155): Homolog of NCBI NO: 7487271 NR Description: hypothetical protein T20K18.220 - Arabidopsis >gi|4586263|emb|CAB41004.1| putative protein [Arabidopsis >gi|7267989|emb|CAB78329.1| putative protein [Arabidopsis
  misc_feature (5)..(208): Homolog of NCBI NO: 18390723 NR Description: expressed protein; protein id: At1g07080.1, by cDNA: gi_15146333, supported by cDNA: gi_15809755 [Arabidopsis >gi|15146334|gb|AAK83650.1| At1g07080/F10K1_15 [Arabidopsis
MASSSSLASSTKLVFFACLLLFTFSSHNLVAGESDKVKLNLYYESLCPSCQNFIVHHLGKIFNTDLHTITDLKLIPFGNAHVSDDLTVTCQHGEEECKLNALEACAIRTWPNQRLHYKFIRCVETNTNAWESCVKKYGGEKAINDCYNGDLSKELILGYANQTLSLKPEHKYVPWMTLNGEPLYENIGDFVDLVCKAYKGKAALPKLCYSSVLSQRTMMLEFSYVDEAINH

SEQ ID NO: 82143 - DNA, 747 bp, Arabidopsis thaliana
  misc_feature (1)..(747): Ceres Seq. ID no. 12663593
  misc_feature: MA Experiment ID: 20000315 Result: Down-regulated in Transcription
  misc_feature: MA Experiment 20000315 PARAMETER Experiment Name: At_14day_Shoots-Roots_Sub_P Parameter: Age (day) Value: 14
  misc_feature: MA Experiment 20000315 PARAMETER Experiment Name: At_14day_Shoots-Roots_Sub_P Parameter: Organism Value: A. thaliana
  misc_feature: MA Experiment 20000315 PARAMETER Experiment Name: At_14day_Shoots-Roots_Sub_P Parameter: Plant Line Value: WS
  misc_feature: MA Experiment 20000315 PARAMETER Experiment Name: At_14day_Shoots-Roots_Sub_P Parameter: Tissue Value: Shoots vs. Whole Plant
  misc_feature: MA Experiment ID: 20000355 Result: Down-regulated in Transcription
  misc_feature: MA Experiment 20000355 PARAMETER Experiment Name: At_Siliques_Sub_P Parameter: Age (day) Value: 21
  misc_feature: MA Experiment 20000355 PARAMETER Experiment Name: At_Siliques_Sub_P Parameter: Organism Value: A. thaliana
  misc_feature: MA Experiment 20000355 PARAMETER Experiment Name: At_Siliques_Sub_P Parameter: Plant Line Value: WS
  misc_feature: MA Experiment 20000355 PARAMETER Experiment Name: At_Siliques_Sub_P Parameter: Tissue Value: Less Than 5mm Siliques vs. Whole Plant
atgtccgatcaccagaaaattcatccggtgagcgaccccgaagcgccgccacatccaacggctccccttgttccacgtggttcctcaagatcggaacatggtgatcctaccaagacacagcaagcagcaccgttggatcctccgagggagaagaaaggatcaagaagttgttggtgcagatgcgtgtgctacacgcttcttgtcctctttctccttattgtcatcgtaggagcgatcgttggtatactctaccttgtatttagaccaaaatttccggattacaatattgaccggttacagctaacccggtttcaactaaaccaagacttgagtttatccaccgcatttaacgttaccataaccgcgaaaaatcccaacgagaaaattggaatttactatgaagatggaagcaagattagtgtcttgtacatgcaaaccagaatcagtaatgggtcgttgccaaaattctaccaaggacatgagaatactactattatattggtagaaatgactggttttactcaaaatgcaacaagtttaatgacgacattgcaagagcaacaacggttaacaggaagtataccgttgcggattagagttacccaaccggttcggatcaaactcgggaaattaaagttgatgaaagtaagatttttggttaggtgtggtgtatccgttgatagcttggctgctaacagtgtgattagggttagaagtagtaactgcaaatacaggtttagactataa

SEQ ID NO: 82144 - protein, 248 aa, Arabidopsis thaliana
  peptide (1)..(248): Ceres Seq. ID no. 12663594
  misc_feature (1)..(248): Homolog of NCBI NO: 15239459 NR Description: putative protein; protein id: At5g36970.1
  misc_feature (1)..(248): Homolog of NCBI NO: 10178216 NR Description: gb|AAF23842.1~gene_id:MLF18.15~similar to unknown
  misc_feature (1)..(248): Homolog of NCBI NO: 18408342 NR Description: expressed protein; protein id: At1g65690.1, by cDNA: 21639. [Arabidopsis thaliana]
  misc_feature (1)..(248): Homolog of NCBI NO: 6686408 NR Description: F1E22.7 [Arabidopsis thaliana]
  misc_feature (1)..(248): Homolog of NCBI NO: 15221846 NR Description: hypothetical protein; protein id: At1g54540.1
  misc_feature (3)..(248): Homolog of NCBI NO: 38344198 NR Description: OSJNBa0064G10.14 [Oryza sativa (japonica
  misc_feature (13)..(244): Homolog of NCBI NO: 18401317 NR Description: expressed protein; protein id: At2g27080.1, by cDNA: gi_13877664, supported by cDNA: gi_15450380, supported cDNA: gi_16974488 [Arabidopsis thaliana] >gi|25407856|pir||E84668
  misc_feature (11)..(245): Homolog of NCBI NO: 38636986 NR Description: unknown protein [Oryza sativa (japonica
  misc_feature (51)..(243): Homolog of NCBI NO: 15242167 NR Description: putative protein; protein id: At5g21130.1 thaliana] >gi|29294053|gb|AAO73890.1| hypothetical protein
  misc_feature (49)..(246): Homolog of NCBI NO: 34909192 NR Description: P0425G02.19 [Oryza sativa (japonica
MSDHQKIHPVSDPEAPPHPTAPLVPRGSSRSEHGDPTKTQQAAPLDPPREKKGSRSCWCRCVCYTLLVLFLLIVIVGAIVGILYLVFRPKFPDYNIDRLQLTRFQLNQDLSLSTAFNVTITAKNPNEKIGIYYEDGSKISVLYMQTRISNGSLPKFYQGHENTTIILVEMTGFTQNATSLMTTLQEQQRLTGSIPLRIRVTQPVRIKLGKLKLMKVRFLVRCGVSVDSLAANSVIRVRSSNCKYRFRL

SEQ ID NO: 82145 - DNA, 513 bp, Arabidopsis thaliana
  misc_feature (1)..(513): Ceres Seq. ID no. 12663602
  misc_feature: MA Experiment ID: 20000315 Result: Down-regulated in Transcription
  misc_feature: MA Experiment 20000315 PARAMETER Experiment Name: At_14day_Shoots-Roots_Sub_P Parameter: Age (day) Value: 14
  misc_feature: MA Experiment 20000315 PARAMETER Experiment Name: At_14day_Shoots-Roots_Sub_P Parameter: Organism Value: A. thaliana
  misc_feature: MA Experiment 20000315 PARAMETER Experiment Name: At_14day_Shoots-Roots_Sub_P Parameter: Plant Line Value: WS
  misc_feature: MA Experiment 20000315 PARAMETER Experiment Name: At_14day_Shoots-Roots_Sub_P Parameter: Tissue Value: Shoots vs. Whole Plant
  misc_feature: MA Experiment ID: 20000347 Result: Up-regulated in Transcription
  misc_feature: MA Experiment 20000347 PARAMETER Experiment Name: At_2mM_SA_Sub_P Parameter: Age (day) Value: 14
  misc_feature: MA Experiment 20000347 PARAMETER Experiment Name: At_2mM_SA_Sub_P Parameter: Organism Value: A. thaliana
  misc_feature: MA Experiment 20000347 PARAMETER Experiment Name: At_2mM_SA_Sub_P Parameter: Plant Line Value: WS
  misc_feature: MA Experiment 20000347 PARAMETER Experiment Name: At_2mM_SA_Sub_P Parameter: Timepoint (hr) Value: 6
  misc_feature: MA Experiment 20000347 PARAMETER Experiment Name: At_2mM_SA_Sub_P Parameter: Tissue Value: Aerial
  misc_feature: MA Experiment 20000347 PARAMETER Experiment Name: At_2mM_SA_Sub_P Parameter: Treatment Value: 2mM SA vs. No Treatment
  misc_feature: MA Experiment ID: 20000355 Result: Down-regulated in Transcription
  misc_feature: MA Experiment 20000355 PARAMETER Experiment Name: At_Siliques_Sub_P Parameter: Age (day) Value: 21
  misc_feature: MA Experiment 20000355 PARAMETER Experiment Name: At_Siliques_Sub_P Parameter: Organism Value: A. thaliana
  misc_feature: MA Experiment 20000355 PARAMETER Experiment Name: At_Siliques_Sub_P Parameter: Plant Line Value: WS
  misc_feature: MA Experiment 20000355 PARAMETER Experiment Name: At_Siliques_Sub_P Parameter: Tissue Value: Less Than 5mm Siliques vs. Whole Plant
  misc_feature: MA Experiment ID: 20000440 Result: Down-regulated in Transcription
  misc_feature: MA Experiment 20000440 PARAMETER Experiment Name: At_Closed-Flower__Sub_P Parameter: Tissue Value: Closed Flower vs. Whole Plant
atggatcagatactgaacaaagttggctcttactggttagggcaaaaggcaaacaaagagttcaattccgtcggtgacgatttcaattcattgtctagcagtattgaaggaggtaccaagtggttagtcaacaaactcaaaggaaaaatgcagaagccattacctgaattgttgaaggaatttggtctaccagttgggatcttcccacaggatgctacaaactatgaattcaacgaagagacgggtaaattgactgtattcatccctgagacatgtgaagttgggtacagagattcatcggttctgcggttttcaactacggtaacgggttacttggagaaagggaagctagcagaagtggaaggcatgaagacaaaggttatgatatgggtgaaagtgacttgtatctcagctgattcatcaaaggtatatttcacagccgggattaagaaaagcagaagcagagatgcttatgaggtaatacgacctggtgttggtgttgataaattctaa

SEQ ID NO: 82146 - protein, 170 aa, Arabidopsis thaliana
  peptide (1)..(170): Ceres Seq. ID no. 12663603
  misc_feature (32)..(170): Pfam Name: Protein of unknown function, DUF538 Pfam Description: Protein of unknown function, DUF538
  misc_feature (1)..(170): Homolog of NCBI NO: 15240103 NR Description: putative protein; protein id: At5g37070.1 thaliana] >gi|10177986|dbj|BAB11359.1|
  misc_feature (1)..(170): Homolog of NCBI NO: 18398279 NR Description: expressed protein; protein id: At3g08890.1, by cDNA: 20180. [Arabidopsis thaliana] unknown protein [Arabidopsis thaliana]
  misc_feature (1)..(170): Homolog of NCBI NO: 15241019 NR Description: putative protein; protein id: At5g01610.1, by cDNA: 21740. [Arabidopsis thaliana] >gi|11290054|pir||T48182
  misc_feature (1)..(170): Homolog of NCBI NO: 28466909 NR Description: At5g01610 [Arabidopsis thaliana]
  misc_feature (1)..(170): Homolog of NCBI NO: 40642817 NR Description: cp protein [Celosia cristata]
  misc_feature (1)..(170): Homolog of NCBI NO: 34914210 NR Description: OSJNBb0049O23.18 [Oryza sativa (japonica
  misc_feature (7)..(167): Homolog of NCBI NO: 18395537 NR Description: expressed protein; protein id: At2g03350.1, by cDNA: 1697. [Arabidopsis thaliana] >gi|25364434|pir||D84447
  misc_feature (7)..(167): Homolog of NCBI NO: 21553803 NR Description: unknown [Arabidopsis thaliana]
  misc_feature (57)..(168): Homolog of NCBI NO: 18379014 NR Description: Expressed protein; protein id: At1g02816.1, by cDNA: 28445., supported by cDNA: gi_14423479, supported by
  misc_feature (51)..(149): Homolog of NCBI NO: 15235335 NR Description: putative protein; protein id: At4g02360.1
MDQILNKVGSYWLGQKANKEFNSVGDDFNSLSSSIEGGTKWLVNKLKGKMQKPLPELLKEFGLPVGIFPQDATNYEFNEETGKLTVFIPETCEVGYRDSSVLRFSTTVTGYLEKGKLAEVEGMKTKVMIWVKVTCISADSSKVYFTAGIKKSRSRDAYEVIRPGVGVDKF

SEQ ID NO: 82147 - protein, 121 aa, Arabidopsis thaliana
  peptide (1)..(121): Ceres Seq. ID no. 12663604
  misc_feature (1)..(121): Pfam Name: Protein of unknown function, DUF538 Pfam Description: Protein of unknown function, DUF538
  misc_feature (1)..(121): Homolog of NCBI NO: 15240103 NR Description: putative protein; protein id: At5g37070.1 thaliana] >gi|10177986|dbj|BAB11359.1|
  misc_feature (1)..(121): Homolog of NCBI NO: 18398279 NR Description: expressed protein; protein id: At3g08890.1, by cDNA: 20180. [Arabidopsis thaliana] unknown protein [Arabidopsis thaliana]
  misc_feature (1)..(121): Homolog of NCBI NO: 15241019 NR Description: putative protein; protein id: At5g01610.1, by cDNA: 21740. [Arabidopsis thaliana] >gi|11290054|pir||T48182
  misc_feature (1)..(121): Homolog of NCBI NO: 28466909 NR Description: At5g01610 [Arabidopsis thaliana]
  misc_feature (1)..(121): Homolog of NCBI NO: 40642817 NR Description: cp protein [Celosia cristata]
  misc_feature (1)..(121): Homolog of NCBI NO: 34914210 NR Description: OSJNBb0049O23.18 [Oryza sativa (japonica
  misc_feature (1)..(118): Homolog of NCBI NO: 18395537 NR Description: expressed protein; protein id: At2g03350.1, by cDNA: 1697. [Arabidopsis thaliana] >gi|25364434|pir||D84447
  misc_feature (1)..(118): Homolog of NCBI NO: 21553803 NR Description: unknown [Arabidopsis thaliana]
  misc_feature (8)..(119): Homolog of NCBI NO: 18379014 NR Description: Expressed protein; protein id: At1g02816.1, by cDNA: 28445., supported by cDNA: gi_14423479, supported by
  misc_feature (2)..(100): Homolog of NCBI NO: 15235335 NR Description: putative protein; protein id: At4g02360.1
MQKPLPELLKEFGLPVGIFPQDATNYEFNEETGKLTVFIPETCEVGYRDSSVLRFSTTVTGYLEKGKLAEVEGMKTKVMIWVKVTCISADSSKVYFTAGIKKSRSRDAYEVIRPGVGVDKF

SEQ ID NO: 82148 - DNA, 1966 bp, Arabidopsis thaliana
  misc_feature (1)..(1966): Ceres Seq. ID no. 12663682
  misc_feature: MA Experiment ID: 20000169 Result: Up-regulated in Transcription
  misc_feature: MA Experiment 20000169 PARAMETER Experiment Name: At_100uM_ABA_P Parameter: Age (day) Value: 14
  misc_feature: MA Experiment 20000169 PARAMETER Experiment Name: At_100uM_ABA_P Parameter: Organism Value: A. thaliana
  misc_feature: MA Experiment 20000169 PARAMETER Experiment Name: At_100uM_ABA_P Parameter: Plant Line Value: WS
  misc_feature: MA Experiment 20000169 PARAMETER Experiment Name: At_100uM_ABA_P Parameter: Timepoint (hr) Value: 6
  misc_feature: MA Experiment 20000169 PARAMETER Experiment Name: At_100uM_ABA_P Parameter: Tissue Value: Aerial
  misc_feature: MA Experiment 20000169 PARAMETER Experiment Name: At_100uM_ABA_P Parameter: Treatment Value: 100uM ABA vs. No Treatment
  misc_feature: MA Experiment ID: 20000171 Result: Down-regulated in Transcription
  misc_feature: MA Experiment 20000171 PARAMETER Experiment Name: At_42deg_Heat_P Parameter: Age (day) Value: 14
  misc_feature: MA Experiment 20000171 PARAMETER Experiment Name: At_42deg_Heat_P Parameter: Organism Value: A. thaliana
  misc_feature: MA Experiment 20000171 PARAMETER Experiment Name: At_42deg_Heat_P Parameter: Plant Line Value: WS
  misc_feature: MA Experiment 20000171 PARAMETER Experiment Name: At_42deg_Heat_P Parameter: Temperature (deg C) Value: 42 vs. 22
  misc_feature: MA Experiment 20000171 PARAMETER Experiment Name: At_42deg_Heat_P Parameter: Timepoint (hr) Value: 1
  misc_feature: MA Experiment 20000171 PARAMETER Experiment Name: At_42deg_Heat_P Parameter: Tissue Value: Aerial
  misc_feature: MA Experiment ID: 20000173 Result: Down-regulated in Transcription
  misc_feature: MA Experiment 20000173 PARAMETER Experiment Name: At_42deg_Heat_P Parameter: Age (day) Value: 14
  misc_feature: MA Experiment 20000173 PARAMETER Experiment Name: At_42deg_Heat_P Parameter: Organism Value: A. thaliana
  misc_feature: MA Experiment 20000173 PARAMETER Experiment Name: At_42deg_Heat_P Parameter: Plant Line Value: WS
  misc_feature: MA Experiment 20000173 PARAMETER Experiment Name: At_42deg_Heat_P Parameter: Temperature (deg C) Value: 42 vs. 22
  misc_feature: MA Experiment 20000173 PARAMETER Experiment Name: At_42deg_Heat_P Parameter: Timepoint (hr) Value: 6
  misc_feature: MA Experiment 20000173 PARAMETER Experiment Name: At_42deg_Heat_P Parameter: Tissue Value: Aerial
  misc_feature: MA Experiment ID: 20000227 Result: Down-regulated in Transcription
  misc_feature: MA Experiment 20000227 PARAMETER Experiment Name: At_Root-Tips-vs-Tops_P Parameter: Tissue Value: Root Tips vs. Root Tops
  misc_feature: MA Experiment ID: 20000234 Result: Down-regulated in Transcription
  misc_feature: MA Experiment 20000234 PARAMETER Experiment Name: At_Siliques_P Parameter: Age (day) Value: 21
  misc_feature: MA Experiment 20000234 PARAMETER Experiment Name: At_Siliques_P Parameter: Organism Value: A. thaliana
  misc_feature: MA Experiment 20000234 PARAMETER Experiment Name: At_Siliques_P Parameter: Plant Line Value: WS
  misc_feature: MA Experiment 20000234 PARAMETER Experiment Name: At_Siliques_P Parameter: Tissue Value: Less Than 5mm Siliques vs. Whole Plant
  misc_feature: MA Experiment ID: 20000235 Result: Down-regulated in Transcription
  misc_feature: MA Experiment 20000235 PARAMETER Experiment Name: At_Siliques_P Parameter: Age (day) Value: 21
  misc_feature: MA Experiment 20000235 PARAMETER Experiment Name: At_Siliques_P Parameter: Organism Value: A. thaliana
  misc_feature: MA Experiment 20000235 PARAMETER Experiment Name: At_Siliques_P Parameter: Plant Line Value: WS
  misc_feature: MA Experiment 20000235 PARAMETER Experiment Name: At_Siliques_P Parameter: Tissue Value: 5-10mm Siliques vs. Whole Plant
  misc_feature: MA Experiment ID: 20000264 Result: Down-regulated in Transcription
  misc_feature: MA Experiment 20000264 PARAMETER Experiment Name: At_Open_Flower_P Parameter: Age (day) Value: 21
  misc_feature: MA Experiment 20000264 PARAMETER Experiment Name: At_Open_Flower_P Parameter: Plant Line Value: WS
  misc_feature: MA Experiment 20000264 PARAMETER Experiment Name: At_Open_Flower_P Parameter: Tissue Value: Open Flower vs. Whole Plant
  misc_feature: MA Experiment ID: 20000265 Result: Down-regulated in Transcription
  misc_feature: MA Experiment 20000265 PARAMETER Experiment Name: At_Open_Flower_P Parameter: Age (day) Value: 21
  misc_feature: MA Experiment 20000265 PARAMETER Experiment Name: At_Open_Flower_P Parameter: Plant Line Value: WS
  misc_feature: MA Experiment 20000265 PARAMETER Experiment Name: At_Open_Flower_P Parameter: Tissue Value: Closed Flower vs. Whole Plant
  misc_feature: MA Experiment ID: 20000286 Result: Down-regulated in Transcription
  misc_feature: MA Experiment 20000286 PARAMETER Experiment Name: At_Open_Flower_P Parameter: Age (day) Value: 21
  misc_feature: MA Experiment 20000286 PARAMETER Experiment Name: At_Open_Flower_P Parameter: Plant Line Value: WS
  misc_feature: MA Experiment 20000286 PARAMETER Experiment Name: At_Open_Flower_P Parameter: Tissue Value: Half Open vs. Whole Plant
  misc_feature: MA Experiment ID: 20000453 Result: Up-regulated in Transcription
  misc_feature: MA Experiment 20000453 PARAMETER Experiment Name: At_100uM_ABA_P Parameter: Age (day) Value: 15
  misc_feature: MA Experiment 20000453 PARAMETER Experiment Name: At_100uM_ABA_P Parameter: Organism Value: A. thaliana
  misc_feature: MA Experiment 20000453 PARAMETER Experiment Name: At_100uM_ABA_P Parameter: Plant Line Value: WS
  misc_feature: MA Experiment 20000453 PARAMETER Experiment Name: At_100uM_ABA_P Parameter: Timepoint (hr) Value: 24
  misc_feature: MA Experiment 20000453 PARAMETER Experiment Name: At_100uM_ABA_P Parameter: Tissue Value: Aerial
  misc_feature: MA Experiment 20000453 PARAMETER Experiment Name: At_100uM_ABA_P Parameter: Treatment Value: 100uM ABA vs. No Treatment
  misc_feature: MA Experiment ID: 20000495 Result: Down-regulated in Transcription
  misc_feature: MA Experiment 20000495 PARAMETER Experiment Name: At_Guard_Cells_P Parameter: Harvest Date Value: 8/2/2002
  misc_feature: MA Experiment 20000495 PARAMETER Experiment Name: At_Guard_Cells_P Parameter: Organism Value: A. thaliana
  misc_feature: MA Experiment 20000495 PARAMETER Experiment Name: At_Guard_Cells_P Parameter: Tissue Value: Guard Cells vs. Leaves
  misc_feature: MA Experiment ID: 20000794 Result: Down-regulated in Transcription
  misc_feature: MA Experiment 20000794 PARAMETER Experiment Name: At_Petals_P Parameter: Age (day) Value: 23-25 days
  misc_feature: MA Experiment 20000794 PARAMETER Experiment Name: At_Petals_P Parameter: Plant Line Value: WS
  misc_feature: MA Experiment 20000794 PARAMETER Experiment Name: At_Petals_P Parameter: Tissue Value: Petals vs. Whole plant
  misc_feature: MA Experiment ID: 20001248 Result: Down-regulated in Transcription
  misc_feature: MA Experiment 20001248 PARAMETER Experiment Name: At_Far-red-induction_P Parameter: Age (day) Value: 7
  misc_feature: MA Experiment 20001248 PARAMETER Experiment Name: At_Far-red-induction_P Parameter: Light Value: Far-red vs. White
  misc_feature: MA Experiment 20001248 PARAMETER Experiment Name: At_Far-red-induction_P Parameter: Organism Value: A. thaliana
  misc_feature: MA Experiment 20001248 PARAMETER Experiment Name: At_Far-red-induction_P Parameter: Plant Line Value: Columbia
  misc_feature: MA Experiment 20001248 PARAMETER Experiment Name: At_Far-red-induction_P Parameter: Timepoint (hr) Value: 4
  misc_feature: MA Experiment 20001248 PARAMETER Experiment Name: At_Far-red-induction_P Parameter: Tissue Value: Whole Plant
  misc_feature: MA Experiment ID: 20001458 Result: Up-regulated in Transcription
  misc_feature: MA Experiment 20001458 PARAMETER Experiment Name: At_50mM_NH4NO3_L-to-H_P Parameter: Age (day) Value: Undefined
  misc_feature: MA Experiment 20001458 PARAMETER Experiment Name: At_50mM_NH4NO3_L-to-H_P Parameter: Organism Value: Undefined
  misc_feature: MA Experiment 20001458 PARAMETER Experiment Name: At_50mM_NH4NO3_L-to-H_P Parameter: Plant Line Value: Undefined
  misc_feature: MA Experiment 20001458 PARAMETER Experiment Name: At_50mM_NH4NO3_L-to-H_P Parameter: Timepoint (hr) Value: 2
  misc_feature: MA Experiment 20001458 PARAMETER Experiment Name: At_50mM_NH4NO3_L-to-H_P Parameter: Tissue Value: Siliques
  misc_feature: MA Experiment 20001458 PARAMETER Experiment Name: At_50mM_NH4NO3_L-to-H_P Parameter: Treatment Value: 50mM NH4NO3 vs. 100mM Manitol
  misc_feature: MA Experiment ID: 20001459 Result: Up-regulated in Transcription
  misc_feature: MA Experiment 20001459 PARAMETER Experiment Name: At_50mM_NH4NO3_L-to-H_P Parameter: Age (day) Value: Undefined
  misc_feature: MA Experiment 20001459 PARAMETER Experiment Name: At_50mM_NH4NO3_L-to-H_P Parameter: Organism Value: Undefined
  misc_feature: MA Experiment 20001459 PARAMETER Experiment Name: At_50mM_NH4NO3_L-to-H_P Parameter: Plant Line Value: Undefined
  misc_feature: MA Experiment 20001459 PARAMETER Experiment Name: At_50mM_NH4NO3_L-to-H_P Parameter: Timepoint (hr) Value: 4
  misc_feature: MA Experiment 20001459 PARAMETER Experiment Name: At_50mM_NH4NO3_L-to-H_P Parameter: Tissue Value: Siliques
  misc_feature: MA Experiment 20001459 PARAMETER Experiment Name: At_50mM_NH4NO3_L-to-H_P Parameter: Treatment Value: 50mM NH4NO3 vs. 100mM Manitol
  misc_feature: MA Experiment ID: 20001904 Result: Up-regulated in Transcription
  misc_feature: MA Experiment 20001904 PARAMETER Experiment Name: At_Drought_Reproduction_P Parameter: Age (day) Value: 37
  misc_feature: MA Experiment 20001904 PARAMETER Experiment Name: At_Drought_Reproduction_P Parameter: Organism Value: A. thaliana
  misc_feature: MA Experiment 20001904 PARAMETER Experiment Name: At_Drought_Reproduction_P Parameter: Plant Line Value: WS
  misc_feature: MA Experiment 20001904 PARAMETER Experiment Name: At_Drought_Reproduction_P Parameter: Timepoint (day) Value: 7
  misc_feature: MA Experiment 20001904 PARAMETER Experiment Name: At_Drought_Reproduction_P Parameter: Tissue Value: Rosettes
  misc_feature: MA Experiment 20001904 PARAMETER Experiment Name: At_Drought_Reproduction_P Parameter: Treatment Value: Drought vs. No Drought
  misc_feature: MA Experiment ID: 20001905 Result: Up-regulated in Transcription
  misc_feature: MA Experiment 20001905 PARAMETER Experiment Name: At_Drought_Reproduction_P Parameter: Age (day) Value: 40
  misc_feature: MA Experiment 20001905 PARAMETER Experiment Name: At_Drought_Reproduction_P Parameter: Organism Value: A. thaliana
  misc_feature: MA Experiment 20001905 PARAMETER Experiment Name: At_Drought_Reproduction_P Parameter: Plant Line Value: WS
  misc_feature: MA Experiment 20001905 PARAMETER Experiment Name: At_Drought_Reproduction_P Parameter: Timepoint (day) Value: 10
  misc_feature: MA Experiment 20001905 PARAMETER Experiment Name: At_Drought_Reproduction_P Parameter: Tissue Value: Rosettes
  misc_feature: MA Experiment 20001905 PARAMETER Experiment Name: At_Drought_Reproduction_P Parameter: Treatment Value: Drought vs. No Drought
aacaaaacttggtttaatgaaatttgacttgatcttgtttaaaaaaacgtctcacgtccacacgttagcttttccaatccaaaacccctaaagagtagaaaaccaaaataaccatttttaattcccagcctctttttatacgtagtctaaattgacaaacacatcattcgctctctttctcttctttctctagctctcttggttttttgctaaaaacagagcattttctctctagctctcactgtttctttaccataagtttcgtcatattagtacatgcaagtgtaagggatggtgatggaggaaggaagaagcatagaagaagggcttttgcagctcaagaacaaaaacgacgattcagagtgtcgtattactgcttgtgttatccttagcacttttgtcgccgtttgtggctccttctcttttggtgttgctactggttacacttcaggtgctgagacaggagttatgaaggacttggatctttctatcgcgcaattttcagcttttggctcattcgccactttaggagctgcaattggtgcactgttctgcggtaatctggcaatggtcattggcagaagagggacaatgtgggtctccgatttcctatgcatcactggttggctctccatcgcttttgctaaggaagtagtgttgctgaacttcggaagaatcatttcagggataggtttcggcttgacgagctatgtggtacctgtctacatagcagaaattacgccaaaacatgttcgtggtacatttacgttttcaaaccagcttcttcaaaacgctggactcgccatgatttatttctgtgggaatttcatcacttggaggacgttggctttattaggtgctttaccatgcttcattcaagtaatcggtttattcttcgtgccagagtctccaagatggctggccaaagttggctccgataaagaactagaaaattcactgtttcggcttagaggaagagatgctgatatttcacgtgaagcctcagaaattcaagtaatgaccaaaatggtggaaaatgattcaaagtcgagtttttcagatttgttccagagaaagtatagatacaccctcgtggtaggaatcgggctaatgttgatacaacaattctcaggaagtgctgctgtaatctcttatgcaagtaccatttttagaaaagctggtttttcggtggccattggaacgacgatgctaggtatcttcgtgattccaaaagccatgattggcctcattcttgtcgataaatggggcagacgtcctctcctgatgacttcagcgtttgggatgagcatgacttgcatgctacttggggtcgccttcacattacagaaaatgcaattgctttcggaactaactccaatattatcgtttatatgcgtaatgatgtatattgcaacttatgcaataggcttgggaggtctaccttgggtaattatgtcggagatatttccaataaatataaaagtaactgcaggaagtatagttacgttagtctcattttcaagtagttcaatcgtcacttacgctttcaactttctgttcgaatggagcactcaaggaacgtttttcatattcgcgggtatcggtggagcagcgttgctttttatatggttgctcgttccagaaacgaaaggattatcactcgaagaaatacaagtttcacttattcatcagcccgatgaaagaaatcaaacttaatttgaattattttattttattataaaaatgatcaaattcagtttatggtgttatatttgtttatttacaaacaaggatttttttttttcattatgtaattactactttatttttctgggtaattagccccatttttatgatgtatatttacgagatgtaaaacttggcctacgtacatgtgtattttatctctaaaattgcaaatgtaatatttttcggacatatattaaagaagagattgatttctagt

SEQ ID NO: 82149 - protein, 474 aa, Arabidopsis thaliana
  peptide (1)..(474): Ceres Seq. ID no. 12663683
  misc_feature (33)..(411): Pfam Name: Sugar (and other) transporter Pfam Description: Sugar (and other) transporter
  misc_feature (1)..(474): Homolog of NCBI NO: 18421106 NR Description: sugar transporter-like protein; protein id: supported by cDNA: gi_14585698, supported by cDNA: gi_15294181
  misc_feature (1)..(474): Homolog of NCBI NO: 14585699 NR Description: sugar-porter family protein 1 [Arabidopsis
  misc_feature (1)..(474): Homolog of NCBI NO: 18421108 NR Description: sugar transporter-like protein; protein id:
  misc_feature (1)..(464): Homolog of NCBI NO: 18397141 NR Description: Expressed protein; protein id: At3g05165.1
  misc_feature (9)..(464): Homolog of NCBI NO: 18397139 NR Description: putative sugar transporter; protein id: supported by cDNA: gi_16604315 [Arabidopsis thaliana] AT3g05160/T12H1_13 [Arabidopsis thaliana]
  misc_feature (1)..(434): Homolog of NCBI NO: 20260272 NR Description: putative sugar transporter [Arabidopsis thaliana]
  misc_feature (172)..(474): Homolog of NCBI NO: 15294182 NR Description: AT5g27350/F21A20_60 [Arabidopsis thaliana]
  misc_feature (1)..(411): Homolog of NCBI NO: 6729026 NR Description: putative sugar transporter [Arabidopsis thaliana]
  misc_feature (3)..(466): Homolog of NCBI NO: 22330860 NR Description: sugar transporter, putative; protein id: supported by cDNA: gi_17380763, supported by cDNA: gi_20259596 thaliana] >gi|17380764|gb|AAL36212.1| putative sugar transporter
  misc_feature (1)..(464): Homolog of NCBI NO: 18390957 NR Description: putative sugar transport protein, ERD6; protein At1g08920.1, supported by cDNA: gi_14194108 [Arabidopsis >gi|14194109|gb|AAK56249.1|AF367260_1 At1g08920/F7G19_20
MVMEEGRSIEEGLLQLKNKNDDSECRITACVILSTFVAVCGSFSFGVATGYTSGAETGVMKDLDLSIAQFSAFGSFATLGAAIGALFCGNLAMVIGRRGTMWVSDFLCITGWLSIAFAKEVVLLNFGRIISGIGFGLTSYVVPVYIAEITPKHVRGTFTFSNQLLQNAGLAMIYFCGNFITWRTLALLGALPCFIQVIGLFFVPESPRWLAKVGSDKELENSLFRLRGRDADISREASEIQVMTKMVENDSKSSFSDLFQRKYRYTLVVGIGLMLIQQFSGSAAVISYASTIFRKAGFSVAIGTTMLGIFVIPKAMIGLILVDKWGRRPLLMTSAFGMSMTCMLLGVAFTLQKMQLLSELTPILSFICVMMYIATYAIGLGGLPWVIMSEIFPINIKVTAGSIVTLVSFSSSSIVTYAFNFLFEWSTQGTFFIFAGIGGAALLFIWLLVPETKGLSLEEIQVSLIHQPDERNQT

SEQ ID NO: 82150 - protein, 472 aa, Arabidopsis thaliana
  peptide (1)..(472): Ceres Seq. ID no. 12663684
  misc_feature (31)..(409): Pfam Name: Sugar (and other) transporter Pfam Description: Sugar (and other) transporter
  misc_feature (1)..(472): Homolog of NCBI NO: 18421106 NR Description: sugar transporter-like protein; protein id: supported by cDNA: gi_14585698, supported by cDNA: gi_15294181
  misc_feature (1)..(472): Homolog of NCBI NO: 14585699 NR Description: sugar-porter family protein 1 [Arabidopsis
  misc_feature (1)..(472): Homolog of NCBI NO: 18421108 NR Description: sugar transporter-like protein; protein id:
  misc_feature (1)..(462): Homolog of NCBI NO: 18397141 NR Description: Expressed protein; protein id: At3g05165.1
  misc_feature (7)..(462): Homolog of NCBI NO: 18397139 NR Description: putative sugar transporter; protein id: supported by cDNA: gi_16604315 [Arabidopsis thaliana] AT3g05160/T12H1_13 [Arabidopsis thaliana]
  misc_feature (1)..(432): Homolog of NCBI NO: 20260272 NR Description: putative sugar transporter [Arabidopsis thaliana]
  misc_feature (170)..(472): Homolog of NCBI NO: 15294182 NR Description: AT5g27350/F21A20_60 [Arabidopsis thaliana]
  misc_feature (1)..(409): Homolog of NCBI NO: 6729026 NR Description: putative sugar transporter [Arabidopsis thaliana]
  misc_feature (1)..(464): Homolog of NCBI NO: 22330860 NR Description: sugar transporter, putative; protein id: supported by cDNA: gi_17380763, supported by cDNA: gi_20259596 thaliana] >gi|17380764|gb|AAL36212.1| putative sugar transporter
  misc_feature (1)..(462): Homolog of NCBI NO: 18390957 NR Description: putative sugar transport protein, ERD6; protein At1g08920.1, supported by cDNA: gi_14194108 [Arabidopsis >gi|14194109|gb|AAK56249.1|AF367260_1 At1g08920/F7G19_20
MEEGRSIEEGLLQLKNKNDDSECRITACVILSTFVAVCGSFSFGVATGYTSGAETGVMKDLDLSIAQFSAFGSFATLGAAIGALFCGNLAMVIGRRGTMWVSDFLCITGWLSIAFAKEVVLLNFGRIISGIGFGLTSYVVPVYIAEITPKHVRGTFTFSNQLLQNAGLAMIYFCGNFITWRTLALLGALPCFIQVIGLFFVPESPRWLAKVGSDKELENSLFRLRGRDADISREASEIQVMTKMVENDSKSSFSDLFQRKYRYTLVVGIGLMLIQQFSGSAAVISYASTIFRKAGFSVAIGTTMLGIFVIPKAMIGLILVDKWGRRPLLMTSAFGMSMTCMLLGVAFTLQKMQLLSELTPILSFICVMMYIATYAIGLGGLPWVIMSEIFPINIKVTAGSIVTLVSFSSSSIVTYAFNFLFEWSTQGTFFIFAGIGGAALLFIWLLVPETKGLSLEEIQVSLIHQPDERNQT

SEQ ID NO: 82151 - protein, 415 aa, Arabidopsis thaliana
  peptide (1)..(415): Ceres Seq. ID no. 12663685
  misc_feature (1)..(352): Pfam Name: Sugar (and other) transporter Pfam Description: Sugar (and other) transporter
  misc_feature (1)..(415): Homolog of NCBI NO: 18421106 NR Description: sugar transporter-like protein; protein id: supported by cDNA: gi_14585698, supported by cDNA: gi_15294181
  misc_feature (1)..(415): Homolog of NCBI NO: 14585699 NR Description: sugar-porter family protein 1 [Arabidopsis
  misc_feature (1)..(415): Homolog of NCBI NO: 18421108 NR Description: sugar transporter-like protein; protein id:
  misc_feature (1)..(405): Homolog of NCBI NO: 18397141 NR Description: Expressed protein; protein id: At3g05165.1
  misc_feature (1)..(405): Homolog of NCBI NO: 18397139 NR Description: putative sugar transporter; protein id: supported by cDNA: gi_16604315 [Arabidopsis thaliana] AT3g05160/T12H1_13 [Arabidopsis thaliana]
  misc_feature (1)..(375): Homolog of NCBI NO: 20260272 NR Description: putative sugar transporter [Arabidopsis thaliana]
  misc_feature (113)..(415): Homolog of NCBI NO: 15294182 NR Description: AT5g27350/F21A20_60 [Arabidopsis thaliana]
  misc_feature (1)..(352): Homolog of NCBI NO: 6729026 NR Description: putative sugar transporter [Arabidopsis thaliana]
  misc_feature (1)..(407): Homolog of NCBI NO: 22330860 NR Description: sugar transporter, putative; protein id: supported by cDNA: gi_17380763, supported by cDNA: gi_20259596 thaliana] >gi|17380764|gb|AAL36212.1| putative sugar transporter
  misc_feature (1)..(405): Homolog of NCBI NO: 18390957 NR Description: putative sugar transport protein, ERD6; protein At1g08920.1, supported by cDNA: gi_14194108 [Arabidopsis >gi|14194109|gb|AAK56249.1|AF367260_1 At1g08920/F7G19_20
MKDLDLSIAQFSAFGSFATLGAAIGALFCGNLAMVIGRRGTMWVSDFLCITGWLSIAFAKEVVLLNFGRIISGIGFGLTSYVVPVYIAEITPKHVRGTFTFSNQLLQNAGLAMIYFCGNFITWRTLALLGALPCFIQVIGLFFVPESPRWLAKVGSDKELENSLFRLRGRDADISREASEIQVMTKMVENDSKSSFSDLFQRKYRYTLVVGIGLMLIQQFSGSAAVISYASTIFRKAGFSVAIGTTMLGIFVIPKAMIGLILVDKWGRRPLLMTSAFGMSMTCMLLGVAFTLQKMQLLSELTPILSFICVMMYIATYAIGLGGLPWVIMSEIFPINIKVTAGSIVTLVSFSSSSIVTYAFNFLFEWSTQGTFFIFAGIGGAALLFIWLLVPETKGLSLEEIQVSLIHQPDERNQT

SEQ ID NO: 82152 - DNA, 1110 bp, Arabidopsis thaliana
  misc_feature (1)..(1110): Ceres Seq. ID no. 12663692
atggcggcggagacggaggcagaatcacagtaccttaatgtactctctgctttcctcgccatcgaaccggtggactccgtcatcactctcgctagagggtgcactggaggatcaattactgagaacgcccagagatttttctgggaaatttgcgttgaagctgctgcgaatggtaacggatcatacgcgaagaagttactgaagaaactcataaatgaagttgagttagagaatggtgaagtattggatgaagtgtatgaagagtatgctctttacatgttaacttctaaggaagatatattggtgaaagaaaacataaggataaccaaattcatttcttttcttttccctgaaggttcgtacaaacacccgagttgtccaaggtcgaggaaattagttattccgctgcattgttcgttgaacatgcttgaaggagataccgggtgttccatctggccatcgagtctgtttctgtcagaatttgttttgtcatttccagagttattcgccaataaagcctgttttgaggttggttctggagttggtatggtcgggatttgccttgcacatgtaaaggccaaagaggtgatactaacagacggagatcttttaactttgtctaacatgaagcttaatttggagagaaatcacttaaactatgatgacgagtttctcaaacaacccggagaagctcagagtacacgagttaaatgcactcatcttccatgggaaactgcatcggaaagtgaactaagccaatatcgtccagatattgttctaggcgcagatgtaatctatgatccgtcatgtctccctcatctacttcgggtgctagtagcccttttaaagaacccacccaaaagaggaaatggctctctcgagactgaagacagagacacgacacaagaagaacacagtcccgcggtggcttatatcgcatctgtgatccgcaatgtagacacttttaatgtgtgcttgacacttgcagaccaaatggacctttccatcacagacgtgaccgcagaacttacgcctcgctttgagcttttaccatatatgcattcgtatgaccgctcaaccgttcggctcttctccatatcctccagataa

SEQ ID NO: 82153 - protein, 369 aa, Arabidopsis thaliana
  peptide (1)..(369): Ceres Seq. ID no. 12663693
  misc_feature (1)..(369): Homolog of NCBI NO: 15240919 NR Description: putative protein; protein id: At5g27400.1 thaliana] >gi|29029094|gb|AAO64926.1| At5g27400 [Arabidopsis
  misc_feature (148)..(366): Homolog of NCBI NO: 28829124 NR Description: similar to putative protein; protein id:
  misc_feature (145)..(278): Homolog of NCBI NO: 14585877 NR Description: hypothetical protein SB153 [Homo sapiens]
  misc_feature (145)..(278): Homolog of NCBI NO: 14603247 NR Description: Similar to RIKEN cDNA 5730409G15 gene [Homo
  misc_feature (62)..(281): Homolog of NCBI NO: 37550662 NR Description: similar to ectonucleotide
  misc_feature (145)..(278): Homolog of NCBI NO: 37541807 NR Description: similar to hypothetical protein FLJ10661 [Homo
  misc_feature (145)..(278): Homolog of NCBI NO: 30149259 NR Description: similar to CG7889-PA [Homo sapiens]
  misc_feature (145)..(281): Homolog of NCBI NO: 29835170 NR Description: Unknown (protein for MGC:59002) [Mus musculus]
  misc_feature (65)..(278): Homolog of NCBI NO: 37549678 NR Description: similar to CG7889-PA [Homo sapiens]
  misc_feature (98)..(278): Homolog of NCBI NO: 37543704 NR Description: similar to CG7889-PA [Homo sapiens]
MAAETEAESQYLNVLSAFLAIEPVDSVITLARGCTGGSITENAQRFFWEICVEAAANGNGSYAKKLLKKLINEVELENGEVLDEVYEEYALYMLTSKEDILVKENIRITKFISFLFPEGSYKHPSCPRSRKLVIPLHCSLNMLEGDTGCSIWPSSLFLSEFVLSFPELFANKACFEVGSGVGMVGICLAHVKAKEVILTDGDLLTLSNMKLNLERNHLNYDDEFLKQPGEAQSTRVKCTHLPWETASESELSQYRPDIVLGADVIYDPSCLPHLLRVLVALLKNPPKRGNGSLETEDRDTTQEEHSPAVAYIASVIRNVDTFNVCLTLADQMDLSITDVTAELTPRFELLPYMHSYDRSTVRLFSISSR

SEQ ID NO: 82154 - protein, 277 aa, Arabidopsis thaliana
  peptide (1)..(277): Ceres Seq. ID no. 12663694
  misc_feature (1)..(277): Homolog of NCBI NO: 15240919 NR Description: putative protein; protein id: At5g27400.1 thaliana] >gi|29029094|gb|AAO64926.1| At5g27400 [Arabidopsis
  misc_feature (56)..(274): Homolog of NCBI NO: 28829124 NR Description: similar to putative protein; protein id:
  misc_feature (53)..(186): Homolog of NCBI NO: 14585877 NR Description: hypothetical protein SB153 [Homo sapiens]
  misc_feature (53)..(186): Homolog of NCBI NO: 14603247 NR Description: Similar to RIKEN cDNA 5730409G15 gene [Homo
  misc_feature (1)..(189): Homolog of NCBI NO: 37550662 NR Description: similar to ectonucleotide
  misc_feature (53)..(186): Homolog of NCBI NO: 37541807 NR Description: similar to hypothetical protein FLJ10661 [Homo
  misc_feature (53)..(186): Homolog of NCBI NO: 30149259 NR Description: similar to CG7889-PA [Homo sapiens]
  misc_feature (53)..(189): Homolog of NCBI NO: 29835170 NR Description: Unknown (protein for MGC:59002) [Mus musculus]
  misc_feature (1)..(186): Homolog of NCBI NO: 37549678 NR Description: similar to CG7889-PA [Homo sapiens]
  misc_feature (6)..(186): Homolog of NCBI NO: 37543704 NR Description: similar to CG7889-PA [Homo sapiens]
MLTSKEDILVKENIRITKFISFLFPEGSYKHPSCPRSRKLVIPLHCSLNMLEGDTGCSIWPSSLFLSEFVLSFPELFANKACFEVGSGVGMVGICLAHVKAKEVILTDGDLLTLSNMKLNLERNHLNYDDEFLKQPGEAQSTRVKCTHLPWETASESELSQYRPDIVLGADVIYDPSCLPHLLRVLVALLKNPPKRGNGSLETEDRDTTQEEHSPAVAYIASVIRNVDTFNVCLTLADQMDLSITDVTAELTPRFELLPYMHSYDRSTVRLFSISSR

SEQ ID NO: 82155 - protein, 228 aa, Arabidopsis thaliana
  peptide (1)..(228): Ceres Seq. ID no. 12663695
  misc_feature (1)..(228): Homolog of NCBI NO: 15240919 NR Description: putative protein; protein id: At5g27400.1 thaliana] >gi|29029094|gb|AAO64926.1| At5g27400 [Arabidopsis
  misc_feature (7)..(225): Homolog of NCBI NO: 28829124 NR Description: similar to putative protein; protein id:
  misc_feature (4)..(137): Homolog of NCBI NO: 14585877 NR Description: hypothetical protein SB153 [Homo sapiens]
  misc_feature (4)..(137): Homolog of NCBI NO: 14603247 NR Description: Similar to RIKEN cDNA 5730409G15 gene [Homo
  misc_feature (1)..(140): Homolog of NCBI NO: 37550662 NR Description: similar to ectonucleotide
  misc_feature (4)..(137): Homolog of NCBI NO: 37541807 NR Description: similar to hypothetical protein FLJ10661 [Homo
  misc_feature (4)..(137): Homolog of NCBI NO: 30149259 NR Description: similar to CG7889-PA [Homo sapiens]
  misc_feature (4)..(140): Homolog of NCBI NO: 29835170 NR Description: Unknown (protein for MGC:59002) [Mus musculus]
  misc_feature (1)..(137): Homolog of NCBI NO: 37549678 NR Description: similar to CG7889-PA [Homo sapiens]
  misc_feature (1)..(137): Homolog of NCBI NO: 37543704 NR Description: similar to CG7889-PA [Homo sapiens]
MLEGDTGCSIWPSSLFLSEFVLSFPELFANKACFEVGSGVGMVGICLAHVKAKEVILTDGDLLTLSNMKLNLERNHLNYDDEFLKQPGEAQSTRVKCTHLPWETASESELSQYRPDIVLGADVIYDPSCLPHLLRVLVALLKNPPKRGNGSLETEDRDTTQEEHSPAVAYIASVIRNVDTFNVCLTLADQMDLSITDVTAELTPRFELLPYMHSYDRSTVRLFSISSR

SEQ ID NO: 82156 - DNA, 897 bp, Arabidopsis thaliana
  misc_feature (1)..(897): Ceres Seq. ID no. 12663700
  misc_feature: MA Experiment ID: 20000171 Result: Up-regulated in Transcription
  misc_feature: MA Experiment 20000171 PARAMETER Experiment Name: At_42deg_Heat_P Parameter: Age (day) Value: 14
  misc_feature: MA Experiment 20000171 PARAMETER Experiment Name: At_42deg_Heat_P Parameter: Organism Value: A. thaliana
  misc_feature: MA Experiment 20000171 PARAMETER Experiment Name: At_42deg_Heat_P Parameter: Plant Line Value: WS
  misc_feature: MA Experiment 20000171 PARAMETER Experiment Name: At_42deg_Heat_P Parameter: Temperature (deg C) Value: 42 vs. 22
  misc_feature: MA Experiment 20000171 PARAMETER Experiment Name: At_42deg_Heat_P Parameter: Timepoint (hr) Value: 1
  misc_feature: MA Experiment 20000171 PARAMETER Experiment Name: At_42deg_Heat_P Parameter: Tissue Value: Aerial
  misc_feature: MA Experiment ID: 20000180 Result: Up-regulated in Transcription
  misc_feature: MA Experiment 20000180 PARAMETER Experiment Name: At_Germinating_Seeds_P Parameter: Age (hr) Value: 24 vs. 0
  misc_feature: MA Experiment 20000180 PARAMETER Experiment Name: At_Germinating_Seeds_P Parameter: Tissue Value: Germinating Seeds
atgatgatgtccggtggaagctacacgaacatcgatcaccagaaagtttctggatctgtacccgctgttccagatcctggacatgtcaccgtcaaattcgcagactcaaatctacaaacgtttcctccatctgctactcagggaaagatttctggtggtactaatcctcctcgagatgctgacgttttgtatgccttattggctaatcttatcgactttcaaccggtggcagatacattttcgaggcctgtgaatggtactacagatgaacctcagtctagtggttggcttcatagattcactgttggtgcttacaagccttactttgatgtggacacttcagatgtcgtagagagactcaaagaatcgctctttccgtttagaggaacatttacggaaaagacagccaacaaccctgatttgtacgggccattctggatatgcacaacattgatctttgtagcagcatccataggaacatttgttacatacatagcacacaaattgaagaaacaggaatggaactacgatattaatctggtgacttggtctgcaggagttttctacggttatgtaactattgtccctctcgcattatacgttgttctcaagtacttctctgcaccatcaggcttagtccaactcttctgtctatacggatattccctattcgtcttcatccctgcattgtgtctctctgttgtgccattagagatcttcagatgggttattgcgggtttagctggattcatgtctgctacatttgtagcattgaatctcaaagcacatattaactctgcaggagagagatggttcttgattgtggtcagcatatttcttctacagctcgctctctcagtagtgctgaagctatatctgttcactgtcaccgtataa

SEQ ID NO: 82157 - protein, 298 aa, Arabidopsis thaliana
  peptide (1)..(298): Ceres Seq. ID no. 12663701
  misc_feature (109)..(274): Pfam Name: Yip1 domain Pfam Description: Yip1 domain
  misc_feature (1)..(298): Homolog of NCBI NO: 30690667 NR Description: expressed protein [Arabidopsis thaliana]
  misc_feature (1)..(298): Homolog of NCBI NO: 38564308 NR Description: At5g27490 [Arabidopsis thaliana]
  misc_feature (2)..(298): Homolog of NCBI NO: 30679454 NR Description: expressed protein [Arabidopsis thaliana] unknown protein [Arabidopsis thaliana]
  misc_feature (3)..(298): Homolog of NCBI NO: 6729038 NR Description: unknown protein [Arabidopsis thaliana]
  misc_feature (2)..(298): Homolog of NCBI NO: 34912560 NR Description: P0410E03.18 [Oryza sativa (japonica
  misc_feature (7)..(294): Homolog of NCBI NO: 30688039 NR Description: expressed protein [Arabidopsis thaliana] unknown protein [Arabidopsis thaliana]
  misc_feature (52)..(294): Homolog of NCBI NO: 18859855 NR Description: CG4645-PA [Drosophila melanogaster]
  misc_feature (100)..(294): Homolog of NCBI NO: 40786465 NR Description: similar to RIKEN cDNA C030002N13 [Rattus >gi|38328251|gb|AAH62239.1| Similar to RIKEN cDNA C030002N13
  misc_feature (100)..(294): Homolog of NCBI NO: 21704084 NR Description: RIKEN cDNA C030002N13 [Mus musculus] Similar to hypothetical protein [Mus musculus]
  misc_feature (100)..(294): Homolog of NCBI NO: 10092643 NR Description: hypothetical protein DJ167A19.1 [Homo sapiens]
MMMSGGSYTNIDHQKVSGSVPAVPDPGHVTVKFADSNLQTFPPSATQGKISGGTNPPRDADVLYALLANLIDFQPVADTFSRPVNGTTDEPQSSGWLHRFTVGAYKPYFDVDTSDVVERLKESLFPFRGTFTEKTANNPDLYGPFWICTTLIFVAASIGTFVTYIAHKLKKQEWNYDINLVTWSAGVFYGYVTIVPLALYVVLKYFSAPSGLVQLFCLYGYSLFVFIPALCLSVVPLEIFRWVIAGLAGFMSATFVALNLKAHINSAGERWFLIVVSIFLLQLALSVVLKLYLFTVTV

SEQ ID NO: 82158 - protein, 297 aa, Arabidopsis thaliana
  peptide (1)..(297): Ceres Seq. ID no. 12663702
  misc_feature (108)..(273): Pfam Name: Yip1 domain Pfam Description: Yip1 domain
  misc_feature (1)..(297): Homolog of NCBI NO: 30690667 NR Description: expressed protein [Arabidopsis thaliana]
  misc_feature (1)..(297): Homolog of NCBI NO: 38564308 NR Description: At5g27490 [Arabidopsis thaliana]
  misc_feature (1)..(297): Homolog of NCBI NO: 30679454 NR Description: expressed protein [Arabidopsis thaliana] unknown protein [Arabidopsis thaliana]
  misc_feature (2)..(297): Homolog of NCBI NO: 6729038 NR Description: unknown protein [Arabidopsis thaliana]
  misc_feature (1)..(297): Homolog of NCBI NO: 34912560 NR Description: P0410E03.18 [Oryza sativa (japonica
  misc_feature (6)..(293): Homolog of NCBI NO: 30688039 NR Description: expressed protein [Arabidopsis thaliana] unknown protein [Arabidopsis thaliana]
  misc_feature (51)..(293): Homolog of NCBI NO: 18859855 NR Description: CG4645-PA [Drosophila melanogaster]
  misc_feature (99)..(293): Homolog of NCBI NO: 40786465 NR Description: similar to RIKEN cDNA C030002N13 [Rattus >gi|38328251|gb|AAH62239.1| Similar to RIKEN cDNA C030002N13
  misc_feature (99)..(293): Homolog of NCBI NO: 21704084 NR Description: RIKEN cDNA C030002N13 [Mus musculus] Similar to hypothetical protein [Mus musculus]
  misc_feature (99)..(293): Homolog of NCBI NO: 10092643 NR Description: hypothetical protein DJ167A19.1 [Homo sapiens]
MMSGGSYTNIDHQKVSGSVPAVPDPGHVTVKFADSNLQTFPPSATQGKISGGTNPPRDADVLYALLANLIDFQPVADTFSRPVNGTTDEPQSSGWLHRFTVGAYKPYFDVDTSDVVERLKESLFPFRGTFTEKTANNPDLYGPFWICTTLIFVAASIGTFVTYIAHKLKKQEWNYDINLVTWSAGVFYGYVTIVPLALYVVLKYFSAPSGLVQLFCLYGYSLFVFIPALCLSVVPLEIFRWVIAGLAGFMSATFVALNLKAHINSAGERWFLIVVSIFLLQLALSVVLKLYLFTVTV

SEQ ID NO: 82159 - protein, 296 aa, Arabidopsis thaliana
  peptide (1)..(296): Ceres Seq. ID no. 12663703
  misc_feature (107)..(272): Pfam Name: Yip1 domain Pfam Description: Yip1 domain
  misc_feature (1)..(296): Homolog of NCBI NO: 30690667 NR Description: expressed protein [Arabidopsis thaliana]
  misc_feature (1)..(296): Homolog of NCBI NO: 38564308 NR Description: At5g27490 [Arabidopsis thaliana]
  misc_feature (1)..(296): Homolog of NCBI NO: 30679454 NR Description: expressed protein [Arabidopsis thaliana] unknown protein [Arabidopsis thaliana]
  misc_feature (1)..(296): Homolog of NCBI NO: 6729038 NR Description: unknown protein [Arabidopsis thaliana]
  misc_feature (1)..(296): Homolog of NCBI NO: 34912560 NR Description: P0410E03.18 [Oryza sativa (japonica
  misc_feature (5)..(292): Homolog of NCBI NO: 30688039 NR Description: expressed protein [Arabidopsis thaliana] unknown protein [Arabidopsis thaliana]
  misc_feature (50)..(292): Homolog of NCBI NO: 18859855 NR Description: CG4645-PA [Drosophila melanogaster]
  misc_feature (98)..(292): Homolog of NCBI NO: 40786465 NR Description: similar to RIKEN cDNA C030002N13 [Rattus >gi|38328251|gb|AAH62239.1| Similar to RIKEN cDNA C030002N13
  misc_feature (98)..(292): Homolog of NCBI NO: 21704084 NR Description: RIKEN cDNA C030002N13 [Mus musculus] Similar to hypothetical protein [Mus musculus]
  misc_feature (98)..(292): Homolog of NCBI NO: 10092643 NR Description: hypothetical protein DJ167A19.1 [Homo sapiens]
MSGGSYTNIDHQKVSGSVPAVPDPGHVTVKFADSNLQTFPPSATQGKISGGTNPPRDADVLYALLANLIDFQPVADTFSRPVNGTTDEPQSSGWLHRFTVGAYKPYFDVDTSDVVERLKESLFPFRGTFTEKTANNPDLYGPFWICTTLIFVAASIGTFVTYIAHKLKKQEWNYDINLVTWSAGVFYGYVTIVPLALYVVLKYFSAPSGLVQLFCLYGYSLFVFIPALCLSVVPLEIFRWVIAGLAGFMSATFVALNLKAHINSAGERWFLIVVSIFLLQLALSVVLKLYLFTVTV

SEQ ID NO: 82160 - DNA, 2247 bp, Arabidopsis thaliana
  misc_feature (1)..(2247): Ceres Seq. ID no. 12663731
  misc_feature: MA Experiment ID: 20000265 Result: Up-regulated in Transcription
  misc_feature: MA Experiment 20000265 PARAMETER Experiment Name: At_Open_Flower_P Parameter: Age (day) Value: 21
  misc_feature: MA Experiment 20000265 PARAMETER Experiment Name: At_Open_Flower_P Parameter: Plant Line Value: WS
  misc_feature: MA Experiment 20000265 PARAMETER Experiment Name: At_Open_Flower_P Parameter: Tissue Value: Closed Flower vs. Whole Plant
  misc_feature: MA Experiment ID: 20000794 Result: Up-regulated in Transcription
  misc_feature: MA Experiment 20000794 PARAMETER Experiment Name: At_Petals_P Parameter: Age (day) Value: 23-25 days
  misc_feature: MA Experiment 20000794 PARAMETER Experiment Name: At_Petals_P Parameter: Plant Line Value: WS
  misc_feature: MA Experiment 20000794 PARAMETER Experiment Name: At_Petals_P Parameter: Tissue Value: Petals vs. Whole plant
aactaaaaccaaattagtattaatccgaaaacttgaaactgtggcttcctcctcaaatctccgatcaacggaaacaaaatggctcacatggtgagagcgagctctggcctttcttacccggagagattctacgccgccgcatcgtacgtcggcctcgacggatctcaatcgtcggtcaaacaactcagctccaaattctccaacgatacctctttgcttctctacacgttgcaccagcaggctactctaggaccttgtagtattccaaaaccgagtgcgtggaatccagtagagcaaagcaaatggaaaagttggcaggggcttggaaccatgccctccattgaggcaatgcgtctatttgtgaaaatcttggaggaagcagatcctggttggtatccaaggacatctaactctgttcttgaccctgctgtacatgtccaaatcaatagcacaaaggctgagcctagttttgagagtggagcttcatttggtgagacaaagacgattacttctgaggatgggcgcttgacagaaacgcaagataaagatgtagttttggaagacccagatactgtttctgtgtataatcagtggactgcaccacgaacatcaggtcagccaccaaaagcccgatatcagcatggagcagcggttattcaagataagatgtatatgtatggtggaaaccacaacggccgttatctaggtgatcttcatgttctggatttaaaaaactggacttggtcaagagttgaaaccaaggttgtgactggatcacaggaaacatcatctccagcaaaactaactcactgtgctggtcattctttgataccatgggataaccagcttttgtctatcggtggtcatacaaaagatccttcagaatccatgccagtgatggtctttgatctacattgctgttcatggtcaatcttaaagacatacgggaagccaccgatttcgcgtggaggtcagtcagtgacccttgtgggaaaaagcttggtgatatttggtggccaggatgcaaagagatcgcttctgaacgatttgcatatacttgatttagataccatgacctgggaggaaattgatgccgtgggttctcctccaactccaaggtctgatcatgctgctgcagtgcacgctgagcgttaccttctaatctttggtggaggatcacatgcaacttgttttgatgatctgcacgtccttgatctgcaaactatggaatggtcaagacatacacaacaaggtgacgcaccaactccacgtgctggacacgctggtgtgacgattggggaaaattggtatattgttggtggtggagataacaaaagcggggcatctaagactgttgtattaaatatgtcaactcttgcatggtcagttgtcacttcagtccaagaacatgtacctctcgctagtgagggattgagtttagttgtgagctcatacaatggagaagacatagtggttgcttttggtggatacaacggacattacaacaatgaagtgaatgttcttaaaccaagccacaaatcaagcttgaaatccaagattatgggagcttctgctgtgccagatagtttttccgctgttaataacgccacgactagagatattgagtctgagatcaaggttgaaggaaaagccgaccgcattatcacaacccttaaatccgaaaaagaagaagtggaggcatcactcaacaaggaaaagatacaaactctccaactaaaggaagagttagcagagatagacacacgaaatacagagttatacaaggaacttcaatctgtgcggaaccaacttgcagcggaacaatcaaggtgtttcaaactagaggttgaagttgcagagctaagacaaaagcttcagacaatggaaacacttcaaaaggaactcgaactcctccaacgtcaaagagccgttgcgtctgaacaagccgccaccatgaacgccaaacgacaaagctctggtggcgtctggggttggctcgctggaactcctccgcctaaaacatgagtgcccatgaaactttttttcgggtaactcttttttgtcattaccaatatcagtatttacttttagaaagaaagaaaaagagagaaatacagtatagacaatttttagcgtctccgcattgttactagtgaaaataaggtctatagttgtttctactacagtatgattgatgagttgccatttgaagattcagtttctatataagctctaccgatttgtgtg

SEQ ID NO: 82161 - protein, 648 aa, Arabidopsis thaliana
  peptide (1)..(648): Ceres Seq. ID no. 12663732
  misc_feature (22)..(104): Pfam Name: Acyl CoA binding protein Pfam Description: Acyl CoA binding protein
  misc_feature (4)..(611): Homolog of NCBI NO: 7596769 NR Description: unknown protein [Arabidopsis thaliana]
  misc_feature (4)..(611): Homolog of NCBI NO: 30679500 NR Description: acyl CoA binding protein (ACBP) family
  misc_feature (7)..(648): Homolog of NCBI NO: 40714674 NR Description: putative transcription factor [Oryza sativa
  misc_feature (156)..(638): Homolog of NCBI NO: 15237715 NR Description: putative protein; protein id: At5g04420.1, by cDNA: gi_15724205 [Arabidopsis thaliana]
  misc_feature (156)..(638): Homolog of NCBI NO: 15724206 NR Description: AT5g04420/T32M21_20 [Arabidopsis thaliana]
  misc_feature (144)..(598): Homolog of NCBI NO: 21950739 NR Description: RanGAP1 interacting protein [Arabidopsis thaliana]
  misc_feature (144)..(598): Homolog of NCBI NO: 30686896 NR Description: RanGAP1 interacting protein [Arabidopsis >gi|30686901|ref|NP_850846.1| RanGAP1 interacting protein
  misc_feature (520)..(647): Homolog of NCBI NO: 7596769 NR Description: unknown protein [Arabidopsis thaliana]
  misc_feature (520)..(647): Homolog of NCBI NO: 30679500 NR Description: acyl CoA binding protein (ACBP) family
  misc_feature (172)..(520): Homolog of NCBI NO: 34905476 NR Description: P0682B08.13 [Oryza sativa (japonica
MAHMVRASSGLSYPERFYAAASYVGLDGSQSSVKQLSSKFSNDTSLLLYTLHQQATLGPCSIPKPSAWNPVEQSKWKSWQGLGTMPSIEAMRLFVKILEEADPGWYPRTSNSVLDPAVHVQINSTKAEPSFESGASFGETKTITSEDGRLTETQDKDVVLEDPDTVSVYNQWTAPRTSGQPPKARYQHGAAVIQDKMYMYGGNHNGRYLGDLHVLDLKNWTWSRVETKVVTGSQETSSPAKLTHCAGHSLIPWDNQLLSIGGHTKDPSESMPVMVFDLHCCSWSILKTYGKPPISRGGQSVTLVGKSLVIFGGQDAKRSLLNDLHILDLDTMTWEEIDAVGSPPTPRSDHAAAVHAERYLLIFGGGSHATCFDDLHVLDLQTMEWSRHTQQGDAPTPRAGHAGVTIGENWYIVGGGDNKSGASKTVVLNMSTLAWSVVTSVQEHVPLASEGLSLVVSSYNGEDIVVAFGGYNGHYNNEVNVLKPSHKSSLKSKIMGASAVPDSFSAVNNATTRDIESEIKVEGKADRIITTLKSEKEEVEASLNKEKIQTLQLKEELAEIDTRNTELYKELQSVRNQLAAEQSRCFKLEVEVAELRQKLQTMETLQKELELLQRQRAVASEQAATMNAKRQSSGGVWGWLAGTPPPKT

SEQ ID NO: 82162 - protein, 645 aa, Arabidopsis thaliana
  peptide (1)..(645): Ceres Seq. ID no. 12663733
  misc_feature (19)..(101): Pfam Name: Acyl CoA binding protein Pfam Description: Acyl CoA binding protein
  misc_feature (1)..(608): Homolog of NCBI NO: 7596769 NR Description: unknown protein [Arabidopsis thaliana]
  misc_feature (1)..(608): Homolog of NCBI NO: 30679500 NR Description: acyl CoA binding protein (ACBP) family
  misc_feature (4)..(645): Homolog of NCBI NO: 40714674 NR Description: putative transcription factor [Oryza sativa
  misc_feature (153)..(635): Homolog of NCBI NO: 15237715 NR Description: putative protein; protein id: At5g04420.1, by cDNA: gi_15724205 [Arabidopsis thaliana]
  misc_feature (153)..(635): Homolog of NCBI NO: 15724206 NR Description: AT5g04420/T32M21_20 [Arabidopsis thaliana]
  misc_feature (141)..(595): Homolog of NCBI NO: 21950739 NR Description: RanGAP1 interacting protein [Arabidopsis thaliana]
  misc_feature (141)..(595): Homolog of NCBI NO: 30686896 NR Description: RanGAP1 interacting protein [Arabidopsis >gi|30686901|ref|NP_850846.1| RanGAP1 interacting protein
  misc_feature (517)..(644): Homolog of NCBI NO: 7596769 NR Description: unknown protein [Arabidopsis thaliana]
  misc_feature (517)..(644): Homolog of NCBI NO: 30679500 NR Description: acyl CoA binding protein (ACBP) family
  misc_feature (169)..(517): Homolog of NCBI NO: 34905476 NR Description: P0682B08.13 [Oryza sativa (japonica
MVRASSGLSYPERFYAAASYVGLDGSQSSVKQLSSKFSNDTSLLLYTLHQQATLGPCSIPKPSAWNPVEQSKWKSWQGLGTMPSIEAMRLFVKILEEADPGWYPRTSNSVLDPAVHVQINSTKAEPSFESGASFGETKTITSEDGRLTETQDKDVVLEDPDTVSVYNQWTAPRTSGQPPKARYQHGAAVIQDKMYMYGGNHNGRYLGDLHVLDLKNWTWSRVETKVVTGSQETSSPAKLTHCAGHSLIPWDNQLLSIGGHTKDPSESMPVMVFDLHCCSWSILKTYGKPPISRGGQSVTLVGKSLVIFGGQDAKRSLLNDLHILDLDTMTWEEIDAVGSPPTPRSDHAAAVHAERYLLIFGGGSHATCFDDLHVLDLQTMEWSRHTQQGDAPTPRAGHAGVTIGENWYIVGGGDNKSGASKTVVLNMSTLAWSVVTSVQEHVPLASEGLSLVVSSYNGEDIVVAFGGYNGHYNNEVNVLKPSHKSSLKSKIMGASAVPDSFSAVNNATTRDIESEIKVEGKADRIITTLKSEKEEVEASLNKEKIQTLQLKEELAEIDTRNTELYKELQSVRNQLAAEQSRCFKLEVEVAELRQKLQTMETLQKELELLQRQRAVASEQAATMNAKRQSSGGVWGWLAGTPPPKT

SEQ ID NO: 82163 - protein, 564 aa, Arabidopsis thaliana
  peptide (1)..(564): Ceres Seq. ID no. 12663734
  misc_feature (160)..(206): Pfam Name: Kelch motif Pfam Description: Kelch motif
  misc_feature (1)..(527): Homolog of NCBI NO: 7596769 NR Description: unknown protein [Arabidopsis thaliana]
  misc_feature (1)..(527): Homolog of NCBI NO: 30679500 NR Description: acyl CoA binding protein (ACBP) family
  misc_feature (1)..(564): Homolog of NCBI NO: 40714674 NR Description: putative transcription factor [Oryza sativa
  misc_feature (72)..(554): Homolog of NCBI NO: 15237715 NR Description: putative protein; protein id: At5g04420.1, by cDNA: gi_15724205 [Arabidopsis thaliana]
  misc_feature (72)..(554): Homolog of NCBI NO: 15724206 NR Description: AT5g04420/T32M21_20 [Arabidopsis thaliana]
  misc_feature (60)..(514): Homolog of NCBI NO: 21950739 NR Description: RanGAP1 interacting protein [Arabidopsis thaliana]
  misc_feature (60)..(514): Homolog of NCBI NO: 30686896 NR Description: RanGAP1 interacting protein [Arabidopsis >gi|30686901|ref|NP_850846.1| RanGAP1 interacting protein
  misc_feature (436)..(563): Homolog of NCBI NO: 7596769 NR Description: unknown protein [Arabidopsis thaliana]
  misc_feature (436)..(563): Homolog of NCBI NO: 30679500 NR Description: acyl CoA binding protein (ACBP) family
  misc_feature (88)..(436): Homolog of NCBI NO: 34905476 NR Description: P0682B08.13 [Oryza sativa (japonica
MPSIEAMRLFVKILEEADPGWYPRTSNSVLDPAVHVQINSTKAEPSFESGASFGETKTITSEDGRLTETQDKDVVLEDPDTVSVYNQWTAPRTSGQPPKARYQHGAAVIQDKMYMYGGNHNGRYLGDLHVLDLKNWTWSRVETKVVTGSQETSSPAKLTHCAGHSLIPWDNQLLSIGGHTKDPSESMPVMVFDLHCCSWSILKTYGKPPISRGGQSVTLVGKSLVIFGGQDAKRSLLNDLHILDLDTMTWEEIDAVGSPPTPRSDHAAAVHAERYLLIFGGGSHATCFDDLHVLDLQTMEWSRHTQQGDAPTPRAGHAGVTIGENWYIVGGGDNKSGASKTVVLNMSTLAWSVVTSVQEHVPLASEGLSLVVSSYNGEDIVVAFGGYNGHYNNEVNVLKPSHKSSLKSKIMGASAVPDSFSAVNNATTRDIESEIKVEGKADRIITTLKSEKEEVEASLNKEKIQTLQLKEELAEIDTRNTELYKELQSVRNQLAAEQSRCFKLEVEVAELRQKLQTMETLQKELELLQRQRAVASEQAATMNAKRQSSGGVWGWLAGTPPPKT

SEQ ID NO: 82164 - DNA, 1544 bp, Arabidopsis thaliana
  misc_feature (1)..(1544): Ceres Seq. ID no. 12663769
  misc_feature: MA Experiment ID: 20000227 Result: Down-regulated in Transcription
  misc_feature: MA Experiment 20000227 PARAMETER Experiment Name: At_Root-Tips-vs-Tops_P Parameter: Tissue Value: Root Tips vs. Root Tops
  misc_feature: MA Experiment ID: 20001905 Result: Up-regulated in Transcription
  misc_feature: MA Experiment 20001905 PARAMETER Experiment Name: At_Drought_Reproduction_P Parameter: Age (day) Value: 40
  misc_feature: MA Experiment 20001905 PARAMETER Experiment Name: At_Drought_Reproduction_P Parameter: Organism Value: A. thaliana
  misc_feature: MA Experiment 20001905 PARAMETER Experiment Name: At_Drought_Reproduction_P Parameter: Plant Line Value: WS
  misc_feature: MA Experiment 20001905 PARAMETER Experiment Name: At_Drought_Reproduction_P Parameter: Timepoint (day) Value: 10
  misc_feature: MA Experiment 20001905 PARAMETER Experiment Name: At_Drought_Reproduction_P Parameter: Tissue Value: Rosettes
  misc_feature: MA Experiment 20001905 PARAMETER Experiment Name: At_Drought_Reproduction_P Parameter: Treatment Value: Drought vs. No Drought
aagacaaaatagatttcttcttctctttgtttgacccacattttctctggaaaaaattcgtctactttctccgatcgtctcttcattgatcggaaaaccaacaacgacccattattcctctcctgtttctggcgcaaacccttgtagcaagttttgattttggtgagaaaatattttagggatctgaagagaaagaacacgatgatgacgagtatggaagggatggtggagaaaggagtattggatgatattataagaagattgttagaaggtaaaggaggcaaacaggttcagctttccgagagcgagattcgtcaactctgctttaacgctcgtcaaatcttcctctctcaacctaatctccttgatctccatgccccaattcgcatctgcggtgatattcatggtcaatatcaagatcttttgaggttgtttgaatacggaggttatcctccttcagcaaactatctattccttggtgattacgttgacagaggcaaacaaagtcttgagaccatatgtttgcttcttgcttacaagatacggtacccatcgaagatatatctgttgagagggaaccatgaggatgctaagatcaacaggatttacgggttttatgacgagtgcaaacggagattcaatgtacgactctggaaggtgtttactgattgcttcaactgtttacctgtagctgcacttattgatgagaagatactgtgtatgcacggtggtttgtcaccagatttggataatttgaatcagattcgagagattcaaaggcctattgagattccagacagtggtcttctttgtgatttactttggtcagatcctgatcagaagattgaaggttgggctgatagtgatcgaggtatctcttgcacttttggagctgataaagtcgctgagttcttggataagaatgatcttgacctcatttgccgaggccatcaggtagtagaagacgggtatgagtttttcgcaaaacggagattagtcacgatattctcagctccaaactatggtggggagtttgacaacgctggtgcgttattaagcgttgacgagtctcttgtatgttcctttgagattatgaaaccagccccagcttcaagcagtcatcctctcaagaaggtaccgaagatggggaagtcttgaatatctagtcctctctatgtcaatatcacggttccacagctcaagctaggctcaagattctgagtgtcattacaactgtgtctgtgtctccaattatgggttgaatgcaatgaagaacccaaagggtacttacttagtcatcaaacaacttctgtaaaaaaacaaaaaaagtgagaaaacaaaaacacactttgttttctttgtatagatgcagaaaatgatctgtcttctgcttctggagattttatctccttattagtctctcttttctttcttcttttagcccttttagtttaatatagtaccacttagatttttttttctcggttatttttttccttgttgtacaaacccttttgcatatcgtcaagattccacattttctt

SEQ ID NO: 82165 - protein, 318 aa, Arabidopsis thaliana
  peptide (1)..(318): Ceres Seq. ID no. 12663770
  misc_feature (59)..(254): Pfam Name: Calcineurin-like phosphoesterase Pfam Description: Calcineurin-like phosphoesterase
  misc_feature (1)..(318): Homolog of NCBI NO: 3153205 NR Description: serine/threonine protein phosphatase type one
  misc_feature (8)..(311): Homolog of NCBI NO: 21593410 NR Description: TOPP8 serine/threonine protein phosphatase type
  misc_feature (1)..(318): Homolog of NCBI NO: 15230010 NR Description: serine/threonine protein phosphatase (PP1); id: At3g05580.1 [Arabidopsis thaliana] putative serine/threonine protein phosphatase type one
  misc_feature (1)..(317): Homolog of NCBI NO: 29290586 NR Description: serine threonine protein phosphatase [Phaseolus
  misc_feature (9)..(317): Homolog of NCBI NO: 1346765 NR Description: SERINE/THREONINE PROTEIN PHOSPHATASE PP1
  misc_feature (65)..(318): Homolog of NCBI NO: 130708 NR Description: SERINE/THREONINE PROTEIN PHOSPHATASE PP1
  misc_feature (65)..(318): Homolog of NCBI NO: 227345 NR Description: protein phosphatase 1
  misc_feature (7)..(318): Homolog of NCBI NO: 34895162 NR Description: putative serine/threonine protein phosphatase
  misc_feature (1)..(301): Homolog of NCBI NO: 15225576 NR Description: phosphoprotein phosphatase type 1 catalytic protein id: At2g39840.1, supported by cDNA: gi_166800 thaliana] >gi|1346758|sp|P48484|PP14_ARATH Serine/threonine
  misc_feature (1)..(300): Homolog of NCBI NO: 11133831 NR Description: Serine/threonine protein phosphatase PP1 isozyme 1
MMTSMEGMVEKGVLDDIIRRLLEGKGGKQVQLSESEIRQLCFNARQIFLSQPNLLDLHAPIRICGDIHGQYQDLLRLFEYGGYPPSANYLFLGDYVDRGKQSLETICLLLAYKIRYPSKIYLLRGNHEDAKINRIYGFYDECKRRFNVRLWKVFTDCFNCLPVAALIDEKILCMHGGLSPDLDNLNQIREIQRPIEIPDSGLLCDLLWSDPDQKIEGWADSDRGISCTFGADKVAEFLDKNDLDLICRGHQVVEDGYEFFAKRRLVTIFSAPNYGGEFDNAGALLSVDESLVCSFEIMKPAPASSSHPLKKVPKMGKS

SEQ ID NO: 82166 - protein, 317 aa, Arabidopsis thaliana
  peptide (1)..(317): Ceres Seq. ID no. 12663771
  misc_feature (58)..(253): Pfam Name: Calcineurin-like phosphoesterase Pfam Description: Calcineurin-like phosphoesterase
  misc_feature (1)..(317): Homolog of NCBI NO: 3153205 NR Description: serine/threonine protein phosphatase type one
  misc_feature (7)..(310): Homolog of NCBI NO: 21593410 NR Description: TOPP8 serine/threonine protein phosphatase type
  misc_feature (1)..(317): Homolog of NCBI NO: 15230010 NR Description: serine/threonine protein phosphatase (PP1); id: At3g05580.1 [Arabidopsis thaliana] putative serine/threonine protein phosphatase type one
  misc_feature (1)..(316): Homolog of NCBI NO: 29290586 NR Description: serine threonine protein phosphatase [Phaseolus
  misc_feature (8)..(316): Homolog of NCBI NO: 1346765 NR Description: SERINE/THREONINE PROTEIN PHOSPHATASE PP1
  misc_feature (64)..(317): Homolog of NCBI NO: 130708 NR Description: SERINE/THREONINE PROTEIN PHOSPHATASE PP1
  misc_feature (64)..(317): Homolog of NCBI NO: 227345 NR Description: protein phosphatase 1
  misc_feature (6)..(317): Homolog of NCBI NO: 34895162 NR Description: putative serine/threonine protein phosphatase
  misc_feature (1)..(300): Homolog of NCBI NO: 15225576 NR Description: phosphoprotein phosphatase type 1 catalytic protein id: At2g39840.1, supported by cDNA: gi_166800 thaliana] >gi|1346758|sp|P48484|PP14_ARATH Serine/threonine
  misc_feature (1)..(299): Homolog of NCBI NO: 11133831 NR Description: Serine/threonine protein phosphatase PP1 isozyme 1
MTSMEGMVEKGVLDDIIRRLLEGKGGKQVQLSESEIRQLCFNARQIFLSQPNLLDLHAPIRICGDIHGQYQDLLRLFEYGGYPPSANYLFLGDYVDRGKQSLETICLLLAYKIRYPSKIYLLRGNHEDAKINRIYGFYDECKRRFNVRLWKVFTDCFNCLPVAALIDEKILCMHGGLSPDLDNLNQIREIQRPIEIPDSGLLCDLLWSDPDQKIEGWADSDRGISCTFGADKVAEFLDKNDLDLICRGHQVVEDGYEFFAKRRLVTIFSAPNYGGEFDNAGALLSVDESLVCSFEIMKPAPASSSHPLKKVPKMGKS

SEQ ID NO: 82167 - protein, 314 aa, Arabidopsis thaliana
  peptide (1)..(314): Ceres Seq. ID no. 12663772
  misc_feature (55)..(250): Pfam Name: Calcineurin-like phosphoesterase Pfam Description: Calcineurin-like phosphoesterase
  misc_feature (1)..(314): Homolog of NCBI NO: 3153205 NR Description: serine/threonine protein phosphatase type one
  misc_feature (4)..(307): Homolog of NCBI NO: 21593410 NR Description: TOPP8 serine/threonine protein phosphatase type
  misc_feature (1)..(314): Homolog of NCBI NO: 15230010 NR Description: serine/threonine protein phosphatase (PP1); id: At3g05580.1 [Arabidopsis thaliana] putative serine/threonine protein phosphatase type one
  misc_feature (1)..(313): Homolog of NCBI NO: 29290586 NR Description: serine threonine protein phosphatase [Phaseolus
  misc_feature (5)..(313): Homolog of NCBI NO: 1346765 NR Description: SERINE/THREONINE PROTEIN PHOSPHATASE PP1
  misc_feature (61)..(314): Homolog of NCBI NO: 130708 NR Description: SERINE/THREONINE PROTEIN PHOSPHATASE PP1
  misc_feature (61)..(314): Homolog of NCBI NO: 227345 NR Description: protein phosphatase 1
  misc_feature (3)..(314): Homolog of NCBI NO: 34895162 NR Description: putative serine/threonine protein phosphatase
  misc_feature (1)..(297): Homolog of NCBI NO: 15225576 NR Description: phosphoprotein phosphatase type 1 catalytic protein id: At2g39840.1, supported by cDNA: gi_166800 thaliana] >gi|1346758|sp|P48484|PP14_ARATH Serine/threonine
  misc_feature (1)..(296): Homolog of NCBI NO: 11133831 NR Description: Serine/threonine protein phosphatase PP1 isozyme 1
MEGMVEKGVLDDIIRRLLEGKGGKQVQLSESEIRQLCFNARQIFLSQPNLLDLHAPIRICGDIHGQYQDLLRLFEYGGYPPSANYLFLGDYVDRGKQSLETICLLLAYKIRYPSKIYLLRGNHEDAKINRIYGFYDECKRRFNVRLWKVFTDCFNCLPVAALIDEKILCMHGGLSPDLDNLNQIREIQRPIEIPDSGLLCDLLWSDPDQKIEGWADSDRGISCTFGADKVAEFLDKNDLDLICRGHQVVEDGYEFFAKRRLVTIFSAPNYGGEFDNAGALLSVDESLVCSFEIMKPAPASSSHPLKKVPKMGKS

SEQ ID NO: 82168 - DNA, 543 bp, Arabidopsis thaliana
  misc_feature (1)..(543): Ceres Seq. ID no. 12663844
  misc_feature: MA Experiment ID: 20000315 Result: Down-regulated in Transcription
  misc_feature: MA Experiment 20000315 PARAMETER Experiment Name: At_14day_Shoots-Roots_Sub_P Parameter: Age (day) Value: 14
  misc_feature: MA Experiment 20000315 PARAMETER Experiment Name: At_14day_Shoots-Roots_Sub_P Parameter: Organism Value: A. thaliana
  misc_feature: MA Experiment 20000315 PARAMETER Experiment Name: At_14day_Shoots-Roots_Sub_P Parameter: Plant Line Value: WS
  misc_feature: MA Experiment 20000315 PARAMETER Experiment Name: At_14day_Shoots-Roots_Sub_P Parameter: Tissue Value: Shoots vs. Whole Plant
atgtcaaatccgagtttcaagcttgatgataatgccccaactgtaagctgggctgaatcaaggagtggaggagaaggagacttttctgcctctcaggtcaaggcattgtacatcaagaatttacctagagatataacacaagaacgtctaaaggcattacttgaacatcacgggaaaatactgaaagtggtgatcccaccagcaaaaccaggaaaggaagacagtagatacggatttgtgcactacgcagagaggacaagcgtaatgcgagctttgaaaaacactgaaagatatgagattgatgcttctgcctattcacaaccattaatgcatgcgggaggtcacgcagctggtggaatgtcgatgatgccaatcatgttacctgatggaaggatccgatacgtcttgcaacagcctggactagcagcgatgccacaaccaccaccgaggccttctccaccgtataggggatgcagcggttcgagcagcagcaaacaaagtagcgacaacggtagaggacgaagctgttacaatccttattag

SEQ ID NO: 82169 - protein, 180 aa, Arabidopsis thaliana
  peptide (1)..(180): Ceres Seq. ID no. 12663845
  misc_feature (36)..(101): Pfam Name: RNA recognition motif. (a.k.a. RRM, RBD, or RNP domain) Pfam Description: RNA recognition motif. (a.k.a. RRM, RBD, or RNP
  misc_feature (1)..(180): Homolog of NCBI NO: 15241771 NR Description: RRM-containing protein; protein id: At5g28330.1
  misc_feature (1)..(180): Homolog of NCBI NO: 22327128 NR Description: RRM-containing protein; protein id: At5g28390.1
  misc_feature (1)..(101): Homolog of NCBI NO: 15231284 NR Description: RRM-containing RNA-binding protein, putative; id: At3g52660.1 [Arabidopsis thaliana] >gi|11358672|pir||T49019
  misc_feature (102)..(180): Homolog of NCBI NO: 15231284 NR Description: RRM-containing RNA-binding protein, putative; id: At3g52660.1 [Arabidopsis thaliana] >gi|11358672|pir||T49019
  misc_feature (31)..(180): Homolog of NCBI NO: 9502153 NR Description: contains similarity to Pfam family PF00076 (RNA
  misc_feature (1)..(109): Homolog of NCBI NO: 18411454 NR Description: RRM-containing protein; protein id: At4g00830.1, by cDNA: gi_13605915 [Arabidopsis thaliana] AT4g00830/A_TM018A10_14 [Arabidopsis thaliana]
  misc_feature (102)..(180): Homolog of NCBI NO: 18411454 NR Description: RRM-containing protein; protein id: At4g00830.1, by cDNA: gi_13605915 [Arabidopsis thaliana] AT4g00830/A_TM018A10_14 [Arabidopsis thaliana]
  misc_feature (1)..(109): Homolog of NCBI NO: 7485284 NR Description: hypothetical protein A_TM018A10.14 - Arabidopsis >gi|2252863|gb|AAB62861.1| similar to nucleolin protein thaliana] >gi|7267422|emb|CAB80892.1| putative protein
  misc_feature (102)..(180): Homolog of NCBI NO: 7485284 NR Description: hypothetical protein A_TM018A10.14 - Arabidopsis >gi|2252863|gb|AAB62861.1| similar to nucleolin protein thaliana] >gi|7267422|emb|CAB80892.1| putative protein
  misc_feature (1)..(101): Homolog of NCBI NO: 29371361 NR Description: putative RNA-binding protein [Oryza sativa
MSNPSFKLDDNAPTVSWAESRSGGEGDFSASQVKALYIKNLPRDITQERLKALLEHHGKILKVVIPPAKPGKEDSRYGFVHYAERTSVMRALKNTERYEIDASAYSQPLMHAGGHAAGGMSMMPIMLPDGRIRYVLQQPGLAAMPQPPPRPSPPYRGCSGSSSSKQSSDNGRGRSCYNPY

SEQ ID NO: 82170 - protein, 92 aa, Arabidopsis thaliana
  peptide (1)..(92): Ceres Seq. ID no. 12663846
  misc_feature (1)..(92): Homolog of NCBI NO: 15241771 NR Description: RRM-containing protein; protein id: At5g28330.1
  misc_feature (1)..(92): Homolog of NCBI NO: 22327128 NR Description: RRM-containing protein; protein id: At5g28390.1
  misc_feature (1)..(13): Homolog of NCBI NO: 15231284 NR Description: RRM-containing RNA-binding protein, putative; id: At3g52660.1 [Arabidopsis thaliana] >gi|11358672|pir||T49019
  misc_feature (14)..(92): Homolog of NCBI NO: 15231284 NR Description: RRM-containing RNA-binding protein, putative; id: At3g52660.1 [Arabidopsis thaliana] >gi|11358672|pir||T49019
  misc_feature (1)..(92): Homolog of NCBI NO: 9502153 NR Description: contains similarity to Pfam family PF00076 (RNA
  misc_feature (1)..(21): Homolog of NCBI NO: 18411454 NR Description: RRM-containing protein; protein id: At4g00830.1, by cDNA: gi_13605915 [Arabidopsis thaliana] AT4g00830/A_TM018A10_14 [Arabidopsis thaliana]
  misc_feature (14)..(92): Homolog of NCBI NO: 18411454 NR Description: RRM-containing protein; protein id: At4g00830.1, by cDNA: gi_13605915 [Arabidopsis thaliana] AT4g00830/A_TM018A10_14 [Arabidopsis thaliana]
  misc_feature (1)..(21): Homolog of NCBI NO: 7485284 NR Description: hypothetical protein A_TM018A10.14 - Arabidopsis >gi|2252863|gb|AAB62861.1| similar to nucleolin protein thaliana] >gi|7267422|emb|CAB80892.1| putative protein
  misc_feature (14)..(92): Homolog of NCBI NO: 7485284 NR Description: hypothetical protein A_TM018A10.14 - Arabidopsis >gi|2252863|gb|AAB62861.1| similar to nucleolin protein thaliana] >gi|7267422|emb|CAB80892.1| putative protein
  misc_feature (1)..(13): Homolog of NCBI NO: 29371361 NR Description: putative RNA-binding protein [Oryza sativa
MRALKNTERYEIDASAYSQPLMHAGGHAAGGMSMMPIMLPDGRIRYVLQQPGLAAMPQPPPRPSPPYRGCSGSSSSKQSSDNGRGRSCYNPY

SEQ ID NO: 82171 - DNA, 543 bp, Arabidopsis thaliana
  misc_feature (1)..(543): Ceres Seq. ID no. 12663858
  misc_feature: MA Experiment ID: 20000315 Result: Down-regulated in Transcription
  misc_feature: MA Experiment 20000315 PARAMETER Experiment Name: At_14day_Shoots-Roots_Sub_P Parameter: Age (day) Value: 14
  misc_feature: MA Experiment 20000315 PARAMETER Experiment Name: At_14day_Shoots-Roots_Sub_P Parameter: Organism Value: A. thaliana
  misc_feature: MA Experiment 20000315 PARAMETER Experiment Name: At_14day_Shoots-Roots_Sub_P Parameter: Plant Line Value: WS
  misc_feature: MA Experiment 20000315 PARAMETER Experiment Name: At_14day_Shoots-Roots_Sub_P Parameter: Tissue Value: Shoots vs. Whole Plant
atgtcaaatccgagtttcaagcttgatgataatgccccaactgtaagctgggctgaatcaaggagtggaggagaaggagactcttctgcctctcaggtcaaggcattgtacatcaagaatttacctagagatataacacaagaacgtctaaaggcattatttgaacatcacgggaaaatactgaaagtggtgatcccaccagcaaaaccaggaaaggaagacagtagatacggatttgtgcactacgcagagaggacaagcgtaatgcgagctttgaaaaacactgaaagatatgagattgatgcttctgcctattcacaaccattaatgcatgcgggaggtcacgcagctggtggaatgtcgatgatgccaatcatgttacctgatggaaggatccgatacgtcttgcaacagcctggactagcagcgatgccacaaccaccaccgaggccttctccaccgtataggggaggcagcggttcgagcagtagcaaacaaagtagcgacaatggtagaggacgaagccgttacaatccttattag

SEQ ID NO: 82172 - protein, 180 aa, Arabidopsis thaliana
  peptide (1)..(180): Ceres Seq. ID no. 12663859
  misc_feature (36)..(101): Pfam Name: RNA recognition motif. (a.k.a. RRM, RBD, or RNP domain) Pfam Description: RNA recognition motif. (a.k.a. RRM, RBD, or RNP
  misc_feature (1)..(180): Homolog of NCBI NO: 22327128 NR Description: RRM-containing protein; protein id: At5g28390.1
  misc_feature (1)..(180): Homolog of NCBI NO: 15241771 NR Description: RRM-containing protein; protein id: At5g28330.1
  misc_feature (1)..(101): Homolog of NCBI NO: 15231284 NR Description: RRM-containing RNA-binding protein, putative; id: At3g52660.1 [Arabidopsis thaliana] >gi|11358672|pir||T49019
  misc_feature (102)..(180): Homolog of NCBI NO: 15231284 NR Description: RRM-containing RNA-binding protein, putative; id: At3g52660.1 [Arabidopsis thaliana] >gi|11358672|pir||T49019
  misc_feature (31)..(180): Homolog of NCBI NO: 9502153 NR Description: contains similarity to Pfam family PF00076 (RNA
  misc_feature (1)..(109): Homolog of NCBI NO: 18411454 NR Description: RRM-containing protein; protein id: At4g00830.1, by cDNA: gi_13605915 [Arabidopsis thaliana] AT4g00830/A_TM018A10_14 [Arabidopsis thaliana]
  misc_feature (102)..(180): Homolog of NCBI NO: 18411454 NR Description: RRM-containing protein; protein id: At4g00830.1, by cDNA: gi_13605915 [Arabidopsis thaliana] AT4g00830/A_TM018A10_14 [Arabidopsis thaliana]
  misc_feature (1)..(109): Homolog of NCBI NO: 7485284 NR Description: hypothetical protein A_TM018A10.14 - Arabidopsis >gi|2252863|gb|AAB62861.1| similar to nucleolin protein thaliana] >gi|7267422|emb|CAB80892.1| putative protein
  misc_feature (102)..(180): Homolog of NCBI NO: 7485284 NR Description: hypothetical protein A_TM018A10.14 - Arabidopsis >gi|2252863|gb|AAB62861.1| similar to nucleolin protein thaliana] >gi|7267422|emb|CAB80892.1| putative protein
  misc_feature (1)..(101): Homolog of NCBI NO: 29371361 NR Description: putative RNA-binding protein [Oryza sativa
MSNPSFKLDDNAPTVSWAESRSGGEGDSSASQVKALYIKNLPRDITQERLKALFEHHGKILKVVIPPAKPGKEDSRYGFVHYAERTSVMRALKNTERYEIDASAYSQPLMHAGGHAAGGMSMMPIMLPDGRIRYVLQQPGLAAMPQPPPRPSPPYRGGSGSSSSKQSSDNGRGRSRYNPY

SEQ ID NO: 82173 - protein, 92 aa, Arabidopsis thaliana
  peptide (1)..(92): Ceres Seq. ID no. 12663860
  misc_feature (1)..(92): Homolog of NCBI NO: 22327128 NR Description: RRM-containing protein; protein id: At5g28390.1
  misc_feature (1)..(92): Homolog of NCBI NO: 15241771 NR Description: RRM-containing protein; protein id: At5g28330.1
  misc_feature (1)..(13): Homolog of NCBI NO: 15231284 NR Description: RRM-containing RNA-binding protein, putative; id: At3g52660.1 [Arabidopsis thaliana] >gi|11358672|pir||T49019
  misc_feature (14)..(92): Homolog of NCBI NO: 15231284 NR Description: RRM-containing RNA-binding protein, putative; id: At3g52660.1 [Arabidopsis thaliana] >gi|11358672|pir||T49019
  misc_feature (1)..(92): Homolog of NCBI NO: 9502153 NR Description: contains similarity to Pfam family PF00076 (RNA
  misc_feature (1)..(21): Homolog of NCBI NO: 18411454 NR Description: RRM-containing protein; protein id: At4g00830.1, by cDNA: gi_13605915 [Arabidopsis thaliana] AT4g00830/A_TM018A10_14 [Arabidopsis thaliana]
  misc_feature (14)..(92): Homolog of NCBI NO: 18411454 NR Description: RRM-containing protein; protein id: At4g00830.1, by cDNA: gi_13605915 [Arabidopsis thaliana] AT4g00830/A_TM018A10_14 [Arabidopsis thaliana]
  misc_feature (1)..(21): Homolog of NCBI NO: 7485284 NR Description: hypothetical protein A_TM018A10.14 - Arabidopsis >gi|2252863|gb|AAB62861.1| similar to nucleolin protein thaliana] >gi|7267422|emb|CAB80892.1| putative protein
  misc_feature (14)..(92): Homolog of NCBI NO: 7485284 NR Description: hypothetical protein A_TM018A10.14 - Arabidopsis >gi|2252863|gb|AAB62861.1| similar to nucleolin protein thaliana] >gi|7267422|emb|CAB80892.1| putative protein
  misc_feature (1)..(13): Homolog of NCBI NO: 29371361 NR Description: putative RNA-binding protein [Oryza sativa
MRALKNTERYEIDASAYSQPLMHAGGHAAGGMSMMPIMLPDGRIRYVLQQPGLAAMPQPPPRPSPPYRGGSGSSSSKQSSDNGRGRSRYNPY

SEQ ID NO: 82174 - DNA, 1602 bp, Arabidopsis thaliana
  misc_feature (1)..(1602): Ceres Seq. ID no. 12663881
  misc_feature: MA Experiment ID: 20000227 Result: Down-regulated in Transcription
  misc_feature: MA Experiment 20000227 PARAMETER Experiment Name: At_Root-Tips-vs-Tops_P Parameter: Tissue Value: Root Tips vs. Root Tops
  misc_feature: MA Experiment ID: 20000234 Result: Up-regulated in Transcription
  misc_feature: MA Experiment 20000234 PARAMETER Experiment Name: At_Siliques_P Parameter: Age (day) Value: 21
  misc_feature: MA Experiment 20000234 PARAMETER Experiment Name: At_Siliques_P Parameter: Organism Value: A. thaliana
  misc_feature: MA Experiment 20000234 PARAMETER Experiment Name: At_Siliques_P Parameter: Plant Line Value: WS
  misc_feature: MA Experiment 20000234 PARAMETER Experiment Name: At_Siliques_P Parameter: Tissue Value: Less Than 5mm Siliques vs. Whole Plant
  misc_feature: MA Experiment ID: 20000235 Result: Up-regulated in Transcription
  misc_feature: MA Experiment 20000235 PARAMETER Experiment Name: At_Siliques_P Parameter: Age (day) Value: 21
  misc_feature: MA Experiment 20000235 PARAMETER Experiment Name: At_Siliques_P Parameter: Organism Value: A. thaliana
  misc_feature: MA Experiment 20000235 PARAMETER Experiment Name: At_Siliques_P Parameter: Plant Line Value: WS
  misc_feature: MA Experiment 20000235 PARAMETER Experiment Name: At_Siliques_P Parameter: Tissue Value: 5-10mm Siliques vs. Whole Plant
  misc_feature: MA Experiment ID: 20000267 Result: Up-regulated in Transcription
  misc_feature: MA Experiment 20000267 PARAMETER Experiment Name: At_Drought_P Parameter: Age (day) Value: 7
  misc_feature: MA Experiment 20000267 PARAMETER Experiment Name: At_Drought_P Parameter: Organism Value: A. thaliana
  misc_feature: MA Experiment 20000267 PARAMETER Experiment Name: At_Drought_P Parameter: Plant Line Value: WS
  misc_feature: MA Experiment 20000267 PARAMETER Experiment Name: At_Drought_P Parameter: Timepoint (hr) Value: 6
  misc_feature: MA Experiment 20000267 PARAMETER Experiment Name: At_Drought_P Parameter: Tissue Value: Whole Plant
  misc_feature: MA Experiment 20000267 PARAMETER Experiment Name: At_Drought_P Parameter: Treatment Value: Drought vs. No Drought
  misc_feature: MA Experiment ID: 20000436 Result: Up-regulated in Transcription
  misc_feature: MA Experiment 20000436 PARAMETER Experiment Name: At_Drought_P Parameter: Age (day) Value: 7
  misc_feature: MA Experiment 20000436 PARAMETER Experiment Name: At_Drought_P Parameter: Organism Value: A. thaliana
  misc_feature: MA Experiment 20000436 PARAMETER Experiment Name: At_Drought_P Parameter: Plant Line Value: WS
  misc_feature: MA Experiment 20000436 PARAMETER Experiment Name: At_Drought_P Parameter: Timepoint (hr) Value: 12
  misc_feature: MA Experiment 20000436 PARAMETER Experiment Name: At_Drought_P Parameter: Tissue Value: Whole Plant
  misc_feature: MA Experiment 20000436 PARAMETER Experiment Name: At_Drought_P Parameter: Treatment Value: Drought vs. No Drought
  misc_feature: MA Experiment ID: 20000437 Result: Up-regulated in Transcription
  misc_feature: MA Experiment 20000437 PARAMETER Experiment Name: At_Drought_P Parameter: Age (day) Value: 8
  misc_feature: MA Experiment 20000437 PARAMETER Experiment Name: At_Drought_P Parameter: Organism Value: A. thaliana
  misc_feature: MA Experiment 20000437 PARAMETER Experiment Name: At_Drought_P Parameter: Plant Line Value: WS
  misc_feature: MA Experiment 20000437 PARAMETER Experiment Name: At_Drought_P Parameter: Timepoint (hr) Value: 24
  misc_feature: MA Experiment 20000437 PARAMETER Experiment Name: At_Drought_P Parameter: Tissue Value: Whole Plant
  misc_feature: MA Experiment 20000437 PARAMETER Experiment Name: At_Drought_P Parameter: Treatment Value: Drought vs. No Drought
  misc_feature: MA Experiment ID: 20001910 Result: Up-regulated in Transcription
  misc_feature: MA Experiment 20001910 PARAMETER Experiment Name: At_Drought_Reproduction_P Parameter: Age (day) Value: 37
  misc_feature: MA Experiment 20001910 PARAMETER Experiment Name: At_Drought_Reproduction_P Parameter: Organism Value: A. thaliana
  misc_feature: MA Experiment 20001910 PARAMETER Experiment Name: At_Drought_Reproduction_P Parameter: Plant Line Value: WS
  misc_feature: MA Experiment 20001910 PARAMETER Experiment Name: At_Drought_Reproduction_P Parameter: Timepoint (day) Value: 7
  misc_feature: MA Experiment 20001910 PARAMETER Experiment Name: At_Drought_Reproduction_P Parameter: Tissue Value: Flowers
  misc_feature: MA Experiment 20001910 PARAMETER Experiment Name: At_Drought_Reproduction_P Parameter: Treatment Value: Drought vs. No Drought
atggtattgcaaaaacttcctctcatgtctattgggctgctttggctactaatcatcgtaggtccgctggtaaatgccgatggacctgtttgcccaccgaaaccgtcggacaaactaagccgggcacattttcctaaaggttttttatttggcacagcgactgcggcatatcaggttgaaggtgcagtgaatgaaacttgtcgtggaccatccgtatgggatatctattgtaaaaaatatccagaaaaatgcaatggcgataatggtactcaagctgttgatttcttctatcgttacaaggaagatattcaattaatgaagaatctaaacacagattccttcagattatctatctcatggacaagaatttttcctcacgggagagaagagaatggagtgagtaaatctggtgttcaattctaccatgacctcattgacgagctcaaaagaaacggtataattccgttcgtgactgtttttcattgggacacgccacaaactctagagaatgaatatgggggcttcttaagcgcacacattgtgaaagattttcgggagtatgctgagtttgttttcaaagaatatggtggaaaagttaaacattggatcacttttaacgagccatgggttttcgcgcatgccggttatgacgttggaaagaaagcacctggacgttgttctccttacgccaaggacgaaactgtcaagggagattgtctaggcggacgatcaggttatgaggcttatctagtcagtcacaacctcctcaacgctcatgcagaagccgttgaagcttttcgacaatgtgaaaaatgtaagggtggaaagatcggaatcgcacatagtccggcttggtttgaaccacatgactttaaagatgaacaaagtggtgcgaccattgaccgtgcacttgactttataatgggatggcatctggacacaactatgtttggggattatccacagacaatgaaagacattgttggacatagattgcctaaatttactactgagcagatagcaaaactcaaaaactcagccgatttcgtagggatcaattactatacttctacattttcaaaacacttggagaagccaaaccatgcagaaccaaaatttaaacaagattctcttgttgaatggaaaaataaaaatgtaaacaatatcactattggtagcaagcctgaaaccggtccattgccagtttattctacaggctttagaaaagttttgaaatacgtcaaagataaatacgcaaatcctgaaattatcatcatggaaaacggatatggagaaaaccttaaagagaacgattcggttgaaaatggtactgctgattacaacagggaaagttatcttaagaagcatctttggagtatgcacaaagctatttgcgaagacaaggtaaatgttacaggatattttgtatggtcattgatggataactttgagtggcaagatggttttaaaaacagatttggactgtattacattgattacaaaaacaacctcacacgtcatgagaaagtttcgggcaagtattatagagaattccttagtgagggagttcgtccatccgctatcaagaaggatgagctttga

SEQ ID NO: 82175 - protein, 533 aa, Arabidopsis thaliana
  peptide (1)..(533): Ceres Seq. ID no. 12663882
  misc_feature (1)..(533): Homolog of NCBI NO: 15241841 NR Description: glycosyl hydrolase family 1; protein id:
  misc_feature (9)..(533): Homolog of NCBI NO: 9502167 NR Description: contains similarity to Pfam family PF00232
  misc_feature (1)..(533): Homolog of NCBI NO: 15232626 NR Description: glycosyl hydrolase family 1; protein id: supported by cDNA: gi_14423459, supported by cDNA: gi_1732569 thaliana] >gi|6478919|gb|AAF14024.1|AC011436_8 thioglucosidase 3D
  misc_feature (1)..(533): Homolog of NCBI NO: 1363489 NR Description: thioglucosidase (EC 3.2.1.147) 3D precursor - thaliana >gi|984052|emb|CAA61592.1| thioglucoside glucohydrolase thaliana] >gi|5524767|emb|CAB50792.1| thioglucoside
  misc_feature (1)..(533): Homolog of NCBI NO: 1732570 NR Description: beta-glucosidase [Arabidopsis thaliana]
  misc_feature (1)..(533): Homolog of NCBI NO: 15219623 NR Description: glycosyl hydrolase family 1; protein id: supported by cDNA: gi_18389261 [Arabidopsis thaliana]
  misc_feature (1)..(533): Homolog of NCBI NO: 15219605 NR Description: glycosyl hydrolase family 1, beta-glucosidase; id: At1g66270.1, supported by cDNA: gi_15010793 [Arabidopsis
  misc_feature (1)..(533): Homolog of NCBI NO: 2286069 NR Description: beta-glucosidase [Arabidopsis thaliana]
  misc_feature (1)..(533): Homolog of NCBI NO: 30697327 NR Description: glycosyl hydrolase family 1, beta-glucosidase
  misc_feature (93)..(533): Homolog of NCBI NO: 1732572 NR Description: beta-glucosidase [Brassica nigra]
MVLQKLPLMSIGLLWLLIIVGPLVNADGPVCPPKPSDKLSRAHFPKGFLFGTATAAYQVEGAVNETCRGPSVWDIYCKKYPEKCNGDNGTQAVDFFYRYKEDIQLMKNLNTDSFRLSISWTRIFPHGREENGVSKSGVQFYHDLIDELKRNGIIPFVTVFHWDTPQTLENEYGGFLSAHIVKDFREYAEFVFKEYGGKVKHWITFNEPWVFAHAGYDVGKKAPGRCSPYAKDETVKGDCLGGRSGYEAYLVSHNLLNAHAEAVEAFRQCEKCKGGKIGIAHSPAWFEPHDFKDEQSGATIDRALDFIMGWHLDTTMFGDYPQTMKDIVGHRLPKFTTEQIAKLKNSADFVGINYYTSTFSKHLEKPNHAEPKFKQDSLVEWKNKNVNNITIGSKPETGPLPVYSTGFRKVLKYVKDKYANPEIIIMENGYGENLKENDSVENGTADYNRESYLKKHLWSMHKAICEDKVNVTGYFVWSLMDNFEWQDGFKNRFGLYYIDYKNNLTRHEKVSGKYYREFLSEGVRPSAIKKDEL

SEQ ID NO: 82176 - protein, 525 aa, Arabidopsis thaliana
  peptide (1)..(525): Ceres Seq. ID no. 12663883
  misc_feature (1)..(525): Homolog of NCBI NO: 15241841 NR Description: glycosyl hydrolase family 1; protein id:
  misc_feature (1)..(525): Homolog of NCBI NO: 9502167 NR Description: contains similarity to Pfam family PF00232
  misc_feature (1)..(525): Homolog of NCBI NO: 15232626 NR Description: glycosyl hydrolase family 1; protein id: supported by cDNA: gi_14423459, supported by cDNA: gi_1732569 thaliana] >gi|6478919|gb|AAF14024.1|AC011436_8 thioglucosidase 3D
  misc_feature (1)..(525): Homolog of NCBI NO: 1363489 NR Description: thioglucosidase (EC 3.2.1.147) 3D precursor - thaliana >gi|984052|emb|CAA61592.1| thioglucoside glucohydrolase thaliana] >gi|5524767|emb|CAB50792.1| thioglucoside
  misc_feature (1)..(525): Homolog of NCBI NO: 1732570 NR Description: beta-glucosidase [Arabidopsis thaliana]
  misc_feature (1)..(525): Homolog of NCBI NO: 15219623 NR Description: glycosyl hydrolase family 1; protein id: supported by cDNA: gi_18389261 [Arabidopsis thaliana]
  misc_feature (1)..(525): Homolog of NCBI NO: 15219605 NR Description: glycosyl hydrolase family 1, beta-glucosidase; id: At1g66270.1, supported by cDNA: gi_15010793 [Arabidopsis
  misc_feature (1)..(525): Homolog of NCBI NO: 2286069 NR Description: beta-glucosidase [Arabidopsis thaliana]
  misc_feature (1)..(525): Homolog of NCBI NO: 30697327 NR Description: glycosyl hydrolase family 1, beta-glucosidase
  misc_feature (85)..(525): Homolog of NCBI NO: 1732572 NR Description: beta-glucosidase [Brassica nigra]
MSIGLLWLLIIVGPLVNADGPVCPPKPSDKLSRAHFPKGFLFGTATAAYQVEGAVNETCRGPSVWDIYCKKYPEKCNGDNGTQAVDFFYRYKEDIQLMKNLNTDSFRLSISWTRIFPHGREENGVSKSGVQFYHDLIDELKRNGIIPFVTVFHWDTPQTLENEYGGFLSAHIVKDFREYAEFVFKEYGGKVKHWITFNEPWVFAHAGYDVGKKAPGRCSPYAKDETVKGDCLGGRSGYEAYLVSHNLLNAHAEAVEAFRQCEKCKGGKIGIAHSPAWFEPHDFKDEQSGATIDRALDFIMGWHLDTTMFGDYPQTMKDIVGHRLPKFTTEQIAKLKNSADFVGINYYTSTFSKHLEKPNHAEPKFKQDSLVEWKNKNVNNITIGSKPETGPLPVYSTGFRKVLKYVKDKYANPEIIIMENGYGENLKENDSVENGTADYNRESYLKKHLWSMHKAICEDKVNVTGYFVWSLMDNFEWQDGFKNRFGLYYIDYKNNLTRHEKVSGKYYREFLSEGVRPSAIKKDEL

SEQ ID NO: 82177 - protein, 428 aa, Arabidopsis thaliana
  peptide (1)..(428): Ceres Seq. ID no. 12663884
  misc_feature (1)..(428): Homolog of NCBI NO: 15241841 NR Description: glycosyl hydrolase family 1; protein id:
  misc_feature (1)..(428): Homolog of NCBI NO: 9502167 NR Description: contains similarity to Pfam family PF00232
  misc_feature (1)..(428): Homolog of NCBI NO: 15232626 NR Description: glycosyl hydrolase family 1; protein id: supported by cDNA: gi_14423459, supported by cDNA: gi_1732569 thaliana] >gi|6478919|gb|AAF14024.1|AC011436_8 thioglucosidase 3D
  misc_feature (1)..(428): Homolog of NCBI NO: 1363489 NR Description: thioglucosidase (EC 3.2.1.147) 3D precursor - thaliana >gi|984052|emb|CAA61592.1| thioglucoside glucohydrolase thaliana] >gi|5524767|emb|CAB50792.1| thioglucoside
  misc_feature (1)..(428): Homolog of NCBI NO: 1732570 NR Description: beta-glucosidase [Arabidopsis thaliana]
  misc_feature (1)..(428): Homolog of NCBI NO: 15219623 NR Description: glycosyl hydrolase family 1; protein id: supported by cDNA: gi_18389261 [Arabidopsis thaliana]
  misc_feature (1)..(428): Homolog of NCBI NO: 15219605 NR Description: glycosyl hydrolase family 1, beta-glucosidase; id: At1g66270.1, supported by cDNA: gi_15010793 [Arabidopsis
  misc_feature (1)..(428): Homolog of NCBI NO: 2286069 NR Description: beta-glucosidase [Arabidopsis thaliana]
  misc_feature (1)..(428): Homolog of NCBI NO: 30697327 NR Description: glycosyl hydrolase family 1, beta-glucosidase
  misc_feature (1)..(428): Homolog of NCBI NO: 1732572 NR Description: beta-glucosidase [Brassica nigra]
MKNLNTDSFRLSISWTRIFPHGREENGVSKSGVQFYHDLIDELKRNGIIPFVTVFHWDTPQTLENEYGGFLSAHIVKDFREYAEFVFKEYGGKVKHWITFNEPWVFAHAGYDVGKKAPGRCSPYAKDETVKGDCLGGRSGYEAYLVSHNLLNAHAEAVEAFRQCEKCKGGKIGIAHSPAWFEPHDFKDEQSGATIDRALDFIMGWHLDTTMFGDYPQTMKDIVGHRLPKFTTEQIAKLKNSADFVGINYYTSTFSKHLEKPNHAEPKFKQDSLVEWKNKNVNNITIGSKPETGPLPVYSTGFRKVLKYVKDKYANPEIIIMENGYGENLKENDSVENGTADYNRESYLKKHLWSMHKAICEDKVNVTGYFVWSLMDNFEWQDGFKNRFGLYYIDYKNNLTRHEKVSGKYYREFLSEGVRPSAIKKDEL

SEQ ID NO: 82178 - DNA, 993 bp, Arabidopsis thaliana
  misc_feature (1)..(993): Ceres Seq. ID no. 12663920
  misc_feature: MA Experiment ID: 20000315 Result: Down-regulated in Transcription
  misc_feature: MA Experiment 20000315 PARAMETER Experiment Name: At_14day_Shoots-Roots_Sub_P Parameter: Age (day) Value: 14
  misc_feature: MA Experiment 20000315 PARAMETER Experiment Name: At_14day_Shoots-Roots_Sub_P Parameter: Organism Value: A. thaliana
  misc_feature: MA Experiment 20000315 PARAMETER Experiment Name: At_14day_Shoots-Roots_Sub_P Parameter: Plant Line Value: WS
  misc_feature: MA Experiment 20000315 PARAMETER Experiment Name: At_14day_Shoots-Roots_Sub_P Parameter: Tissue Value: Shoots vs. Whole Plant
  misc_feature: MA Experiment ID: 20000347 Result: Up-regulated in Transcription
  misc_feature: MA Experiment 20000347 PARAMETER Experiment Name: At_2mM_SA_Sub_P Parameter: Age (day) Value: 14
  misc_feature: MA Experiment 20000347 PARAMETER Experiment Name: At_2mM_SA_Sub_P Parameter: Organism Value: A. thaliana
  misc_feature: MA Experiment 20000347 PARAMETER Experiment Name: At_2mM_SA_Sub_P Parameter: Plant Line Value: WS
  misc_feature: MA Experiment 20000347 PARAMETER Experiment Name: At_2mM_SA_Sub_P Parameter: Timepoint (hr) Value: 6
  misc_feature: MA Experiment 20000347 PARAMETER Experiment Name: At_2mM_SA_Sub_P Parameter: Tissue Value: Aerial
  misc_feature: MA Experiment 20000347 PARAMETER Experiment Name: At_2mM_SA_Sub_P Parameter: Treatment Value: 2mM SA vs. No Treatment
atggaagaagttgaagctgcaaacaaagcagcagtggaaagttgtcatggagtattgaatctcttatcacaacaaaccaatgattccaaatcaataatggttgaaacaagagaagctgtttgcaagttcaagagagtctcctctcttttgtctagagggttaggtcaaaggaagataaagaaactcaacaacaacaactacaagtttagctcttctttgttgccacaacacatgtttttggagagtcctgtttgcagtaataatgctataagtggttgtattccaattctagcaccaaagcctcttcagattgtaccagctggtcctcctccattgatgttgtttaaccagaatatgtgtcttgataagtcgtttctcgagctgaagccaccctcttcacgagctgttgatccaaaaccttatcagtttattcatacccatcagcaaggagtgtactcaaggagcaaaagtggtttgaatctaaagtttgatgggtctattggtgctagttgttattcaccaagtatatcaaatgggtcaagatcgtttgtttcatctcttagtatggatggtagtgtgacggattacgatagaaactcttttcatttgattggattacctcaaggttccgatcatatatcgcaacattctaggaggactagttgctctggtagtttaaaatgtggaagtaaaagcaaatgccattgttccaagaaaaggaaattaagggtgaaacgatcgattaaagtaccggcaatcagtaacaagattgcggacatacctcccgatgaatattcatggaggaaatacggacaaaagccgattaagggttctcctcatcctaggggatactataaatgtagcagtgtgcgcggttgtccagcgaggaagcatgttgagcgatgtgtagaagaaacttcgatgcttattgtgacttatgaaggcgagcataaccattcaagaatactctcttctcaatcagctcatacttga

SEQ ID NO: 82179 - protein, 330 aa, Arabidopsis thaliana
  peptide (1)..(330): Ceres Seq. ID no. 12663921
  misc_feature (261)..(321): Pfam Name: WRKY DNA -binding domain Pfam Description: WRKY DNA -binding domain
  misc_feature (1)..(330): Homolog of NCBI NO: 15241875 NR Description: WRKY family transcription factor; protein id: supported by cDNA: gi_16798367, supported by cDNA: gi_17064167 thaliana] >gi|17064168|gb|AAL35291.1|AF442398_1 WRKY
  misc_feature (1)..(330): Homolog of NCBI NO: 29839595 NR Description: Probable WRKY transcription factor 74 (WRKY protein 74) >gi|16798368|gb|AAL29432.1|AF426255_1 WRKY
  misc_feature (1)..(330): Homolog of NCBI NO: 18396971 NR Description: WRKY family transcription factor; protein id: supported by cDNA: gi_15384222, supported by cDNA: gi_15450756 thaliana] >gi|20978793|sp|Q9SR07|WR39_ARATH Probable
  misc_feature (142)..(330): Homolog of NCBI NO: 18402397 NR Description: WRKY family transcription factor; protein id: supported by cDNA: gi_13507098 [Arabidopsis thaliana]
  misc_feature (1)..(74): Homolog of NCBI NO: 18402397 NR Description: WRKY family transcription factor; protein id: supported by cDNA: gi_13507098 [Arabidopsis thaliana]
  misc_feature (75)..(321): Homolog of NCBI NO: 11993901 NR Description: somatic embryogenesis related protein [Dactylis
  misc_feature (1)..(89): Homolog of NCBI NO: 11993901 NR Description: somatic embryogenesis related protein [Dactylis
  misc_feature (75)..(328): Homolog of NCBI NO: 40539044 NR Description: putative somatic embryogenesis related protein
  misc_feature (130)..(329): Homolog of NCBI NO: 10798760 NR Description: WRKY transcription factor Nt-SubD48 [Nicotiana
  misc_feature (175)..(330): Homolog of NCBI NO: 7488950 NR Description: DNA-binding protein WRKY3 - parsley
MEEVEAANKAAVESCHGVLNLLSQQTNDSKSIMVETREAVCKFKRVSSLLSRGLGQRKIKKLNNNNYKFSSSLLPQHMFLESPVCSNNAISGCIPILAPKPLQIVPAGPPPLMLFNQNMCLDKSFLELKPPSSRAVDPKPYQFIHTHQQGVYSRSKSGLNLKFDGSIGASCYSPSISNGSRSFVSSLSMDGSVTDYDRNSFHLIGLPQGSDHISQHSRRTSCSGSLKCGSKSKCHCSKKRKLRVKRSIKVPAISNKIADIPPDEYSWRKYGQKPIKGSPHPRGYYKCSSVRGCPARKHVERCVEETSMLIVTYEGEHNHSRILSSQSAHT

SEQ ID NO: 82180 - protein, 298 aa, Arabidopsis thaliana
  peptide (1)..(298): Ceres Seq. ID no. 12663922
  misc_feature (229)..(289): Pfam Name: WRKY DNA -binding domain Pfam Description: WRKY DNA -binding domain
  misc_feature (1)..(298): Homolog of NCBI NO: 15241875 NR Description: WRKY family transcription factor; protein id: supported by cDNA: gi_16798367, supported by cDNA: gi_17064167 thaliana] >gi|17064168|gb|AAL35291.1|AF442398_1 WRKY
  misc_feature (1)..(298): Homolog of NCBI NO: 29839595 NR Description: Probable WRKY transcription factor 74 (WRKY protein 74) >gi|16798368|gb|AAL29432.1|AF426255_1 WRKY
  misc_feature (1)..(298): Homolog of NCBI NO: 18396971 NR Description: WRKY family transcription factor; protein id: supported by cDNA: gi_15384222, supported by cDNA: gi_15450756 thaliana] >gi|20978793|sp|Q9SR07|WR39_ARATH Probable
  misc_feature (110)..(298): Homolog of NCBI NO: 18402397 NR Description: WRKY family transcription factor; protein id: supported by cDNA: gi_13507098 [Arabidopsis thaliana]
  misc_feature (1)..(42): Homolog of NCBI NO: 18402397 NR Description: WRKY family transcription factor; protein id: supported by cDNA: gi_13507098 [Arabidopsis thaliana]
  misc_feature (43)..(289): Homolog of NCBI NO: 11993901 NR Description: somatic embryogenesis related protein [Dactylis
  misc_feature (1)..(57): Homolog of NCBI NO: 11993901 NR Description: somatic embryogenesis related protein [Dactylis
  misc_feature (43)..(296): Homolog of NCBI NO: 40539044 NR Description: putative somatic embryogenesis related protein
  misc_feature (98)..(297): Homolog of NCBI NO: 10798760 NR Description: WRKY transcription factor Nt-SubD48 [Nicotiana
  misc_feature (143)..(298): Homolog of NCBI NO: 7488950 NR Description: DNA-binding protein WRKY3 - parsley
MVETREAVCKFKRVSSLLSRGLGQRKIKKLNNNNYKFSSSLLPQHMFLESPVCSNNAISGCIPILAPKPLQIVPAGPPPLMLFNQNMCLDKSFLELKPPSSRAVDPKPYQFIHTHQQGVYSRSKSGLNLKFDGSIGASCYSPSISNGSRSFVSSLSMDGSVTDYDRNSFHLIGLPQGSDHISQHSRRTSCSGSLKCGSKSKCHCSKKRKLRVKRSIKVPAISNKIADIPPDEYSWRKYGQKPIKGSPHPRGYYKCSSVRGCPARKHVERCVEETSMLIVTYEGEHNHSRILSSQSAHT

SEQ ID NO: 82181 - protein, 253 aa, Arabidopsis thaliana
  peptide (1)..(253): Ceres Seq. ID no. 12663923
  misc_feature (184)..(244): Pfam Name: WRKY DNA -binding domain Pfam Description: WRKY DNA -binding domain
  misc_feature (1)..(253): Homolog of NCBI NO: 15241875 NR Description: WRKY family transcription factor; protein id: supported by cDNA: gi_16798367, supported by cDNA: gi_17064167 thaliana] >gi|17064168|gb|AAL35291.1|AF442398_1 WRKY
  misc_feature (1)..(253): Homolog of NCBI NO: 29839595 NR Description: Probable WRKY transcription factor 74 (WRKY protein 74) >gi|16798368|gb|AAL29432.1|AF426255_1 WRKY
  misc_feature (1)..(253): Homolog of NCBI NO: 18396971 NR Description: WRKY family transcription factor; protein id: supported by cDNA: gi_15384222, supported by cDNA: gi_15450756 thaliana] >gi|20978793|sp|Q9SR07|WR39_ARATH Probable
  misc_feature (65)..(253): Homolog of NCBI NO: 18402397 NR Description: WRKY family transcription factor; protein id: supported by cDNA: gi_13507098 [Arabidopsis thaliana]
  misc_feature (1)..(244): Homolog of NCBI NO: 11993901 NR Description: somatic embryogenesis related protein [Dactylis
  misc_feature (1)..(12): Homolog of NCBI NO: 11993901 NR Description: somatic embryogenesis related protein [Dactylis
  misc_feature (1)..(251): Homolog of NCBI NO: 40539044 NR Description: putative somatic embryogenesis related protein
  misc_feature (53)..(252): Homolog of NCBI NO: 10798760 NR Description: WRKY transcription factor Nt-SubD48 [Nicotiana
  misc_feature (98)..(253): Homolog of NCBI NO: 7488950 NR Description: DNA-binding protein WRKY3 - parsley
  misc_feature (53)..(244): Homolog of NCBI NO: 30689072 NR Description: WRKY family transcription factor [Arabidopsis
MFLESPVCSNNAISGCIPILAPKPLQIVPAGPPPLMLFNQNMCLDKSFLELKPPSSRAVDPKPYQFIHTHQQGVYSRSKSGLNLKFDGSIGASCYSPSISNGSRSFVSSLSMDGSVTDYDRNSFHLIGLPQGSDHISQHSRRTSCSGSLKCGSKSKCHCSKKRKLRVKRSIKVPAISNKIADIPPDEYSWRKYGQKPIKGSPHPRGYYKCSSVRGCPARKHVERCVEETSMLIVTYEGEHNHSRILSSQSAHT

SEQ ID NO: 82182 - DNA, 2577 bp, Arabidopsis thaliana
  misc_feature (1)..(2577): Ceres Seq. ID no. 12663930
  misc_feature: MA Experiment ID: 20000355 Result: Up-regulated in Transcription
  misc_feature: MA Experiment 20000355 PARAMETER Experiment Name: At_Siliques_Sub_P Parameter: Age (day) Value: 21
  misc_feature: MA Experiment 20000355 PARAMETER Experiment Name: At_Siliques_Sub_P Parameter: Organism Value: A. thaliana
  misc_feature: MA Experiment 20000355 PARAMETER Experiment Name: At_Siliques_Sub_P Parameter: Plant Line Value: WS
  misc_feature: MA Experiment 20000355 PARAMETER Experiment Name: At_Siliques_Sub_P Parameter: Tissue Value: Less Than 5mm Siliques vs. Whole Plant
  misc_feature: MA Experiment ID: 20000440 Result: Up-regulated in Transcription
  misc_feature: MA Experiment 20000440 PARAMETER Experiment Name: At_Closed-Flower__Sub_P Parameter: Tissue Value: Closed Flower vs. Whole Plant
atgaacgagaaactccggattctgttctccttcctctgtttcttctatgttcttctagtttctccatctcaatctaatggccaagacatctccttgagctgcggagcatcagaaccagctgttgatcaagacaagaaaaaatgggaacccgataccaaattcttgaaaacaccaaacacggttcatgcaccagctacttatcaagatccttcacttctttcaacggttccttacatgacatcaagaatctttacagctccagcaacgtatgagatcccggttaaaggcgacaaaagacatatgctccgcttacatttctatccatcaacatacacaggactcaacattctcgactcttatttctccgtggctgctaatgatcttacccttctcagcaattttagtgcagctatcacatgtcaagccttgactcaagcttacctcgtgagagaatattctcttgcaccatccgaaaaagatgttttgagcatcatatttactccctcggataaacatccaaaagcgtttgctttcattaatggtattgaggtcattccgatgccagaattgtttgatacagcttctcttgttggattctcagaccagacttcagatactaagaccgcgaatcttcaaacgatgtttaggctcaatgtcggtgggcaggatattcccggaagtcaagactctggtggattaacaagaacttggtacaatgacgcgccttatatattcagcgcaggtcttggtgttactttacaagcaagcaacaattttagaattgattatcagaaaatgccggtttctaccgctccagcggatgtttacaaaacagctcgatcacaaggaccaaacggagatatcaacatgaagtcaaatctcacatggatgtttcaagttgacactaatttcacctatatcatgaggctccacttctgtgaattccagcttgctaaaatcaaccagaaagtattcaacattttcatcaacaacagaaccgcgcaaggggatacaaaccccgcagatatactcgggtggacaggtgggaaaggtatccctacttacaaagattacgcgatatatgttgatgctaataccggaggaggaggggaagagatatcgcttcaaatgacgccttcgacatttggtcaaccggaatattacgattcacagcttaatgggctagagattttcaagattgacacaatgaagaaccttgccggtccaaaccctaagccatcacctatgcaagctaatgaagatgttaaaaaggactttcaaggtgacaaaagaatcacagcttttgtcattggttctgctggaggagtagcagctgttttattttgtgcattgtgtttcacaatgtaccagagaaaaagaaagttttcgggcagcgattctcacacatcaagctggcttcctatatatggaaactcacacacatctgcaacaaaatctactatatcgggtaagagcaacaacggaagccacctatcgaatcttgcagcgggtttatgtcgaagattctcattgtccgaaataaaacacggaactcataacttcgatgagtcaaacgtaatcggagtaggagggtttggtaaggtttacaaaggagttatagatggaggcacaaaagtggcaatcaagaaatcaaaccctaattcagaacaagggctcaacgaattcgagacagaaatcgaacttctctcaagattaagacacaaacacttagtctcattaattggatactgcgatgaaggtggagaaatgtgtctaatatacgattacatgtctcttggaacactcagagaacatctttacaacacaaagagacctcagttaacttggaaacgaagactcgaaatcgccattggagctgcaagaggattacattacctacacacaggagcaaagtacactatcattcaccgtgacgtcaaaacaactaacatcttactagatgagaattgggttgctaaagtctcagatttcggattgtccaaaaccggaccaaacatgaatggtggtcatgtcacaaccgttgtgaaaggaagtttcggttacttggatccagagtatttcagaagacaacagttaactgagaagtcagatgtgtactcatttggagttgttctattcgaggttttatgcgctaggccagcgttaaaccctagtttatctaaagaacaagttagtcttggagattgggctatgaactgtaaacgtaaagggacattagaagacatcattgatcctaatcttaaaggaaagattaatccagagtgtttgaagaaatttgcggatacggcggagaagtgtttatctgatagtggcttagatcgaccaacgatgggagatgtcttgtggaatcttgaatttgcacttcagttacaagaaactgctgatggatcacgtcaccgaacgccgagcaatggtggtggttctgtggatttaggtggaggaggaggaggtgtgacggtgaacatcagcgccggagaaagtgacttgggtgatgacttgtcatctgaagaaaacagtggaatattttctcagattgtaaaccctaaaggacgataa

SEQ ID NO: 82183 - protein, 858 aa, Arabidopsis thaliana
  peptide (1)..(858): Ceres Seq. ID no. 12663931
  misc_feature (4)..(802): Homolog of NCBI NO: 15230520 NR Description: receptor-protein kinase-like protein; protein id:
  misc_feature (4)..(802): Homolog of NCBI NO: 14334760 NR Description: putative receptor-protein kinase [Arabidopsis
  misc_feature (29)..(858): Homolog of NCBI NO: 34909896 NR Description: putative receptor-protein kinase [Oryza sativa
  misc_feature (235)..(802): Homolog of NCBI NO: 17887381 NR Description: receptor protein kinase-like protein [Capsicum
  misc_feature (12)..(858): Homolog of NCBI NO: 15241606 NR Description: protein kinase - like protein; protein id:
  misc_feature (3)..(858): Homolog of NCBI NO: 15239630 NR Description: receptor-protein kinase-like protein; protein id:
  misc_feature (26)..(835): Homolog of NCBI NO: 5679841 NR Description: contains eukaryotic protein kinase domain
  misc_feature (430)..(858): Homolog of NCBI NO: 15238498 NR Description: receptor-like protein kinase precursor - like;
  misc_feature (78)..(503): Homolog of NCBI NO: 15238498 NR Description: receptor-like protein kinase precursor - like;
  misc_feature (9)..(799): Homolog of NCBI NO: 34393641 NR Description: putative PTH-2, resistance gene (PTO kinase)
MNEKLRILFSFLCFFYVLLVSPSQSNGQDISLSCGASEPAVDQDKKKWEPDTKFLKTPNTVHAPATYQDPSLLSTVPYMTSRIFTAPATYEIPVKGDKRHMLRLHFYPSTYTGLNILDSYFSVAANDLTLLSNFSAAITCQALTQAYLVREYSLAPSEKDVLSIIFTPSDKHPKAFAFINGIEVIPMPELFDTASLVGFSDQTSDTKTANLQTMFRLNVGGQDIPGSQDSGGLTRTWYNDAPYIFSAGLGVTLQASNNFRIDYQKMPVSTAPADVYKTARSQGPNGDINMKSNLTWMFQVDTNFTYIMRLHFCEFQLAKINQKVFNIFINNRTAQGDTNPADILGWTGGKGIPTYKDYAIYVDANTGGGGEEISLQMTPSTFGQPEYYDSQLNGLEIFKIDTMKNLAGPNPKPSPMQANEDVKKDFQGDKRITAFVIGSAGGVAAVLFCALCFTMYQRKRKFSGSDSHTSSWLPIYGNSHTSATKSTISGKSNNGSHLSNLAAGLCRRFSLSEIKHGTHNFDESNVIGVGGFGKVYKGVIDGGTKVAIKKSNPNSEQGLNEFETEIELLSRLRHKHLVSLIGYCDEGGEMCLIYDYMSLGTLREHLYNTKRPQLTWKRRLEIAIGAARGLHYLHTGAKYTIIHRDVKTTNILLDENWVAKVSDFGLSKTGPNMNGGHVTTVVKGSFGYLDPEYFRRQQLTEKSDVYSFGVVLFEVLCARPALNPSLSKEQVSLGDWAMNCKRKGTLEDIIDPNLKGKINPECLKKFADTAEKCLSDSGLDRPTMGDVLWNLEFALQLQETADGSRHRTPSNGGGSVDLGGGGGGVTVNISAGESDLGDDLSSEENSGIFSQIVNPKGR

SEQ ID NO: 82184 - protein, 780 aa, Arabidopsis thaliana
  peptide (1)..(780): Ceres Seq. ID no. 12663932
  misc_feature (1)..(724): Homolog of NCBI NO: 15230520 NR Description: receptor-protein kinase-like protein; protein id:
  misc_feature (1)..(724): Homolog of NCBI NO: 14334760 NR Description: putative receptor-protein kinase [Arabidopsis
  misc_feature (1)..(780): Homolog of NCBI NO: 34909896 NR Description: putative receptor-protein kinase [Oryza sativa
  misc_feature (157)..(724): Homolog of NCBI NO: 17887381 NR Description: receptor protein kinase-like protein [Capsicum
  misc_feature (1)..(780): Homolog of NCBI NO: 15241606 NR Description: protein kinase - like protein; protein id:
  misc_feature (1)..(780): Homolog of NCBI NO: 15239630 NR Description: receptor-protein kinase-like protein; protein id:
  misc_feature (1)..(757): Homolog of NCBI NO: 5679841 NR Description: contains eukaryotic protein kinase domain
  misc_feature (352)..(780): Homolog of NCBI NO: 15238498 NR Description: receptor-like protein kinase precursor - like;
  misc_feature (1)..(425): Homolog of NCBI NO: 15238498 NR Description: receptor-like protein kinase precursor - like;
  misc_feature (1)..(721): Homolog of NCBI NO: 34393641 NR Description: putative PTH-2, resistance gene (PTO kinase)
MTSRIFTAPATYEIPVKGDKRHMLRLHFYPSTYTGLNILDSYFSVAANDLTLLSNFSAAITCQALTQAYLVREYSLAPSEKDVLSIIFTPSDKHPKAFAFINGIEVIPMPELFDTASLVGFSDQTSDTKTANLQTMFRLNVGGQDIPGSQDSGGLTRTWYNDAPYIFSAGLGVTLQASNNFRIDYQKMPVSTAPADVYKTARSQGPNGDINMKSNLTWMFQVDTNFTYIMRLHFCEFQLAKINQKVFNIFINNRTAQGDTNPADILGWTGGKGIPTYKDYAIYVDANTGGGGEEISLQMTPSTFGQPEYYDSQLNGLEIFKIDTMKNLAGPNPKPSPMQANEDVKKDFQGDKRITAFVIGSAGGVAAVLFCALCFTMYQRKRKFSGSDSHTSSWLPIYGNSHTSATKSTISGKSNNGSHLSNLAAGLCRRFSLSEIKHGTHNFDESNVIGVGGFGKVYKGVIDGGTKVAIKKSNPNSEQGLNEFETEIELLSRLRHKHLVSLIGYCDEGGEMCLIYDYMSLGTLREHLYNTKRPQLTWKRRLEIAIGAARGLHYLHTGAKYTIIHRDVKTTNILLDENWVAKVSDFGLSKTGPNMNGGHVTTVVKGSFGYLDPEYFRRQQLTEKSDVYSFGVVLFEVLCARPALNPSLSKEQVSLGDWAMNCKRKGTLEDIIDPNLKGKINPECLKKFADTAEKCLSDSGLDRPTMGDVLWNLEFALQLQETADGSRHRTPSNGGGSVDLGGGGGGVTVNISAGESDLGDDLSSEENSGIFSQIVNPKGR

SEQ ID NO: 82185 - protein, 758 aa, Arabidopsis thaliana
  peptide (1)..(758): Ceres Seq. ID no. 12663933
  misc_feature (1)..(702): Homolog of NCBI NO: 15230520 NR Description: receptor-protein kinase-like protein; protein id:
  misc_feature (1)..(702): Homolog of NCBI NO: 14334760 NR Description: putative receptor-protein kinase [Arabidopsis
  misc_feature (1)..(758): Homolog of NCBI NO: 34909896 NR Description: putative receptor-protein kinase [Oryza sativa
  misc_feature (135)..(702): Homolog of NCBI NO: 17887381 NR Description: receptor protein kinase-like protein [Capsicum
  misc_feature (1)..(758): Homolog of NCBI NO: 15241606 NR Description: protein kinase - like protein; protein id:
  misc_feature (1)..(758): Homolog of NCBI NO: 15239630 NR Description: receptor-protein kinase-like protein; protein id:
  misc_feature (1)..(735): Homolog of NCBI NO: 5679841 NR Description: contains eukaryotic protein kinase domain
  misc_feature (330)..(758): Homolog of NCBI NO: 15238498 NR Description: receptor-like protein kinase precursor - like;
  misc_feature (1)..(403): Homolog of NCBI NO: 15238498 NR Description: receptor-like protein kinase precursor - like;
  misc_feature (1)..(699): Homolog of NCBI NO: 34393641 NR Description: putative PTH-2, resistance gene (PTO kinase)
MLRLHFYPSTYTGLNILDSYFSVAANDLTLLSNFSAAITCQALTQAYLVREYSLAPSEKDVLSIIFTPSDKHPKAFAFINGIEVIPMPELFDTASLVGFSDQTSDTKTANLQTMFRLNVGGQDIPGSQDSGGLTRTWYNDAPYIFSAGLGVTLQASNNFRIDYQKMPVSTAPADVYKTARSQGPNGDINMKSNLTWMFQVDTNFTYIMRLHFCEFQLAKINQKVFNIFINNRTAQGDTNPADILGWTGGKGIPTYKDYAIYVDANTGGGGEEISLQMTPSTFGQPEYYDSQLNGLEIFKIDTMKNLAGPNPKPSPMQANEDVKKDFQGDKRITAFVIGSAGGVAAVLFCALCFTMYQRKRKFSGSDSHTSSWLPIYGNSHTSATKSTISGKSNNGSHLSNLAAGLCRRFSLSEIKHGTHNFDESNVIGVGGFGKVYKGVIDGGTKVAIKKSNPNSEQGLNEFETEIELLSRLRHKHLVSLIGYCDEGGEMCLIYDYMSLGTLREHLYNTKRPQLTWKRRLEIAIGAARGLHYLHTGAKYTIIHRDVKTTNILLDENWVAKVSDFGLSKTGPNMNGGHVTTVVKGSFGYLDPEYFRRQQLTEKSDVYSFGVVLFEVLCARPALNPSLSKEQVSLGDWAMNCKRKGTLEDIIDPNLKGKINPECLKKFADTAEKCLSDSGLDRPTMGDVLWNLEFALQLQETADGSRHRTPSNGGGSVDLGGGGGGVTVNISAGESDLGDDLSSEENSGIFSQIVNPKGR

SEQ ID NO: 82186 - DNA, 1117 bp, Arabidopsis thaliana
  misc_feature (1)..(1117): Ceres Seq. ID no. 12663942
  misc_feature: MA Experiment ID: 20000166 Result: Down-regulated in Transcription
  misc_feature: MA Experiment 20000166 PARAMETER Experiment Name: At_100uM_ABA_P Parameter: Age (day) Value: 14
  misc_feature: MA Experiment 20000166 PARAMETER Experiment Name: At_100uM_ABA_P Parameter: Organism Value: A. thaliana
  misc_feature: MA Experiment 20000166 PARAMETER Experiment Name: At_100uM_ABA_P Parameter: Plant Line Value: WS
  misc_feature: MA Experiment 20000166 PARAMETER Experiment Name: At_100uM_ABA_P Parameter: Timepoint (hr) Value: 1
  misc_feature: MA Experiment 20000166 PARAMETER Experiment Name: At_100uM_ABA_P Parameter: Tissue Value: Aerial
  misc_feature: MA Experiment 20000166 PARAMETER Experiment Name: At_100uM_ABA_P Parameter: Treatment Value: 100uM ABA vs. No Treatment
  misc_feature: MA Experiment ID: 20000227 Result: Down-regulated in Transcription
  misc_feature: MA Experiment 20000227 PARAMETER Experiment Name: At_Root-Tips-vs-Tops_P Parameter: Tissue Value: Root Tips vs. Root Tops
  misc_feature: MA Experiment ID: 20000234 Result: Down-regulated in Transcription
  misc_feature: MA Experiment 20000234 PARAMETER Experiment Name: At_Siliques_P Parameter: Age (day) Value: 21
  misc_feature: MA Experiment 20000234 PARAMETER Experiment Name: At_Siliques_P Parameter: Organism Value: A. thaliana
  misc_feature: MA Experiment 20000234 PARAMETER Experiment Name: At_Siliques_P Parameter: Plant Line Value: WS
  misc_feature: MA Experiment 20000234 PARAMETER Experiment Name: At_Siliques_P Parameter: Tissue Value: Less Than 5mm Siliques vs. Whole Plant
  misc_feature: MA Experiment ID: 20000264 Result: Down-regulated in Transcription
  misc_feature: MA Experiment 20000264 PARAMETER Experiment Name: At_Open_Flower_P Parameter: Age (day) Value: 21
  misc_feature: MA Experiment 20000264 PARAMETER Experiment Name: At_Open_Flower_P Parameter: Plant Line Value: WS
  misc_feature: MA Experiment 20000264 PARAMETER Experiment Name: At_Open_Flower_P Parameter: Tissue Value: Open Flower vs. Whole Plant
  misc_feature: MA Experiment ID: 20000265 Result: Down-regulated in Transcription
  misc_feature: MA Experiment 20000265 PARAMETER Experiment Name: At_Open_Flower_P Parameter: Age (day) Value: 21
  misc_feature: MA Experiment 20000265 PARAMETER Experiment Name: At_Open_Flower_P Parameter: Plant Line Value: WS
  misc_feature: MA Experiment 20000265 PARAMETER Experiment Name: At_Open_Flower_P Parameter: Tissue Value: Closed Flower vs. Whole Plant
  misc_feature: MA Experiment ID: 20000267 Result: Down-regulated in Transcription
  misc_feature: MA Experiment 20000267 PARAMETER Experiment Name: At_Drought_P Parameter: Age (day) Value: 7
  misc_feature: MA Experiment 20000267 PARAMETER Experiment Name: At_Drought_P Parameter: Organism Value: A. thaliana
  misc_feature: MA Experiment 20000267 PARAMETER Experiment Name: At_Drought_P Parameter: Plant Line Value: WS
  misc_feature: MA Experiment 20000267 PARAMETER Experiment Name: At_Drought_P Parameter: Timepoint (hr) Value: 6
  misc_feature: MA Experiment 20000267 PARAMETER Experiment Name: At_Drought_P Parameter: Tissue Value: Whole Plant
  misc_feature: MA Experiment 20000267 PARAMETER Experiment Name: At_Drought_P Parameter: Treatment Value: Drought vs. No Drought
  misc_feature: MA Experiment ID: 20000268 Result: Down-regulated in Transcription
  misc_feature: MA Experiment 20000268 PARAMETER Experiment Name: At_100mM_NaCl__P Parameter: Age (day) Value: 14
  misc_feature: MA Experiment 20000268 PARAMETER Experiment Name: At_100mM_NaCl__P Parameter: Organism Value: A. thaliana
  misc_feature: MA Experiment 20000268 PARAMETER Experiment Name: At_100mM_NaCl__P Parameter: Plant Line Value: WS
  misc_feature: MA Experiment 20000268 PARAMETER Experiment Name: At_100mM_NaCl__P Parameter: Timepoint (hr) Value: 6
  misc_feature: MA Experiment 20000268 PARAMETER Experiment Name: At_100mM_NaCl__P Parameter: Tissue Value: Whole Plant
  misc_feature: MA Experiment 20000268 PARAMETER Experiment Name: At_100mM_NaCl__P Parameter: Treatment Value: 100mM NaCl vs. No Treatment
  misc_feature: MA Experiment ID: 20000308 Result: Down-regulated in Transcription
  misc_feature: MA Experiment 20000308 PARAMETER Experiment Name: At_100mM_NaCl__P Parameter: Age (day) Value: 17
  misc_feature: MA Experiment 20000308 PARAMETER Experiment Name: At_100mM_NaCl__P Parameter: Organism Value: A. thaliana
  misc_feature: MA Experiment 20000308 PARAMETER Experiment Name: At_100mM_NaCl__P Parameter: Plant Line Value: WS
  misc_feature: MA Experiment 20000308 PARAMETER Experiment Name: At_100mM_NaCl__P Parameter: Timepoint (hr) Value: 72
  misc_feature: MA Experiment 20000308 PARAMETER Experiment Name: At_100mM_NaCl__P Parameter: Tissue Value: Whole Plant
  misc_feature: MA Experiment 20000308 PARAMETER Experiment Name: At_100mM_NaCl__P Parameter: Treatment Value: 100mM NaCl vs. No Treatment
  misc_feature: MA Experiment ID: 20000436 Result: Down-regulated in Transcription
  misc_feature: MA Experiment 20000436 PARAMETER Experiment Name: At_Drought_P Parameter: Age (day) Value: 7
  misc_feature: MA Experiment 20000436 PARAMETER Experiment Name: At_Drought_P Parameter: Organism Value: A. thaliana
  misc_feature: MA Experiment 20000436 PARAMETER Experiment Name: At_Drought_P Parameter: Plant Line Value: WS
  misc_feature: MA Experiment 20000436 PARAMETER Experiment Name: At_Drought_P Parameter: Timepoint (hr) Value: 12
  misc_feature: MA Experiment 20000436 PARAMETER Experiment Name: At_Drought_P Parameter: Tissue Value: Whole Plant
  misc_feature: MA Experiment 20000436 PARAMETER Experiment Name: At_Drought_P Parameter: Treatment Value: Drought vs. No Drought
  misc_feature: MA Experiment ID: 20000437 Result: Down-regulated in Transcription
  misc_feature: MA Experiment 20000437 PARAMETER Experiment Name: At_Drought_P Parameter: Age (day) Value: 8
  misc_feature: MA Experiment 20000437 PARAMETER Experiment Name: At_Drought_P Parameter: Organism Value: A. thaliana
  misc_feature: MA Experiment 20000437 PARAMETER Experiment Name: At_Drought_P Parameter: Plant Line Value: WS
  misc_feature: MA Experiment 20000437 PARAMETER Experiment Name: At_Drought_P Parameter: Timepoint (hr) Value: 24
  misc_feature: MA Experiment 20000437 PARAMETER Experiment Name: At_Drought_P Parameter: Tissue Value: Whole Plant
  misc_feature: MA Experiment 20000437 PARAMETER Experiment Name: At_Drought_P Parameter: Treatment Value: Drought vs. No Drought
  misc_feature: MA Experiment ID: 20000439 Result: Down-regulated in Transcription
  misc_feature: MA Experiment 20000439 PARAMETER Experiment Name: At_Roots__P Parameter: Age (day) Value: 14 vs. 21
  misc_feature: MA Experiment 20000439 PARAMETER Experiment Name: At_Roots__P Parameter: Organism Value: A. thaliana
  misc_feature: MA Experiment 20000439 PARAMETER Experiment Name: At_Roots__P Parameter: Tissue Value: Roots vs. Whole Plant
  misc_feature: MA Experiment ID: 20000453 Result: Down-regulated in Transcription
  misc_feature: MA Experiment 20000453 PARAMETER Experiment Name: At_100uM_ABA_P Parameter: Age (day) Value: 15
  misc_feature: MA Experiment 20000453 PARAMETER Experiment Name: At_100uM_ABA_P Parameter: Organism Value: A. thaliana
  misc_feature: MA Experiment 20000453 PARAMETER Experiment Name: At_100uM_ABA_P Parameter: Plant Line Value: WS
  misc_feature: MA Experiment 20000453 PARAMETER Experiment Name: At_100uM_ABA_P Parameter: Timepoint (hr) Value: 24
  misc_feature: MA Experiment 20000453 PARAMETER Experiment Name: At_100uM_ABA_P Parameter: Tissue Value: Aerial
  misc_feature: MA Experiment 20000453 PARAMETER Experiment Name: At_100uM_ABA_P Parameter: Treatment Value: 100uM ABA vs. No Treatment
  misc_feature: MA Experiment ID: 20000455 Result: Down-regulated in Transcription
  misc_feature: MA Experiment 20000455 PARAMETER Experiment Name: At_100uM_ABA_P Parameter: Age (day) Value: 16
  misc_feature: MA Experiment 20000455 PARAMETER Experiment Name: At_100uM_ABA_P Parameter: Organism Value: A. thaliana
  misc_feature: MA Experiment 20000455 PARAMETER Experiment Name: At_100uM_ABA_P Parameter: Plant Line Value: WS
  misc_feature: MA Experiment 20000455 PARAMETER Experiment Name: At_100uM_ABA_P Parameter: Timepoint (hr) Value: 48
  misc_feature: MA Experiment 20000455 PARAMETER Experiment Name: At_100uM_ABA_P Parameter: Tissue Value: Aerial
  misc_feature: MA Experiment 20000455 PARAMETER Experiment Name: At_100uM_ABA_P Parameter: Treatment Value: 100uM ABA vs. No Treatment
  misc_feature: MA Experiment ID: 20001450 Result: Up-regulated in Transcription
  misc_feature: MA Experiment 20001450 PARAMETER Experiment Name: At_Far-red-induction_P Parameter: Age (day) Value: 7
  misc_feature: MA Experiment 20001450 PARAMETER Experiment Name: At_Far-red-induction_P Parameter: Light Value: Far-red vs. White
  misc_feature: MA Experiment 20001450 PARAMETER Experiment Name: At_Far-red-induction_P Parameter: Organism Value: A. thaliana
  misc_feature: MA Experiment 20001450 PARAMETER Experiment Name: At_Far-red-induction_P Parameter: Plant Line Value: Columbia
  misc_feature: MA Experiment 20001450 PARAMETER Experiment Name: At_Far-red-induction_P Parameter: Timepoint (hr) Value: 8
  misc_feature: MA Experiment 20001450 PARAMETER Experiment Name: At_Far-red-induction_P Parameter: Tissue Value: Whole Plant
  misc_feature: MA Experiment ID: 20001451 Result: Up-regulated in Transcription
  misc_feature: MA Experiment 20001451 PARAMETER Experiment Name: At_Far-red-induction_P Parameter: Age (day) Value: 7
  misc_feature: MA Experiment 20001451 PARAMETER Experiment Name: At_Far-red-induction_P Parameter: Light Value: Far-red vs. White
  misc_feature: MA Experiment 20001451 PARAMETER Experiment Name: At_Far-red-induction_P Parameter: Organism Value: A. thaliana
  misc_feature: MA Experiment 20001451 PARAMETER Experiment Name: At_Far-red-induction_P Parameter: Plant Line Value: Columbia
  misc_feature: MA Experiment 20001451 PARAMETER Experiment Name: At_Far-red-induction_P Parameter: Timepoint (hr) Value: 24
  misc_feature: MA Experiment 20001451 PARAMETER Experiment Name: At_Far-red-induction_P Parameter: Tissue Value: Whole Plant
  misc_feature: MA Experiment ID: 20001554 Result: Down-regulated in Transcription
  misc_feature: MA Experiment 20001554 PARAMETER Experiment Name: At_Drought_Soil_Dry_P Parameter: Age (day) Value: 21
  misc_feature: MA Experiment 20001554 PARAMETER Experiment Name: At_Drought_Soil_Dry_P Parameter: Organism Value: A. thaliana
  misc_feature: MA Experiment 20001554 PARAMETER Experiment Name: At_Drought_Soil_Dry_P Parameter: Plant Line Value: WS
  misc_feature: MA Experiment 20001554 PARAMETER Experiment Name: At_Drought_Soil_Dry_P Parameter: Post Timepoint (hr) Value: None
  misc_feature: MA Experiment 20001554 PARAMETER Experiment Name: At_Drought_Soil_Dry_P Parameter: Post-Treatment Value: None
  misc_feature: MA Experiment 20001554 PARAMETER Experiment Name: At_Drought_Soil_Dry_P Parameter: Timepoint (day) Value: 7
  misc_feature: MA Experiment 20001554 PARAMETER Experiment Name: At_Drought_Soil_Dry_P Parameter: Treatment Value: Drought vs. No Drought
  misc_feature: MA Experiment ID: 20001555 Result: Down-regulated in Transcription
  misc_feature: MA Experiment 20001555 PARAMETER Experiment Name: At_Drought_Soil_Dry_P Parameter: Age (day) Value: 24
  misc_feature: MA Experiment 20001555 PARAMETER Experiment Name: At_Drought_Soil_Dry_P Parameter: Organism Value: A. thaliana
  misc_feature: MA Experiment 20001555 PARAMETER Experiment Name: At_Drought_Soil_Dry_P Parameter: Plant Line Value: WS
  misc_feature: MA Experiment 20001555 PARAMETER Experiment Name: At_Drought_Soil_Dry_P Parameter: Post Timepoint (hr) Value: None
  misc_feature: MA Experiment 20001555 PARAMETER Experiment Name: At_Drought_Soil_Dry_P Parameter: Post-Treatment Value: None
  misc_feature: MA Experiment 20001555 PARAMETER Experiment Name: At_Drought_Soil_Dry_P Parameter: Timepoint (day) Value: 10
  misc_feature: MA Experiment 20001555 PARAMETER Experiment Name: At_Drought_Soil_Dry_P Parameter: Treatment Value: Drought vs. No Drought
  misc_feature: MA Experiment ID: 20001556 Result: Down-regulated in Transcription
  misc_feature: MA Experiment 20001556 PARAMETER Experiment Name: At_Drought_Soil_Dry_P Parameter: Age (day) Value: 26
  misc_feature: MA Experiment 20001556 PARAMETER Experiment Name: At_Drought_Soil_Dry_P Parameter: Organism Value: A. thaliana
  misc_feature: MA Experiment 20001556 PARAMETER Experiment Name: At_Drought_Soil_Dry_P Parameter: Plant Line Value: WS
  misc_feature: MA Experiment 20001556 PARAMETER Experiment Name: At_Drought_Soil_Dry_P Parameter: Post Timepoint (hr) Value: None
  misc_feature: MA Experiment 20001556 PARAMETER Experiment Name: At_Drought_Soil_Dry_P Parameter: Post-Treatment Value: None
  misc_feature: MA Experiment 20001556 PARAMETER Experiment Name: At_Drought_Soil_Dry_P Parameter: Timepoint (day) Value: 12
  misc_feature: MA Experiment 20001556 PARAMETER Experiment Name: At_Drought_Soil_Dry_P Parameter: Treatment Value: Drought vs. No Drought
  misc_feature: MA Experiment ID: 20001757 Result: Up-regulated in Transcription
  misc_feature: MA Experiment 20001757 PARAMETER Experiment Name: At_50mM_NH4NO3_L-to-H_P Parameter: Timepoint (hr) Value: 6
  misc_feature: MA Experiment 20001757 PARAMETER Experiment Name: At_50mM_NH4NO3_L-to-H_P Parameter: Tissue Value: Leaf
  misc_feature: MA Experiment 20001757 PARAMETER Experiment Name: At_50mM_NH4NO3_L-to-H_P Parameter: Treatment Value: 50mM NH4NO3 vs 100mM Mannitol
  misc_feature: MA Experiment ID: 20001904 Result: Down-regulated in Transcription
  misc_feature: MA Experiment 20001904 PARAMETER Experiment Name: At_Drought_Reproduction_P Parameter: Age (day) Value: 37
  misc_feature: MA Experiment 20001904 PARAMETER Experiment Name: At_Drought_Reproduction_P Parameter: Organism Value: A. thaliana
  misc_feature: MA Experiment 20001904 PARAMETER Experiment Name: At_Drought_Reproduction_P Parameter: Plant Line Value: WS
  misc_feature: MA Experiment 20001904 PARAMETER Experiment Name: At_Drought_Reproduction_P Parameter: Timepoint (day) Value: 7
  misc_feature: MA Experiment 20001904 PARAMETER Experiment Name: At_Drought_Reproduction_P Parameter: Tissue Value: Rosettes
  misc_feature: MA Experiment 20001904 PARAMETER Experiment Name: At_Drought_Reproduction_P Parameter: Treatment Value: Drought vs. No Drought
  misc_feature: MA Experiment ID: 20001906 Result: Down-regulated in Transcription
  misc_feature: MA Experiment 20001906 PARAMETER Experiment Name: At_Drought_Reproduction_P Parameter: Age (day) Value: 35
  misc_feature: MA Experiment 20001906 PARAMETER Experiment Name: At_Drought_Reproduction_P Parameter: Organism Value: A. thaliana
  misc_feature: MA Experiment 20001906 PARAMETER Experiment Name: At_Drought_Reproduction_P Parameter: Plant Line Value: WS
  misc_feature: MA Experiment 20001906 PARAMETER Experiment Name: At_Drought_Reproduction_P Parameter: Timepoint (day) Value: 5
  misc_feature: MA Experiment 20001906 PARAMETER Experiment Name: At_Drought_Reproduction_P Parameter: Tissue Value: Siliques
  misc_feature: MA Experiment 20001906 PARAMETER Experiment Name: At_Drought_Reproduction_P Parameter: Treatment Value: Drought vs. No Drought
aaaagatggaaaaagttttctccgacgaagaaatctccggtaaccatcactggtcggttaatggaatgacgtcgttgaatcgcagtgcttccgaatgggcattcaatcgtttcatacaagaatcctccgccgctgcagacgacggagaatctacgacggcgtgtggtgtttccgtctcctctcctcctaatgttcctgtagattcagaggaatacagagcatttctcaagagtaaacttaatcttgcttgtgctgctgtcgccatgaaaagggatacttctggtagatctgacaatggtggagccaatgaatcagaacaagcctctcttgcttcttccaaagctacaccaatgatgagcagtgctataacaagtggatctgagctctctggtgatgaagaagaagctgatggtgaaactaatatgaaccctactaatgttaaacgcgttaaaaggatgctctctaatagagaatcagctagacggtccagaagaagaaagcaagcacacttgagtgagctagagacacaagtttcacagcttcgtgtagagaattcaaaactcatgaagggtctcactgatgtaactcaaacattcaatgatgcatctgtagaaaacagagttttaaaagccaatattgagacactacgagcaaaggtgaaaatggctgaagagacagtgaagagactcactggctttaacccaatgttccacaatatgcctcagattgtttcaactgtctctcttccttcagagacatcaaattctccagacactacaagcagccaagtgactacaccagagatcattagctcggggaacaaaggcaaggccttgatagggtgcaagatgaacagaacagcttcgatgcgtagagttgagagcttggaacatctgcagaaacgtattcgaagcgttggggatcagtagctgttaaagaagaatcttgatttgtaacattaatcttaagacatatgttaagacaaaatgttgtatgtttttgtaaagaattgttttttcagattatttaaatttttttttgtcttcttcgttgattgtttgtgttgaacttctaattttcattgtacatgtcttttgttaaatttacaaagtttttc

SEQ ID NO: 82187 - protein, 308 aa, Arabidopsis thaliana
  peptide (1)..(308): Ceres Seq. ID no. 12663943
  misc_feature (143)..(207): Pfam Name: bZIP transcription factor Pfam Description: bZIP transcription factor
  misc_feature (2)..(308): Homolog of NCBI NO: 30691973 NR Description: bZIP family transcription factor [Arabidopsis >gi|15450641|gb|AAK96592.1| AT5g28770/T32B20_60 [Arabidopsis >gi|17386126|gb|AAL38609.1|AF446876_1 AT5g28770/T32B20_60
  misc_feature (2)..(308): Homolog of NCBI NO: 30691978 NR Description: bZIP family transcription factor [Arabidopsis
  misc_feature (2)..(308): Homolog of NCBI NO: 7682779 NR Description: Hypothetical protein T32B20.c [Arabidopsis
  misc_feature (2)..(185): Homolog of NCBI NO: 10954099 NR Description: bZIP protein BZO2H3 [Arabidopsis thaliana]
  misc_feature (101)..(264): Homolog of NCBI NO: 100163 NR Description: light-induced protein CPRF-2 - parsley
  misc_feature (101)..(264): Homolog of NCBI NO: 2842757 NR Description: Light-inducible protein CPRF-2
  misc_feature (280)..(303): Homolog of NCBI NO: 100163 NR Description: light-induced protein CPRF-2 - parsley
  misc_feature (280)..(303): Homolog of NCBI NO: 2842757 NR Description: Light-inducible protein CPRF-2
KMEKVFSDEEISGNHHWSVNGMTSLNRSASEWAFNRFIQESSAAADDGESTTACGVSVSSPPNVPVDSEEYRAFLKSKLNLACAAVAMKRDTSGRSDNGGANESEQASLASSKATPMMSSAITSGSELSGDEEEADGETNMNPTNVKRVKRMLSNRESARRSRRRKQAHLSELETQVSQLRVENSKLMKGLTDVTQTFNDASVENRVLKANIETLRAKVKMAEETVKRLTGFNPMFHNMPQIVSTVSLPSETSNSPDTTSSQVTTPEIISSGNKGKALIGCKMNRTASMRRVESLEHLQKRIRSVGDQ

SEQ ID NO: 82188 - protein, 307 aa, Arabidopsis thaliana
  peptide (1)..(307): Ceres Seq. ID no. 12663944
  misc_feature (142)..(206): Pfam Name: bZIP transcription factor Pfam Description: bZIP transcription factor
  misc_feature (1)..(307): Homolog of NCBI NO: 30691973 NR Description: bZIP family transcription factor [Arabidopsis >gi|15450641|gb|AAK96592.1| AT5g28770/T32B20_60 [Arabidopsis >gi|17386126|gb|AAL38609.1|AF446876_1 AT5g28770/T32B20_60
  misc_feature (1)..(307): Homolog of NCBI NO: 30691978 NR Description: bZIP family transcription factor [Arabidopsis
  misc_feature (1)..(307): Homolog of NCBI NO: 7682779 NR Description: Hypothetical protein T32B20.c [Arabidopsis
  misc_feature (1)..(184): Homolog of NCBI NO: 10954099 NR Description: bZIP protein BZO2H3 [Arabidopsis thaliana]
  misc_feature (100)..(263): Homolog of NCBI NO: 100163 NR Description: light-induced protein CPRF-2 - parsley
  misc_feature (100)..(263): Homolog of NCBI NO: 2842757 NR Description: Light-inducible protein CPRF-2
  misc_feature (279)..(302): Homolog of NCBI NO: 100163 NR Description: light-induced protein CPRF-2 - parsley
  misc_feature (279)..(302): Homolog of NCBI NO: 2842757 NR Description: Light-inducible protein CPRF-2
MEKVFSDEEISGNHHWSVNGMTSLNRSASEWAFNRFIQESSAAADDGESTTACGVSVSSPPNVPVDSEEYRAFLKSKLNLACAAVAMKRDTSGRSDNGGANESEQASLASSKATPMMSSAITSGSELSGDEEEADGETNMNPTNVKRVKRMLSNRESARRSRRRKQAHLSELETQVSQLRVENSKLMKGLTDVTQTFNDASVENRVLKANIETLRAKVKMAEETVKRLTGFNPMFHNMPQIVSTVSLPSETSNSPDTTSSQVTTPEIISSGNKGKALIGCKMNRTASMRRVESLEHLQKRIRSVGDQ

SEQ ID NO: 82189 - protein, 287 aa, Arabidopsis thaliana
  peptide (1)..(287): Ceres Seq. ID no. 12663945
  misc_feature (122)..(186): Pfam Name: bZIP transcription factor Pfam Description: bZIP transcription factor
  misc_feature (1)..(287): Homolog of NCBI NO: 30691973 NR Description: bZIP family transcription factor [Arabidopsis >gi|15450641|gb|AAK96592.1| AT5g28770/T32B20_60 [Arabidopsis >gi|17386126|gb|AAL38609.1|AF446876_1 AT5g28770/T32B20_60
  misc_feature (1)..(287): Homolog of NCBI NO: 30691978 NR Description: bZIP family transcription factor [Arabidopsis
  misc_feature (1)..(287): Homolog of NCBI NO: 7682779 NR Description: Hypothetical protein T32B20.c [Arabidopsis
  misc_feature (1)..(164): Homolog of NCBI NO: 10954099 NR Description: bZIP protein BZO2H3 [Arabidopsis thaliana]
  misc_feature (80)..(243): Homolog of NCBI NO: 100163 NR Description: light-induced protein CPRF-2 - parsley
  misc_feature (80)..(243): Homolog of NCBI NO: 2842757 NR Description: Light-inducible protein CPRF-2
  misc_feature (259)..(282): Homolog of NCBI NO: 100163 NR Description: light-induced protein CPRF-2 - parsley
  misc_feature (259)..(282): Homolog of NCBI NO: 2842757 NR Description: Light-inducible protein CPRF-2
MTSLNRSASEWAFNRFIQESSAAADDGESTTACGVSVSSPPNVPVDSEEYRAFLKSKLNLACAAVAMKRDTSGRSDNGGANESEQASLASSKATPMMSSAITSGSELSGDEEEADGETNMNPTNVKRVKRMLSNRESARRSRRRKQAHLSELETQVSQLRVENSKLMKGLTDVTQTFNDASVENRVLKANIETLRAKVKMAEETVKRLTGFNPMFHNMPQIVSTVSLPSETSNSPDTTSSQVTTPEIISSGNKGKALIGCKMNRTASMRRVESLEHLQKRIRSVGDQ

SEQ ID NO: 82190 - DNA, 1893 bp, Arabidopsis thaliana
  misc_feature (1)..(1893): Ceres Seq. ID no. 12664124
  misc_feature: MA Experiment ID: 20000327 Result: Up-regulated in Transcription
  misc_feature: MA Experiment 20000327 PARAMETER Experiment Name: At_42deg_Heat_Sub_P Parameter: Age (day) Value: 14
  misc_feature: MA Experiment 20000327 PARAMETER Experiment Name: At_42deg_Heat_Sub_P Parameter: Organism Value: A. thaliana
  misc_feature: MA Experiment 20000327 PARAMETER Experiment Name: At_42deg_Heat_Sub_P Parameter: Plant Line Value: WS
  misc_feature: MA Experiment 20000327 PARAMETER Experiment Name: At_42deg_Heat_Sub_P Parameter: Temperature (deg C) Value: 42 vs. 22
  misc_feature: MA Experiment 20000327 PARAMETER Experiment Name: At_42deg_Heat_Sub_P Parameter: Timepoint (hr) Value: 1
  misc_feature: MA Experiment 20000327 PARAMETER Experiment Name: At_42deg_Heat_Sub_P Parameter: Tissue Value: Aerial
atgtttgcgaagaacatcaaggaggttgagttgcggatacctcttgttgacgctctagcgctaatcctagatacccacaagtttttgaaagacttgatcgtggagagaattcaagaagtgcaagggatggtagtattgagtcatgaatgcagtgctatcatacagaagaagatcgttcctaagaagcttagtgatcctggttcattcactctaccatgctttttaggtacagtggctttcaacagatgcctatgtgatttaggagcattagtcagtcccatgccactctctattgccaaaagattggggttcactcaatataaatcctgcaacatatcccttatcctagctgacaggtcagtaaggatctcgcatggtttactcaaaaacctaccaatcagaattggagctgcagagatatcaactgactttgtaatcctggagatggatgaagagcccaaggaccctttgattttgagaagacctttcttagcaactgcaggagctatgattgatgtcaagaaagggaagattgatctaaaccttggcaaagactttaggatgacctttgacatcaaagatgcaatgaagaagcctaacatagaagggcaactcttttggatcgaagaaatggatcagttagctgatgagttactagaagagcttgcacaagaagatcaccttaacagtgctttaaccaaaactggtcaagatgggtttctgcatttgaaggttttgggataccagaagcttttagactcacataaagcgatggaagaatccaaaccctttgaggaattgaatggaccagcaacaaaggtaatggtaatgaatgaagaaggatcaacacaagttcaacctgctcactcgagaacttactcgaccaatcactcgacctcgactgtcagcaactctggggagcagatcattccaacttcagatgactggtctaaactcaaagcaccgaaggtttctccagtgcaatgcatccctaaaaagggcggaattactgttattaaaaatgaaaaggatgaattgatccctattagaactataactggtcttagaatgtgtattgattatagaaatctaaatgctgcatctaggaatgatcattttcctttaccattcactgatcaaatgcttgaacgcttagctaatcacccatactattgctttcttgatggatatagtggtttctttcaaataccaattcaccctaatgatcatgagaaaaccactttcacttgtccttatggaacttttgcttatgagagaatgccatttggtttatgcaatgctcctgcaacctttcagaggtgtatgacctctatattttcggatataatcgaggagatggtggaggtcttcatggacgatttttcggtctatggcccctctttctcctcatgtttgttgaatcttggtagggtactaaccaggtgcgaagagactaatcttgttctcaattgggaaaagtgtcatttcatggtgaaggaaggcataatgttgggtcacaagatatcagagaagggtatagaggttgacaagggttgttttcttggtcatgcggggttctacagaagatttattaaggacttctccaaaatagccaggccgttaacaagactattgtgcaaggagaccgagttcgaattcgatgaggactgccccaaatcgtttcacaccatcaaggaagctttggtatctgctcctgttgttcgagctactaattgggattatccgttcgagattatgtgtgatgcattagattacgccgtaggagctgttctaggccagaaaatagacaagaagcttcacgtcatatactacgccagccgaacgttggatgaagctcaaggaagatatgcaaccactgaaaaggagctttaa

SEQ ID NO: 82191 - protein, 630 aa, Arabidopsis thaliana
  peptide (1)..(630): Ceres Seq. ID no. 12664125
  misc_feature (324)..(508): Pfam Name: Reverse transcriptase (RNA-dependent DNA polymerase) Pfam Description: Reverse transcriptase (RNA-dependent DNA
  misc_feature (1)..(332): Homolog of NCBI NO: 6691193 NR Description: F7F22.17 [Arabidopsis thaliana]
  misc_feature (324)..(518): Homolog of NCBI NO: 6691193 NR Description: F7F22.17 [Arabidopsis thaliana]
  misc_feature (520)..(630): Homolog of NCBI NO: 6691193 NR Description: F7F22.17 [Arabidopsis thaliana]
  misc_feature (1)..(332): Homolog of NCBI NO: 15223982 NR Description: polyprotein, putative; protein id: At1g42375.1
  misc_feature (324)..(518): Homolog of NCBI NO: 15223982 NR Description: polyprotein, putative; protein id: At1g42375.1
  misc_feature (520)..(630): Homolog of NCBI NO: 15223982 NR Description: polyprotein, putative; protein id: At1g42375.1
  misc_feature (4)..(332): Homolog of NCBI NO: 6691191 NR Description: F7F22.15 [Arabidopsis thaliana]
  misc_feature (324)..(518): Homolog of NCBI NO: 6691191 NR Description: F7F22.15 [Arabidopsis thaliana]
  misc_feature (520)..(630): Homolog of NCBI NO: 6691191 NR Description: F7F22.15 [Arabidopsis thaliana]
  misc_feature (52)..(332): Homolog of NCBI NO: 25407395 NR Description: probable athila transposon protein [imported] - thaliana >gi|7267363|emb|CAB81136.1| putative athila transposon
MFAKNIKEVELRIPLVDALALILDTHKFLKDLIVERIQEVQGMVVLSHECSAIIQKKIVPKKLSDPGSFTLPCFLGTVAFNRCLCDLGALVSPMPLSIAKRLGFTQYKSCNISLILADRSVRISHGLLKNLPIRIGAAEISTDFVILEMDEEPKDPLILRRPFLATAGAMIDVKKGKIDLNLGKDFRMTFDIKDAMKKPNIEGQLFWIEEMDQLADELLEELAQEDHLNSALTKTGQDGFLHLKVLGYQKLLDSHKAMEESKPFEELNGPATKVMVMNEEGSTQVQPAHSRTYSTNHSTSTVSNSGEQIIPTSDDWSKLKAPKVSPVQCIPKKGGITVIKNEKDELIPIRTITGLRMCIDYRNLNAASRNDHFPLPFTDQMLERLANHPYYCFLDGYSGFFQIPIHPNDHEKTTFTCPYGTFAYERMPFGLCNAPATFQRCMTSIFSDIIEEMVEVFMDDFSVYGPSFSSCLLNLGRVLTRCEETNLVLNWEKCHFMVKEGIMLGHKISEKGIEVDKGCFLGHAGFYRRFIKDFSKIARPLTRLLCKETEFEFDEDCPKSFHTIKEALVSAPVVRATNWDYPFEIMCDALDYAVGAVLGQKIDKKLHVIYYASRTLDEAQGRYATTEKEL

SEQ ID NO: 82192 - protein, 588 aa, Arabidopsis thaliana
  peptide (1)..(588): Ceres Seq. ID no. 12664126
  misc_feature (282)..(466): Pfam Name: Reverse transcriptase (RNA-dependent DNA polymerase) Pfam Description: Reverse transcriptase (RNA-dependent DNA
  misc_feature (1)..(290): Homolog of NCBI NO: 6691193 NR Description: F7F22.17 [Arabidopsis thaliana]
  misc_feature (282)..(476): Homolog of NCBI NO: 6691193 NR Description: F7F22.17 [Arabidopsis thaliana]
  misc_feature (478)..(588): Homolog of NCBI NO: 6691193 NR Description: F7F22.17 [Arabidopsis thaliana]
  misc_feature (1)..(290): Homolog of NCBI NO: 15223982 NR Description: polyprotein, putative; protein id: At1g42375.1
  misc_feature (282)..(476): Homolog of NCBI NO: 15223982 NR Description: polyprotein, putative; protein id: At1g42375.1
  misc_feature (478)..(588): Homolog of NCBI NO: 15223982 NR Description: polyprotein, putative; protein id: At1g42375.1
  misc_feature (1)..(290): Homolog of NCBI NO: 6691191 NR Description: F7F22.15 [Arabidopsis thaliana]
  misc_feature (282)..(476): Homolog of NCBI NO: 6691191 NR Description: F7F22.15 [Arabidopsis thaliana]
  misc_feature (478)..(588): Homolog of NCBI NO: 6691191 NR Description: F7F22.15 [Arabidopsis thaliana]
  misc_feature (10)..(290): Homolog of NCBI NO: 25407395 NR Description: probable athila transposon protein [imported] - thaliana >gi|7267363|emb|CAB81136.1| putative athila transposon
MVVLSHECSAIIQKKIVPKKLSDPGSFTLPCFLGTVAFNRCLCDLGALVSPMPLSIAKRLGFTQYKSCNISLILADRSVRISHGLLKNLPIRIGAAEISTDFVILEMDEEPKDPLILRRPFLATAGAMIDVKKGKIDLNLGKDFRMTFDIKDAMKKPNIEGQLFWIEEMDQLADELLEELAQEDHLNSALTKTGQDGFLHLKVLGYQKLLDSHKAMEESKPFEELNGPATKVMVMNEEGSTQVQPAHSRTYSTNHSTSTVSNSGEQIIPTSDDWSKLKAPKVSPVQCIPKKGGITVIKNEKDELIPIRTITGLRMCIDYRNLNAASRNDHFPLPFTDQMLERLANHPYYCFLDGYSGFFQIPIHPNDHEKTTFTCPYGTFAYERMPFGLCNAPATFQRCMTSIFSDIIEEMVEVFMDDFSVYGPSFSSCLLNLGRVLTRCEETNLVLNWEKCHFMVKEGIMLGHKISEKGIEVDKGCFLGHAGFYRRFIKDFSKIARPLTRLLCKETEFEFDEDCPKSFHTIKEALVSAPVVRATNWDYPFEIMCDALDYAVGAVLGQKIDKKLHVIYYASRTLDEAQGRYATTEKEL

SEQ ID NO: 82193 - protein, 537 aa, Arabidopsis thaliana
  peptide (1)..(537): Ceres Seq. ID no. 12664127
  misc_feature (231)..(415): Pfam Name: Reverse transcriptase (RNA-dependent DNA polymerase) Pfam Description: Reverse transcriptase (RNA-dependent DNA
  misc_feature (1)..(239): Homolog of NCBI NO: 6691193 NR Description: F7F22.17 [Arabidopsis thaliana]
  misc_feature (231)..(425): Homolog of NCBI NO: 6691193 NR Description: F7F22.17 [Arabidopsis thaliana]
  misc_feature (427)..(537): Homolog of NCBI NO: 6691193 NR Description: F7F22.17 [Arabidopsis thaliana]
  misc_feature (1)..(239): Homolog of NCBI NO: 15223982 NR Description: polyprotein, putative; protein id: At1g42375.1
  misc_feature (231)..(425): Homolog of NCBI NO: 15223982 NR Description: polyprotein, putative; protein id: At1g42375.1
  misc_feature (427)..(537): Homolog of NCBI NO: 15223982 NR Description: polyprotein, putative; protein id: At1g42375.1
  misc_feature (1)..(239): Homolog of NCBI NO: 6691191 NR Description: F7F22.15 [Arabidopsis thaliana]
  misc_feature (231)..(425): Homolog of NCBI NO: 6691191 NR Description: F7F22.15 [Arabidopsis thaliana]
  misc_feature (427)..(537): Homolog of NCBI NO: 6691191 NR Description: F7F22.15 [Arabidopsis thaliana]
  misc_feature (1)..(239): Homolog of NCBI NO: 25407395 NR Description: probable athila transposon protein [imported] - thaliana >gi|7267363|emb|CAB81136.1| putative athila transposon
MPLSIAKRLGFTQYKSCNISLILADRSVRISHGLLKNLPIRIGAAEISTDFVILEMDEEPKDPLILRRPFLATAGAMIDVKKGKIDLNLGKDFRMTFDIKDAMKKPNIEGQLFWIEEMDQLADELLEELAQEDHLNSALTKTGQDGFLHLKVLGYQKLLDSHKAMEESKPFEELNGPATKVMVMNEEGSTQVQPAHSRTYSTNHSTSTVSNSGEQIIPTSDDWSKLKAPKVSPVQCIPKKGGITVIKNEKDELIPIRTITGLRMCIDYRNLNAASRNDHFPLPFTDQMLERLANHPYYCFLDGYSGFFQIPIHPNDHEKTTFTCPYGTFAYERMPFGLCNAPATFQRCMTSIFSDIIEEMVEVFMDDFSVYGPSFSSCLLNLGRVLTRCEETNLVLNWEKCHFMVKEGIMLGHKISEKGIEVDKGCFLGHAGFYRRFIKDFSKIARPLTRLLCKETEFEFDEDCPKSFHTIKEALVSAPVVRATNWDYPFEIMCDALDYAVGAVLGQKIDKKLHVIYYASRTLDEAQGRYATTEKEL

SEQ ID NO: 82194 - DNA, 570 bp, Arabidopsis thaliana
  misc_feature (1)..(570): Ceres Seq. ID no. 12664269
  misc_feature: MA Experiment ID: 20000171 Result: Up-regulated in Transcription
  misc_feature: MA Experiment 20000171 PARAMETER Experiment Name: At_42deg_Heat_P Parameter: Age (day) Value: 14
  misc_feature: MA Experiment 20000171 PARAMETER Experiment Name: At_42deg_Heat_P Parameter: Organism Value: A. thaliana
  misc_feature: MA Experiment 20000171 PARAMETER Experiment Name: At_42deg_Heat_P Parameter: Plant Line Value: WS
  misc_feature: MA Experiment 20000171 PARAMETER Experiment Name: At_42deg_Heat_P Parameter: Temperature (deg C) Value: 42 vs. 22
  misc_feature: MA Experiment 20000171 PARAMETER Experiment Name: At_42deg_Heat_P Parameter: Timepoint (hr) Value: 1
  misc_feature: MA Experiment 20000171 PARAMETER Experiment Name: At_42deg_Heat_P Parameter: Tissue Value: Aerial
  misc_feature: MA Experiment ID: 20000173 Result: Up-regulated in Transcription
  misc_feature: MA Experiment 20000173 PARAMETER Experiment Name: At_42deg_Heat_P Parameter: Age (day) Value: 14
  misc_feature: MA Experiment 20000173 PARAMETER Experiment Name: At_42deg_Heat_P Parameter: Organism Value: A. thaliana
  misc_feature: MA Experiment 20000173 PARAMETER Experiment Name: At_42deg_Heat_P Parameter: Plant Line Value: WS
  misc_feature: MA Experiment 20000173 PARAMETER Experiment Name: At_42deg_Heat_P Parameter: Temperature (deg C) Value: 42 vs. 22
  misc_feature: MA Experiment 20000173 PARAMETER Experiment Name: At_42deg_Heat_P Parameter: Timepoint (hr) Value: 6
  misc_feature: MA Experiment 20000173 PARAMETER Experiment Name: At_42deg_Heat_P Parameter: Tissue Value: Aerial
  misc_feature: MA Experiment ID: 20000185 Result: Up-regulated in Transcription
  misc_feature: MA Experiment 20000185 PARAMETER Experiment Name: At_Roots__P Parameter: Age (day) Value: 7 vs. 21
  misc_feature: MA Experiment 20000185 PARAMETER Experiment Name: At_Roots__P Parameter: Organism Value: A. thaliana
  misc_feature: MA Experiment 20000185 PARAMETER Experiment Name: At_Roots__P Parameter: Tissue Value: Roots vs. Whole Plant
  misc_feature: MA Experiment ID: 20000437 Result: Up-regulated in Transcription
  misc_feature: MA Experiment 20000437 PARAMETER Experiment Name: At_Drought_P Parameter: Age (day) Value: 8
  misc_feature: MA Experiment 20000437 PARAMETER Experiment Name: At_Drought_P Parameter: Organism Value: A. thaliana
  misc_feature: MA Experiment 20000437 PARAMETER Experiment Name: At_Drought_P Parameter: Plant Line Value: WS
  misc_feature: MA Experiment 20000437 PARAMETER Experiment Name: At_Drought_P Parameter: Timepoint (hr) Value: 24
  misc_feature: MA Experiment 20000437 PARAMETER Experiment Name: At_Drought_P Parameter: Tissue Value: Whole Plant
  misc_feature: MA Experiment 20000437 PARAMETER Experiment Name: At_Drought_P Parameter: Treatment Value: Drought vs. No Drought
  misc_feature: MA Experiment ID: 20000439 Result: Up-regulated in Transcription
  misc_feature: MA Experiment 20000439 PARAMETER Experiment Name: At_Roots__P Parameter: Age (day) Value: 14 vs. 21
  misc_feature: MA Experiment 20000439 PARAMETER Experiment Name: At_Roots__P Parameter: Organism Value: A. thaliana
  misc_feature: MA Experiment 20000439 PARAMETER Experiment Name: At_Roots__P Parameter: Tissue Value: Roots vs. Whole Plant
ataattaattgatctctggagatttgctgttgacgaataagaagaagaacccagaattctactttaatggcgtacgtcgaaggaggtgtggttaaagcgaagaggccaatatggagactaaggacgatcaaagatttcttcttgtccatcattaatctaatacaagtcttctttgtaaccatgttttcgatggagaaatcagatgcatacaggaaaggctctaagcctaataagaagtggggtggtggcatgggtggcggtggtggtggaggcggaggcagtggcggtggtggtggtggtaggggtggtggacctcctcgtgggggcctcgacaatgttcgtggtttgaatgatatccgtggagctgaccacaattccctacctgcatgtggctcgtgctgtggctaatccttgtttgtgtggacagtggagcgcccaagaataaacgaagggatatatcatatatttacatattacttagtgttgaaaacgatgcttttggaatatgaaaaatcaaaggaacaatgattctggtgtattttgtaattgggtctaatcaaagctttttgt

SEQ ID NO: 82195 - protein, 113 aa, Arabidopsis thaliana
  peptide (1)..(113): Ceres Seq. ID no. 12664270
  misc_feature (1)..(113): Homolog of NCBI NO: 22328481 NR Description: hypothetical protein; protein id: At4g08230.1, by cDNA: gi_18252942 [Arabidopsis thaliana] unknown protein [Arabidopsis thaliana]
  misc_feature (42)..(107): Homolog of NCBI NO: 7486876 NR Description: hypothetical protein T12G13.70 - Arabidopsis >gi|5262196|emb|CAB45793.1| hypothetical protein [Arabidopsis >gi|7267463|emb|CAB81159.1| hypothetical protein [Arabidopsis
  misc_feature (1)..(103): Homolog of NCBI NO: 34902142 NR Description: hypothetical protein [Oryza sativa (japonica group)] >gi|29893606|gb|AAP06860.1| hypothetical protein [Oryza
  misc_feature (1)..(113): Homolog of NCBI NO: 24641445 NR Description: CG1840-PA [Drosophila melanogaster]
  misc_feature (1)..(109): Homolog of NCBI NO: 16767882 NR Description: GH03581p [Drosophila melanogaster]
  misc_feature (1)..(109): Homolog of NCBI NO: 28571165 NR Description: Selenoprotein G CG1844-PA
  misc_feature (45)..(104): Homolog of NCBI NO: 15965826 NR Description: PUTATIVE GLYCINE-RICH PROTEIN [Sinorhizobium
  misc_feature (51)..(96): Homolog of NCBI NO: 15965655 NR Description: HYPOTHETICAL GLYCINE RICH TRANSMEMBRANE PROTEIN meliloti] >gi|15074836|emb|CAC46481.1| HYPOTHETICAL GLYCINE RICH
  misc_feature (44)..(113): Homolog of NCBI NO: 16554785 NR Description: no on or off transient A [Drosophila americana
  misc_feature (44)..(113): Homolog of NCBI NO: 16554791 NR Description: no on or off transient A [Drosophila americana
MAYVEGGVVKAKRPIWRLRTIKDFFLSIINLIQVFFVTMFSMEKSDAYRKGSKPNKKWGGGMGGGGGGGGGSGGGGGGRGGGPPRGGLDNVRGLNDIRGADHNSLPACGSCCG

SEQ ID NO: 82196 - protein, 75 aa, Arabidopsis thaliana
  peptide (1)..(75): Ceres Seq. ID no. 12664271
  misc_feature (1)..(75): Homolog of NCBI NO: 22328481 NR Description: hypothetical protein; protein id: At4g08230.1, by cDNA: gi_18252942 [Arabidopsis thaliana] unknown protein [Arabidopsis thaliana]
  misc_feature (4)..(69): Homolog of NCBI NO: 7486876 NR Description: hypothetical protein T12G13.70 - Arabidopsis >gi|5262196|emb|CAB45793.1| hypothetical protein [Arabidopsis >gi|7267463|emb|CAB81159.1| hypothetical protein [Arabidopsis
  misc_feature (1)..(65): Homolog of NCBI NO: 34902142 NR Description: hypothetical protein [Oryza sativa (japonica group)] >gi|29893606|gb|AAP06860.1| hypothetical protein [Oryza
  misc_feature (1)..(75): Homolog of NCBI NO: 24641445 NR Description: CG1840-PA [Drosophila melanogaster]
  misc_feature (1)..(71): Homolog of NCBI NO: 16767882 NR Description: GH03581p [Drosophila melanogaster]
  misc_feature (1)..(71): Homolog of NCBI NO: 28571165 NR Description: Selenoprotein G CG1844-PA
  misc_feature (7)..(66): Homolog of NCBI NO: 15965826 NR Description: PUTATIVE GLYCINE-RICH PROTEIN [Sinorhizobium
  misc_feature (13)..(58): Homolog of NCBI NO: 15965655 NR Description: HYPOTHETICAL GLYCINE RICH TRANSMEMBRANE PROTEIN meliloti] >gi|15074836|emb|CAC46481.1| HYPOTHETICAL GLYCINE RICH
  misc_feature (6)..(75): Homolog of NCBI NO: 16554785 NR Description: no on or off transient A [Drosophila americana
  misc_feature (6)..(75): Homolog of NCBI NO: 16554791 NR Description: no on or off transient A [Drosophila americana
MFSMEKSDAYRKGSKPNKKWGGGMGGGGGGGGGSGGGGGGRGGGPPRGGLDNVRGLNDIRGADHNSLPACGSCCG

SEQ ID NO: 82197 - protein, 72 aa, Arabidopsis thaliana
  peptide (1)..(72): Ceres Seq. ID no. 12664272
  misc_feature (1)..(72): Homolog of NCBI NO: 22328481 NR Description: hypothetical protein; protein id: At4g08230.1, by cDNA: gi_18252942 [Arabidopsis thaliana] unknown protein [Arabidopsis thaliana]
  misc_feature (1)..(66): Homolog of NCBI NO: 7486876 NR Description: hypothetical protein T12G13.70 - Arabidopsis >gi|5262196|emb|CAB45793.1| hypothetical protein [Arabidopsis >gi|7267463|emb|CAB81159.1| hypothetical protein [Arabidopsis
  misc_feature (1)..(62): Homolog of NCBI NO: 34902142 NR Description: hypothetical protein [Oryza sativa (japonica group)] >gi|29893606|gb|AAP06860.1| hypothetical protein [Oryza
  misc_feature (1)..(72): Homolog of NCBI NO: 24641445 NR Description: CG1840-PA [Drosophila melanogaster]
  misc_feature (1)..(68): Homolog of NCBI NO: 16767882 NR Description: GH03581p [Drosophila melanogaster]
  misc_feature (1)..(68): Homolog of NCBI NO: 28571165 NR Description: Selenoprotein G CG1844-PA
  misc_feature (4)..(63): Homolog of NCBI NO: 15965826 NR Description: PUTATIVE GLYCINE-RICH PROTEIN [Sinorhizobium
  misc_feature (10)..(55): Homolog of NCBI NO: 15965655 NR Description: HYPOTHETICAL GLYCINE RICH TRANSMEMBRANE PROTEIN meliloti] >gi|15074836|emb|CAC46481.1| HYPOTHETICAL GLYCINE RICH
  misc_feature (3)..(72): Homolog of NCBI NO: 16554785 NR Description: no on or off transient A [Drosophila americana
  misc_feature (3)..(72): Homolog of NCBI NO: 16554791 NR Description: no on or off transient A [Drosophila americana
MEKSDAYRKGSKPNKKWGGGMGGGGGGGGGSGGGGGGRGGGPPRGGLDNVRGLNDIRGADHNSLPACGSCCG

SEQ ID NO: 82198 - DNA, 639 bp, Arabidopsis thaliana
  misc_feature (1)..(639): Ceres Seq. ID no. 12664273
  misc_feature: MA Experiment ID: 20000314 Result: Down-regulated in Transcription
  misc_feature: MA Experiment 20000314 PARAMETER Experiment Name: At_14day_Shoots-Roots_Sub_P Parameter: Age (day) Value: 14
  misc_feature: MA Experiment 20000314 PARAMETER Experiment Name: At_14day_Shoots-Roots_Sub_P Parameter: Organism Value: A. thaliana
  misc_feature: MA Experiment 20000314 PARAMETER Experiment Name: At_14day_Shoots-Roots_Sub_P Parameter: Plant Line Value: WS
  misc_feature: MA Experiment 20000314 PARAMETER Experiment Name: At_14day_Shoots-Roots_Sub_P Parameter: Tissue Value: Roots vs. Whole Plant
  misc_feature: MA Experiment ID: 20000315 Result: Down-regulated in Transcription
  misc_feature: MA Experiment 20000315 PARAMETER Experiment Name: At_14day_Shoots-Roots_Sub_P Parameter: Age (day) Value: 14
  misc_feature: MA Experiment 20000315 PARAMETER Experiment Name: At_14day_Shoots-Roots_Sub_P Parameter: Organism Value: A. thaliana
  misc_feature: MA Experiment 20000315 PARAMETER Experiment Name: At_14day_Shoots-Roots_Sub_P Parameter: Plant Line Value: WS
  misc_feature: MA Experiment 20000315 PARAMETER Experiment Name: At_14day_Shoots-Roots_Sub_P Parameter: Tissue Value: Shoots vs. Whole Plant
  misc_feature: MA Experiment ID: 20000327 Result: Down-regulated in Transcription
  misc_feature: MA Experiment 20000327 PARAMETER Experiment Name: At_42deg_Heat_Sub_P Parameter: Age (day) Value: 14
  misc_feature: MA Experiment 20000327 PARAMETER Experiment Name: At_42deg_Heat_Sub_P Parameter: Organism Value: A. thaliana
  misc_feature: MA Experiment 20000327 PARAMETER Experiment Name: At_42deg_Heat_Sub_P Parameter: Plant Line Value: WS
  misc_feature: MA Experiment 20000327 PARAMETER Experiment Name: At_42deg_Heat_Sub_P Parameter: Temperature (deg C) Value: 42 vs. 22
  misc_feature: MA Experiment 20000327 PARAMETER Experiment Name: At_42deg_Heat_Sub_P Parameter: Timepoint (hr) Value: 1
  misc_feature: MA Experiment 20000327 PARAMETER Experiment Name: At_42deg_Heat_Sub_P Parameter: Tissue Value: Aerial
  misc_feature: MA Experiment ID: 20000346 Result: Up-regulated in Transcription
  misc_feature: MA Experiment 20000346 PARAMETER Experiment Name: At_2mM_SA_Sub_P Parameter: Age (day) Value: 14
  misc_feature: MA Experiment 20000346 PARAMETER Experiment Name: At_2mM_SA_Sub_P Parameter: Organism Value: A. thaliana
  misc_feature: MA Experiment 20000346 PARAMETER Experiment Name: At_2mM_SA_Sub_P Parameter: Plant Line Value: WS
  misc_feature: MA Experiment 20000346 PARAMETER Experiment Name: At_2mM_SA_Sub_P Parameter: Timepoint (hr) Value: 1
  misc_feature: MA Experiment 20000346 PARAMETER Experiment Name: At_2mM_SA_Sub_P Parameter: Tissue Value: Aerial
  misc_feature: MA Experiment 20000346 PARAMETER Experiment Name: At_2mM_SA_Sub_P Parameter: Treatment Value: 2mM SA vs. No Treatment
  misc_feature: MA Experiment ID: 20000352 Result: Up-regulated in Transcription
  misc_feature: MA Experiment 20000352 PARAMETER Experiment Name: At_Drought_Sub_P Parameter: Age (day) Value: 7
  misc_feature: MA Experiment 20000352 PARAMETER Experiment Name: At_Drought_Sub_P Parameter: Organism Value: A. thaliana
  misc_feature: MA Experiment 20000352 PARAMETER Experiment Name: At_Drought_Sub_P Parameter: Plant Line Value: WS
  misc_feature: MA Experiment 20000352 PARAMETER Experiment Name: At_Drought_Sub_P Parameter: Timepoint (hr) Value: 6
  misc_feature: MA Experiment 20000352 PARAMETER Experiment Name: At_Drought_Sub_P Parameter: Tissue Value: Whole Plant
  misc_feature: MA Experiment 20000352 PARAMETER Experiment Name: At_Drought_Sub_P Parameter: Treatment Value: Drought vs. No Drought
  misc_feature: MA Experiment ID: 20000355 Result: Down-regulated in Transcription
  misc_feature: MA Experiment 20000355 PARAMETER Experiment Name: At_Siliques_Sub_P Parameter: Age (day) Value: 21
  misc_feature: MA Experiment 20000355 PARAMETER Experiment Name: At_Siliques_Sub_P Parameter: Organism Value: A. thaliana
  misc_feature: MA Experiment 20000355 PARAMETER Experiment Name: At_Siliques_Sub_P Parameter: Plant Line Value: WS
  misc_feature: MA Experiment 20000355 PARAMETER Experiment Name: At_Siliques_Sub_P Parameter: Tissue Value: Less Than 5mm Siliques vs. Whole Plant
  misc_feature: MA Experiment ID: 20000440 Result: Down-regulated in Transcription
  misc_feature: MA Experiment 20000440 PARAMETER Experiment Name: At_Closed-Flower__Sub_P Parameter: Tissue Value: Closed Flower vs. Whole Plant
  misc_feature: MA Experiment ID: 20000634 Result: Up-regulated in Transcription
  misc_feature: MA Experiment 20000634 PARAMETER Experiment Name: At_10percent_PEG_Sub_P Parameter: Age (day) Value: 12
  misc_feature: MA Experiment 20000634 PARAMETER Experiment Name: At_10percent_PEG_Sub_P Parameter: Organism Value: A. thaliana
  misc_feature: MA Experiment 20000634 PARAMETER Experiment Name: At_10percent_PEG_Sub_P Parameter: Plant Line Value: WS
  misc_feature: MA Experiment 20000634 PARAMETER Experiment Name: At_10percent_PEG_Sub_P Parameter: Timepoint (day) Value: 12
  misc_feature: MA Experiment 20000634 PARAMETER Experiment Name: At_10percent_PEG_Sub_P Parameter: Tissue Value: Whole Plant
  misc_feature: MA Experiment 20000634 PARAMETER Experiment Name: At_10percent_PEG_Sub_P Parameter: Treatment Value: 10% PEG vs. No Treatment
  misc_feature: MA Experiment ID: 20001807 Result: Down-regulated in Transcription
  misc_feature: MA Experiment 20001807 PARAMETER Experiment Name: At_50mM_NH4NO3_L-to-H_Sub_P Parameter: Timepoint (hr) Value: 6
  misc_feature: MA Experiment 20001807 PARAMETER Experiment Name: At_50mM_NH4NO3_L-to-H_Sub_P Parameter: Tissue Value: Leaf
  misc_feature: MA Experiment 20001807 PARAMETER Experiment Name: At_50mM_NH4NO3_L-to-H_Sub_P Parameter: Treatment Value: 50mM NH4NO3 vs 100mM Mannitol
atggaggatcggttctccgctatcaccaatcttcatggagatcataaacaggcaatatttggagtctatgttggtcatggaggagttaaagcggctgagtttgcagctaagaacttagataagaacattgtagaagaagtagttgacgcaacgtttcttaaggaggaaggttttaagggtggttcatcctgtgtcacggctttggttagcgaagggagccttgttgtgtcaaacgccggtgactgtcgtgctgttatgagtgtaggagagatgatgaacggaaaagaattgaaaccacgggaggatatgttgatacgtttcacgttgtggagaatccagggatccttagttgtgccaagaggaatcggagatgctcaacttaagaaatgggttatagctgaaccagagacaaagatctcgagagttgagcatgaccatgagttcttaatcttggcatcacatggtttatgggataaggtaagtaaccaagaagcagtagacattgctcgtcccttctgcttacgaaccgagaagccattgttgttagcagcttgtaagaagcttgttgatctctcggcttcacgaggctcgtttgatgatatcagtgtgatgttgatcccattgcgccagttcgtatag

SEQ ID NO: 82199 - protein, 212 aa, Arabidopsis thaliana
  peptide (1)..(212): Ceres Seq. ID no. 12664274
  misc_feature (1)..(201): Pfam Name: Protein phosphatase 2C Pfam Description: Protein phosphatase 2C
  misc_feature (1)..(212): Homolog of NCBI NO: 15236450 NR Description: protein phosphatase 2C (PP2C), putative; protein At4g08260.1 [Arabidopsis thaliana] >gi|7486866|pir||T10553
  misc_feature (1)..(209): Homolog of NCBI NO: 9294079 NR Description: serine/threonine phosphatase type 2c-like protein
  misc_feature (49)..(212): Homolog of NCBI NO: 15227687 NR Description: protein phosphatase 2C (PP2C); protein id: supported by cDNA: gi_13877670 [Arabidopsis thaliana]
  misc_feature (1)..(100): Homolog of NCBI NO: 22331365 NR Description: protein phosphatase 2C (PP2C), putative; protein
  misc_feature (113)..(209): Homolog of NCBI NO: 22331365 NR Description: protein phosphatase 2C (PP2C), putative; protein
  misc_feature (1)..(48): Homolog of NCBI NO: 15227687 NR Description: protein phosphatase 2C (PP2C); protein id: supported by cDNA: gi_13877670 [Arabidopsis thaliana]
  misc_feature (108)..(208): Homolog of NCBI NO: 25352225 NR Description: hypothetical protein [imported] - Arabidopsis >gi|8954030|gb|AAF82204.1|AC067971_12 Contains similarity to phosphatase 2C from Arabidopsis thaliana gb|AF085279. It contains
  misc_feature (49)..(102): Homolog of NCBI NO: 25352225 NR Description: hypothetical protein [imported] - Arabidopsis >gi|8954030|gb|AAF82204.1|AC067971_12 Contains similarity to phosphatase 2C from Arabidopsis thaliana gb|AF085279. It contains
  misc_feature (1)..(48): Homolog of NCBI NO: 25352225 NR Description: hypothetical protein [imported] - Arabidopsis >gi|8954030|gb|AAF82204.1|AC067971_12 Contains similarity to phosphatase 2C from Arabidopsis thaliana gb|AF085279. It contains
  misc_feature (49)..(208): Homolog of NCBI NO: 15222312 NR Description: protein phosphatase 2C (PP2C); protein id: supported by cDNA: gi_20258779 [Arabidopsis thaliana]
MEDRFSAITNLHGDHKQAIFGVYVGHGGVKAAEFAAKNLDKNIVEEVVDATFLKEEGFKGGSSCVTALVSEGSLVVSNAGDCRAVMSVGEMMNGKELKPREDMLIRFTLWRIQGSLVVPRGIGDAQLKKWVIAEPETKISRVEHDHEFLILASHGLWDKVSNQEAVDIARPFCLRTEKPLLLAACKKLVDLSASRGSFDDISVMLIPLRQFV

SEQ ID NO: 82200 - protein, 127 aa, Arabidopsis thaliana
  peptide (1)..(127): Ceres Seq. ID no. 12664275
  misc_feature (1)..(116): Pfam Name: Protein phosphatase 2C Pfam Description: Protein phosphatase 2C
  misc_feature (1)..(127): Homolog of NCBI NO: 15236450 NR Description: protein phosphatase 2C (PP2C), putative; protein At4g08260.1 [Arabidopsis thaliana] >gi|7486866|pir||T10553
  misc_feature (1)..(124): Homolog of NCBI NO: 9294079 NR Description: serine/threonine phosphatase type 2c-like protein
  misc_feature (1)..(127): Homolog of NCBI NO: 15227687 NR Description: protein phosphatase 2C (PP2C); protein id: supported by cDNA: gi_13877670 [Arabidopsis thaliana]
  misc_feature (1)..(15): Homolog of NCBI NO: 22331365 NR Description: protein phosphatase 2C (PP2C), putative; protein
  misc_feature (28)..(124): Homolog of NCBI NO: 22331365 NR Description: protein phosphatase 2C (PP2C), putative; protein
  misc_feature (23)..(123): Homolog of NCBI NO: 25352225 NR Description: hypothetical protein [imported] - Arabidopsis >gi|8954030|gb|AAF82204.1|AC067971_12 Contains similarity to phosphatase 2C from Arabidopsis thaliana gb|AF085279. It contains
  misc_feature (1)..(17): Homolog of NCBI NO: 25352225 NR Description: hypothetical protein [imported] - Arabidopsis >gi|8954030|gb|AAF82204.1|AC067971_12 Contains similarity to phosphatase 2C from Arabidopsis thaliana gb|AF085279. It contains
  misc_feature (1)..(123): Homolog of NCBI NO: 15222312 NR Description: protein phosphatase 2C (PP2C); protein id: supported by cDNA: gi_20258779 [Arabidopsis thaliana]
  misc_feature (1)..(126): Homolog of NCBI NO: 30013681 NR Description: Avr9/Cf-9 rapidly elicited protein 284 [Nicotiana
  misc_feature (1)..(127): Homolog of NCBI NO: 7488754 NR Description: protein phosphatase 2C - alfalfa
MSVGEMMNGKELKPREDMLIRFTLWRIQGSLVVPRGIGDAQLKKWVIAEPETKISRVEHDHEFLILASHGLWDKVSNQEAVDIARPFCLRTEKPLLLAACKKLVDLSASRGSFDDISVMLIPLRQFV

SEQ ID NO: 82201 - protein, 122 aa, Arabidopsis thaliana
  peptide (1)..(122): Ceres Seq. ID no. 12664276
  misc_feature (1)..(111): Pfam Name: Protein phosphatase 2C Pfam Description: Protein phosphatase 2C
  misc_feature (1)..(122): Homolog of NCBI NO: 15236450 NR Description: protein phosphatase 2C (PP2C), putative; protein At4g08260.1 [Arabidopsis thaliana] >gi|7486866|pir||T10553
  misc_feature (1)..(119): Homolog of NCBI NO: 9294079 NR Description: serine/threonine phosphatase type 2c-like protein
  misc_feature (1)..(122): Homolog of NCBI NO: 15227687 NR Description: protein phosphatase 2C (PP2C); protein id: supported by cDNA: gi_13877670 [Arabidopsis thaliana]
  misc_feature (23)..(119): Homolog of NCBI NO: 22331365 NR Description: protein phosphatase 2C (PP2C), putative; protein
  misc_feature (18)..(118): Homolog of NCBI NO: 25352225 NR Description: hypothetical protein [imported] - Arabidopsis >gi|8954030|gb|AAF82204.1|AC067971_12 Contains similarity to phosphatase 2C from Arabidopsis thaliana gb|AF085279. It contains
  misc_feature (1)..(12): Homolog of NCBI NO: 25352225 NR Description: hypothetical protein [imported] - Arabidopsis >gi|8954030|gb|AAF82204.1|AC067971_12 Contains similarity to phosphatase 2C from Arabidopsis thaliana gb|AF085279. It contains
  misc_feature (1)..(118): Homolog of NCBI NO: 15222312 NR Description: protein phosphatase 2C (PP2C); protein id: supported by cDNA: gi_20258779 [Arabidopsis thaliana]
  misc_feature (1)..(121): Homolog of NCBI NO: 30013681 NR Description: Avr9/Cf-9 rapidly elicited protein 284 [Nicotiana
  misc_feature (1)..(122): Homolog of NCBI NO: 7488754 NR Description: protein phosphatase 2C - alfalfa
  misc_feature (1)..(122): Homolog of NCBI NO: 15225656 NR Description: protein phosphatase 2C (PP2C); protein id: [Arabidopsis thaliana] >gi|25352216|pir||C84826 protein
MMNGKELKPREDMLIRFTLWRIQGSLVVPRGIGDAQLKKWVIAEPETKISRVEHDHEFLILASHGLWDKVSNQEAVDIARPFCLRTEKPLLLAACKKLVDLSASRGSFDDISVMLIPLRQFV

SEQ ID NO: 82202 - DNA, 1107 bp, Arabidopsis thaliana
  misc_feature (1)..(1107): Ceres Seq. ID no. 12664280
  misc_feature: MA Experiment ID: 20000269 Result: Up-regulated in Transcription
  misc_feature: MA Experiment 20000269 PARAMETER Experiment Name: At_1mM_KNO3_L-vs-H_Roots_P Parameter: Age (day) Value: 7,10,12
  misc_feature: MA Experiment 20000269 PARAMETER Experiment Name: At_1mM_KNO3_L-vs-H_Roots_P Parameter: Organism Value: A. thaliana
  misc_feature: MA Experiment 20000269 PARAMETER Experiment Name: At_1mM_KNO3_L-vs-H_Roots_P Parameter: Plant Line Value: WS
  misc_feature: MA Experiment 20000269 PARAMETER Experiment Name: At_1mM_KNO3_L-vs-H_Roots_P Parameter: Timepoint (day) Value: 7,10,12
  misc_feature: MA Experiment 20000269 PARAMETER Experiment Name: At_1mM_KNO3_L-vs-H_Roots_P Parameter: Tissue Value: Roots
  misc_feature: MA Experiment 20000269 PARAMETER Experiment Name: At_1mM_KNO3_L-vs-H_Roots_P Parameter: Treatment Value: 1mM KNO3 vs. 50mM KNO3
  misc_feature: MA Experiment ID: 20000451 Result: Down-regulated in Transcription
  misc_feature: MA Experiment 20000451 PARAMETER Experiment Name: At_CS6879_Shoots-Roots_P Parameter: Age (day) Value: 14
  misc_feature: MA Experiment 20000451 PARAMETER Experiment Name: At_CS6879_Shoots-Roots_P Parameter: Organism Value: A. thaliana
  misc_feature: MA Experiment 20000451 PARAMETER Experiment Name: At_CS6879_Shoots-Roots_P Parameter: Plant Line Value: CS6879 vs. WS
  misc_feature: MA Experiment 20000451 PARAMETER Experiment Name: At_CS6879_Shoots-Roots_P Parameter: Tissue Value: Roots
  misc_feature: MA Experiment ID: 20000794 Result: Up-regulated in Transcription
  misc_feature: MA Experiment 20000794 PARAMETER Experiment Name: At_Petals_P Parameter: Age (day) Value: 23-25 days
  misc_feature: MA Experiment 20000794 PARAMETER Experiment Name: At_Petals_P Parameter: Plant Line Value: WS
  misc_feature: MA Experiment 20000794 PARAMETER Experiment Name: At_Petals_P Parameter: Tissue Value: Petals vs. Whole plant
  misc_feature: MA Experiment ID: 20001556 Result: Down-regulated in Transcription
  misc_feature: MA Experiment 20001556 PARAMETER Experiment Name: At_Drought_Soil_Dry_P Parameter: Age (day) Value: 26
  misc_feature: MA Experiment 20001556 PARAMETER Experiment Name: At_Drought_Soil_Dry_P Parameter: Organism Value: A. thaliana
  misc_feature: MA Experiment 20001556 PARAMETER Experiment Name: At_Drought_Soil_Dry_P Parameter: Plant Line Value: WS
  misc_feature: MA Experiment 20001556 PARAMETER Experiment Name: At_Drought_Soil_Dry_P Parameter: Post Timepoint (hr) Value: None
  misc_feature: MA Experiment 20001556 PARAMETER Experiment Name: At_Drought_Soil_Dry_P Parameter: Post-Treatment Value: None
  misc_feature: MA Experiment 20001556 PARAMETER Experiment Name: At_Drought_Soil_Dry_P Parameter: Timepoint (day) Value: 12
  misc_feature: MA Experiment 20001556 PARAMETER Experiment Name: At_Drought_Soil_Dry_P Parameter: Treatment Value: Drought vs. No Drought
  misc_feature: MA Experiment ID: 20001557 Result: Down-regulated in Transcription
  misc_feature: MA Experiment 20001557 PARAMETER Experiment Name: At_Drought_Soil_Dry_P Parameter: Age (day) Value: 27
  misc_feature: MA Experiment 20001557 PARAMETER Experiment Name: At_Drought_Soil_Dry_P Parameter: Organism Value: A. thaliana
  misc_feature: MA Experiment 20001557 PARAMETER Experiment Name: At_Drought_Soil_Dry_P Parameter: Plant Line Value: WS
  misc_feature: MA Experiment 20001557 PARAMETER Experiment Name: At_Drought_Soil_Dry_P Parameter: Post Timepoint (hr) Value: 3
  misc_feature: MA Experiment 20001557 PARAMETER Experiment Name: At_Drought_Soil_Dry_P Parameter: Post-Treatment Value: Re-Water vs. No Drought
  misc_feature: MA Experiment 20001557 PARAMETER Experiment Name: At_Drought_Soil_Dry_P Parameter: Timepoint (day) Value: 13
  misc_feature: MA Experiment 20001557 PARAMETER Experiment Name: At_Drought_Soil_Dry_P Parameter: Treatment Value: Drought vs. No Drought
  misc_feature: MA Experiment ID: 20001558 Result: Down-regulated in Transcription
  misc_feature: MA Experiment 20001558 PARAMETER Experiment Name: At_Drought_Soil_Dry_P Parameter: Age (day) Value: 27
  misc_feature: MA Experiment 20001558 PARAMETER Experiment Name: At_Drought_Soil_Dry_P Parameter: Organism Value: A. thaliana
  misc_feature: MA Experiment 20001558 PARAMETER Experiment Name: At_Drought_Soil_Dry_P Parameter: Plant Line Value: WS
  misc_feature: MA Experiment 20001558 PARAMETER Experiment Name: At_Drought_Soil_Dry_P Parameter: Post Timepoint (hr) Value: 6
  misc_feature: MA Experiment 20001558 PARAMETER Experiment Name: At_Drought_Soil_Dry_P Parameter: Post-Treatment Value: Re-Water vs. No Drought
  misc_feature: MA Experiment 20001558 PARAMETER Experiment Name: At_Drought_Soil_Dry_P Parameter: Timepoint (day) Value: 13
  misc_feature: MA Experiment 20001558 PARAMETER Experiment Name: At_Drought_Soil_Dry_P Parameter: Treatment Value: Drought vs. No Drought
  misc_feature: MA Experiment ID: 20001756 Result: Down-regulated in Transcription
  misc_feature: MA Experiment 20001756 PARAMETER Experiment Name: At_50mM_NH4NO3_L-to-H_P Parameter: Timepoint (hr) Value: 4
  misc_feature: MA Experiment 20001756 PARAMETER Experiment Name: At_50mM_NH4NO3_L-to-H_P Parameter: Tissue Value: Leaf
  misc_feature: MA Experiment 20001756 PARAMETER Experiment Name: At_50mM_NH4NO3_L-to-H_P Parameter: Treatment Value: 50mM NH4NO3 vs 100mM Mannitol
  misc_feature: MA Experiment ID: 20001757 Result: Down-regulated in Transcription
  misc_feature: MA Experiment 20001757 PARAMETER Experiment Name: At_50mM_NH4NO3_L-to-H_P Parameter: Timepoint (hr) Value: 6
  misc_feature: MA Experiment 20001757 PARAMETER Experiment Name: At_50mM_NH4NO3_L-to-H_P Parameter: Tissue Value: Leaf
  misc_feature: MA Experiment 20001757 PARAMETER Experiment Name: At_50mM_NH4NO3_L-to-H_P Parameter: Treatment Value: 50mM NH4NO3 vs 100mM Mannitol
  misc_feature: MA Experiment ID: 20001911 Result: Down-regulated in Transcription
  misc_feature: MA Experiment 20001911 PARAMETER Experiment Name: At_Drought_Reproduction_P Parameter: Age (day) Value: 40
  misc_feature: MA Experiment 20001911 PARAMETER Experiment Name: At_Drought_Reproduction_P Parameter: Organism Value: A. thaliana
  misc_feature: MA Experiment 20001911 PARAMETER Experiment Name: At_Drought_Reproduction_P Parameter: Plant Line Value: WS
  misc_feature: MA Experiment 20001911 PARAMETER Experiment Name: At_Drought_Reproduction_P Parameter: Timepoint (day) Value: 10
  misc_feature: MA Experiment 20001911 PARAMETER Experiment Name: At_Drought_Reproduction_P Parameter: Tissue Value: Flowers
  misc_feature: MA Experiment 20001911 PARAMETER Experiment Name: At_Drought_Reproduction_P Parameter: Treatment Value: Drought vs. No Drought
atggataaattgaagccaataatagcaatcatatcactccaatttggatatgcaggcatgtacatcattactatggtctccttcaagcatggcatgaaccattggatccttgctacttaccgacatgtcgtcgccacaattgtcatagctccttttgctctcattctcgagaggaaaataaggcctaagatgacatggccattgttccttaggattcttgcccttggattcctagaaccacttttggaccagaacttgtactacataggaatgaaagccacgtcagcaacgtatagttctgcctttgttaatgcacttcccgccattaccttcataatggctgtcattttcaggatagaaactgtaaatttgaagaagacacgaagtcttgcaaaagtgattggaacagcaataactgtgggaggagcaatggttatgacgttgtacaaaggtccagccattgagctctttaagactgctcatagctctttacacggcggctcctcgggcacctcctccgagaccactgatcagaattgggttaccggaactctagcggttatgggtagtatcaccacttgggcaggtttcttcattctacaatcgttcacgttgaaaaaatatccggctgagctttcgctagtgatgtggatttgtgccatgggaacggtcttaaacaccatcgcttcgctcataatggtgcgcgacgtaagcgcatggaaagtcggtatggactcgggcacacttgcggctgtttactccggagtggtttgttcgggtatggcgtattacatacaaagcattgtgattagggaacgaggtccggtttttacgacatcgtttagtcctatgtgcatgatcatcactgctttcctcggcgtgttagttttggctgaaaagattcaccttggaagtataatcggggcgatttttatcgtcttcgggctatatagcgttgtgtgggggaaagctaaggacgaagtgatatcggtggaagagaaaataggaatgcaggagctgccgatcaccaacacatcgacaaaagtggagggtggtggtattaccagtgaagtaaacgaaggtgtgactaacaatacccaagtgtaa

SEQ ID NO: 82203 - protein, 368 aa, Arabidopsis thaliana
  peptide (1)..(368): Ceres Seq. ID no. 12664281
  misc_feature (15)..(148): Pfam Name: Integral membrane protein DUF6 Pfam Description: Integral membrane protein DUF6
  misc_feature (1)..(368): Homolog of NCBI NO: 7486870 NR Description: hypothetical protein T12G13.140 - Arabidopsis
  misc_feature (1)..(368): Homolog of NCBI NO: 30680708 NR Description: nodulin MtN21 family protein [Arabidopsis
  misc_feature (1)..(366): Homolog of NCBI NO: 15219448 NR Description: nodulin protein, putative; protein id: supported by cDNA: 149985., supported by cDNA: gi_15146329
  misc_feature (1)..(366): Homolog of NCBI NO: 21553533 NR Description: nodulin protein, putative [Arabidopsis thaliana]
  misc_feature (1)..(358): Homolog of NCBI NO: 15219123 NR Description: nodulin-like protein; protein id: At1g21890.1,
  misc_feature (1)..(358): Homolog of NCBI NO: 17529004 NR Description: putative nodulin protein [Arabidopsis thaliana]
  misc_feature (1)..(358): Homolog of NCBI NO: 6552743 NR Description: T26F17.11 [Arabidopsis thaliana]
  misc_feature (1)..(350): Homolog of NCBI NO: 34908998 NR Description: nodulin-like protein [Oryza sativa (japonica
  misc_feature (5)..(343): Homolog of NCBI NO: 15225480 NR Description: nodulin-like protein; protein id: At2g39510.1
  misc_feature (1)..(346): Homolog of NCBI NO: 21593603 NR Description: nodulin-like protein [Arabidopsis thaliana]
MDKLKPIIAIISLQFGYAGMYIITMVSFKHGMNHWILATYRHVVATIVIAPFALILERKIRPKMTWPLFLRILALGFLEPLLDQNLYYIGMKATSATYSSAFVNALPAITFIMAVIFRIETVNLKKTRSLAKVIGTAITVGGAMVMTLYKGPAIELFKTAHSSLHGGSSGTSSETTDQNWVTGTLAVMGSITTWAGFFILQSFTLKKYPAELSLVMWICAMGTVLNTIASLIMVRDVSAWKVGMDSGTLAAVYSGVVCSGMAYYIQSIVIRERGPVFTTSFSPMCMIITAFLGVLVLAEKIHLGSIIGAIFIVFGLYSVVWGKAKDEVISVEEKIGMQELPITNTSTKVEGGGITSEVNEGVTNNTQV

SEQ ID NO: 82204 - protein, 349 aa, Arabidopsis thaliana
  peptide (1)..(349): Ceres Seq. ID no. 12664282
  misc_feature (1)..(129): Pfam Name: Integral membrane protein DUF6 Pfam Description: Integral membrane protein DUF6
  misc_feature (1)..(349): Homolog of NCBI NO: 7486870 NR Description: hypothetical protein T12G13.140 - Arabidopsis
  misc_feature (1)..(349): Homolog of NCBI NO: 30680708 NR Description: nodulin MtN21 family protein [Arabidopsis
  misc_feature (1)..(347): Homolog of NCBI NO: 15219448 NR Description: nodulin protein, putative; protein id: supported by cDNA: 149985., supported by cDNA: gi_15146329
  misc_feature (1)..(347): Homolog of NCBI NO: 21553533 NR Description: nodulin protein, putative [Arabidopsis thaliana]
  misc_feature (1)..(339): Homolog of NCBI NO: 15219123 NR Description: nodulin-like protein; protein id: At1g21890.1,
  misc_feature (1)..(339): Homolog of NCBI NO: 17529004 NR Description: putative nodulin protein [Arabidopsis thaliana]
  misc_feature (1)..(339): Homolog of NCBI NO: 6552743 NR Description: T26F17.11 [Arabidopsis thaliana]
  misc_feature (1)..(331): Homolog of NCBI NO: 34908998 NR Description: nodulin-like protein [Oryza sativa (japonica
  misc_feature (1)..(324): Homolog of NCBI NO: 15225480 NR Description: nodulin-like protein; protein id: At2g39510.1
  misc_feature (1)..(327): Homolog of NCBI NO: 21593603 NR Description: nodulin-like protein [Arabidopsis thaliana]
MYIITMVSFKHGMNHWILATYRHVVATIVIAPFALILERKIRPKMTWPLFLRILALGFLEPLLDQNLYYIGMKATSATYSSAFVNALPAITFIMAVIFRIETVNLKKTRSLAKVIGTAITVGGAMVMTLYKGPAIELFKTAHSSLHGGSSGTSSETTDQNWVTGTLAVMGSITTWAGFFILQSFTLKKYPAELSLVMWICAMGTVLNTIASLIMVRDVSAWKVGMDSGTLAAVYSGVVCSGMAYYIQSIVIRERGPVFTTSFSPMCMIITAFLGVLVLAEKIHLGSIIGAIFIVFGLYSVVWGKAKDEVISVEEKIGMQELPITNTSTKVEGGGITSEVNEGVTNNTQV

SEQ ID NO: 82205 - protein, 344 aa, Arabidopsis thaliana
  peptide (1)..(344): Ceres Seq. ID no. 12664283
  misc_feature (1)..(124): Pfam Name: Integral membrane protein DUF6 Pfam Description: Integral membrane protein DUF6
  misc_feature (1)..(344): Homolog of NCBI NO: 7486870 NR Description: hypothetical protein T12G13.140 - Arabidopsis
  misc_feature (1)..(344): Homolog of NCBI NO: 30680708 NR Description: nodulin MtN21 family protein [Arabidopsis
  misc_feature (1)..(342): Homolog of NCBI NO: 15219448 NR Description: nodulin protein, putative; protein id: supported by cDNA: 149985., supported by cDNA: gi_15146329
  misc_feature (1)..(342): Homolog of NCBI NO: 21553533 NR Description: nodulin protein, putative [Arabidopsis thaliana]
  misc_feature (1)..(334): Homolog of NCBI NO: 15219123 NR Description: nodulin-like protein; protein id: At1g21890.1,
  misc_feature (1)..(334): Homolog of NCBI NO: 17529004 NR Description: putative nodulin protein [Arabidopsis thaliana]
  misc_feature (1)..(334): Homolog of NCBI NO: 6552743 NR Description: T26F17.11 [Arabidopsis thaliana]
  misc_feature (1)..(326): Homolog of NCBI NO: 34908998 NR Description: nodulin-like protein [Oryza sativa (japonica
  misc_feature (1)..(319): Homolog of NCBI NO: 15225480 NR Description: nodulin-like protein; protein id: At2g39510.1
  misc_feature (1)..(322): Homolog of NCBI NO: 21593603 NR Description: nodulin-like protein [Arabidopsis thaliana]
MVSFKHGMNHWILATYRHVVATIVIAPFALILERKIRPKMTWPLFLRILALGFLEPLLDQNLYYIGMKATSATYSSAFVNALPAITFIMAVIFRIETVNLKKTRSLAKVIGTAITVGGAMVMTLYKGPAIELFKTAHSSLHGGSSGTSSETTDQNWVTGTLAVMGSITTWAGFFILQSFTLKKYPAELSLVMWICAMGTVLNTIASLIMVRDVSAWKVGMDSGTLAAVYSGVVCSGMAYYIQSIVIRERGPVFTTSFSPMCMIITAFLGVLVLAEKIHLGSIIGAIFIVFGLYSVVWGKAKDEVISVEEKIGMQELPITNTSTKVEGGGITSEVNEGVTNNTQV

SEQ ID NO: 82206 - DNA, 2311 bp, Arabidopsis thaliana
  misc_feature (1)..(2311): Ceres Seq. ID no. 12664333
  misc_feature: MA Experiment ID: 20000460 Result: Down-regulated in Transcription
  misc_feature: MA Experiment 20000460 PARAMETER Experiment Name: At_10percent_PEG_P Parameter: Age (day) Value: 12
  misc_feature: MA Experiment 20000460 PARAMETER Experiment Name: At_10percent_PEG_P Parameter: Organism Value: A. thaliana
  misc_feature: MA Experiment 20000460 PARAMETER Experiment Name: At_10percent_PEG_P Parameter: Plant Line Value: WS
  misc_feature: MA Experiment 20000460 PARAMETER Experiment Name: At_10percent_PEG_P Parameter: Timepoint (day) Value: 12
  misc_feature: MA Experiment 20000460 PARAMETER Experiment Name: At_10percent_PEG_P Parameter: Tissue Value: Whole Plant
  misc_feature: MA Experiment 20000460 PARAMETER Experiment Name: At_10percent_PEG_P Parameter: Treatment Value: 10percent PEG vs. No Treatment
  misc_feature: MA Experiment ID: 20000527 Result: Down-regulated in Transcription
  misc_feature: MA Experiment 20000527 PARAMETER Experiment Name: At_10percent_PEG_P Parameter: Age (day) Value: 20
  misc_feature: MA Experiment 20000527 PARAMETER Experiment Name: At_10percent_PEG_P Parameter: Organism Value: A. thaliana
  misc_feature: MA Experiment 20000527 PARAMETER Experiment Name: At_10percent_PEG_P Parameter: Plant Line Value: WS
  misc_feature: MA Experiment 20000527 PARAMETER Experiment Name: At_10percent_PEG_P Parameter: Timepoint (day) Value: 20
  misc_feature: MA Experiment 20000527 PARAMETER Experiment Name: At_10percent_PEG_P Parameter: Tissue Value: Whole Plant
  misc_feature: MA Experiment 20000527 PARAMETER Experiment Name: At_10percent_PEG_P Parameter: Treatment Value: 10percent PEG vs. No Treatment
  misc_feature: MA Experiment ID: 20001451 Result: Up-regulated in Transcription
  misc_feature: MA Experiment 20001451 PARAMETER Experiment Name: At_Far-red-induction_P Parameter: Age (day) Value: 7
  misc_feature: MA Experiment 20001451 PARAMETER Experiment Name: At_Far-red-induction_P Parameter: Light Value: Far-red vs. White
  misc_feature: MA Experiment 20001451 PARAMETER Experiment Name: At_Far-red-induction_P Parameter: Organism Value: A. thaliana
  misc_feature: MA Experiment 20001451 PARAMETER Experiment Name: At_Far-red-induction_P Parameter: Plant Line Value: Columbia
  misc_feature: MA Experiment 20001451 PARAMETER Experiment Name: At_Far-red-induction_P Parameter: Timepoint (hr) Value: 24
  misc_feature: MA Experiment 20001451 PARAMETER Experiment Name: At_Far-red-induction_P Parameter: Tissue Value: Whole Plant
attccaatctctcaagaaaatctacagttcctccaaataataataccctccctctaaggcaactaattttcagcaatcatgtccgggactattaatcccccggacggaggagggtccggtgcaagaaacccaccagtcgttcgtcagagagtgctagctcctccgaaagcgggtttactaaaggacatcaagtccgtggttgaagaaactttcttccatgatgctccgcttagggatttcaagggccaaaccccagctaaaaaagcgttgctcgggatccaggctgtcttcccgatcatcgggtgggccagagaatacactcttcgcaaatttagaggtgatctcatcgccggtctcaccattgctagtctttgtatccctcaggatatcggatatgcaaaactcgcgaatgtcgatccgaaatacggactttattcgagtttcgtgccaccgctgatttacgcgggcatggggagttctagggatattgcgataggaccagtcgctgtggtgtctcttcttgtgggaactttgtgccaggccgtgatcgacccaaagaaaaacccggaggattatctccgacttgtcttcactgccactttctttgctggcattttccaagccggcctcggatttctacggttgggattcttgatagactttctgtcgcatgcggccgtggttgggttcatgggaggagcagccatcacaatcgctctccaacagcttaagggctttcttggcatcaaaacatttaccaagaaaactgatattgtttctgtcatgcactccgtattcaaaaacgctgagcatgggtggaattggcaaactatagtcattggcgccagtttcttgacctttcttctcgtcaccaaattcattgggaagagaaacaggaaactattttgggttccggcaattgcgcctcttatttcagtcattatctctaccttctttgtcttcatttttcgtgctgataaacaaggagtccaaattgtgaaacatatagatcaaggaatcaatccgatttccgttcataagattttcttctccggaaaatatttcaccgaaggaatccgaatcggaggcattgcgggtatggtcgccttaacggaggctgtagcgattgcaagaacatttgcggcaatgaaagactatcaaattgatggaaacaaagagatgattgccctagggactatgaacgtcgtcggttcaatgacctcttgttacattgccacgggttcgttttcgcgatctgccgtgaacttcatggcgggagtcgaaacggcggtttcaaacatagttatggccatagttgtagctctaaccttagagttcatcacaccactcttcaagtacactccaaatgctatcctcgcggccatcattatatcggctgtcctcggtcttatcgatattgacgcagcgattctcatatggaggatcgataaactcgacttcttggcttgcatgggagctttcttaggagtcatcttcatctcggttgagatcggtctcttgatcgctgtggtgatctcttttgcaaagatattgcttcaagtgacgagaccaagaaccacggttctagggaagctgccaaattcgaatgtatatcggaacactctacagtatccggacgctgcccaaattcccggaatcttgatcatccgtgttgactcggccatctacttttccaactccaactatgtccgagaaagggcatcaagatgggtgcgagaggagcaagaaaatgctaaggaatatggcatgccggcaatcagatttgtgattattgagatgtcaccggttaccgatatcgataccagtggtatccactccatcgaagaacttctcaagagcctcgagaagcaagaaattcagttgattctagcaaatccaggaccagtggtgattgagaaactttatgcttcaaagttcgtcgaggagattggagagaaaaatatcttccttactgttggcgacgcggtcgcagtttgttctacggaagtggctgagcaacaaacttaatatcgtctattcatatacataaacacatccatatatgtatgtgtatatatatatgaaagaaactaatttaagaactatgggttattttcatttttttgagatgatatgatattatgtgtgtaatatatgcatgattgttgaatttgtttggttcacacaatggtgagatgggaacaaagtcgaacgtttgacttttatttttattttttaatctttcaaatgttattttctcgtgatttgtgtttcgtttgagatgatgaataaattgtattttcaacttata

SEQ ID NO: 82207 - protein, 649 aa, Arabidopsis thaliana
  peptide (1)..(649): Ceres Seq. ID no. 12664334
  misc_feature (184)..(495): Pfam Name: Sulfate transporter family Pfam Description: Sulfate transporter family
  misc_feature (6)..(648): Homolog of NCBI NO: 16197732 NR Description: sulfate transporter [Brassica napus]
  misc_feature (1)..(647): Homolog of NCBI NO: 18411776 NR Description: high affinity sulphate transporter, putative; id: At1g78000.1, supported by cDNA: gi_14245726 [Arabidopsis >gi|7768660|dbj|BAA95484.1| sulfate transporter [Arabidopsis
  misc_feature (9)..(647): Homolog of NCBI NO: 14270243 NR Description: sulfate transporter [Brassica napus]
  misc_feature (285)..(647): Homolog of NCBI NO: 25310835 NR Description: protein F28K19.22 [imported] - Arabidopsis >gi|6573765|gb|AAF17685.1|AC009243_12 F28K19.22 [Arabidopsis
  misc_feature (98)..(268): Homolog of NCBI NO: 25310835 NR Description: protein F28K19.22 [imported] - Arabidopsis >gi|6573765|gb|AAF17685.1|AC009243_12 F28K19.22 [Arabidopsis
  misc_feature (1)..(102): Homolog of NCBI NO: 25310835 NR Description: protein F28K19.22 [imported] - Arabidopsis >gi|6573765|gb|AAF17685.1|AC009243_12 F28K19.22 [Arabidopsis
  misc_feature (258)..(308): Homolog of NCBI NO: 25310835 NR Description: protein F28K19.22 [imported] - Arabidopsis >gi|6573765|gb|AAF17685.1|AC009243_12 F28K19.22 [Arabidopsis
  misc_feature (3)..(647): Homolog of NCBI NO: 18395079 NR Description: high affinity sulphate transporter, putative; id: At1g22150.1, supported by cDNA: gi_10716804 [Arabidopsis >gi|10716805|dbj|BAB16410.1| sulfate tansporter Sultr1;3
  misc_feature (13)..(647): Homolog of NCBI NO: 13487717 NR Description: sulfate transporter 2 [Lycopersicon esculentum]
  misc_feature (247)..(647): Homolog of NCBI NO: 25310832 NR Description: protein F2E2.22 [imported] - Arabidopsis thaliana
MSGTINPPDGGGSGARNPPVVRQRVLAPPKAGLLKDIKSVVEETFFHDAPLRDFKGQTPAKKALLGIQAVFPIIGWAREYTLRKFRGDLIAGLTIASLCIPQDIGYAKLANVDPKYGLYSSFVPPLIYAGMGSSRDIAIGPVAVVSLLVGTLCQAVIDPKKNPEDYLRLVFTATFFAGIFQAGLGFLRLGFLIDFLSHAAVVGFMGGAAITIALQQLKGFLGIKTFTKKTDIVSVMHSVFKNAEHGWNWQTIVIGASFLTFLLVTKFIGKRNRKLFWVPAIAPLISVIISTFFVFIFRADKQGVQIVKHIDQGINPISVHKIFFSGKYFTEGIRIGGIAGMVALTEAVAIARTFAAMKDYQIDGNKEMIALGTMNVVGSMTSCYIATGSFSRSAVNFMAGVETAVSNIVMAIVVALTLEFITPLFKYTPNAILAAIIISAVLGLIDIDAAILIWRIDKLDFLACMGAFLGVIFISVEIGLLIAVVISFAKILLQVTRPRTTVLGKLPNSNVYRNTLQYPDAAQIPGILIIRVDSAIYFSNSNYVRERASRWVREEQENAKEYGMPAIRFVIIEMSPVTDIDTSGIHSIEELLKSLEKQEIQLILANPGPVVIEKLYASKFVEEIGEKNIFLTVGDAVAVCSTEVAEQQT

SEQ ID NO: 82208 - protein, 519 aa, Arabidopsis thaliana
  peptide (1)..(519): Ceres Seq. ID no. 12664335
  misc_feature (54)..(365): Pfam Name: Sulfate transporter family Pfam Description: Sulfate transporter family
  misc_feature (1)..(518): Homolog of NCBI NO: 16197732 NR Description: sulfate transporter [Brassica napus]
  misc_feature (1)..(517): Homolog of NCBI NO: 18411776 NR Description: high affinity sulphate transporter, putative; id: At1g78000.1, supported by cDNA: gi_14245726 [Arabidopsis >gi|7768660|dbj|BAA95484.1| sulfate transporter [Arabidopsis
  misc_feature (1)..(517): Homolog of NCBI NO: 14270243 NR Description: sulfate transporter [Brassica napus]
  misc_feature (155)..(517): Homolog of NCBI NO: 25310835 NR Description: protein F28K19.22 [imported] - Arabidopsis >gi|6573765|gb|AAF17685.1|AC009243_12 F28K19.22 [Arabidopsis
  misc_feature (1)..(138): Homolog of NCBI NO: 25310835 NR Description: protein F28K19.22 [imported] - Arabidopsis >gi|6573765|gb|AAF17685.1|AC009243_12 F28K19.22 [Arabidopsis
  misc_feature (128)..(178): Homolog of NCBI NO: 25310835 NR Description: protein F28K19.22 [imported] - Arabidopsis >gi|6573765|gb|AAF17685.1|AC009243_12 F28K19.22 [Arabidopsis
  misc_feature (1)..(517): Homolog of NCBI NO: 18395079 NR Description: high affinity sulphate transporter, putative; id: At1g22150.1, supported by cDNA: gi_10716804 [Arabidopsis >gi|10716805|dbj|BAB16410.1| sulfate tansporter Sultr1;3
  misc_feature (1)..(517): Homolog of NCBI NO: 13487717 NR Description: sulfate transporter 2 [Lycopersicon esculentum]
  misc_feature (117)..(517): Homolog of NCBI NO: 25310832 NR Description: protein F2E2.22 [imported] - Arabidopsis thaliana
  misc_feature (1)..(116): Homolog of NCBI NO: 25310832 NR Description: protein F2E2.22 [imported] - Arabidopsis thaliana
MGSSRDIAIGPVAVVSLLVGTLCQAVIDPKKNPEDYLRLVFTATFFAGIFQAGLGFLRLGFLIDFLSHAAVVGFMGGAAITIALQQLKGFLGIKTFTKKTDIVSVMHSVFKNAEHGWNWQTIVIGASFLTFLLVTKFIGKRNRKLFWVPAIAPLISVIISTFFVFIFRADKQGVQIVKHIDQGINPISVHKIFFSGKYFTEGIRIGGIAGMVALTEAVAIARTFAAMKDYQIDGNKEMIALGTMNVVGSMTSCYIATGSFSRSAVNFMAGVETAVSNIVMAIVVALTLEFITPLFKYTPNAILAAIIISAVLGLIDIDAAILIWRIDKLDFLACMGAFLGVIFISVEIGLLIAVVISFAKILLQVTRPRTTVLGKLPNSNVYRNTLQYPDAAQIPGILIIRVDSAIYFSNSNYVRERASRWVREEQENAKEYGMPAIRFVIIEMSPVTDIDTSGIHSIEELLKSLEKQEIQLILANPGPVVIEKLYASKFVEEIGEKNIFLTVGDAVAVCSTEVAEQQT

SEQ ID NO: 82209 - protein, 445 aa, Arabidopsis thaliana
  peptide (1)..(445): Ceres Seq. ID no. 12664336
  misc_feature (1)..(291): Pfam Name: Sulfate transporter family Pfam Description: Sulfate transporter family
  misc_feature (1)..(444): Homolog of NCBI NO: 16197732 NR Description: sulfate transporter [Brassica napus]
  misc_feature (1)..(443): Homolog of NCBI NO: 18411776 NR Description: high affinity sulphate transporter, putative; id: At1g78000.1, supported by cDNA: gi_14245726 [Arabidopsis >gi|7768660|dbj|BAA95484.1| sulfate transporter [Arabidopsis
  misc_feature (1)..(443): Homolog of NCBI NO: 14270243 NR Description: sulfate transporter [Brassica napus]
  misc_feature (81)..(443): Homolog of NCBI NO: 25310835 NR Description: protein F28K19.22 [imported] - Arabidopsis >gi|6573765|gb|AAF17685.1|AC009243_12 F28K19.22 [Arabidopsis
  misc_feature (1)..(64): Homolog of NCBI NO: 25310835 NR Description: protein F28K19.22 [imported] - Arabidopsis >gi|6573765|gb|AAF17685.1|AC009243_12 F28K19.22 [Arabidopsis
  misc_feature (54)..(104): Homolog of NCBI NO: 25310835 NR Description: protein F28K19.22 [imported] - Arabidopsis >gi|6573765|gb|AAF17685.1|AC009243_12 F28K19.22 [Arabidopsis
  misc_feature (1)..(443): Homolog of NCBI NO: 18395079 NR Description: high affinity sulphate transporter, putative; id: At1g22150.1, supported by cDNA: gi_10716804 [Arabidopsis >gi|10716805|dbj|BAB16410.1| sulfate tansporter Sultr1;3
  misc_feature (1)..(443): Homolog of NCBI NO: 13487717 NR Description: sulfate transporter 2 [Lycopersicon esculentum]
  misc_feature (43)..(443): Homolog of NCBI NO: 25310832 NR Description: protein F2E2.22 [imported] - Arabidopsis thaliana
  misc_feature (1)..(42): Homolog of NCBI NO: 25310832 NR Description: protein F2E2.22 [imported] - Arabidopsis thaliana
MGGAAITIALQQLKGFLGIKTFTKKTDIVSVMHSVFKNAEHGWNWQTIVIGASFLTFLLVTKFIGKRNRKLFWVPAIAPLISVIISTFFVFIFRADKQGVQIVKHIDQGINPISVHKIFFSGKYFTEGIRIGGIAGMVALTEAVAIARTFAAMKDYQIDGNKEMIALGTMNVVGSMTSCYIATGSFSRSAVNFMAGVETAVSNIVMAIVVALTLEFITPLFKYTPNAILAAIIISAVLGLIDIDAAILIWRIDKLDFLACMGAFLGVIFISVEIGLLIAVVISFAKILLQVTRPRTTVLGKLPNSNVYRNTLQYPDAAQIPGILIIRVDSAIYFSNSNYVRERASRWVREEQENAKEYGMPAIRFVIIEMSPVTDIDTSGIHSIEELLKSLEKQEIQLILANPGPVVIEKLYASKFVEEIGEKNIFLTVGDAVAVCSTEVAEQQT

SEQ ID NO: 82210 - DNA, 900 bp, Arabidopsis thaliana
  misc_feature (1)..(900): Ceres Seq. ID no. 12664380
  misc_feature: MA Experiment ID: 108469 Result: Up-regulated in Transcription
  misc_feature: MA Experiment ID: 108573 Result: Up-regulated in Transcription
  misc_feature: MA Experiment 108573 PARAMETER Experiment Name: At_Drought_cDNA_P Parameter: Timepoint (hr) Value: 6
  misc_feature: MA Experiment 108573 PARAMETER Experiment Name: At_Drought_cDNA_P Parameter: Tissue Value: Aerial
  misc_feature: MA Experiment 108573 PARAMETER Experiment Name: At_Drought_cDNA_P Parameter: Treatment Value: Drought vs. No Drought
  misc_feature: MA Experiment ID: 108585 Result: Up-regulated in Transcription
  misc_feature: MA Experiment 108585 PARAMETER Experiment Name: At_5mM_NaNP_cDNA_P Parameter: Timepoint (hr) Value: 6
  misc_feature: MA Experiment 108585 PARAMETER Experiment Name: At_5mM_NaNP_cDNA_P Parameter: Tissue Value: Aerial
  misc_feature: MA Experiment 108585 PARAMETER Experiment Name: At_5mM_NaNP_cDNA_P Parameter: Treatment Value: null
ctctcaacaactacttgtttagagagagtcccaccaccaccactaccacaatcccaatggcttcaccaactcttactctcctcctcctcctcaccaccgtctccttcttcatctcctcctccgcagatcctgacatgcttcaagatctctgcgtcgctgatcttccctctggaatcaaaatcaatggcttcccttgcaaagacgcagctacagtcacatcagccgatttcttctcacaaggattagctaaaccaggtcttaccaacaacacattcggtgccttagtcacaggagctaacgttatgacaatcccaggactcaacacacttggtgtctccctctctcgtatcgactacgcaccaggaggcttaaacccacctcacacccacccacgtgccactgaggtcgttttcgtcctcgaaggaacacttgacgttgggtttctcactactgccaataagctaatctctcaatctctcaagaaaggagatgtctttgctttccccaaaggacttgtccatttccagaagaacaatggtgatgtccctgcttctgttattgcagctttcaatagtcagcttcctggaactcaatctcttggtgctactttgtttggttctactcctcctgttcctgacaacatcttggctcaagcctttcagacttctccaggaactgttaaacacatcaaatccaagttccaacccaagaaatgatcatcacccttcctttatattcattactacagttctgtttttttctaaagggaagatctttttatcttctttgatttgtcttctgtaataaaaaaggaacaataactgatgatcttcagtgtgcatttgagctccatagtctcatgtattcgtcttcttgtataatccatattattttttgttc

SEQ ID NO: 82211 - protein, 237 aa, Arabidopsis thaliana
  peptide (1)..(237): Ceres Seq. ID no. 12664381
  misc_feature (79)..(205): Pfam Name: Cupin Pfam Description: Cupin
  misc_feature (19)..(237): Homolog of NCBI NO: 15217561 NR Description: germin-like protein; protein id: At1g09560.1, by cDNA: gi_11908055, supported by cDNA: gi_12642871, supported cDNA: gi_13265455, supported by cDNA: gi_1755159, supported by
  misc_feature (19)..(205): Homolog of NCBI NO: 18202459 NR Description: Germin-like protein subfamily 2 member 1 precursor
  misc_feature (19)..(205): Homolog of NCBI NO: 1755160 NR Description: germin-like protein [Arabidopsis thaliana]
  misc_feature (33)..(205): Homolog of NCBI NO: 1755176 NR Description: germin-like protein [Arabidopsis thaliana]
  misc_feature (24)..(237): Homolog of NCBI NO: 18203442 NR Description: Rhicadhesin receptor precursor (Germin-like
  misc_feature (26)..(237): Homolog of NCBI NO: 27805638 NR Description: Nectarin 1 precursor (Superoxide dismutase [Mn])
  misc_feature (42)..(237): Homolog of NCBI NO: 1934730 NR Description: germin-like protein [Arabidopsis thaliana]
  misc_feature (42)..(237): Homolog of NCBI NO: 15228673 NR Description: germin-like protein (GLP10); protein id:
  misc_feature (25)..(237): Homolog of NCBI NO: 34904670 NR Description: putative germin protein [Oryza sativa (japonica group)] >gi|5042461|gb|AAD38298.1| putative oxalate oxidase
  misc_feature (24)..(237): Homolog of NCBI NO: 18203447 NR Description: Nectarin 1 precursor (Superoxide dismutase [Mn])
LNNYLFRESPTTTTTTIPMASPTLTLLLLLTTVSFFISSSADPDMLQDLCVADLPSGIKINGFPCKDAATVTSADFFSQGLAKPGLTNNTFGALVTGANVMTIPGLNTLGVSLSRIDYAPGGLNPPHTHPRATEVVFVLEGTLDVGFLTTANKLISQSLKKGDVFAFPKGLVHFQKNNGDVPASVIAAFNSQLPGTQSLGATLFGSTPPVPDNILAQAFQTSPGTVKHIKSKFQPKK

SEQ ID NO: 82212 - protein, 219 aa, Arabidopsis thaliana; identical to SEQ ID NO: 30505
  peptide (1)..(219): Ceres Seq. ID no. 12664382
  misc_feature (61)..(187): Pfam Name: Cupin Pfam Description: Cupin
  misc_feature (1)..(219): Homolog of NCBI NO: 15217561 NR Description: germin-like protein; protein id: At1g09560.1, by cDNA: gi_11908055, supported by cDNA: gi_12642871, supported cDNA: gi_13265455, supported by cDNA: gi_1755159, supported by
  misc_feature (1)..(187): Homolog of NCBI NO: 18202459 NR Description: Germin-like protein subfamily 2 member 1 precursor
  misc_feature (1)..(187): Homolog of NCBI NO: 1755160 NR Description: germin-like protein [Arabidopsis thaliana]
  misc_feature (15)..(187): Homolog of NCBI NO: 1755176 NR Description: germin-like protein [Arabidopsis thaliana]
  misc_feature (6)..(219): Homolog of NCBI NO: 18203442 NR Description: Rhicadhesin receptor precursor (Germin-like
  misc_feature (8)..(219): Homolog of NCBI NO: 27805638 NR Description: Nectarin 1 precursor (Superoxide dismutase [Mn])
  misc_feature (24)..(219): Homolog of NCBI NO: 1934730 NR Description: germin-like protein [Arabidopsis thaliana]
  misc_feature (24)..(219): Homolog of NCBI NO: 15228673 NR Description: germin-like protein (GLP10); protein id:
  misc_feature (7)..(219): Homolog of NCBI NO: 34904670 NR Description: putative germin protein [Oryza sativa (japonica group)] >gi|5042461|gb|AAD38298.1| putative oxalate oxidase
  misc_feature (6)..(219): Homolog of NCBI NO: 18203447 NR Description: Nectarin 1 precursor (Superoxide dismutase [Mn])

SEQ ID NO: 82213 - protein, 193 aa, Arabidopsis thaliana; identical to SEQ ID NO: 30506
  peptide (1)..(193): Ceres Seq. ID no. 12664383
  misc_feature (35)..(161): Pfam Name: Cupin Pfam Description: Cupin
  misc_feature (1)..(193): Homolog of NCBI NO: 15217561 NR Description: germin-like protein; protein id: At1g09560.1, by cDNA: gi_11908055, supported by cDNA: gi_12642871, supported cDNA: gi_13265455, supported by cDNA: gi_1755159, supported by
  misc_feature (1)..(161): Homolog of NCBI NO: 18202459 NR Description: Germin-like protein subfamily 2 member 1 precursor
  misc_feature (1)..(161): Homolog of NCBI NO: 1755160 NR Description: germin-like protein [Arabidopsis thaliana]
  misc_feature (1)..(161): Homolog of NCBI NO: 1755176 NR Description: germin-like protein [Arabidopsis thaliana]
  misc_feature (1)..(193): Homolog of NCBI NO: 18203442 NR Description: Rhicadhesin receptor precursor (Germin-like
  misc_feature (1)..(193): Homolog of NCBI NO: 27805638 NR Description: Nectarin 1 precursor (Superoxide dismutase [Mn])
  misc_feature (1)..(193): Homolog of NCBI NO: 1934730 NR Description: germin-like protein [Arabidopsis thaliana]
  misc_feature (1)..(193): Homolog of NCBI NO: 15228673 NR Description: germin-like protein (GLP10); protein id:
  misc_feature (1)..(193): Homolog of NCBI NO: 34904670 NR Description: putative germin protein [Oryza sativa (japonica group)] >gi|5042461|gb|AAD38298.1| putative oxalate oxidase
  misc_feature (1)..(193): Homolog of NCBI NO: 18203447 NR Description: Nectarin 1 precursor (Superoxide dismutase [Mn])

SEQ ID NO: 82214 - DNA, 648 bp, Arabidopsis thaliana
  misc_feature (1)..(648): Ceres Seq. ID no. 12664388
  misc_feature: MA Experiment ID: 20000306 Result: Up-regulated in Transcription
  misc_feature: MA Experiment 20000306 PARAMETER Experiment Name: At_Germinating_Seeds_Sub_P Parameter: Age (hr) Value: 6 vs. 0
  misc_feature: MA Experiment 20000306 PARAMETER Experiment Name: At_Germinating_Seeds_Sub_P Parameter: Organism Value: A. thaliana
  misc_feature: MA Experiment 20000306 PARAMETER Experiment Name: At_Germinating_Seeds_Sub_P Parameter: Plant Line Value: WS
  misc_feature: MA Experiment 20000306 PARAMETER Experiment Name: At_Germinating_Seeds_Sub_P Parameter: Tissue Value: Germinating Seeds
  misc_feature: MA Experiment ID: 20000307 Result: Up-regulated in Transcription
  misc_feature: MA Experiment 20000307 PARAMETER Experiment Name: At_Germinating_Seeds_Sub_P Parameter: Age (hr) Value: 24 vs. 0
  misc_feature: MA Experiment 20000307 PARAMETER Experiment Name: At_Germinating_Seeds_Sub_P Parameter: Organism Value: A. thaliana
  misc_feature: MA Experiment 20000307 PARAMETER Experiment Name: At_Germinating_Seeds_Sub_P Parameter: Plant Line Value: WS
  misc_feature: MA Experiment 20000307 PARAMETER Experiment Name: At_Germinating_Seeds_Sub_P Parameter: Tissue Value: Germinating Seeds
  misc_feature: MA Experiment ID: 20000355 Result: Up-regulated in Transcription
  misc_feature: MA Experiment 20000355 PARAMETER Experiment Name: At_Siliques_Sub_P Parameter: Age (day) Value: 21
  misc_feature: MA Experiment 20000355 PARAMETER Experiment Name: At_Siliques_Sub_P Parameter: Organism Value: A. thaliana
  misc_feature: MA Experiment 20000355 PARAMETER Experiment Name: At_Siliques_Sub_P Parameter: Plant Line Value: WS
  misc_feature: MA Experiment 20000355 PARAMETER Experiment Name: At_Siliques_Sub_P Parameter: Tissue Value: Less Than 5mm Siliques vs. Whole Plant
atgactgctaagatgcgccgtgaattcccgacggcgttccttctcttgtttctggttccggtgatgattccggtcggtgaggctgtatggctagatgtgcctcccaccggaacaaagtgtgtatctgaagaaatccagagcaatgtcgtcgttttggctgattacctcatcatctccgaggatcacgaggtcatgcccactatatccgtcaaggtgacatccccatatggcaacaatctgcacaatatggaaaacgtaacgcatggccaatttgcatttacaacccaagaatcagggaactacttggcgtgcttttgggcagatgaaaagagtcacggaaacaaaaatgttagcatcaacattgactggagaactggaatcgctgctaaggattgggcctctattgctaagaaagagaagatcgagggtgtggagctggagatcaggaaactcgaaggcgcagtcgaagccatccatgaaaatatactctacctaagaaacagagaagcagacatgaggacaatgagtgagaaaacgaactcgcgggtggcttggtacagtataatgtcactaggtgtttgcattgctgtctctggtttccaggtactctacttgaagcagtactttgagaagaagaagcttatatag

SEQ ID NO: 82215 - protein, 215 aa, Arabidopsis thaliana; identical to SEQ ID NO: 47633
  peptide (1)..(215): Ceres Seq. ID no. 12664389
  misc_feature (14)..(215): Pfam Name: emp24/gp25L/p24 family Pfam Description: emp24/gp25L/p24 family
  misc_feature (1)..(215): Homolog of NCBI NO: 15217563 NR Description: unknown protein; protein id: At1g09580.1
  misc_feature (6)..(215): Homolog of NCBI NO: 15223626 NR Description: integral membrane protein, putative; protein id:
  misc_feature (13)..(215): Homolog of NCBI NO: 15219136 NR Description: transmembrane protein, putative; protein id: supported by cDNA: gi_20260193 [Arabidopsis thaliana] similar to transmembrane protein [Arabidopsis thaliana]
  misc_feature (10)..(215): Homolog of NCBI NO: 15228372 NR Description: putative membrane protein; protein id: [Arabidopsis thaliana] >gi|6630552|gb|AAF19571.1|AC011708_14
  misc_feature (66)..(192): Homolog of NCBI NO: 40641597 NR Description: putative transmembrane protein-like protein
  misc_feature (12)..(215): Homolog of NCBI NO: 33146897 NR Description: putative transmembrane protein [Oryza sativa
  misc_feature (14)..(215): Homolog of NCBI NO: 21618241 NR Description: unknown [Arabidopsis thaliana]
  misc_feature (14)..(215): Homolog of NCBI NO: 18396016 NR Description: expressed protein; protein id: At1g26690.1, by cDNA: 117183. [Arabidopsis thaliana]
  misc_feature (13)..(142): Homolog of NCBI NO: 25402945 NR Description: protein T26F17.12 [imported] - Arabidopsis >gi|6552742|gb|AAF16541.1|AC013482_15 T26F17.12 [Arabidopsis
  misc_feature (15)..(215): Homolog of NCBI NO: 12597802 NR Description: unknown protein [Arabidopsis thaliana]

SEQ ID NO: 82216 - protein, 211 aa, Arabidopsis thaliana
  peptide (1)..(211): Ceres Seq. ID no. 12664390
  misc_feature (10)..(211): Pfam Name: emp24/gp25L/p24 family Pfam Description: emp24/gp25L/p24 family
  misc_feature (1)..(211): Homolog of NCBI NO: 15217563 NR Description: unknown protein; protein id: At1g09580.1
  misc_feature (2)..(211): Homolog of NCBI NO: 15223626 NR Description: integral membrane protein, putative; protein id:
  misc_feature (9)..(211): Homolog of NCBI NO: 15219136 NR Description: transmembrane protein, putative; protein id: supported by cDNA: gi_20260193 [Arabidopsis thaliana] similar to transmembrane protein [Arabidopsis thaliana]
  misc_feature (6)..(211): Homolog of NCBI NO: 15228372 NR Description: putative membrane protein; protein id: [Arabidopsis thaliana] >gi|6630552|gb|AAF19571.1|AC011708_14
  misc_feature (62)..(188): Homolog of NCBI NO: 40641597 NR Description: putative transmembrane protein-like protein
  misc_feature (8)..(211): Homolog of NCBI NO: 33146897 NR Description: putative transmembrane protein [Oryza sativa
  misc_feature (10)..(211): Homolog of NCBI NO: 21618241 NR Description: unknown [Arabidopsis thaliana]
  misc_feature (10)..(211): Homolog of NCBI NO: 18396016 NR Description: expressed protein; protein id: At1g26690.1, by cDNA: 117183. [Arabidopsis thaliana]
  misc_feature (9)..(138): Homolog of NCBI NO: 25402945 NR Description: protein T26F17.12 [imported] - Arabidopsis >gi|6552742|gb|AAF16541.1|AC013482_15 T26F17.12 [Arabidopsis
  misc_feature (11)..(211): Homolog of NCBI NO: 12597802 NR Description: unknown protein [Arabidopsis thaliana]
MRREFPTAFLLLFLVPVMIPVGEAVWLDVPPTGTKCVSEEIQSNVVVLADYLIISEDHEVMPTISVKVTSPYGNNLHNMENVTHGQFAFTTQESGNYLACFWADEKSHGNKNVSINIDWRTGIAAKDWASIAKKEKIEGVELEIRKLEGAVEAIHENILYLRNREADMRTMSEKTNSRVAWYSIMSLGVCIAVSGFQVLYLKQYFEKKKLI

SEQ ID NO: 82217 - protein, 194 aa, Arabidopsis thaliana
  peptide (1)..(194): Ceres Seq. ID no. 12664391
  misc_feature (1)..(194): Pfam Name: emp24/gp25L/p24 family Pfam Description: emp24/gp25L/p24 family
  misc_feature (1)..(194): Homolog of NCBI NO: 15217563 NR Description: unknown protein; protein id: At1g09580.1
  misc_feature (1)..(194): Homolog of NCBI NO: 15223626 NR Description: integral membrane protein, putative; protein id:
  misc_feature (1)..(194): Homolog of NCBI NO: 15219136 NR Description: transmembrane protein, putative; protein id: supported by cDNA: gi_20260193 [Arabidopsis thaliana] similar to transmembrane protein [Arabidopsis thaliana]
  misc_feature (1)..(194): Homolog of NCBI NO: 15228372 NR Description: putative membrane protein; protein id: [Arabidopsis thaliana] >gi|6630552|gb|AAF19571.1|AC011708_14
  misc_feature (45)..(171): Homolog of NCBI NO: 40641597 NR Description: putative transmembrane protein-like protein
  misc_feature (1)..(194): Homolog of NCBI NO: 33146897 NR Description: putative transmembrane protein [Oryza sativa
  misc_feature (1)..(194): Homolog of NCBI NO: 21618241 NR Description: unknown [Arabidopsis thaliana]
  misc_feature (1)..(194): Homolog of NCBI NO: 18396016 NR Description: expressed protein; protein id: At1g26690.1, by cDNA: 117183. [Arabidopsis thaliana]
  misc_feature (1)..(121): Homolog of NCBI NO: 25402945 NR Description: protein T26F17.12 [imported] - Arabidopsis >gi|6552742|gb|AAF16541.1|AC013482_15 T26F17.12 [Arabidopsis
  misc_feature (1)..(194): Homolog of NCBI NO: 12597802 NR Description: unknown protein [Arabidopsis thaliana]
MIPVGEAVWLDVPPTGTKCVSEEIQSNVVVLADYLIISEDHEVMPTISVKVTSPYGNNLHNMENVTHGQFAFTTQESGNYLACFWADEKSHGNKNVSINIDWRTGIAAKDWASIAKKEKIEGVELEIRKLEGAVEAIHENILYLRNREADMRTMSEKTNSRVAWYSIMSLGVCIAVSGFQVLYLKQYFEKKKLI

SEQ ID NO: 82218 - DNA, 1521 bp, Arabidopsis thaliana
  misc_feature (1)..(1521): Ceres Seq. ID no. 12664429
  misc_feature: MA Experiment ID: 20000171 Result: Down-regulated in Transcription
  misc_feature: MA Experiment 20000171 PARAMETER Experiment Name: At_42deg_Heat_P Parameter: Age (day) Value: 14
  misc_feature: MA Experiment 20000171 PARAMETER Experiment Name: At_42deg_Heat_P Parameter: Organism Value: A. thaliana
  misc_feature: MA Experiment 20000171 PARAMETER Experiment Name: At_42deg_Heat_P Parameter: Plant Line Value: WS
  misc_feature: MA Experiment 20000171 PARAMETER Experiment Name: At_42deg_Heat_P Parameter: Temperature (deg C) Value: 42 vs. 22
  misc_feature: MA Experiment 20000171 PARAMETER Experiment Name: At_42deg_Heat_P Parameter: Timepoint (hr) Value: 1
  misc_feature: MA Experiment 20000171 PARAMETER Experiment Name: At_42deg_Heat_P Parameter: Tissue Value: Aerial
  misc_feature: MA Experiment ID: 20000173 Result: Down-regulated in Transcription
  misc_feature: MA Experiment 20000173 PARAMETER Experiment Name: At_42deg_Heat_P Parameter: Age (day) Value: 14
  misc_feature: MA Experiment 20000173 PARAMETER Experiment Name: At_42deg_Heat_P Parameter: Organism Value: A. thaliana
  misc_feature: MA Experiment 20000173 PARAMETER Experiment Name: At_42deg_Heat_P Parameter: Plant Line Value: WS
  misc_feature: MA Experiment 20000173 PARAMETER Experiment Name: At_42deg_Heat_P Parameter: Temperature (deg C) Value: 42 vs. 22
  misc_feature: MA Experiment 20000173 PARAMETER Experiment Name: At_42deg_Heat_P Parameter: Timepoint (hr) Value: 6
  misc_feature: MA Experiment 20000173 PARAMETER Experiment Name: At_42deg_Heat_P Parameter: Tissue Value: Aerial
  misc_feature: MA Experiment ID: 20000180 Result: Up-regulated in Transcription
  misc_feature: MA Experiment 20000180 PARAMETER Experiment Name: At_Germinating_Seeds_P Parameter: Age (hr) Value: 24 vs. 0
  misc_feature: MA Experiment 20000180 PARAMETER Experiment Name: At_Germinating_Seeds_P Parameter: Tissue Value: Germinating Seeds
  misc_feature: MA Experiment ID: 20000182 Result: Up-regulated in Transcription
  misc_feature: MA Experiment 20000182 PARAMETER Experiment Name: At_2mM_SA_P Parameter: Age (day) Value: 14
  misc_feature: MA Experiment 20000182 PARAMETER Experiment Name: At_2mM_SA_P Parameter: Organism Value: A. thaliana
  misc_feature: MA Experiment 20000182 PARAMETER Experiment Name: At_2mM_SA_P Parameter: Plant Line Value: WS
  misc_feature: MA Experiment 20000182 PARAMETER Experiment Name: At_2mM_SA_P Parameter: Timepoint (hr) Value: 6
  misc_feature: MA Experiment 20000182 PARAMETER Experiment Name: At_2mM_SA_P Parameter: Tissue Value: Aerial
  misc_feature: MA Experiment 20000182 PARAMETER Experiment Name: At_2mM_SA_P Parameter: Treatment Value: 2mM SA vs. No Treatment
  misc_feature: MA Experiment ID: 20000184 Result: Down-regulated in Transcription
  misc_feature: MA Experiment 20000184 PARAMETER Experiment Name: At_Shoots__P Parameter: Age (day) Value: 7
  misc_feature: MA Experiment 20000184 PARAMETER Experiment Name: At_Shoots__P Parameter: Tissue Value: Shoots vs. Whole Plant
  misc_feature: MA Experiment ID: 20000185 Result: Down-regulated in Transcription
  misc_feature: MA Experiment 20000185 PARAMETER Experiment Name: At_Roots__P Parameter: Age (day) Value: 7 vs. 21
  misc_feature: MA Experiment 20000185 PARAMETER Experiment Name: At_Roots__P Parameter: Organism Value: A. thaliana
  misc_feature: MA Experiment 20000185 PARAMETER Experiment Name: At_Roots__P Parameter: Tissue Value: Roots vs. Whole Plant
  misc_feature: MA Experiment ID: 20000227 Result: Down-regulated in Transcription
  misc_feature: MA Experiment 20000227 PARAMETER Experiment Name: At_Root-Tips-vs-Tops_P Parameter: Tissue Value: Root Tips vs. Root Tops
  misc_feature: MA Experiment ID: 20000234 Result: Down-regulated in Transcription
  misc_feature: MA Experiment 20000234 PARAMETER Experiment Name: At_Siliques_P Parameter: Age (day) Value: 21
  misc_feature: MA Experiment 20000234 PARAMETER Experiment Name: At_Siliques_P Parameter: Organism Value: A. thaliana
  misc_feature: MA Experiment 20000234 PARAMETER Experiment Name: At_Siliques_P Parameter: Plant Line Value: WS
  misc_feature: MA Experiment 20000234 PARAMETER Experiment Name: At_Siliques_P Parameter: Tissue Value: Less Than 5mm Siliques vs. Whole Plant
  misc_feature: MA Experiment ID: 20000235 Result: Down-regulated in Transcription
  misc_feature: MA Experiment 20000235 PARAMETER Experiment Name: At_Siliques_P Parameter: Age (day) Value: 21
  misc_feature: MA Experiment 20000235 PARAMETER Experiment Name: At_Siliques_P Parameter: Organism Value: A. thaliana
  misc_feature: MA Experiment 20000235 PARAMETER Experiment Name: At_Siliques_P Parameter: Plant Line Value: WS
  misc_feature: MA Experiment 20000235 PARAMETER Experiment Name: At_Siliques_P Parameter: Tissue Value: 5-10mm Siliques vs. Whole Plant
  misc_feature: MA Experiment ID: 20000264 Result: Down-regulated in Transcription
  misc_feature: MA Experiment 20000264 PARAMETER Experiment Name: At_Open_Flower_P Parameter: Age (day) Value: 21
  misc_feature: MA Experiment 20000264 PARAMETER Experiment Name: At_Open_Flower_P Parameter: Plant Line Value: WS
  misc_feature: MA Experiment 20000264 PARAMETER Experiment Name: At_Open_Flower_P Parameter: Tissue Value: Open Flower vs. Whole Plant
  misc_feature: MA Experiment ID: 20000265 Result: Down-regulated in Transcription
  misc_feature: MA Experiment 20000265 PARAMETER Experiment Name: At_Open_Flower_P Parameter: Age (day) Value: 21
  misc_feature: MA Experiment 20000265 PARAMETER Experiment Name: At_Open_Flower_P Parameter: Plant Line Value: WS
  misc_feature: MA Experiment 20000265 PARAMETER Experiment Name: At_Open_Flower_P Parameter: Tissue Value: Closed Flower vs. Whole Plant
  misc_feature: MA Experiment ID: 20000286 Result: Down-regulated in Transcription
  misc_feature: MA Experiment 20000286 PARAMETER Experiment Name: At_Open_Flower_P Parameter: Age (day) Value: 21
  misc_feature: MA Experiment 20000286 PARAMETER Experiment Name: At_Open_Flower_P Parameter: Plant Line Value: WS
  misc_feature: MA Experiment 20000286 PARAMETER Experiment Name: At_Open_Flower_P Parameter: Tissue Value: Half Open vs. Whole Plant
  misc_feature: MA Experiment ID: 20000308 Result: Up-regulated in Transcription
  misc_feature: MA Experiment 20000308 PARAMETER Experiment Name: At_100mM_NaCl__P Parameter: Age (day) Value: 17
  misc_feature: MA Experiment 20000308 PARAMETER Experiment Name: At_100mM_NaCl__P Parameter: Organism Value: A. thaliana
  misc_feature: MA Experiment 20000308 PARAMETER Experiment Name: At_100mM_NaCl__P Parameter: Plant Line Value: WS
  misc_feature: MA Experiment 20000308 PARAMETER Experiment Name: At_100mM_NaCl__P Parameter: Timepoint (hr) Value: 72
  misc_feature: MA Experiment 20000308 PARAMETER Experiment Name: At_100mM_NaCl__P Parameter: Tissue Value: Whole Plant
  misc_feature: MA Experiment 20000308 PARAMETER Experiment Name: At_100mM_NaCl__P Parameter: Treatment Value: 100mM NaCl vs. No Treatment
  misc_feature: MA Experiment ID: 20000438 Result: Down-regulated in Transcription
  misc_feature: MA Experiment 20000438 PARAMETER Experiment Name: At_Shoots__P Parameter: Age (day) Value: 14
  misc_feature: MA Experiment 20000438 PARAMETER Experiment Name: At_Shoots__P Parameter: Tissue Value: Shoots vs. Whole Plant
  misc_feature: MA Experiment ID: 20000439 Result: Down-regulated in Transcription
  misc_feature: MA Experiment 20000439 PARAMETER Experiment Name: At_Roots__P Parameter: Age (day) Value: 14 vs. 21
  misc_feature: MA Experiment 20000439 PARAMETER Experiment Name: At_Roots__P Parameter: Organism Value: A. thaliana
  misc_feature: MA Experiment 20000439 PARAMETER Experiment Name: At_Roots__P Parameter: Tissue Value: Roots vs. Whole Plant
  misc_feature: MA Experiment ID: 20000451 Result: Up-regulated in Transcription
  misc_feature: MA Experiment 20000451 PARAMETER Experiment Name: At_CS6879_Shoots-Roots_P Parameter: Age (day) Value: 14
  misc_feature: MA Experiment 20000451 PARAMETER Experiment Name: At_CS6879_Shoots-Roots_P Parameter: Organism Value: A. thaliana
  misc_feature: MA Experiment 20000451 PARAMETER Experiment Name: At_CS6879_Shoots-Roots_P Parameter: Plant Line Value: CS6879 vs. WS
  misc_feature: MA Experiment 20000451 PARAMETER Experiment Name: At_CS6879_Shoots-Roots_P Parameter: Tissue Value: Roots
  misc_feature: MA Experiment ID: 20000495 Result: Down-regulated in Transcription
  misc_feature: MA Experiment 20000495 PARAMETER Experiment Name: At_Guard_Cells_P Parameter: Harvest Date Value: 8/2/2002
  misc_feature: MA Experiment 20000495 PARAMETER Experiment Name: At_Guard_Cells_P Parameter: Organism Value: A. thaliana
  misc_feature: MA Experiment 20000495 PARAMETER Experiment Name: At_Guard_Cells_P Parameter: Tissue Value: Guard Cells vs. Leaves
  misc_feature: MA Experiment ID: 20000496 Result: Up-regulated in Transcription
  misc_feature: MA Experiment 20000496 PARAMETER Experiment Name: At_Guard_Cells_P Parameter: Harvest Date Value: 7/19/2002
  misc_feature: MA Experiment 20000496 PARAMETER Experiment Name: At_Guard_Cells_P Parameter: Organism Value: Canola
  misc_feature: MA Experiment 20000496 PARAMETER Experiment Name: At_Guard_Cells_P Parameter: Tissue Value: Guard Cells vs. Leaves
  misc_feature: MA Experiment ID: 20000606 Result: Up-regulated in Transcription
  misc_feature: MA Experiment 20000606 PARAMETER Experiment Name: At_CS8548_Mutant_P Parameter: Age (day) Value: 14
  misc_feature: MA Experiment 20000606 PARAMETER Experiment Name: At_CS8548_Mutant_P Parameter: Plant Line Value: CS8548 vs. wt
  misc_feature: MA Experiment 20000606 PARAMETER Experiment Name: At_CS8548_Mutant_P Parameter: Tissue Value: Whole Plant
  misc_feature: MA Experiment ID: 20000709 Result: Down-regulated in Transcription
  misc_feature: MA Experiment 20000709 PARAMETER Experiment Name: At_15mM_NH4NO3_L-to-H_P Parameter: Age (hr) Value: 14
  misc_feature: MA Experiment 20000709 PARAMETER Experiment Name: At_15mM_NH4NO3_L-to-H_P Parameter: Organism Value: A. thaliana
  misc_feature: MA Experiment 20000709 PARAMETER Experiment Name: At_15mM_NH4NO3_L-to-H_P Parameter: Plant Line Value: WS
  misc_feature: MA Experiment 20000709 PARAMETER Experiment Name: At_15mM_NH4NO3_L-to-H_P Parameter: Timepoint (hr) Value: 4
  misc_feature: MA Experiment 20000709 PARAMETER Experiment Name: At_15mM_NH4NO3_L-to-H_P Parameter: Tissue Value: Aerial
  misc_feature: MA Experiment 20000709 PARAMETER Experiment Name: At_15mM_NH4NO3_L-to-H_P Parameter: Treatment Value: 15mM NH4NO3 vs. 30mM Mannitol
  misc_feature: MA Experiment ID: 20000794 Result: Down-regulated in Transcription
  misc_feature: MA Experiment 20000794 PARAMETER Experiment Name: At_Petals_P Parameter: Age (day) Value: 23-25 days
  misc_feature: MA Experiment 20000794 PARAMETER Experiment Name: At_Petals_P Parameter: Plant Line Value: WS
  misc_feature: MA Experiment 20000794 PARAMETER Experiment Name: At_Petals_P Parameter: Tissue Value: Petals vs. Whole plant
  misc_feature: MA Experiment ID: 20001450 Result: Down-regulated in Transcription
  misc_feature: MA Experiment 20001450 PARAMETER Experiment Name: At_Far-red-induction_P Parameter: Age (day) Value: 7
  misc_feature: MA Experiment 20001450 PARAMETER Experiment Name: At_Far-red-induction_P Parameter: Light Value: Far-red vs. White
  misc_feature: MA Experiment 20001450 PARAMETER Experiment Name: At_Far-red-induction_P Parameter: Organism Value: A. thaliana
  misc_feature: MA Experiment 20001450 PARAMETER Experiment Name: At_Far-red-induction_P Parameter: Plant Line Value: Columbia
  misc_feature: MA Experiment 20001450 PARAMETER Experiment Name: At_Far-red-induction_P Parameter: Timepoint (hr) Value: 8
  misc_feature: MA Experiment 20001450 PARAMETER Experiment Name: At_Far-red-induction_P Parameter: Tissue Value: Whole Plant
  misc_feature: MA Experiment ID: 20001558 Result: Down-regulated in Transcription
  misc_feature: MA Experiment 20001558 PARAMETER Experiment Name: At_Drought_Soil_Dry_P Parameter: Age (day) Value: 27
  misc_feature: MA Experiment 20001558 PARAMETER Experiment Name: At_Drought_Soil_Dry_P Parameter: Organism Value: A. thaliana
  misc_feature: MA Experiment 20001558 PARAMETER Experiment Name: At_Drought_Soil_Dry_P Parameter: Plant Line Value: WS
  misc_feature: MA Experiment 20001558 PARAMETER Experiment Name: At_Drought_Soil_Dry_P Parameter: Post Timepoint (hr) Value: 6
  misc_feature: MA Experiment 20001558 PARAMETER Experiment Name: At_Drought_Soil_Dry_P Parameter: Post-Treatment Value: Re-Water vs. No Drought
  misc_feature: MA Experiment 20001558 PARAMETER Experiment Name: At_Drought_Soil_Dry_P Parameter: Timepoint (day) Value: 13
  misc_feature: MA Experiment 20001558 PARAMETER Experiment Name: At_Drought_Soil_Dry_P Parameter: Treatment Value: Drought vs. No Drought
  misc_feature: MA Experiment ID: 20001560 Result: Down-regulated in Transcription
  misc_feature: MA Experiment 20001560 PARAMETER Experiment Name: At_Drought_Soil_Dry_P Parameter: Age (day) Value: 28
  misc_feature: MA Experiment 20001560 PARAMETER Experiment Name: At_Drought_Soil_Dry_P Parameter: Organism Value: A. thaliana
  misc_feature: MA Experiment 20001560 PARAMETER Experiment Name: At_Drought_Soil_Dry_P Parameter: Plant Line Value: WS
  misc_feature: MA Experiment 20001560 PARAMETER Experiment Name: At_Drought_Soil_Dry_P Parameter: Post Timepoint (hr) Value: None
  misc_feature: MA Experiment 20001560 PARAMETER Experiment Name: At_Drought_Soil_Dry_P Parameter: Post-Treatment Value: None
  misc_feature: MA Experiment 20001560 PARAMETER Experiment Name: At_Drought_Soil_Dry_P Parameter: Timepoint (day) Value: 14
  misc_feature: MA Experiment 20001560 PARAMETER Experiment Name: At_Drought_Soil_Dry_P Parameter: Treatment Value: Drought vs. No Drought
  misc_feature: MA Experiment ID: 20001768 Result: Up-regulated in Transcription
  misc_feature: MA Experiment 20001768 PARAMETER Experiment Name: At_Far-red-enriched-adult_P Parameter: Age (day) Value: 28
  misc_feature: MA Experiment 20001768 PARAMETER Experiment Name: At_Far-red-enriched-adult_P Parameter: Light Value: Far-red enriched vs. White
  misc_feature: MA Experiment 20001768 PARAMETER Experiment Name: At_Far-red-enriched-adult_P Parameter: Organism Value: A. thaliana
  misc_feature: MA Experiment 20001768 PARAMETER Experiment Name: At_Far-red-enriched-adult_P Parameter: Plant Line Value: Columbia
  misc_feature: MA Experiment 20001768 PARAMETER Experiment Name: At_Far-red-enriched-adult_P Parameter: Timepoint (hr) Value: 1
  misc_feature: MA Experiment 20001768 PARAMETER Experiment Name: At_Far-red-enriched-adult_P Parameter: Tissue Value: Aerial
  misc_feature: MA Experiment ID: 20001904 Result: Down-regulated in Transcription
  misc_feature: MA Experiment 20001904 PARAMETER Experiment Name: At_Drought_Reproduction_P Parameter: Age (day) Value: 37
  misc_feature: MA Experiment 20001904 PARAMETER Experiment Name: At_Drought_Reproduction_P Parameter: Organism Value: A. thaliana
  misc_feature: MA Experiment 20001904 PARAMETER Experiment Name: At_Drought_Reproduction_P Parameter: Plant Line Value: WS
  misc_feature: MA Experiment 20001904 PARAMETER Experiment Name: At_Drought_Reproduction_P Parameter: Timepoint (day) Value: 7
  misc_feature: MA Experiment 20001904 PARAMETER Experiment Name: At_Drought_Reproduction_P Parameter: Tissue Value: Rosettes
  misc_feature: MA Experiment 20001904 PARAMETER Experiment Name: At_Drought_Reproduction_P Parameter: Treatment Value: Drought vs. No Drought
atggatgcaagattcttgtaccccttggagagctgtaaaatcattcacttgttgcgacatggacaagcgttgcacaatgtagaagctgagaaagatagaaatgcgttgttgtctcctcatctttttgatgctccgcttaccgatcatggtcaccaacaggttgagaatctccgcgaacgagttgtttcaagcgggctactaaagagggttgagctagttgtaacttctccgttgtttagaactatgcaaaccgcagttggtgtttttggaaatgaatacaaacaatcgagtatgacaagtagccctcccattttggcacttgaggttgctcgagaccgtaatggagtccgtcctcctgacatgagaagaaacattgaaagtgaagaggacaacctatggagaccggatgttagggagtccgaagaggagattttggcgagagggttagagttcatgaaatggttatggaagaggccagagaaggaggtcgcagttgttagccatggaatagttttgcagcatatgttgtatgtgtttgcaaacgattgtgacctgtcaattagacatgaactttgcaagaggtttgccaattgcgaaattcgtactgtcgtgattgtagacaaaggacttccaagttccttccaagtaaccaacctatctattccaaaagtcggtagtttaaggacgtcactacctacatacatggatttatgtggaactcagatgctgcgcctctcatcgcctcatttcaaaacccttcatttggtgaggcatgcacaaggagtccacaatatagcattagaagagaagggagagaaacctgaatcagaaaagctttttgacgcccacctttctccaaagggtttgcaacaggtttcggaaaggcgcaaccaaatccttgaatcaggattacttaacactgtcgagttagtgataacctctccgctgtgcagcacgaatagtaacactgttccatttaatttcagagcaatggaaacttcaataggaatatttaggggacaaggatatgtaaatatatccgaagactttgcaaaagctaacaacttccctccaattgtagcacttgagatctgtagagaacgcatgggactctatccatgtgatcgtagagcaagtataagtactcgccgcactttttttcctgagatcgactttacaatggtgatagagagtgatgaagacgctctatggcaagacaaggaaagggaaaaattagaagatgttgctactagaggtcttcactttgttaaatggttatgggagagaccagaaaaagagatagcaattgtaagccacgggattttcttgcaacaaacactttgtgcgctgcatggaaaagttggcatacctcttgaagatagtctccttacaaggtttgccaattgtgaactccggtcgattcggatagagaagagtgacatggaagcggatacattaatgacttgtaactgtagaaattacgttactccaccttcaacttccttccattcacacgcttga

SEQ ID NO: 82219 - protein, 506 aa, Arabidopsis thaliana
  peptide (1)..(506): Ceres Seq. ID no. 12664430
  misc_feature (251)..(472): Pfam Name: Phosphoglycerate mutase family Pfam Description: Phosphoglycerate mutase family
  misc_feature (235)..(506): Homolog of NCBI NO: 30681450 NR Description: expressed protein [Arabidopsis thaliana] unknown protein [Arabidopsis thaliana]
  misc_feature (1)..(213): Homolog of NCBI NO: 22329458 NR Description: similar to ZW10-like protein; protein id:
MDARFLYPLESCKIIHLLRHGQALHNVEAEKDRNALLSPHLFDAPLTDHGHQQVENLRERVVSSGLLKRVELVVTSPLFRTMQTAVGVFGNEYKQSSMTSSPPILALEVARDRNGVRPPDMRRNIESEEDNLWRPDVRESEEEILARGLEFMKWLWKRPEKEVAVVSHGIVLQHMLYVFANDCDLSIRHELCKRFANCEIRTVVIVDKGLPSSFQVTNLSIPKVGSLRTSLPTYMDLCGTQMLRLSSPHFKTLHLVRHAQGVHNIALEEKGEKPESEKLFDAHLSPKGLQQVSERRNQILESGLLNTVELVITSPLCSTNSNTVPFNFRAMETSIGIFRGQGYVNISEDFAKANNFPPIVALEICRERMGLYPCDRRASISTRRTFFPEIDFTMVIESDEDALWQDKEREKLEDVATRGLHFVKWLWERPEKEIAIVSHGIFLQQTLCALHGKVGIPLEDSLLTRFANCELRSIRIEKSDMEADTLMTCNCRNYVTPPSTSFHSHA

SEQ ID NO: 82220 - protein, 425 aa, Arabidopsis thaliana
  peptide (1)..(425): Ceres Seq. ID no. 12664431
  misc_feature (170)..(391): Pfam Name: Phosphoglycerate mutase family Pfam Description: Phosphoglycerate mutase family
  misc_feature (154)..(425): Homolog of NCBI NO: 30681450 NR Description: expressed protein [Arabidopsis thaliana] unknown protein [Arabidopsis thaliana]
  misc_feature (1)..(132): Homolog of NCBI NO: 22329458 NR Description: similar to ZW10-like protein; protein id:
MQTAVGVFGNEYKQSSMTSSPPILALEVARDRNGVRPPDMRRNIESEEDNLWRPDVRESEEEILARGLEFMKWLWKRPEKEVAVVSHGIVLQHMLYVFANDCDLSIRHELCKRFANCEIRTVVIVDKGLPSSFQVTNLSIPKVGSLRTSLPTYMDLCGTQMLRLSSPHFKTLHLVRHAQGVHNIALEEKGEKPESEKLFDAHLSPKGLQQVSERRNQILESGLLNTVELVITSPLCSTNSNTVPFNFRAMETSIGIFRGQGYVNISEDFAKANNFPPIVALEICRERMGLYPCDRRASISTRRTFFPEIDFTMVIESDEDALWQDKEREKLEDVATRGLHFVKWLWERPEKEIAIVSHGIFLQQTLCALHGKVGIPLEDSLLTRFANCELRSIRIEKSDMEADTLMTCNCRNYVTPPSTSFHSHA

SEQ ID NO: 82221 - protein, 409 aa, Arabidopsis thaliana
  peptide (1)..(409): Ceres Seq. ID no. 12664432
  misc_feature (154)..(375): Pfam Name: Phosphoglycerate mutase family Pfam Description: Phosphoglycerate mutase family
  misc_feature (138)..(409): Homolog of NCBI NO: 30681450 NR Description: expressed protein [Arabidopsis thaliana] unknown protein [Arabidopsis thaliana]
  misc_feature (1)..(116): Homolog of NCBI NO: 22329458 NR Description: similar to ZW10-like protein; protein id:
MTSSPPILALEVARDRNGVRPPDMRRNIESEEDNLWRPDVRESEEEILARGLEFMKWLWKRPEKEVAVVSHGIVLQHMLYVFANDCDLSIRHELCKRFANCEIRTVVIVDKGLPSSFQVTNLSIPKVGSLRTSLPTYMDLCGTQMLRLSSPHFKTLHLVRHAQGVHNIALEEKGEKPESEKLFDAHLSPKGLQQVSERRNQILESGLLNTVELVITSPLCSTNSNTVPFNFRAMETSIGIFRGQGYVNISEDFAKANNFPPIVALEICRERMGLYPCDRRASISTRRTFFPEIDFTMVIESDEDALWQDKEREKLEDVATRGLHFVKWLWERPEKEIAIVSHGIFLQQTLCALHGKVGIPLEDSLLTRFANCELRSIRIEKSDMEADTLMTCNCRNYVTPPSTSFHSHA

SEQ ID NO: 82222 - DNA, 2868 bp, Arabidopsis thaliana
  misc_feature (1)..(2868): Ceres Seq. ID no. 12664523
  misc_feature: MA Experiment ID: 20000315 Result: Down-regulated in Transcription
  misc_feature: MA Experiment 20000315 PARAMETER Experiment Name: At_14day_Shoots-Roots_Sub_P Parameter: Age (day) Value: 14
  misc_feature: MA Experiment 20000315 PARAMETER Experiment Name: At_14day_Shoots-Roots_Sub_P Parameter: Organism Value: A. thaliana
  misc_feature: MA Experiment 20000315 PARAMETER Experiment Name: At_14day_Shoots-Roots_Sub_P Parameter: Plant Line Value: WS
  misc_feature: MA Experiment 20000315 PARAMETER Experiment Name: At_14day_Shoots-Roots_Sub_P Parameter: Tissue Value: Shoots vs. Whole Plant
  misc_feature: MA Experiment ID: 20000355 Result: Down-regulated in Transcription
  misc_feature: MA Experiment 20000355 PARAMETER Experiment Name: At_Siliques_Sub_P Parameter: Age (day) Value: 21
  misc_feature: MA Experiment 20000355 PARAMETER Experiment Name: At_Siliques_Sub_P Parameter: Organism Value: A. thaliana
  misc_feature: MA Experiment 20000355 PARAMETER Experiment Name: At_Siliques_Sub_P Parameter: Plant Line Value: WS
  misc_feature: MA Experiment 20000355 PARAMETER Experiment Name: At_Siliques_Sub_P Parameter: Tissue Value: Less Than 5mm Siliques vs. Whole Plant
  misc_feature: MA Experiment ID: 20000440 Result: Down-regulated in Transcription
  misc_feature: MA Experiment 20000440 PARAMETER Experiment Name: At_Closed-Flower__Sub_P Parameter: Tissue Value: Closed Flower vs. Whole Plant
atgcgtctgcgtcaccaaggaggacaatacttggctcgcggtatggaacccgtgtactggtcaaacaaggtggattcaacccatgacttatatgacaactatactctcggatcctaccaaaataatagctacaatatattggcacacactggttttggctacgaccacgaattccaaatttatgaaattaactccaattcatggaggattattgatgccactttggacttcaaattagggtatattggtcgtggcgtgtctttgaagggaaagacttactggattgctagtggtgaagaagagaaacggcttggcaaattcttaatcagttttgattatacgacagaaagatttgaacgtctatgtcttccgaataagtatccttgttatgcaactctggctctatccgttgttagagaagagaaactttccatgttatcgcaacgcggaattaaatcaaaggcagaaatatgggtgacaaataagattggtgagacacaagtggtgtcgtggagcatggtcttagctttggatttgcagcctaaacgttgtattggggaaagcggaagtttcttggtcgacgagaagaagagagtggtcgtgtgttgtgataatattagagaccaaggaaaaaccacgtttgactcaaatctaccaaggtatcacaggcaaaagaaaaagggacgaatgatcatagtgtttgacgttgaatcaatgagactccccgtcaccgtcaaagccactaagccgtcgtttctcgtcatttggatccgatactcctccgccgcgtcgtcgccgacagtctccttgaatccaagtggacgattacagcaaactctcgcaggatctgtggaagtgaaaggaaaatctctgcactccggtaagttctcgacggtgaagctaaatccggagatcgccggagctggtaggttcttcgagtttcgatccagattcatccctgcgtcgattgaatttgctcaggaatcgcctctttgcacgacgctgttgaaagatgagctcaaaatccgaaccgttgagcatttgttatcagctcttgaggcgaagggagttgataattgcaggattcaaatcgagagcgaaagttccgatgatcgagaagtcgaggtccctatttttgatggatcagctaaagaatgggtcgatgcgatacaaggagttggcataaacgcggctcaaaaccatgatggtgaaagtgtagagaagatggtcgcacatgtgaacaagcctgtgtatgtttgcaagaacgatacttttgttgctgcatttccggctctagagactcggatcacttgtggtatcgacttcccacaggtgcctgctataggctgccaatggttttcttggagacctatccatgagtcttcttttgcaaaggatatcgcatcatcaagaaccttctgtgtctatgaagaggtggagcgtatgcgtgaagcagggctcattaaaggaggttctctggataacgccatagtttgtagcgctgagcatggatggatgaatcctcctctgcggtttgatgatgaagcatgtcgacataagattcttgacctaatcggtgacctctcccttgtttcacggggcggaaatggaggactccccgtggctcacatagtcgcatataagaatgaggaggaggaggtgcgatcttcaaccgaagagaacgagaatgtgcgatcttcaaccgaagagaacgagtatgtgcgatcttccaccgaagctggtaggggagaagatcctcacgaggattccgataacatctctgagagcggtgcgatccacttgcaaattatggaacgctttaaccaaagatcgggttctggcaaggaggaagaagaagacacgatggatctatctataaagcaggtagatttgcttaatcaagtcgagatatctagggtgtatcactgcgacggcttgttgttatgcgtggctaaggacaactcgagggtcgtggtttggaacccttatttggggcaaacaagatggatcagacccagaacagaatccaacataggagacagctatgctcttggatacgacatcaaccgtaaccacaaaatcttgaggatggtgcagacaagaaacgtttccgtttacaggtacgaaatctacgacttgcgctctaattcatggagggttctcgaggtcactcccaacggggaaatggaccctaatcatcccctctacggcgtttctgtgaagggaaatacctacttttttgcgcatgaggatagcagcagtggtgaaattgatgaagatggcgacataatcgatcttgaagatttcttactctgttttgattttacaacagagacatttggtctgcgtctgcctcttccgtttcactctactatcgatgcgactgtgaccctctcttgtgttagagaccagcagctcgcggtgctatatcataatgagggtcttcacagtgatgatcggtttaccacagttgagttttgggttactactagtattgagcccaactctgtgtcctggagcaagtttttgacagtggatatgagaccattggcactcactggtgttcggtttgacaatgatatgggtgccaccttcttcattgacgaggatgagaaagttgctgtggttttcgatctagacggatacctaagcaccgagagcgctcgttaccacaccgcttttatcagtggaaaggatggattctttaaacctgtgactctaggagtagctcccaatgtcggggaaccttgtcccagaaccgggcatattccgactacatatcgtcccccgcttgtctgctcgtctacttaccttccgagtttagtgcaagtcaaccaacagcgcaaaaggaaagaaagacatgtttag

SEQ ID NO: 82223 - protein, 955 aa, Arabidopsis thaliana; identical to SEQ ID NO: 80444
  peptide (1)..(955): Ceres Seq. ID no. 12664524
  misc_feature (274)..(548): Pfam Name: UDP-3-O-acyl N-acetylglycosamine deacetylase Pfam Description: UDP-3-O-acyl N-acetylglycosamine deacetylase
  misc_feature (606)..(955): Homolog of NCBI NO: 23297235 NR Description: unknown protein [Arabidopsis thaliana]
  misc_feature (606)..(955): Homolog of NCBI NO: 19347782 NR Description: putative F5A9.18 protein [Arabidopsis thaliana]
  misc_feature (239)..(548): Homolog of NCBI NO: 26451306 NR Description: unknown protein [Arabidopsis thaliana]
  misc_feature (239)..(504): Homolog of NCBI NO: 20453133 NR Description: At1g25190/F4F7_4 [Arabidopsis thaliana]
  misc_feature (734)..(944): Homolog of NCBI NO: 15220234 NR Description: unknown protein; protein id: At1g10890.1
  misc_feature (625)..(698): Homolog of NCBI NO: 15220234 NR Description: unknown protein; protein id: At1g10890.1
  misc_feature (624)..(912): Homolog of NCBI NO: 15239318 NR Description: putative protein; protein id: At5g36200.1
  misc_feature (634)..(879): Homolog of NCBI NO: 9293877 NR Description: gb|AAC67359.1~gene_id:MCB17.16~similar to unknown
  misc_feature (634)..(879): Homolog of NCBI NO: 22331255 NR Description: similar to type 2 peroxiredoxin, putative;
  misc_feature (634)..(912): Homolog of NCBI NO: 15228908 NR Description: hypothetical protein; protein id: At3g22940.1 thaliana] >gi|11994724|dbj|BAB03040.1|

SEQ ID NO: 82224 - protein, 941 aa, Arabidopsis thaliana; identical to SEQ ID NO: 80445
  peptide (1)..(941): Ceres Seq. ID no. 12664525
  misc_feature (260)..(534): Pfam Name: UDP-3-O-acyl N-acetylglycosamine deacetylase Pfam Description: UDP-3-O-acyl N-acetylglycosamine deacetylase
  misc_feature (592)..(941): Homolog of NCBI NO: 23297235 NR Description: unknown protein [Arabidopsis thaliana]
  misc_feature (592)..(941): Homolog of NCBI NO: 19347782 NR Description: putative F5A9.18 protein [Arabidopsis thaliana]
  misc_feature (225)..(534): Homolog of NCBI NO: 26451306 NR Description: unknown protein [Arabidopsis thaliana]
  misc_feature (225)..(490): Homolog of NCBI NO: 20453133 NR Description: At1g25190/F4F7_4 [Arabidopsis thaliana]
  misc_feature (720)..(930): Homolog of NCBI NO: 15220234 NR Description: unknown protein; protein id: At1g10890.1
  misc_feature (611)..(684): Homolog of NCBI NO: 15220234 NR Description: unknown protein; protein id: At1g10890.1
  misc_feature (610)..(898): Homolog of NCBI NO: 15239318 NR Description: putative protein; protein id: At5g36200.1
  misc_feature (620)..(865): Homolog of NCBI NO: 9293877 NR Description: gb|AAC67359.1~gene_id:MCB17.16~similar to unknown
  misc_feature (620)..(865): Homolog of NCBI NO: 22331255 NR Description: similar to type 2 peroxiredoxin, putative;
  misc_feature (620)..(898): Homolog of NCBI NO: 15228908 NR Description: hypothetical protein; protein id: At3g22940.1 thaliana] >gi|11994724|dbj|BAB03040.1|

SEQ ID NO: 82225 - protein, 811 aa, Arabidopsis thaliana; identical to SEQ ID NO: 80446
  peptide (1)..(811): Ceres Seq. ID no. 12664526
  misc_feature (130)..(404): Pfam Name: UDP-3-O-acyl N-acetylglycosamine deacetylase Pfam Description: UDP-3-O-acyl N-acetylglycosamine deacetylase
  misc_feature (462)..(811): Homolog of NCBI NO: 23297235 NR Description: unknown protein [Arabidopsis thaliana]
  misc_feature (462)..(811): Homolog of NCBI NO: 19347782 NR Description: putative F5A9.18 protein [Arabidopsis thaliana]
  misc_feature (95)..(404): Homolog of NCBI NO: 26451306 NR Description: unknown protein [Arabidopsis thaliana]
  misc_feature (95)..(360): Homolog of NCBI NO: 20453133 NR Description: At1g25190/F4F7_4 [Arabidopsis thaliana]
  misc_feature (590)..(800): Homolog of NCBI NO: 15220234 NR Description: unknown protein; protein id: At1g10890.1
  misc_feature (481)..(554): Homolog of NCBI NO: 15220234 NR Description: unknown protein; protein id: At1g10890.1
  misc_feature (480)..(768): Homolog of NCBI NO: 15239318 NR Description: putative protein; protein id: At5g36200.1
  misc_feature (490)..(735): Homolog of NCBI NO: 9293877 NR Description: gb|AAC67359.1~gene_id:MCB17.16~similar to unknown
  misc_feature (490)..(735): Homolog of NCBI NO: 22331255 NR Description: similar to type 2 peroxiredoxin, putative;
  misc_feature (490)..(768): Homolog of NCBI NO: 15228908 NR Description: hypothetical protein; protein id: At3g22940.1 thaliana] >gi|11994724|dbj|BAB03040.1|

SEQ ID NO: 82226 - DNA, 1108 bp, Arabidopsis thaliana
  misc_feature (1)..(1108): Ceres Seq. ID no. 12664534
  misc_feature: MA Experiment ID: 20000355 Result: Down-regulated in Transcription
  misc_feature: MA Experiment 20000355 PARAMETER Experiment Name: At_Siliques_Sub_P Parameter: Age (day) Value: 21
  misc_feature: MA Experiment 20000355 PARAMETER Experiment Name: At_Siliques_Sub_P Parameter: Organism Value: A. thaliana
  misc_feature: MA Experiment 20000355 PARAMETER Experiment Name: At_Siliques_Sub_P Parameter: Plant Line Value: WS
  misc_feature: MA Experiment 20000355 PARAMETER Experiment Name: At_Siliques_Sub_P Parameter: Tissue Value: Less Than 5mm Siliques vs. Whole Plant
aaatcataaaagcctctctcttagtctatttttatctcacggctctctctcccctctctacacacacaaacacaaataaagcgtaaaactgaaatattttaattacaattagaaagagaacatattaatatgtcaaatataacaaagaagaagtgtaatggaaatgaagagggtgcagagcagaggaaagggccttggacactcgaggaagacactcttctcaccaattacatttcccataacggtgaaggccgatggaatctgctcgctaaatcttctgggctaaagagagcaggaaaaagttgtagattgagatggttgaattaccttaaacccgacataaagcgtgggaatctcactcctcaagaacaacttttaatccttgagctccattctaaatggggtaataggtggtcaaaaatttcgaagtatttaccaggaagaacagacaacgatatcaaaaactactggagaactagagtccagaaacaagcacgccagctcaacatagattccaatagccacaagttcatagaagttgttcgtagcttttggtttccaagactgatcaacgagattaaagacaactcatacaccaacaatattaaagctaatgctcctgatttacttggaccaattttacgagacagcaaagatttgggtttcaacaacatggattgttccacttccatgtcagaagatctcaagaaaacttcacaattcatggatttttctgatcttgaaaccacaatgtccttggaaggatcacgagggggtagtagtcaatgtgtgagtgaggtttatagctccttcccttgcctagaggaggagtacatggtggccgttatgggcagttcagacatttcagcattgcatgattgtcacgtggctgattccaagtacgaggatgatgtgacacaagatctaatgtggaacatggatgacatttggcagtttaacgagtatgcacactttaattaggttatattatatttatgtacttcttacaacttggaggggtttatcggtcttttattaaattttgattgttttggattccttaaaaatgtgttcttattatagtttttaatgaaaaaaatgtttaagc

SEQ ID NO: 82227 - protein, 283 aa, Arabidopsis thaliana
  peptide (1)..(283): Ceres Seq. ID no. 12664535
  misc_feature (20)..(67): Pfam Name: Myb-like DNA-binding domain Pfam Description: Myb-like DNA-binding domain
  misc_feature (1)..(283): Homolog of NCBI NO: 18395645 NR Description: myb-related transcription factor (cpm7), protein id: At1g25340.1, supported by cDNA: gi_15375294 thaliana] >gi|15375295|gb|AAK25748.2|AF334815_1 putative
  misc_feature (1)..(283): Homolog of NCBI NO: 25294097 NR Description: probable Myb-like protein (Myb26) [imported] -
  misc_feature (1)..(278): Homolog of NCBI NO: 15221373 NR Description: myb family transcription factor; protein id: [Arabidopsis thaliana] >gi|25294102|pir||H96706 probable
  misc_feature (13)..(150): Homolog of NCBI NO: 34895506 NR Description: putative myb-related transcription factor [Oryza
  misc_feature (1)..(227): Homolog of NCBI NO: 7446183 NR Description: ABA-induced myb-related protein Cpm10 -
  misc_feature (1)..(227): Homolog of NCBI NO: 7446184 NR Description: myb-related protein Cpm5 - Craterostigma
  misc_feature (17)..(151): Homolog of NCBI NO: 19073328 NR Description: typical P-type R2R3 Myb protein [Sorghum bicolor]
  misc_feature (1)..(234): Homolog of NCBI NO: 7446185 NR Description: dehydration-induced myb-related protein Cpm7 - plantagineum >gi|1002800|gb|AAB58314.1| Cpm7 [Craterostigma
  misc_feature (15)..(166): Homolog of NCBI NO: 34898110 NR Description: putative typical P-type R2R3 Myb protein [Oryza
  misc_feature (16)..(275): Homolog of NCBI NO: 13177578 NR Description: Myb transcription factor JAMyb [Oryza sativa]
MSNITKKKCNGNEEGAEQRKGPWTLEEDTLLTNYISHNGEGRWNLLAKSSGLKRAGKSCRLRWLNYLKPDIKRGNLTPQEQLLILELHSKWGNRWSKISKYLPGRTDNDIKNYWRTRVQKQARQLNIDSNSHKFIEVVRSFWFPRLINEIKDNSYTNNIKANAPDLLGPILRDSKDLGFNNMDCSTSMSEDLKKTSQFMDFSDLETTMSLEGSRGGSSQCVSEVYSSFPCLEEEYMVAVMGSSDISALHDCHVADSKYEDDVTQDLMWNMDDIWQFNEYAHFN

SEQ ID NO: 82228 - DNA, 2124 bp, Arabidopsis thaliana
  misc_feature (1)..(2124): Ceres Seq. ID no. 12664540
  misc_feature: MA Experiment ID: 20000171 Result: Down-regulated in Transcription
  misc_feature: MA Experiment 20000171 PARAMETER Experiment Name: At_42deg_Heat_P Parameter: Age (day) Value: 14
  misc_feature: MA Experiment 20000171 PARAMETER Experiment Name: At_42deg_Heat_P Parameter: Organism Value: A. thaliana
  misc_feature: MA Experiment 20000171 PARAMETER Experiment Name: At_42deg_Heat_P Parameter: Plant Line Value: WS
  misc_feature: MA Experiment 20000171 PARAMETER Experiment Name: At_42deg_Heat_P Parameter: Temperature (deg C) Value: 42 vs. 22
  misc_feature: MA Experiment 20000171 PARAMETER Experiment Name: At_42deg_Heat_P Parameter: Timepoint (hr) Value: 1
  misc_feature: MA Experiment 20000171 PARAMETER Experiment Name: At_42deg_Heat_P Parameter: Tissue Value: Aerial
  misc_feature: MA Experiment ID: 20000173 Result: Down-regulated in Transcription
  misc_feature: MA Experiment 20000173 PARAMETER Experiment Name: At_42deg_Heat_P Parameter: Age (day) Value: 14
  misc_feature: MA Experiment 20000173 PARAMETER Experiment Name: At_42deg_Heat_P Parameter: Organism Value: A. thaliana
  misc_feature: MA Experiment 20000173 PARAMETER Experiment Name: At_42deg_Heat_P Parameter: Plant Line Value: WS
  misc_feature: MA Experiment 20000173 PARAMETER Experiment Name: At_42deg_Heat_P Parameter: Temperature (deg C) Value: 42 vs. 22
  misc_feature: MA Experiment 20000173 PARAMETER Experiment Name: At_42deg_Heat_P Parameter: Timepoint (hr) Value: 6
  misc_feature: MA Experiment 20000173 PARAMETER Experiment Name: At_42deg_Heat_P Parameter: Tissue Value: Aerial
  misc_feature: MA Experiment ID: 20000184 Result: Down-regulated in Transcription
  misc_feature: MA Experiment 20000184 PARAMETER Experiment Name: At_Shoots__P Parameter: Age (day) Value: 7
  misc_feature: MA Experiment 20000184 PARAMETER Experiment Name: At_Shoots__P Parameter: Tissue Value: Shoots vs. Whole Plant
  misc_feature: MA Experiment ID: 20000234 Result: Down-regulated in Transcription
  misc_feature: MA Experiment 20000234 PARAMETER Experiment Name: At_Siliques_P Parameter: Age (day) Value: 21
  misc_feature: MA Experiment 20000234 PARAMETER Experiment Name: At_Siliques_P Parameter: Organism Value: A. thaliana
  misc_feature: MA Experiment 20000234 PARAMETER Experiment Name: At_Siliques_P Parameter: Plant Line Value: WS
  misc_feature: MA Experiment 20000234 PARAMETER Experiment Name: At_Siliques_P Parameter: Tissue Value: Less Than 5mm Siliques vs. Whole Plant
  misc_feature: MA Experiment ID: 20000265 Result: Down-regulated in Transcription
  misc_feature: MA Experiment 20000265 PARAMETER Experiment Name: At_Open_Flower_P Parameter: Age (day) Value: 21
  misc_feature: MA Experiment 20000265 PARAMETER Experiment Name: At_Open_Flower_P Parameter: Plant Line Value: WS
  misc_feature: MA Experiment 20000265 PARAMETER Experiment Name: At_Open_Flower_P Parameter: Tissue Value: Closed Flower vs. Whole Plant
  misc_feature: MA Experiment ID: 20000286 Result: Down-regulated in Transcription
  misc_feature: MA Experiment 20000286 PARAMETER Experiment Name: At_Open_Flower_P Parameter: Age (day) Value: 21
  misc_feature: MA Experiment 20000286 PARAMETER Experiment Name: At_Open_Flower_P Parameter: Plant Line Value: WS
  misc_feature: MA Experiment 20000286 PARAMETER Experiment Name: At_Open_Flower_P Parameter: Tissue Value: Half Open vs. Whole Plant
  misc_feature: MA Experiment ID: 20000437 Result: Down-regulated in Transcription
  misc_feature: MA Experiment 20000437 PARAMETER Experiment Name: At_Drought_P Parameter: Age (day) Value: 8
  misc_feature: MA Experiment 20000437 PARAMETER Experiment Name: At_Drought_P Parameter: Organism Value: A. thaliana
  misc_feature: MA Experiment 20000437 PARAMETER Experiment Name: At_Drought_P Parameter: Plant Line Value: WS
  misc_feature: MA Experiment 20000437 PARAMETER Experiment Name: At_Drought_P Parameter: Timepoint (hr) Value: 24
  misc_feature: MA Experiment 20000437 PARAMETER Experiment Name: At_Drought_P Parameter: Tissue Value: Whole Plant
  misc_feature: MA Experiment 20000437 PARAMETER Experiment Name: At_Drought_P Parameter: Treatment Value: Drought vs. No Drought
  misc_feature: MA Experiment ID: 20000438 Result: Down-regulated in Transcription
  misc_feature: MA Experiment 20000438 PARAMETER Experiment Name: At_Shoots__P Parameter: Age (day) Value: 14
  misc_feature: MA Experiment 20000438 PARAMETER Experiment Name: At_Shoots__P Parameter: Tissue Value: Shoots vs. Whole Plant
  misc_feature: MA Experiment ID: 20000451 Result: Down-regulated in Transcription
  misc_feature: MA Experiment 20000451 PARAMETER Experiment Name: At_CS6879_Shoots-Roots_P Parameter: Age (day) Value: 14
  misc_feature: MA Experiment 20000451 PARAMETER Experiment Name: At_CS6879_Shoots-Roots_P Parameter: Organism Value: A. thaliana
  misc_feature: MA Experiment 20000451 PARAMETER Experiment Name: At_CS6879_Shoots-Roots_P Parameter: Plant Line Value: CS6879 vs. WS
  misc_feature: MA Experiment 20000451 PARAMETER Experiment Name: At_CS6879_Shoots-Roots_P Parameter: Tissue Value: Roots
  misc_feature: MA Experiment ID: 20001560 Result: Down-regulated in Transcription
  misc_feature: MA Experiment 20001560 PARAMETER Experiment Name: At_Drought_Soil_Dry_P Parameter: Age (day) Value: 28
  misc_feature: MA Experiment 20001560 PARAMETER Experiment Name: At_Drought_Soil_Dry_P Parameter: Organism Value: A. thaliana
  misc_feature: MA Experiment 20001560 PARAMETER Experiment Name: At_Drought_Soil_Dry_P Parameter: Plant Line Value: WS
  misc_feature: MA Experiment 20001560 PARAMETER Experiment Name: At_Drought_Soil_Dry_P Parameter: Post Timepoint (hr) Value: None
  misc_feature: MA Experiment 20001560 PARAMETER Experiment Name: At_Drought_Soil_Dry_P Parameter: Post-Treatment Value: None
  misc_feature: MA Experiment 20001560 PARAMETER Experiment Name: At_Drought_Soil_Dry_P Parameter: Timepoint (day) Value: 14
  misc_feature: MA Experiment 20001560 PARAMETER Experiment Name: At_Drought_Soil_Dry_P Parameter: Treatment Value: Drought vs. No Drought
atctttagatctggctatcgaaaaacacactagcttcttctaatcagaatacctatggagactgtctctgttttgctcttcttcttcctcttccttctagcggcagaagcaaggagcaccaagcggacaggttgcaaggatttcacctgcggagaacatgacttcaagttccctttctttaggacagacatgccatctcgatgcggtcttttcaagctgaactgcagtgcaaatattccagagatacagcttgaaaaagatgggaaatggtatacagtcaagagcgtctctcaagccaacacgataaccatcatcgacccgaggcttaaccaaagcttgacaaccggaggctgcagtgacttgtcaagcttctctcttccagattctccatggctcaaattgaacacgttgtacaaatgcaacaatagtagtaggaagaatggtttcagctatgcgaattgcagaggagaaggaagcagcttgtactacaatttgggagatgatcatgatgtttcagggtgttcacctattaagactccagagagctgggtgactccaaaaaatgggaacctgtctgatgtaaatgctaccttctctcttcatatagaactgcctgggaactgctttcgctgccacaataacggtggagaatgtacaaaggttaaaaacaattaccgttgcgttggcgcaaacacagaaccaaataactaccatgcggagatgaggctaggattaggaataggaggatctgtcatcttgataatcatcttggtggcactctttgctgtcatccataggaattacagaaggaaagatggttcagagctctccagagacaactcaaaatctgacgttgagtttagtcaagtcttctttaagataccaatcttctcctataaggaacttcaagcagcaacagacaactttagtaaagacagattactaggagatggaggctttggcactgtgtactatggaaaagtgcgtgatgggcgagaagttgcagtgaagcgtctctatgagcacaattacagaagacttgagcaattcatgaacgagatagaaatcctcacacgtctccatcacaagaatctagtctccctctatggatgcacttcacgccgcagccgagagcttctccttgtctatgagtttattccaaatggcacagttgcagatcatctctatggcgaaaacacgccacaccaaggctttttaacatggtcaatgcgcctgagcatcgccatagaaacagcgagtgcattggcttaccttcatgcttcggatatcatacaccgggatgtcaagactacaaacattctcctcgacaggaatttcggagtaaaagtcgcggattttgggctatccaggttgctcccgagtgatgtaactcatgtttcaactgctcctcagggtactccgggatacgtggatccagaatatcatcgctgctatcatctaacagataagagtgacgtgtatagctttggggtggtgcttgtcgagctgatatcatcgaagcctgctgttgatataagtagatgcaagagtgagatcaatctatcaagcttagcaataaacaagatacaaaaccatgcgacccacgagctgattgatcagaatcttggatatgcaacgaatgaaggagttagaaaaatgactacaatggtggcagagttggcttttcagtgcttgcagcaagacaatacaatgagacccacaatggaacaagttgtgcacgagctaaaaggaatccagaatgaggagcaaaaatgtccaacctacgactacagagaggagacaataattccacacccttcgccaccagattggggtgaggctgcactattaaaaaatatgaaattcccacgttcaccagtctctgtgactgaccaatggacaagtaaatcaaccacaccgaataccagcgcctacgaattctaggatccaccaggtattggtttcttctcatttgtttcaatggaacgatataagatgaggcacagggttgtgaagcagtaggtaccgagagaatgtacatagtgacataacttgaactaccaatcaccaattttctatgtctaattttgtctactgtatgtaagattgaatcaaaaggtattt

SEQ ID NO: 82229 - protein, 629 aa, Arabidopsis thaliana
  peptide (1)..(629): Ceres Seq. ID no. 12664541
  misc_feature (181)..(605): Homolog of NCBI NO: 15529242 NR Description: At1g25390/F2J7_14 [Arabidopsis thaliana]
  misc_feature (130)..(626): Homolog of NCBI NO: 15408726 NR Description: P0443D08.8 [Oryza sativa (japonica
  misc_feature (189)..(569): Homolog of NCBI NO: 25402857 NR Description: protein F15H18.11 [imported] - Arabidopsis >gi|6714300|gb|AAF25996.1|AC013354_15 F15H18.11 [Arabidopsis
  misc_feature (223)..(569): Homolog of NCBI NO: 34911340 NR Description: P0034C09.1 [Oryza sativa (japonica
  misc_feature (276)..(621): Homolog of NCBI NO: 25404646 NR Description: probable wall-associated kinase T4O24.5
  misc_feature (276)..(621): Homolog of NCBI NO: 12597754 NR Description: protein kinase, putative [Arabidopsis thaliana]
  misc_feature (276)..(621): Homolog of NCBI NO: 30697422 NR Description: serine/threonine protein kinase family
  misc_feature (276)..(621): Homolog of NCBI NO: 24417464 NR Description: unknown [Arabidopsis thaliana]
  misc_feature (255)..(629): Homolog of NCBI NO: 10177797 NR Description: contains similarity to protein
  misc_feature (255)..(629): Homolog of NCBI NO: 22327431 NR Description: protein kinase - like protein; protein id: supported by cDNA: gi_18175790 [Arabidopsis thaliana] putative protein kinase [Arabidopsis thaliana]
METVSVLLFFFLFLLAAEARSTKRTGCKDFTCGEHDFKFPFFRTDMPSRCGLFKLNCSANIPEIQLEKDGKWYTVKSVSQANTITIIDPRLNQSLTTGGCSDLSSFSLPDSPWLKLNTLYKCNNSSRKNGFSYANCRGEGSSLYYNLGDDHDVSGCSPIKTPESWVTPKNGNLSDVNATFSLHIELPGNCFRCHNNGGECTKVKNNYRCVGANTEPNNYHAEMRLGLGIGGSVILIIILVALFAVIHRNYRRKDGSELSRDNSKSDVEFSQVFFKIPIFSYKELQAATDNFSKDRLLGDGGFGTVYYGKVRDGREVAVKRLYEHNYRRLEQFMNEIEILTRLHHKNLVSLYGCTSRRSRELLLVYEFIPNGTVADHLYGENTPHQGFLTWSMRLSIAIETASALAYLHASDIIHRDVKTTNILLDRNFGVKVADFGLSRLLPSDVTHVSTAPQGTPGYVDPEYHRCYHLTDKSDVYSFGVVLVELISSKPAVDISRCKSEINLSSLAINKIQNHATHELIDQNLGYATNEGVRKMTTMVAELAFQCLQQDNTMRPTMEQVVHELKGIQNEEQKCPTYDYREETIIPHPSPPDWGEAALLKNMKFPRSPVSVTDQWTSKSTTPNTSAYEF

SEQ ID NO: 82230 - protein, 584 aa, Arabidopsis thaliana
  peptide (1)..(584): Ceres Seq. ID no. 12664542
  misc_feature (136)..(560): Homolog of NCBI NO: 15529242 NR Description: At1g25390/F2J7_14 [Arabidopsis thaliana]
  misc_feature (85)..(581): Homolog of NCBI NO: 15408726 NR Description: P0443D08.8 [Oryza sativa (japonica
  misc_feature (144)..(524): Homolog of NCBI NO: 25402857 NR Description: protein F15H18.11 [imported] - Arabidopsis >gi|6714300|gb|AAF25996.1|AC013354_15 F15H18.11 [Arabidopsis
  misc_feature (178)..(524): Homolog of NCBI NO: 34911340 NR Description: P0034C09.1 [Oryza sativa (japonica
  misc_feature (231)..(576): Homolog of NCBI NO: 25404646 NR Description: probable wall-associated kinase T4O24.5
  misc_feature (231)..(576): Homolog of NCBI NO: 12597754 NR Description: protein kinase, putative [Arabidopsis thaliana]
  misc_feature (231)..(576): Homolog of NCBI NO: 30697422 NR Description: serine/threonine protein kinase family
  misc_feature (231)..(576): Homolog of NCBI NO: 24417464 NR Description: unknown [Arabidopsis thaliana]
  misc_feature (210)..(584): Homolog of NCBI NO: 10177797 NR Description: contains similarity to protein
  misc_feature (210)..(584): Homolog of NCBI NO: 22327431 NR Description: protein kinase - like protein; protein id: supported by cDNA: gi_18175790 [Arabidopsis thaliana] putative protein kinase [Arabidopsis thaliana]
MPSRCGLFKLNCSANIPEIQLEKDGKWYTVKSVSQANTITIIDPRLNQSLTTGGCSDLSSFSLPDSPWLKLNTLYKCNNSSRKNGFSYANCRGEGSSLYYNLGDDHDVSGCSPIKTPESWVTPKNGNLSDVNATFSLHIELPGNCFRCHNNGGECTKVKNNYRCVGANTEPNNYHAEMRLGLGIGGSVILIIILVALFAVIHRNYRRKDGSELSRDNSKSDVEFSQVFFKIPIFSYKELQAATDNFSKDRLLGDGGFGTVYYGKVRDGREVAVKRLYEHNYRRLEQFMNEIEILTRLHHKNLVSLYGCTSRRSRELLLVYEFIPNGTVADHLYGENTPHQGFLTWSMRLSIAIETASALAYLHASDIIHRDVKTTNILLDRNFGVKVADFGLSRLLPSDVTHVSTAPQGTPGYVDPEYHRCYHLTDKSDVYSFGVVLVELISSKPAVDISRCKSEINLSSLAINKIQNHATHELIDQNLGYATNEGVRKMTTMVAELAFQCLQQDNTMRPTMEQVVHELKGIQNEEQKCPTYDYREETIIPHPSPPDWGEAALLKNMKFPRSPVSVTDQWTSKSTTPNTSAYEF

SEQ ID NO: 82231 - protein, 407 aa, Arabidopsis thaliana
  peptide (1)..(407): Ceres Seq. ID no. 12664543
  misc_feature (1)..(383): Homolog of NCBI NO: 15529242 NR Description: At1g25390/F2J7_14 [Arabidopsis thaliana]
  misc_feature (1)..(404): Homolog of NCBI NO: 15408726 NR Description: P0443D08.8 [Oryza sativa (japonica
  misc_feature (1)..(347): Homolog of NCBI NO: 25402857 NR Description: protein F15H18.11 [imported] - Arabidopsis >gi|6714300|gb|AAF25996.1|AC013354_15 F15H18.11 [Arabidopsis
  misc_feature (1)..(347): Homolog of NCBI NO: 34911340 NR Description: P0034C09.1 [Oryza sativa (japonica
  misc_feature (54)..(399): Homolog of NCBI NO: 25404646 NR Description: probable wall-associated kinase T4O24.5
  misc_feature (54)..(399): Homolog of NCBI NO: 12597754 NR Description: protein kinase, putative [Arabidopsis thaliana]
  misc_feature (54)..(399): Homolog of NCBI NO: 30697422 NR Description: serine/threonine protein kinase family
  misc_feature (54)..(399): Homolog of NCBI NO: 24417464 NR Description: unknown [Arabidopsis thaliana]
  misc_feature (33)..(407): Homolog of NCBI NO: 10177797 NR Description: contains similarity to protein
  misc_feature (33)..(407): Homolog of NCBI NO: 22327431 NR Description: protein kinase - like protein; protein id: supported by cDNA: gi_18175790 [Arabidopsis thaliana] putative protein kinase [Arabidopsis thaliana]
MRLGLGIGGSVILIIILVALFAVIHRNYRRKDGSELSRDNSKSDVEFSQVFFKIPIFSYKELQAATDNFSKDRLLGDGGFGTVYYGKVRDGREVAVKRLYEHNYRRLEQFMNEIEILTRLHHKNLVSLYGCTSRRSRELLLVYEFIPNGTVADHLYGENTPHQGFLTWSMRLSIAIETASALAYLHASDIIHRDVKTTNILLDRNFGVKVADFGLSRLLPSDVTHVSTAPQGTPGYVDPEYHRCYHLTDKSDVYSFGVVLVELISSKPAVDISRCKSEINLSSLAINKIQNHATHELIDQNLGYATNEGVRKMTTMVAELAFQCLQQDNTMRPTMEQVVHELKGIQNEEQKCPTYDYREETIIPHPSPPDWGEAALLKNMKFPRSPVSVTDQWTSKSTTPNTSAYEF

SEQ ID NO: 82232 - DNA, 963 bp, Arabidopsis thaliana
  misc_feature (1)..(963): Ceres Seq. ID no. 12664552
  misc_feature: MA Experiment ID: 20000314 Result: Up-regulated in Transcription
  misc_feature: MA Experiment 20000314 PARAMETER Experiment Name: At_14day_Shoots-Roots_Sub_P Parameter: Age (day) Value: 14
  misc_feature: MA Experiment 20000314 PARAMETER Experiment Name: At_14day_Shoots-Roots_Sub_P Parameter: Organism Value: A. thaliana
  misc_feature: MA Experiment 20000314 PARAMETER Experiment Name: At_14day_Shoots-Roots_Sub_P Parameter: Plant Line Value: WS
  misc_feature: MA Experiment 20000314 PARAMETER Experiment Name: At_14day_Shoots-Roots_Sub_P Parameter: Tissue Value: Roots vs. Whole Plant
  misc_feature: MA Experiment ID: 20000328 Result: Down-regulated in Transcription
  misc_feature: MA Experiment 20000328 PARAMETER Experiment Name: At_42deg_Heat_Sub_P Parameter: Age (day) Value: 14
  misc_feature: MA Experiment 20000328 PARAMETER Experiment Name: At_42deg_Heat_Sub_P Parameter: Organism Value: A. thaliana
  misc_feature: MA Experiment 20000328 PARAMETER Experiment Name: At_42deg_Heat_Sub_P Parameter: Plant Line Value: WS
  misc_feature: MA Experiment 20000328 PARAMETER Experiment Name: At_42deg_Heat_Sub_P Parameter: Temperature (deg C) Value: 42 vs. 22
  misc_feature: MA Experiment 20000328 PARAMETER Experiment Name: At_42deg_Heat_Sub_P Parameter: Timepoint (hr) Value: 6
  misc_feature: MA Experiment 20000328 PARAMETER Experiment Name: At_42deg_Heat_Sub_P Parameter: Tissue Value: Aerial
  misc_feature: MA Experiment ID: 20000355 Result: Up-regulated in Transcription
  misc_feature: MA Experiment 20000355 PARAMETER Experiment Name: At_Siliques_Sub_P Parameter: Age (day) Value: 21
  misc_feature: MA Experiment 20000355 PARAMETER Experiment Name: At_Siliques_Sub_P Parameter: Organism Value: A. thaliana
  misc_feature: MA Experiment 20000355 PARAMETER Experiment Name: At_Siliques_Sub_P Parameter: Plant Line Value: WS
  misc_feature: MA Experiment 20000355 PARAMETER Experiment Name: At_Siliques_Sub_P Parameter: Tissue Value: Less Than 5mm Siliques vs. Whole Plant
atggcagagtacttggttaccggaggaaccagctttatagcctctcatgttatcaagtcacttctagaatttggtcattacgtaagaacaactgttagagactcagaagatgaagaaaaggtgggtttcttgtgggacttaaaaggagcaaaagaaaggttgaagatcttcgaagctgatctaacgatagagggaagctttgacgaagcagtcaacggtgttgatggagtcttccacatcgcatctcgagtttctgttcgtctggacaacaacaatctggataaatttgatcctaatataagtggaacaatgaatgtgatgaactcttgtgcaaagtcaagaaacactgtgaaaaggattgttctcacatcttcttcaaccgcgatacggtaccgttttgatgctacacaagtctctccacttaatgaatcgcattggaccgatcttgaatactgcaaacacttcaaaatttggtatgcttataaaaagactttaggggagaaagaagcttggaggatcgcagctgataagaagctaaacctagttgtcgtaatcccatcattttgtattggtccaatacttagtccaaaacctacaagctcccctctcatttttctgtccattatcaaagggactcgtggaacgtaccctaacttcaggggagggtttgtgcacatagacgatgtagttgctgcacaaatcttagcaatggaagaacctaaagcatcaggaagaatcttatgttcgagttcagtggctcactggtcagagatcattgagatgctacgaatcaaatacccattatacccatttgagaccaagtgtggcagtgaagaagggaaagatatgcctcatagcttagacacaacaaaaatacatgaacttggctttgcctccttcaagtcattaacagagatgtttgatgactgtatcaagtgttttcaagacaagggtttgctctga

SEQ ID NO: 82233 - protein, 320 aa, Arabidopsis thaliana
  peptide (1)..(320): Ceres Seq. ID no. 12664553
  misc_feature (5)..(141): Pfam Name: NAD dependent epimerase/dehydratase family Pfam Description: NAD dependent epimerase/dehydratase family
  misc_feature (1)..(320): Homolog of NCBI NO: 15222595 NR Description: dihydroflavonol 4-reductase, putative; protein At1g25460.1 [Arabidopsis thaliana] >gi|25403022|pir||G86384
  misc_feature (1)..(320): Homolog of NCBI NO: 15221433 NR Description: putative reductase; protein id: At1g68540.1
  misc_feature (1)..(320): Homolog of NCBI NO: 34895494 NR Description: putative reductase [Oryza sativa (japonica >gi|11275525|dbj|BAB18290.1| putative reductase [Oryza sativa
  misc_feature (6)..(320): Homolog of NCBI NO: 30690351 NR Description: dihydroflavonol 4-reductase (dihydrokaempferol
  misc_feature (6)..(320): Homolog of NCBI NO: 14030554 NR Description: dihydro-flavanoid reductase-like protein [Zea
  misc_feature (6)..(320): Homolog of NCBI NO: 4581047 NR Description: putative dihydroflavonol reductase [Oryza sativa]
  misc_feature (6)..(320): Homolog of NCBI NO: 34905082 NR Description: putative dihydroflavonol 4-reductase [Oryza
  misc_feature (6)..(320): Homolog of NCBI NO: 30694964 NR Description: cinnamyl-alcohol dehydrogenase (CAD), putative
  misc_feature (6)..(320): Homolog of NCBI NO: 25405464 NR Description: hypothetical protein F5D21.12 [imported] - thaliana >gi|12325359|gb|AAG52618.1|AC024261_5 cinnamyl alcohol
  misc_feature (6)..(320): Homolog of NCBI NO: 7488627 NR Description: probable cinnamyl-alcohol dehydrogenase (EC - apple tree >gi|2981475|gb|AAC06319.1| putative cinnamyl alcohol
MAEYLVTGGTSFIASHVIKSLLEFGHYVRTTVRDSEDEEKVGFLWDLKGAKERLKIFEADLTIEGSFDEAVNGVDGVFHIASRVSVRLDNNNLDKFDPNISGTMNVMNSCAKSRNTVKRIVLTSSSTAIRYRFDATQVSPLNESHWTDLEYCKHFKIWYAYKKTLGEKEAWRIAADKKLNLVVVIPSFCIGPILSPKPTSSPLIFLSIIKGTRGTYPNFRGGFVHIDDVVAAQILAMEEPKASGRILCSSSVAHWSEIIEMLRIKYPLYPFETKCGSEEGKDMPHSLDTTKIHELGFASFKSLTEMFDDCIKCFQDKGLL

SEQ ID NO: 82234 - protein, 217 aa, Arabidopsis thaliana
  peptide (1)..(217): Ceres Seq. ID no. 12664554
  misc_feature (1)..(65): Pfam Name: 3-beta hydroxysteroid dehydrogenase/isomerase family Pfam Description: 3-beta hydroxysteroid dehydrogenase/isomerase
  misc_feature (1)..(217): Homolog of NCBI NO: 15222595 NR Description: dihydroflavonol 4-reductase, putative; protein At1g25460.1 [Arabidopsis thaliana] >gi|25403022|pir||G86384
  misc_feature (1)..(217): Homolog of NCBI NO: 15221433 NR Description: putative reductase; protein id: At1g68540.1
  misc_feature (1)..(217): Homolog of NCBI NO: 34895494 NR Description: putative reductase [Oryza sativa (japonica >gi|11275525|dbj|BAB18290.1| putative reductase [Oryza sativa
  misc_feature (1)..(217): Homolog of NCBI NO: 30690351 NR Description: dihydroflavonol 4-reductase (dihydrokaempferol
  misc_feature (1)..(217): Homolog of NCBI NO: 14030554 NR Description: dihydro-flavanoid reductase-like protein [Zea
  misc_feature (1)..(217): Homolog of NCBI NO: 4581047 NR Description: putative dihydroflavonol reductase [Oryza sativa]
  misc_feature (1)..(217): Homolog of NCBI NO: 34905082 NR Description: putative dihydroflavonol 4-reductase [Oryza
  misc_feature (1)..(217): Homolog of NCBI NO: 30694964 NR Description: cinnamyl-alcohol dehydrogenase (CAD), putative
  misc_feature (1)..(217): Homolog of NCBI NO: 25405464 NR Description: hypothetical protein F5D21.12 [imported] - thaliana >gi|12325359|gb|AAG52618.1|AC024261_5 cinnamyl alcohol
  misc_feature (1)..(217): Homolog of NCBI NO: 7488627 NR Description: probable cinnamyl-alcohol dehydrogenase (EC - apple tree >gi|2981475|gb|AAC06319.1| putative cinnamyl alcohol
MNVMNSCAKSRNTVKRIVLTSSSTAIRYRFDATQVSPLNESHWTDLEYCKHFKIWYAYKKTLGEKEAWRIAADKKLNLVVVIPSFCIGPILSPKPTSSPLIFLSIIKGTRGTYPNFRGGFVHIDDVVAAQILAMEEPKASGRILCSSSVAHWSEIIEMLRIKYPLYPFETKCGSEEGKDMPHSLDTTKIHELGFASFKSLTEMFDDCIKCFQDKGLL

SEQ ID NO: 82235 - protein, 214 aa, Arabidopsis thaliana
  peptide (1)..(214): Ceres Seq. ID no. 12664555
  misc_feature (1)..(62): Pfam Name: 3-beta hydroxysteroid dehydrogenase/isomerase family Pfam Description: 3-beta hydroxysteroid dehydrogenase/isomerase
  misc_feature (1)..(214): Homolog of NCBI NO: 15222595 NR Description: dihydroflavonol 4-reductase, putative; protein At1g25460.1 [Arabidopsis thaliana] >gi|25403022|pir||G86384
  misc_feature (1)..(214): Homolog of NCBI NO: 15221433 NR Description: putative reductase; protein id: At1g68540.1
  misc_feature (1)..(214): Homolog of NCBI NO: 34895494 NR Description: putative reductase [Oryza sativa (japonica >gi|11275525|dbj|BAB18290.1| putative reductase [Oryza sativa
  misc_feature (1)..(214): Homolog of NCBI NO: 30690351 NR Description: dihydroflavonol 4-reductase (dihydrokaempferol
  misc_feature (1)..(214): Homolog of NCBI NO: 14030554 NR Description: dihydro-flavanoid reductase-like protein [Zea
  misc_feature (1)..(214): Homolog of NCBI NO: 4581047 NR Description: putative dihydroflavonol reductase [Oryza sativa]
  misc_feature (1)..(214): Homolog of NCBI NO: 34905082 NR Description: putative dihydroflavonol 4-reductase [Oryza
  misc_feature (1)..(214): Homolog of NCBI NO: 30694964 NR Description: cinnamyl-alcohol dehydrogenase (CAD), putative
  misc_feature (1)..(214): Homolog of NCBI NO: 25405464 NR Description: hypothetical protein F5D21.12 [imported] - thaliana >gi|12325359|gb|AAG52618.1|AC024261_5 cinnamyl alcohol
  misc_feature (1)..(214): Homolog of NCBI NO: 7488627 NR Description: probable cinnamyl-alcohol dehydrogenase (EC - apple tree >gi|2981475|gb|AAC06319.1| putative cinnamyl alcohol
MNSCAKSRNTVKRIVLTSSSTAIRYRFDATQVSPLNESHWTDLEYCKHFKIWYAYKKTLGEKEAWRIAADKKLNLVVVIPSFCIGPILSPKPTSSPLIFLSIIKGTRGTYPNFRGGFVHIDDVVAAQILAMEEPKASGRILCSSSVAHWSEIIEMLRIKYPLYPFETKCGSEEGKDMPHSLDTTKIHELGFASFKSLTEMFDDCIKCFQDKGLL

SEQ ID NO: 82236 - DNA, 1323 bp, Arabidopsis thaliana
  misc_feature (1)..(1323): Ceres Seq. ID no. 12664560
  misc_feature: MA Experiment ID: 20000180 Result: Down-regulated in Transcription
  misc_feature: MA Experiment 20000180 PARAMETER Experiment Name: At_Germinating_Seeds_P Parameter: Age (hr) Value: 24 vs. 0
  misc_feature: MA Experiment 20000180 PARAMETER Experiment Name: At_Germinating_Seeds_P Parameter: Tissue Value: Germinating Seeds
  misc_feature: MA Experiment ID: 20000184 Result: Down-regulated in Transcription
  misc_feature: MA Experiment 20000184 PARAMETER Experiment Name: At_Shoots__P Parameter: Age (day) Value: 7
  misc_feature: MA Experiment 20000184 PARAMETER Experiment Name: At_Shoots__P Parameter: Tissue Value: Shoots vs. Whole Plant
  misc_feature: MA Experiment ID: 20000227 Result: Down-regulated in Transcription
  misc_feature: MA Experiment 20000227 PARAMETER Experiment Name: At_Root-Tips-vs-Tops_P Parameter: Tissue Value: Root Tips vs. Root Tops
  misc_feature: MA Experiment ID: 20000234 Result: Down-regulated in Transcription
  misc_feature: MA Experiment 20000234 PARAMETER Experiment Name: At_Siliques_P Parameter: Age (day) Value: 21
  misc_feature: MA Experiment 20000234 PARAMETER Experiment Name: At_Siliques_P Parameter: Organism Value: A. thaliana
  misc_feature: MA Experiment 20000234 PARAMETER Experiment Name: At_Siliques_P Parameter: Plant Line Value: WS
  misc_feature: MA Experiment 20000234 PARAMETER Experiment Name: At_Siliques_P Parameter: Tissue Value: Less Than 5mm Siliques vs. Whole Plant
  misc_feature: MA Experiment ID: 20000264 Result: Down-regulated in Transcription
  misc_feature: MA Experiment 20000264 PARAMETER Experiment Name: At_Open_Flower_P Parameter: Age (day) Value: 21
  misc_feature: MA Experiment 20000264 PARAMETER Experiment Name: At_Open_Flower_P Parameter: Plant Line Value: WS
  misc_feature: MA Experiment 20000264 PARAMETER Experiment Name: At_Open_Flower_P Parameter: Tissue Value: Open Flower vs. Whole Plant
  misc_feature: MA Experiment ID: 20000265 Result: Down-regulated in Transcription
  misc_feature: MA Experiment 20000265 PARAMETER Experiment Name: At_Open_Flower_P Parameter: Age (day) Value: 21
  misc_feature: MA Experiment 20000265 PARAMETER Experiment Name: At_Open_Flower_P Parameter: Plant Line Value: WS
  misc_feature: MA Experiment 20000265 PARAMETER Experiment Name: At_Open_Flower_P Parameter: Tissue Value: Closed Flower vs. Whole Plant
  misc_feature: MA Experiment ID: 20000286 Result: Down-regulated in Transcription
  misc_feature: MA Experiment 20000286 PARAMETER Experiment Name: At_Open_Flower_P Parameter: Age (day) Value: 21
  misc_feature: MA Experiment 20000286 PARAMETER Experiment Name: At_Open_Flower_P Parameter: Plant Line Value: WS
  misc_feature: MA Experiment 20000286 PARAMETER Experiment Name: At_Open_Flower_P Parameter: Tissue Value: Half Open vs. Whole Plant
  misc_feature: MA Experiment ID: 20000308 Result: Up-regulated in Transcription
  misc_feature: MA Experiment 20000308 PARAMETER Experiment Name: At_100mM_NaCl__P Parameter: Age (day) Value: 17
  misc_feature: MA Experiment 20000308 PARAMETER Experiment Name: At_100mM_NaCl__P Parameter: Organism Value: A. thaliana
  misc_feature: MA Experiment 20000308 PARAMETER Experiment Name: At_100mM_NaCl__P Parameter: Plant Line Value: WS
  misc_feature: MA Experiment 20000308 PARAMETER Experiment Name: At_100mM_NaCl__P Parameter: Timepoint (hr) Value: 72
  misc_feature: MA Experiment 20000308 PARAMETER Experiment Name: At_100mM_NaCl__P Parameter: Tissue Value: Whole Plant
  misc_feature: MA Experiment 20000308 PARAMETER Experiment Name: At_100mM_NaCl__P Parameter: Treatment Value: 100mM NaCl vs. No Treatment
  misc_feature: MA Experiment ID: 20000436 Result: Up-regulated in Transcription
  misc_feature: MA Experiment 20000436 PARAMETER Experiment Name: At_Drought_P Parameter: Age (day) Value: 7
  misc_feature: MA Experiment 20000436 PARAMETER Experiment Name: At_Drought_P Parameter: Organism Value: A. thaliana
  misc_feature: MA Experiment 20000436 PARAMETER Experiment Name: At_Drought_P Parameter: Plant Line Value: WS
  misc_feature: MA Experiment 20000436 PARAMETER Experiment Name: At_Drought_P Parameter: Timepoint (hr) Value: 12
  misc_feature: MA Experiment 20000436 PARAMETER Experiment Name: At_Drought_P Parameter: Tissue Value: Whole Plant
  misc_feature: MA Experiment 20000436 PARAMETER Experiment Name: At_Drought_P Parameter: Treatment Value: Drought vs. No Drought
  misc_feature: MA Experiment ID: 20000437 Result: Up-regulated in Transcription
  misc_feature: MA Experiment 20000437 PARAMETER Experiment Name: At_Drought_P Parameter: Age (day) Value: 8
  misc_feature: MA Experiment 20000437 PARAMETER Experiment Name: At_Drought_P Parameter: Organism Value: A. thaliana
  misc_feature: MA Experiment 20000437 PARAMETER Experiment Name: At_Drought_P Parameter: Plant Line Value: WS
  misc_feature: MA Experiment 20000437 PARAMETER Experiment Name: At_Drought_P Parameter: Timepoint (hr) Value: 24
  misc_feature: MA Experiment 20000437 PARAMETER Experiment Name: At_Drought_P Parameter: Tissue Value: Whole Plant
  misc_feature: MA Experiment 20000437 PARAMETER Experiment Name: At_Drought_P Parameter: Treatment Value: Drought vs. No Drought
  misc_feature: MA Experiment ID: 20000438 Result: Down-regulated in Transcription
  misc_feature: MA Experiment 20000438 PARAMETER Experiment Name: At_Shoots__P Parameter: Age (day) Value: 14
  misc_feature: MA Experiment 20000438 PARAMETER Experiment Name: At_Shoots__P Parameter: Tissue Value: Shoots vs. Whole Plant
  misc_feature: MA Experiment ID: 20000453 Result: Up-regulated in Transcription
  misc_feature: MA Experiment 20000453 PARAMETER Experiment Name: At_100uM_ABA_P Parameter: Age (day) Value: 15
  misc_feature: MA Experiment 20000453 PARAMETER Experiment Name: At_100uM_ABA_P Parameter: Organism Value: A. thaliana
  misc_feature: MA Experiment 20000453 PARAMETER Experiment Name: At_100uM_ABA_P Parameter: Plant Line Value: WS
  misc_feature: MA Experiment 20000453 PARAMETER Experiment Name: At_100uM_ABA_P Parameter: Timepoint (hr) Value: 24
  misc_feature: MA Experiment 20000453 PARAMETER Experiment Name: At_100uM_ABA_P Parameter: Tissue Value: Aerial
  misc_feature: MA Experiment 20000453 PARAMETER Experiment Name: At_100uM_ABA_P Parameter: Treatment Value: 100uM ABA vs. No Treatment
  misc_feature: MA Experiment ID: 20000455 Result: Up-regulated in Transcription
  misc_feature: MA Experiment 20000455 PARAMETER Experiment Name: At_100uM_ABA_P Parameter: Age (day) Value: 16
  misc_feature: MA Experiment 20000455 PARAMETER Experiment Name: At_100uM_ABA_P Parameter: Organism Value: A. thaliana
  misc_feature: MA Experiment 20000455 PARAMETER Experiment Name: At_100uM_ABA_P Parameter: Plant Line Value: WS
  misc_feature: MA Experiment 20000455 PARAMETER Experiment Name: At_100uM_ABA_P Parameter: Timepoint (hr) Value: 48
  misc_feature: MA Experiment 20000455 PARAMETER Experiment Name: At_100uM_ABA_P Parameter: Tissue Value: Aerial
  misc_feature: MA Experiment 20000455 PARAMETER Experiment Name: At_100uM_ABA_P Parameter: Treatment Value: 100uM ABA vs. No Treatment
  misc_feature: MA Experiment ID: 20000495 Result: Up-regulated in Transcription
  misc_feature: MA Experiment 20000495 PARAMETER Experiment Name: At_Guard_Cells_P Parameter: Harvest Date Value: 8/2/2002
  misc_feature: MA Experiment 20000495 PARAMETER Experiment Name: At_Guard_Cells_P Parameter: Organism Value: A. thaliana
  misc_feature: MA Experiment 20000495 PARAMETER Experiment Name: At_Guard_Cells_P Parameter: Tissue Value: Guard Cells vs. Leaves
  misc_feature: MA Experiment ID: 20000576 Result: Up-regulated in Transcription
  misc_feature: MA Experiment 20000576 PARAMETER Experiment Name: At_100uM_ABA_Mutants__P Parameter: Organism Value: A. thaliana
  misc_feature: MA Experiment 20000576 PARAMETER Experiment Name: At_100uM_ABA_Mutants__P Parameter: Plant Line Value: CS23
  misc_feature: MA Experiment 20000576 PARAMETER Experiment Name: At_100uM_ABA_Mutants__P Parameter: Timepoint (hr) Value: 6
  misc_feature: MA Experiment 20000576 PARAMETER Experiment Name: At_100uM_ABA_Mutants__P Parameter: Tissue Value: Whole Plant
  misc_feature: MA Experiment 20000576 PARAMETER Experiment Name: At_100uM_ABA_Mutants__P Parameter: Treatment Value: 1uM ABA vs. No Treatment
  misc_feature: MA Experiment ID: 20000794 Result: Down-regulated in Transcription
  misc_feature: MA Experiment 20000794 PARAMETER Experiment Name: At_Petals_P Parameter: Age (day) Value: 23-25 days
  misc_feature: MA Experiment 20000794 PARAMETER Experiment Name: At_Petals_P Parameter: Plant Line Value: WS
  misc_feature: MA Experiment 20000794 PARAMETER Experiment Name: At_Petals_P Parameter: Tissue Value: Petals vs. Whole plant
  misc_feature: MA Experiment ID: 20001450 Result: Down-regulated in Transcription
  misc_feature: MA Experiment 20001450 PARAMETER Experiment Name: At_Far-red-induction_P Parameter: Age (day) Value: 7
  misc_feature: MA Experiment 20001450 PARAMETER Experiment Name: At_Far-red-induction_P Parameter: Light Value: Far-red vs. White
  misc_feature: MA Experiment 20001450 PARAMETER Experiment Name: At_Far-red-induction_P Parameter: Organism Value: A. thaliana
  misc_feature: MA Experiment 20001450 PARAMETER Experiment Name: At_Far-red-induction_P Parameter: Plant Line Value: Columbia
  misc_feature: MA Experiment 20001450 PARAMETER Experiment Name: At_Far-red-induction_P Parameter: Timepoint (hr) Value: 8
  misc_feature: MA Experiment 20001450 PARAMETER Experiment Name: At_Far-red-induction_P Parameter: Tissue Value: Whole Plant
  misc_feature: MA Experiment ID: 20001451 Result: Down-regulated in Transcription
  misc_feature: MA Experiment 20001451 PARAMETER Experiment Name: At_Far-red-induction_P Parameter: Age (day) Value: 7
  misc_feature: MA Experiment 20001451 PARAMETER Experiment Name: At_Far-red-induction_P Parameter: Light Value: Far-red vs. White
  misc_feature: MA Experiment 20001451 PARAMETER Experiment Name: At_Far-red-induction_P Parameter: Organism Value: A. thaliana
  misc_feature: MA Experiment 20001451 PARAMETER Experiment Name: At_Far-red-induction_P Parameter: Plant Line Value: Columbia
  misc_feature: MA Experiment 20001451 PARAMETER Experiment Name: At_Far-red-induction_P Parameter: Timepoint (hr) Value: 24
  misc_feature: MA Experiment 20001451 PARAMETER Experiment Name: At_Far-red-induction_P Parameter: Tissue Value: Whole Plant
  misc_feature: MA Experiment ID: 20001554 Result: Up-regulated in Transcription
  misc_feature: MA Experiment 20001554 PARAMETER Experiment Name: At_Drought_Soil_Dry_P Parameter: Age (day) Value: 21
  misc_feature: MA Experiment 20001554 PARAMETER Experiment Name: At_Drought_Soil_Dry_P Parameter: Organism Value: A. thaliana
  misc_feature: MA Experiment 20001554 PARAMETER Experiment Name: At_Drought_Soil_Dry_P Parameter: Plant Line Value: WS
  misc_feature: MA Experiment 20001554 PARAMETER Experiment Name: At_Drought_Soil_Dry_P Parameter: Post Timepoint (hr) Value: None
  misc_feature: MA Experiment 20001554 PARAMETER Experiment Name: At_Drought_Soil_Dry_P Parameter: Post-Treatment Value: None
  misc_feature: MA Experiment 20001554 PARAMETER Experiment Name: At_Drought_Soil_Dry_P Parameter: Timepoint (day) Value: 7
  misc_feature: MA Experiment 20001554 PARAMETER Experiment Name: At_Drought_Soil_Dry_P Parameter: Treatment Value: Drought vs. No Drought
  misc_feature: MA Experiment ID: 20001555 Result: Up-regulated in Transcription
  misc_feature: MA Experiment 20001555 PARAMETER Experiment Name: At_Drought_Soil_Dry_P Parameter: Age (day) Value: 24
  misc_feature: MA Experiment 20001555 PARAMETER Experiment Name: At_Drought_Soil_Dry_P Parameter: Organism Value: A. thaliana
  misc_feature: MA Experiment 20001555 PARAMETER Experiment Name: At_Drought_Soil_Dry_P Parameter: Plant Line Value: WS
  misc_feature: MA Experiment 20001555 PARAMETER Experiment Name: At_Drought_Soil_Dry_P Parameter: Post Timepoint (hr) Value: None
  misc_feature: MA Experiment 20001555 PARAMETER Experiment Name: At_Drought_Soil_Dry_P Parameter: Post-Treatment Value: None
  misc_feature: MA Experiment 20001555 PARAMETER Experiment Name: At_Drought_Soil_Dry_P Parameter: Timepoint (day) Value: 10
  misc_feature: MA Experiment 20001555 PARAMETER Experiment Name: At_Drought_Soil_Dry_P Parameter: Treatment Value: Drought vs. No Drought
  misc_feature: MA Experiment ID: 20001768 Result: Up-regulated in Transcription
  misc_feature: MA Experiment 20001768 PARAMETER Experiment Name: At_Far-red-enriched-adult_P Parameter: Age (day) Value: 28
  misc_feature: MA Experiment 20001768 PARAMETER Experiment Name: At_Far-red-enriched-adult_P Parameter: Light Value: Far-red enriched vs. White
  misc_feature: MA Experiment 20001768 PARAMETER Experiment Name: At_Far-red-enriched-adult_P Parameter: Organism Value: A. thaliana
  misc_feature: MA Experiment 20001768 PARAMETER Experiment Name: At_Far-red-enriched-adult_P Parameter: Plant Line Value: Columbia
  misc_feature: MA Experiment 20001768 PARAMETER Experiment Name: At_Far-red-enriched-adult_P Parameter: Timepoint (hr) Value: 1
  misc_feature: MA Experiment 20001768 PARAMETER Experiment Name: At_Far-red-enriched-adult_P Parameter: Tissue Value: Aerial
  misc_feature: MA Experiment ID: 20001773 Result: Up-regulated in Transcription
  misc_feature: MA Experiment 20001773 PARAMETER Experiment Name: At_Far-red-enriched-adult_P Parameter: Age (day) Value: 30
  misc_feature: MA Experiment 20001773 PARAMETER Experiment Name: At_Far-red-enriched-adult_P Parameter: Light Value: Far-red enriched vs. White
  misc_feature: MA Experiment 20001773 PARAMETER Experiment Name: At_Far-red-enriched-adult_P Parameter: Organism Value: A. thaliana
  misc_feature: MA Experiment 20001773 PARAMETER Experiment Name: At_Far-red-enriched-adult_P Parameter: Plant Line Value: Columbia
  misc_feature: MA Experiment 20001773 PARAMETER Experiment Name: At_Far-red-enriched-adult_P Parameter: Timepoint (hr) Value: 48
  misc_feature: MA Experiment 20001773 PARAMETER Experiment Name: At_Far-red-enriched-adult_P Parameter: Tissue Value: Aerial
  misc_feature: MA Experiment ID: 20001904 Result: Up-regulated in Transcription
  misc_feature: MA Experiment 20001904 PARAMETER Experiment Name: At_Drought_Reproduction_P Parameter: Age (day) Value: 37
  misc_feature: MA Experiment 20001904 PARAMETER Experiment Name: At_Drought_Reproduction_P Parameter: Organism Value: A. thaliana
  misc_feature: MA Experiment 20001904 PARAMETER Experiment Name: At_Drought_Reproduction_P Parameter: Plant Line Value: WS
  misc_feature: MA Experiment 20001904 PARAMETER Experiment Name: At_Drought_Reproduction_P Parameter: Timepoint (day) Value: 7
  misc_feature: MA Experiment 20001904 PARAMETER Experiment Name: At_Drought_Reproduction_P Parameter: Tissue Value: Rosettes
  misc_feature: MA Experiment 20001904 PARAMETER Experiment Name: At_Drought_Reproduction_P Parameter: Treatment Value: Drought vs. No Drought
atggtctctagttctccggtttctccgtctaaggaaactgaccggaagtccggcgagaaatggacggcggaagatccatcacggccagccaagtggtggtactccaccttccacaccgtcaccgccatgattggcgcgggagtcctcagccttccttatgccatggcttaccttggctggggaccagggacctttgtgttggcaatgacgtggggactgaccctaaacactatgtggcaaatggtgcagctccatgagtgtgtaccgggaacccggtttgaccggtatatcgatctaggccggtatgcttttggcccaaaacttggcccatggatcgtcctccctcaacagctaatcgtccaggtcggctgcaacatcgtttacatggtgacaggaggcaagtgcttgaagcagttcgtggagatcacttgttccacctgtacaccggtacgacagtcgtactggatcctcggcttcggtggagtccatttcattctctcccagctccctaacttcaactccgttgccggagtctccctggctgccgccgtcatgtctctctgctactcgacgatagcttggggaggaagtatcgcacatggaagagtgcctgacgtgagctatgattacaaggcgacgaatccgggtgacttcacattccgagtctttaatgcgttaggtcagatctcattcgctttcgctggccacgctgtggctctagagattcaagccacgatgccttccactcctgagagaccatccaaggtgcccatgtggcaaggagtgatcggagcttacgtggtcaacgccgtttgctattttcctgtggctctgatatgctattgggcctttggtcaagacgtggacgacaatgtgctgatgaatctacagagaccagcttggctcattgctgctgctaatctcatggttgttgtccatgtcattggtagctaccaagtgtttgctatgcctgtctttgatcttttggagaggatgatggttaacaaatttggttttaagcatggagttgttctgaggtttttcactcgaactatttatgtcgcatttacattgttcattggagtgagtttccccttctttggagaccttctaggcttctttggaggatttggttttgcacctacttctttcttcctcccaagtataatgtggcttatcatcaagaaaccaaggagattcagcgtcacctggttcgtcaattggatctccattatcgtaggagtgttcataatgttagcgtcaacaattggagggttgaggaacatcattgcagattcttctacttatagtttctacgcttaa

SEQ ID NO: 82237 - protein, 440 aa, Arabidopsis thaliana
  peptide (1)..(440): Ceres Seq. ID no. 12664561
  misc_feature (1)..(440): Homolog of NCBI NO: 15222615 NR Description: lysine and histidine specific transporter, protein id: At1g25530.1 [Arabidopsis thaliana]
  misc_feature (11)..(440): Homolog of NCBI NO: 30409136 NR Description: histidine amino acid transporter [Oryza sativa
  misc_feature (2)..(440): Homolog of NCBI NO: 15220504 NR Description: putative amino acid permease; protein id: [Arabidopsis thaliana] >gi|11072015|gb|AAG28894.1|AC008113_10 [Arabidopsis thaliana] >gi|12324687|gb|AAG52310.1|AC011020_17
  misc_feature (15)..(440): Homolog of NCBI NO: 30693663 NR Description: lysine and histidine specific transporter, [Arabidopsis thaliana] >gi|14194151|gb|AAK56270.1|AF367281_1 [Arabidopsis thaliana] >gi|22137070|gb|AAM91380.1|
  misc_feature (15)..(440): Homolog of NCBI NO: 30693666 NR Description: lysine and histidine specific transporter,
  misc_feature (2)..(440): Homolog of NCBI NO: 18395471 NR Description: putative lysine/histidine-specific permease; id: At1g24400.1, supported by cDNA: gi_9293859 [Arabidopsis
  misc_feature (28)..(440): Homolog of NCBI NO: 38344974 NR Description: OSJNBa0072F16.19 [Oryza sativa (japonica
  misc_feature (12)..(440): Homolog of NCBI NO: 12597815 NR Description: lysine and histidine specific transporter,
  misc_feature (12)..(440): Homolog of NCBI NO: 22330117 NR Description: lysine and histidine specific transporter,
  misc_feature (15)..(440): Homolog of NCBI NO: 2576361 NR Description: lysine and histidine specific transporter
MVSSSPVSPSKETDRKSGEKWTAEDPSRPAKWWYSTFHTVTAMIGAGVLSLPYAMAYLGWGPGTFVLAMTWGLTLNTMWQMVQLHECVPGTRFDRYIDLGRYAFGPKLGPWIVLPQQLIVQVGCNIVYMVTGGKCLKQFVEITCSTCTPVRQSYWILGFGGVHFILSQLPNFNSVAGVSLAAAVMSLCYSTIAWGGSIAHGRVPDVSYDYKATNPGDFTFRVFNALGQISFAFAGHAVALEIQATMPSTPERPSKVPMWQGVIGAYVVNAVCYFPVALICYWAFGQDVDDNVLMNLQRPAWLIAAANLMVVVHVIGSYQVFAMPVFDLLERMMVNKFGFKHGVVLRFFTRTIYVAFTLFIGVSFPFFGDLLGFFGGFGFAPTSFFLPSIMWLIIKKPRRFSVTWFVNWISIIVGVFIMLASTIGGLRNIIADSSTYSFYA

SEQ ID NO: 82238 - protein, 398 aa, Arabidopsis thaliana
  peptide (1)..(398): Ceres Seq. ID no. 12664562
  misc_feature (1)..(398): Homolog of NCBI NO: 15222615 NR Description: lysine and histidine specific transporter, protein id: At1g25530.1 [Arabidopsis thaliana]
  misc_feature (1)..(398): Homolog of NCBI NO: 30409136 NR Description: histidine amino acid transporter [Oryza sativa
  misc_feature (1)..(398): Homolog of NCBI NO: 15220504 NR Description: putative amino acid permease; protein id: [Arabidopsis thaliana] >gi|11072015|gb|AAG28894.1|AC008113_10 [Arabidopsis thaliana] >gi|12324687|gb|AAG52310.1|AC011020_17
  misc_feature (1)..(398): Homolog of NCBI NO: 30693663 NR Description: lysine and histidine specific transporter, [Arabidopsis thaliana] >gi|14194151|gb|AAK56270.1|AF367281_1 [Arabidopsis thaliana] >gi|22137070|gb|AAM91380.1|
  misc_feature (1)..(398): Homolog of NCBI NO: 30693666 NR Description: lysine and histidine specific transporter,
  misc_feature (1)..(398): Homolog of NCBI NO: 18395471 NR Description: putative lysine/histidine-specific permease; id: At1g24400.1, supported by cDNA: gi_9293859 [Arabidopsis
  misc_feature (1)..(398): Homolog of NCBI NO: 38344974 NR Description: OSJNBa0072F16.19 [Oryza sativa (japonica
  misc_feature (1)..(398): Homolog of NCBI NO: 12597815 NR Description: lysine and histidine specific transporter,
  misc_feature (1)..(398): Homolog of NCBI NO: 22330117 NR Description: lysine and histidine specific transporter,
  misc_feature (1)..(398): Homolog of NCBI NO: 2576361 NR Description: lysine and histidine specific transporter
MIGAGVLSLPYAMAYLGWGPGTFVLAMTWGLTLNTMWQMVQLHECVPGTRFDRYIDLGRYAFGPKLGPWIVLPQQLIVQVGCNIVYMVTGGKCLKQFVEITCSTCTPVRQSYWILGFGGVHFILSQLPNFNSVAGVSLAAAVMSLCYSTIAWGGSIAHGRVPDVSYDYKATNPGDFTFRVFNALGQISFAFAGHAVALEIQATMPSTPERPSKVPMWQGVIGAYVVNAVCYFPVALICYWAFGQDVDDNVLMNLQRPAWLIAAANLMVVVHVIGSYQVFAMPVFDLLERMMVNKFGFKHGVVLRFFTRTIYVAFTLFIGVSFPFFGDLLGFFGGFGFAPTSFFLPSIMWLIIKKPRRFSVTWFVNWISIIVGVFIMLASTIGGLRNIIADSSTYSFYA

SEQ ID NO: 82239 - protein, 386 aa, Arabidopsis thaliana
  peptide (1)..(386): Ceres Seq. ID no. 12664563
  misc_feature (1)..(386): Homolog of NCBI NO: 15222615 NR Description: lysine and histidine specific transporter, protein id: At1g25530.1 [Arabidopsis thaliana]
  misc_feature (1)..(386): Homolog of NCBI NO: 30409136 NR Description: histidine amino acid transporter [Oryza sativa
  misc_feature (1)..(386): Homolog of NCBI NO: 15220504 NR Description: putative amino acid permease; protein id: [Arabidopsis thaliana] >gi|11072015|gb|AAG28894.1|AC008113_10 [Arabidopsis thaliana] >gi|12324687|gb|AAG52310.1|AC011020_17
  misc_feature (1)..(386): Homolog of NCBI NO: 30693663 NR Description: lysine and histidine specific transporter, [Arabidopsis thaliana] >gi|14194151|gb|AAK56270.1|AF367281_1 [Arabidopsis thaliana] >gi|22137070|gb|AAM91380.1|
  misc_feature (1)..(386): Homolog of NCBI NO: 30693666 NR Description: lysine and histidine specific transporter,
  misc_feature (1)..(386): Homolog of NCBI NO: 18395471 NR Description: putative lysine/histidine-specific permease; id: At1g24400.1, supported by cDNA: gi_9293859 [Arabidopsis
  misc_feature (1)..(386): Homolog of NCBI NO: 38344974 NR Description: OSJNBa0072F16.19 [Oryza sativa (japonica
  misc_feature (1)..(386): Homolog of NCBI NO: 12597815 NR Description: lysine and histidine specific transporter,
  misc_feature (1)..(386): Homolog of NCBI NO: 22330117 NR Description: lysine and histidine specific transporter,
  misc_feature (1)..(386): Homolog of NCBI NO: 2576361 NR Description: lysine and histidine specific transporter
MAYLGWGPGTFVLAMTWGLTLNTMWQMVQLHECVPGTRFDRYIDLGRYAFGPKLGPWIVLPQQLIVQVGCNIVYMVTGGKCLKQFVEITCSTCTPVRQSYWILGFGGVHFILSQLPNFNSVAGVSLAAAVMSLCYSTIAWGGSIAHGRVPDVSYDYKATNPGDFTFRVFNALGQISFAFAGHAVALEIQATMPSTPERPSKVPMWQGVIGAYVVNAVCYFPVALICYWAFGQDVDDNVLMNLQRPAWLIAAANLMVVVHVIGSYQVFAMPVFDLLERMMVNKFGFKHGVVLRFFTRTIYVAFTLFIGVSFPFFGDLLGFFGGFGFAPTSFFLPSIMWLIIKKPRRFSVTWFVNWISIIVGVFIMLASTIGGLRNIIADSSTYSFYA

SEQ ID NO: 82240 - DNA, 2955 bp, Arabidopsis thaliana
  misc_feature (1)..(2955): Ceres Seq. ID no. 12664653
  misc_feature: MA Experiment ID: 20000184 Result: Up-regulated in Transcription
  misc_feature: MA Experiment 20000184 PARAMETER Experiment Name: At_Shoots__P Parameter: Age (day) Value: 7
  misc_feature: MA Experiment 20000184 PARAMETER Experiment Name: At_Shoots__P Parameter: Tissue Value: Shoots vs. Whole Plant
  misc_feature: MA Experiment ID: 20000185 Result: Up-regulated in Transcription
  misc_feature: MA Experiment 20000185 PARAMETER Experiment Name: At_Roots__P Parameter: Age (day) Value: 7 vs. 21
  misc_feature: MA Experiment 20000185 PARAMETER Experiment Name: At_Roots__P Parameter: Organism Value: A. thaliana
  misc_feature: MA Experiment 20000185 PARAMETER Experiment Name: At_Roots__P Parameter: Tissue Value: Roots vs. Whole Plant
  misc_feature: MA Experiment ID: 20000439 Result: Up-regulated in Transcription
  misc_feature: MA Experiment 20000439 PARAMETER Experiment Name: At_Roots__P Parameter: Age (day) Value: 14 vs. 21
  misc_feature: MA Experiment 20000439 PARAMETER Experiment Name: At_Roots__P Parameter: Organism Value: A. thaliana
  misc_feature: MA Experiment 20000439 PARAMETER Experiment Name: At_Roots__P Parameter: Tissue Value: Roots vs. Whole Plant
atggcggatcaatctcttctacactctccgatcaacccacatttctttcagcctattcttacagaatctcgcactcacctcaacattcctgtagctttcttctcgaagcatgttgaaggaagaaacaaccaaaacaagactgtgacgctaagatcagacgcgtcggataaaacttggttagtgaagatggacggtctaaaactaaccgacggatgggaagattttgcctttgcacatgatcttcgaactggtgacatcgtcgttttcagacttgaaggagaaatggtgtttcatgtcacagctttaggaccaagctgttgcgagattcaatatcatacatcatctcacaatatcaatgatgatgatcgtaatgatcagatcaacattgcttcaagaaacagttcaagagtgaagaagaatccacgaaagaaagtagagtcttctttagaccattctcgttttgtggcaaaagtctcagcttggtgcctaagcaatgatagactgtatataccactaagtttcgccaggttaaacggtctgaacaaaatcaacagtaagaaaatctatcttcagaacgaagaaggaagatcatggaagttagttttgagacatgacaaatcaggcatgcaaacttttgtccaatccggttggagaagattctgctctgaaaatgggattaggcaaggtcaatatacattcaaacttgtccgaaaatcagcaccacctgtcatccgtttgtgccgcgcaaaagctaaaccaaaacaaagatcagttgcagaatattcatcagaccattcttgttttgagggatctgtcactccttcaagcctaagaaatgatctactgtatcttccaaggagctttgtgaactcaaatcgtctggacaaaagatgcagtgagatagttttaaagaatgaacagggagtaaaatggcctttagttttgaaacgtttcaaatcagtcacttatctcccaaaaggctggactagtttctgtcaagtaaacaggatcaaagcaggagattcattcaagtttaaactggttggaacctggaaaaaacctgttctttctttgtgtccgacacaatccaacaatcacaaaactccattagagtgttcagaaggtaacaaatccgaagaaagtgaagaggattgcttggaggtaaagaaaaagaagtattggtcgagatgcagagcttctgtagaaaacatggatgatgatcagaccaacattggaaacagttcaagaaagaagagagtgagtaagaatccaagagagaaagtagagtcttcatcagaccattctagttttgtgggatctgtcaatccttcaagcctatacaaagatcaactgtatcttccaaggaattttgtgagctcaaattttctggacaaaagatgcagtgagatagttttaaagaatgaacggggagaaaaaaggactttagttttgaaacacttcaaaaaagaccttacttttctcaaaaaaggctggactagtttctgtcaagtaaataggatcaaagctggagattccttcaagtttaaactggttggaacatggaacaaacctgttctttctttgtgccctacagaaaccaactatcacaaaactccattagcgtgttcagagggtaacaaatccgaagaaagtgaagaggagggtactgaagacaagaatacctcacaagattgcttggaggtgaagaaaaggaagtattggtcaacatgcagagcttctgcagagaacatagatgatgatcagaccaatattggaaacagttcaaaagagaagagagtgaagaaaaatccagtaaagaaagcagagtcttcatcagaccattctagttttgtggctaatgtcacagcttcaagcctaaactatgatcgactgtatttaccactaagtttcgtgagttcaaacggtctagataaaatgaacggtaaggagatcgttcttcttaatgaagaaggactatcatggaagtttaatttgaagtacaaccaagcaggcaagcatacttatgtcagacctggttggtcaagattctgtgatgcaaatgggatgagccaaggtcaacaatttacattcaaactggtccaaaaacatggaccacctgtcatgtatttgagcctcagtgaacatagaccaaagtcagaatcttcatcgcaccgttcctattttgtaggatctgtcactgcttcaagcataaagaaagataaactgtatttatggaagagttttgtgagctctaatggtctggacaaaggatgcaagaagataattttaaagaataaatggggaagagaatggaaattagtcttgaaacactacaaatcaaactgctttactattatcaaacgaggctggaccagtttctgccaaggcaacggtttgaaagctggagattccttcaagttcaaactggttggaaccggggaaaagcctgttctttctttgtgccctgcagaatccagccatgaaaaaattccattagagtgtccagaaggtatagatgatgtcaattcactctcctcaaatcctagcagtggagatgacagtagtagatccgaagaaagcgaagaggagaatatggaagacaagaacatctcacaggattgcttggaaaccaagaaaaggaagtattgctcttcatcgtcatatagtcaaaaccgatttgtgacattaactcttacacggtccgcttttcaaacctataaactggtgaatggcatcaacaagccaaggaagataactctgctgggtcaagatggagttaaaaaggtggtggatctctatcaggaaagtagtagcagaataatgagatttggaaaaggctggagagagttctttgatgctcaaggcgtgaagatagacgactcctttgtgttggaactcatttgggagaaagaagcaagtccggtgcttaagttctgcaccaaagtaccaaagtaa

SEQ ID NO: 82241 - protein, 984 aa, Arabidopsis thaliana
  peptide (1)..(984): Ceres Seq. ID no. 12664654
  misc_feature (727)..(827): Pfam Name: B3 DNA binding domain Pfam Description: B3 DNA binding domain
  misc_feature (575)..(982): Homolog of NCBI NO: 15224180 NR Description: hypothetical protein; protein id: At2g24650.1
  misc_feature (6)..(267): Homolog of NCBI NO: 15224180 NR Description: hypothetical protein; protein id: At2g24650.1
  misc_feature (128)..(509): Homolog of NCBI NO: 15224604 NR Description: hypothetical protein; protein id: At2g24700.1
  misc_feature (741)..(859): Homolog of NCBI NO: 15224604 NR Description: hypothetical protein; protein id: At2g24700.1
  misc_feature (6)..(111): Homolog of NCBI NO: 15224604 NR Description: hypothetical protein; protein id: At2g24700.1
  misc_feature (585)..(688): Homolog of NCBI NO: 15224604 NR Description: hypothetical protein; protein id: At2g24700.1
  misc_feature (252)..(849): Homolog of NCBI NO: 15224180 NR Description: hypothetical protein; protein id: At2g24650.1
  misc_feature (856)..(973): Homolog of NCBI NO: 15224180 NR Description: hypothetical protein; protein id: At2g24650.1
  misc_feature (41)..(348): Homolog of NCBI NO: 15224180 NR Description: hypothetical protein; protein id: At2g24650.1
  misc_feature (713)..(820): Homolog of NCBI NO: 15224604 NR Description: hypothetical protein; protein id: At2g24700.1
MADQSLLHSPINPHFFQPILTESRTHLNIPVAFFSKHVEGRNNQNKTVTLRSDASDKTWLVKMDGLKLTDGWEDFAFAHDLRTGDIVVFRLEGEMVFHVTALGPSCCEIQYHTSSHNINDDDRNDQINIASRNSSRVKKNPRKKVESSLDHSRFVAKVSAWCLSNDRLYIPLSFARLNGLNKINSKKIYLQNEEGRSWKLVLRHDKSGMQTFVQSGWRRFCSENGIRQGQYTFKLVRKSAPPVIRLCRAKAKPKQRSVAEYSSDHSCFEGSVTPSSLRNDLLYLPRSFVNSNRLDKRCSEIVLKNEQGVKWPLVLKRFKSVTYLPKGWTSFCQVNRIKAGDSFKFKLVGTWKKPVLSLCPTQSNNHKTPLECSEGNKSEESEEDCLEVKKKKYWSRCRASVENMDDDQTNIGNSSRKKRVSKNPREKVESSSDHSSFVGSVNPSSLYKDQLYLPRNFVSSNFLDKRCSEIVLKNERGEKRTLVLKHFKKDLTFLKKGWTSFCQVNRIKAGDSFKFKLVGTWNKPVLSLCPTETNYHKTPLACSEGNKSEESEEEGTEDKNTSQDCLEVKKRKYWSTCRASAENIDDDQTNIGNSSKEKRVKKNPVKKAESSSDHSSFVANVTASSLNYDRLYLPLSFVSSNGLDKMNGKEIVLLNEEGLSWKFNLKYNQAGKHTYVRPGWSRFCDANGMSQGQQFTFKLVQKHGPPVMYLSLSEHRPKSESSSHRSYFVGSVTASSIKKDKLYLWKSFVSSNGLDKGCKKIILKNKWGREWKLVLKHYKSNCFTIIKRGWTSFCQGNGLKAGDSFKFKLVGTGEKPVLSLCPAESSHEKIPLECPEGIDDVNSLSSNPSSGDDSSRSEESEEENMEDKNISQDCLETKKRKYCSSSSYSQNRFVTLTLTRSAFQTYKLVNGINKPRKITLLGQDGVKKVVDLYQESSSRIMRFGKGWREFFDAQGVKIDDSFVLELIWEKEASPVLKFCTKVPK

SEQ ID NO: 82242 - protein, 922 aa, Arabidopsis thaliana
  peptide (1)..(922): Ceres Seq. ID no. 12664655
  misc_feature (665)..(765): Pfam Name: B3 DNA binding domain Pfam Description: B3 DNA binding domain
  misc_feature (513)..(920): Homolog of NCBI NO: 15224180 NR Description: hypothetical protein; protein id: At2g24650.1
  misc_feature (1)..(205): Homolog of NCBI NO: 15224180 NR Description: hypothetical protein; protein id: At2g24650.1
  misc_feature (66)..(447): Homolog of NCBI NO: 15224604 NR Description: hypothetical protein; protein id: At2g24700.1
  misc_feature (679)..(797): Homolog of NCBI NO: 15224604 NR Description: hypothetical protein; protein id: At2g24700.1
  misc_feature (1)..(49): Homolog of NCBI NO: 15224604 NR Description: hypothetical protein; protein id: At2g24700.1
  misc_feature (523)..(626): Homolog of NCBI NO: 15224604 NR Description: hypothetical protein; protein id: At2g24700.1
  misc_feature (190)..(787): Homolog of NCBI NO: 15224180 NR Description: hypothetical protein; protein id: At2g24650.1
  misc_feature (794)..(911): Homolog of NCBI NO: 15224180 NR Description: hypothetical protein; protein id: At2g24650.1
  misc_feature (1)..(286): Homolog of NCBI NO: 15224180 NR Description: hypothetical protein; protein id: At2g24650.1
  misc_feature (651)..(758): Homolog of NCBI NO: 15224604 NR Description: hypothetical protein; protein id: At2g24700.1
MDGLKLTDGWEDFAFAHDLRTGDIVVFRLEGEMVFHVTALGPSCCEIQYHTSSHNINDDDRNDQINIASRNSSRVKKNPRKKVESSLDHSRFVAKVSAWCLSNDRLYIPLSFARLNGLNKINSKKIYLQNEEGRSWKLVLRHDKSGMQTFVQSGWRRFCSENGIRQGQYTFKLVRKSAPPVIRLCRAKAKPKQRSVAEYSSDHSCFEGSVTPSSLRNDLLYLPRSFVNSNRLDKRCSEIVLKNEQGVKWPLVLKRFKSVTYLPKGWTSFCQVNRIKAGDSFKFKLVGTWKKPVLSLCPTQSNNHKTPLECSEGNKSEESEEDCLEVKKKKYWSRCRASVENMDDDQTNIGNSSRKKRVSKNPREKVESSSDHSSFVGSVNPSSLYKDQLYLPRNFVSSNFLDKRCSEIVLKNERGEKRTLVLKHFKKDLTFLKKGWTSFCQVNRIKAGDSFKFKLVGTWNKPVLSLCPTETNYHKTPLACSEGNKSEESEEEGTEDKNTSQDCLEVKKRKYWSTCRASAENIDDDQTNIGNSSKEKRVKKNPVKKAESSSDHSSFVANVTASSLNYDRLYLPLSFVSSNGLDKMNGKEIVLLNEEGLSWKFNLKYNQAGKHTYVRPGWSRFCDANGMSQGQQFTFKLVQKHGPPVMYLSLSEHRPKSESSSHRSYFVGSVTASSIKKDKLYLWKSFVSSNGLDKGCKKIILKNKWGREWKLVLKHYKSNCFTIIKRGWTSFCQGNGLKAGDSFKFKLVGTGEKPVLSLCPAESSHEKIPLECPEGIDDVNSLSSNPSSGDDSSRSEESEEENMEDKNISQDCLETKKRKYCSSSSYSQNRFVTLTLTRSAFQTYKLVNGINKPRKITLLGQDGVKKVVDLYQESSSRIMRFGKGWREFFDAQGVKIDDSFVLELIWEKEASPVLKFCTKVPK

SEQ ID NO: 82243 - protein, 890 aa, Arabidopsis thaliana
  peptide (1)..(890): Ceres Seq. ID no. 12664656
  misc_feature (633)..(733): Pfam Name: B3 DNA binding domain Pfam Description: B3 DNA binding domain
  misc_feature (481)..(888): Homolog of NCBI NO: 15224180 NR Description: hypothetical protein; protein id: At2g24650.1
  misc_feature (1)..(173): Homolog of NCBI NO: 15224180 NR Description: hypothetical protein; protein id: At2g24650.1
  misc_feature (34)..(415): Homolog of NCBI NO: 15224604 NR Description: hypothetical protein; protein id: At2g24700.1
  misc_feature (647)..(765): Homolog of NCBI NO: 15224604 NR Description: hypothetical protein; protein id: At2g24700.1
  misc_feature (1)..(17): Homolog of NCBI NO: 15224604 NR Description: hypothetical protein; protein id: At2g24700.1
  misc_feature (491)..(594): Homolog of NCBI NO: 15224604 NR Description: hypothetical protein; protein id: At2g24700.1
  misc_feature (158)..(755): Homolog of NCBI NO: 15224180 NR Description: hypothetical protein; protein id: At2g24650.1
  misc_feature (762)..(879): Homolog of NCBI NO: 15224180 NR Description: hypothetical protein; protein id: At2g24650.1
  misc_feature (1)..(254): Homolog of NCBI NO: 15224180 NR Description: hypothetical protein; protein id: At2g24650.1
  misc_feature (619)..(726): Homolog of NCBI NO: 15224604 NR Description: hypothetical protein; protein id: At2g24700.1
MVFHVTALGPSCCEIQYHTSSHNINDDDRNDQINIASRNSSRVKKNPRKKVESSLDHSRFVAKVSAWCLSNDRLYIPLSFARLNGLNKINSKKIYLQNEEGRSWKLVLRHDKSGMQTFVQSGWRRFCSENGIRQGQYTFKLVRKSAPPVIRLCRAKAKPKQRSVAEYSSDHSCFEGSVTPSSLRNDLLYLPRSFVNSNRLDKRCSEIVLKNEQGVKWPLVLKRFKSVTYLPKGWTSFCQVNRIKAGDSFKFKLVGTWKKPVLSLCPTQSNNHKTPLECSEGNKSEESEEDCLEVKKKKYWSRCRASVENMDDDQTNIGNSSRKKRVSKNPREKVESSSDHSSFVGSVNPSSLYKDQLYLPRNFVSSNFLDKRCSEIVLKNERGEKRTLVLKHFKKDLTFLKKGWTSFCQVNRIKAGDSFKFKLVGTWNKPVLSLCPTETNYHKTPLACSEGNKSEESEEEGTEDKNTSQDCLEVKKRKYWSTCRASAENIDDDQTNIGNSSKEKRVKKNPVKKAESSSDHSSFVANVTASSLNYDRLYLPLSFVSSNGLDKMNGKEIVLLNEEGLSWKFNLKYNQAGKHTYVRPGWSRFCDANGMSQGQQFTFKLVQKHGPPVMYLSLSEHRPKSESSSHRSYFVGSVTASSIKKDKLYLWKSFVSSNGLDKGCKKIILKNKWGREWKLVLKHYKSNCFTIIKRGWTSFCQGNGLKAGDSFKFKLVGTGEKPVLSLCPAESSHEKIPLECPEGIDDVNSLSSNPSSGDDSSRSEESEEENMEDKNISQDCLETKKRKYCSSSSYSQNRFVTLTLTRSAFQTYKLVNGINKPRKITLLGQDGVKKVVDLYQESSSRIMRFGKGWREFFDAQGVKIDDSFVLELIWEKEASPVLKFCTKVPK

SEQ ID NO: 82244 - DNA, 843 bp, Arabidopsis thaliana
  misc_feature (1)..(843): Ceres Seq. ID no. 12664669
  misc_feature: MA Experiment ID: 20000440 Result: Up-regulated in Transcription
  misc_feature: MA Experiment 20000440 PARAMETER Experiment Name: At_Closed-Flower__Sub_P Parameter: Tissue Value: Closed Flower vs. Whole Plant
atgtttataacggaaaaacaagtgtggatggatgagatcgtcgcaagaagagcttcttcttcttgggacttccctttcaacgacattaatattcatcagcatcatcatcgtcactgcaacacaagtcatgagtttgaaatcttgaagagtcctcttggagatgtagcggttcacgaagaagagagtaataataataaccctaatttcagtaacagcgagagtggtaagaaggagacaacagatagtggtcagtcttggtcctcgtcgtcttcaaaaccatcggtcttggggagaggacattggagaccagctgaagatgttaaactcaaagagcttgtctccatttacggcccacaaaactggaacctcatagctgaaaagcttcaaggaagatctgggaagagctgtagactacgatggtttaaccaattggacccgaggataaaccgaagagctttcacagaagaagaagaggagaggctgatgcaagcacataggctttatggtaacaaatgggcaatgattgcgaggcttttccctggtagaactgataattcagtgaagaaccattggcatgttgtcatggctcgtaagtatagagaacactcttctgcttaccgtaggagaaagcttatgagtaataatccacttaaacctcacctcaccaataatcatcatcctaaccctaaccctaattaccactcttttatctccactaatcattacttcgctcagcctttccccgagtttaatttgactcatcacctggttaataatgcccctatcacgagtgaccataaccagcttgtgttgcctttccattgctttcaaggtagcctatag

SEQ ID NO: 82245 - protein, 280 aa, Arabidopsis thaliana
  peptide (1)..(280): Ceres Seq. ID no. 12664670
  misc_feature (98)..(144): Pfam Name: Myb-like DNA-binding domain Pfam Description: Myb-like DNA-binding domain
  misc_feature (1)..(280): Homolog of NCBI NO: 18396049 NR Description: myb-related protein, putative; protein id: supported by cDNA: gi_13430157 [Arabidopsis thaliana]
  misc_feature (1)..(278): Homolog of NCBI NO: 25403271 NR Description: protein T24P13.16 [imported] - Arabidopsis >gi|9295726|gb|AAF87032.1|AC006535_10 T24P13.16 [Arabidopsis
  misc_feature (33)..(265): Homolog of NCBI NO: 15222362 NR Description: MYB-family transcription factor, putative; id: At1g69560.1, supported by cDNA: gi_7644365 [Arabidopsis
  misc_feature (78)..(251): Homolog of NCBI NO: 34903242 NR Description: unnamed protein product [Oryza sativa (japonica group)] >gi|6539552|dbj|BAA88169.1| unnamed protein product
  misc_feature (69)..(209): Homolog of NCBI NO: 7939552 NR Description: MYB transcription factor-like protein
  misc_feature (69)..(209): Homolog of NCBI NO: 18406019 NR Description: expressed protein; protein id: At3g29020.1, by cDNA: gi_9864076 [Arabidopsis thaliana]
  misc_feature (72)..(216): Homolog of NCBI NO: 6979341 NR Description: myb-like protein [Oryza sativa]
  misc_feature (34)..(201): Homolog of NCBI NO: 15238028 NR Description: MYB56 R2R3-MYB factor family member; protein id:
  misc_feature (89)..(201): Homolog of NCBI NO: 9759057 NR Description: Myb-like transcription factor-like protein
  misc_feature (98)..(209): Homolog of NCBI NO: 21321780 NR Description: putative Myb/Myb-related protein [Oryza sativa
MFITEKQVWMDEIVARRASSSWDFPFNDINIHQHHHRHCNTSHEFEILKSPLGDVAVHEEESNNNNPNFSNSESGKKETTDSGQSWSSSSSKPSVLGRGHWRPAEDVKLKELVSIYGPQNWNLIAEKLQGRSGKSCRLRWFNQLDPRINRRAFTEEEEERLMQAHRLYGNKWAMIARLFPGRTDNSVKNHWHVVMARKYREHSSAYRRRKLMSNNPLKPHLTNNHHPNPNPNYHSFISTNHYFAQPFPEFNLTHHLVNNAPITSDHNQLVLPFHCFQGSL

SEQ ID NO: 82246 - protein, 271 aa, Arabidopsis thaliana
  peptide (1)..(271): Ceres Seq. ID no. 12664671
  misc_feature (89)..(135): Pfam Name: Myb-like DNA-binding domain Pfam Description: Myb-like DNA-binding domain
  misc_feature (1)..(271): Homolog of NCBI NO: 18396049 NR Description: myb-related protein, putative; protein id: supported by cDNA: gi_13430157 [Arabidopsis thaliana]
  misc_feature (1)..(269): Homolog of NCBI NO: 25403271 NR Description: protein T24P13.16 [imported] - Arabidopsis >gi|9295726|gb|AAF87032.1|AC006535_10 T24P13.16 [Arabidopsis
  misc_feature (24)..(256): Homolog of NCBI NO: 15222362 NR Description: MYB-family transcription factor, putative; id: At1g69560.1, supported by cDNA: gi_7644365 [Arabidopsis
  misc_feature (69)..(242): Homolog of NCBI NO: 34903242 NR Description: unnamed protein product [Oryza sativa (japonica group)] >gi|6539552|dbj|BAA88169.1| unnamed protein product
  misc_feature (60)..(200): Homolog of NCBI NO: 7939552 NR Description: MYB transcription factor-like protein
  misc_feature (60)..(200): Homolog of NCBI NO: 18406019 NR Description: expressed protein; protein id: At3g29020.1, by cDNA: gi_9864076 [Arabidopsis thaliana]
  misc_feature (63)..(207): Homolog of NCBI NO: 6979341 NR Description: myb-like protein [Oryza sativa]
  misc_feature (25)..(192): Homolog of NCBI NO: 15238028 NR Description: MYB56 R2R3-MYB factor family member; protein id:
  misc_feature (80)..(192): Homolog of NCBI NO: 9759057 NR Description: Myb-like transcription factor-like protein
  misc_feature (89)..(200): Homolog of NCBI NO: 21321780 NR Description: putative Myb/Myb-related protein [Oryza sativa
MDEIVARRASSSWDFPFNDINIHQHHHRHCNTSHEFEILKSPLGDVAVHEEESNNNNPNFSNSESGKKETTDSGQSWSSSSSKPSVLGRGHWRPAEDVKLKELVSIYGPQNWNLIAEKLQGRSGKSCRLRWFNQLDPRINRRAFTEEEEERLMQAHRLYGNKWAMIARLFPGRTDNSVKNHWHVVMARKYREHSSAYRRRKLMSNNPLKPHLTNNHHPNPNPNYHSFISTNHYFAQPFPEFNLTHHLVNNAPITSDHNQLVLPFHCFQGSL

SEQ ID NO: 82247 - DNA, 1864 bp, Arabidopsis thaliana
  misc_feature (1)..(1864): Ceres Seq. ID no. 12664690
  misc_feature: MA Experiment ID: 20000179 Result: Up-regulated in Transcription
  misc_feature: MA Experiment 20000179 PARAMETER Experiment Name: At_Germinating_Seeds_P Parameter: Age (hr) Value: 6 vs. 0
  misc_feature: MA Experiment 20000179 PARAMETER Experiment Name: At_Germinating_Seeds_P Parameter: Tissue Value: Germinating Seeds
atgcaatcttgtgacggttcttgtgttcaaagagtagatacttgttcttcaaggtggaggttaacagaggacaattgacggggtttttaatcgttgttgtattgctcgaataaacggaatcatggaaaggtttgttcttgttctgttcttgttgttgtttgtatatatattggacatggtgagaaagtgatgatggtgtttgtggtttttgttatgtgtaggtataagattttggaagagcttggtgatggtacttgtggtagtgtatataaagcagtaaatttggaaacatatgaagttgttgctgttaagaagatgaagagaaagttttattattgggaagagtgtgtgaatctgcgagaagttaaggctcttcgtaagctaaatcatcctcatatcataaagttgaaggagattgtgagagaacataatgagctttttttcatctttgagtgcatggatcacaatctgtaccatataatgaaagaaagggaacgacctttttctgaaggagaaataagaagttttatgtctcagatgctgcaagggctcgcacacatgcataaaaacggttatttccatcgagacctgaaacctgagaatttgctggtgaccaacaatatcctgaaaattgctgactttgggttggctagagaagttgcatctatgcctccttacactgaatatgtgtccacacgttggtatcgagctccagaagttttgctacagtcttcattatacactcctgcagttgacatgtgggcagttggagcgatactagctgagctttacgctttaactccgttatttcctggtgaaagtgagatagatcaattatacaaaatctgctgtgttcttggcaagccggactggaccacgttccctgaagcgaaaagcatatctcgaattatgagtattagtcacacagagtttccgcagacacgaattgctgatttacttcccaatgctgctcctgaagctattgatttgatcaatcgactttgctcatgggatccattgaaacgaccaactgctgatgaggcactaaatcatccatttttcagtatggctacgcaggcttcatatcctatccatgaccttgagctgaggcttgataatatggcggcgttgcctaatcttgagctaaatctctgggactttaacagagaacctgaagaatgttttcttggcttgacactagctgtgaaaccaagtgctcccaaactagaaatgctccgcaatgtatctcaggacatgagcgagaattttctcttttgccccggggtcaacaatgatcgagaaccatcagttttctggtctctgctctctcctgatgaaaacggcctccacgcgccagttgaatcatctcctttatctttgtctttcagtccaatgcagcaacacacagttggacctccacagtcgagtggcttcacaatgacatcatcaatgcaaccgaatatgttggaccgcccgtggatggccgtgtctgcgccgtttcaacaaagtcattacctctgatctaataaacccataccctagtaaaaaaagtaaataacacagaggtttgtcagaaagatttgagtttaaagaacaagatagcaaaacaaaacagaggaaaggtgttagaattttcattttttttgtcaccaatttgttcttaatttgtaaaaatttggtttggctgatgcattttcctctcagagcttgagctctatcaatatcgaacaaataatttccttattcttgtctctgtataatatatgataaaaaaagacattgaaatcttgatgtggcattaccataaagaattacgtttcattaatgttggttctgtcgtcttttaatataaaagtctttaact

SEQ ID NO: 82248 - protein, 443 aa, Arabidopsis thaliana
  peptide (1)..(443): Ceres Seq. ID no. 12664691
  misc_feature (12)..(291): Pfam Name: Protein kinase domain Pfam Description: Protein kinase domain
  misc_feature (1)..(443): Homolog of NCBI NO: 15235551 NR Description: serine/threonine-specific protein kinase MHK; id: At4g13020.1, supported by cDNA: gi_166810 [Arabidopsis
  misc_feature (1)..(443): Homolog of NCBI NO: 481207 NR Description: serine/threonine-specific protein kinase MHK (EC
  misc_feature (9)..(443): Homolog of NCBI NO: 30682312 NR Description: serine/threonine protein kinase (MHK)
  misc_feature (9)..(443): Homolog of NCBI NO: 7710959 NR Description: putative Cdc2-related protein kinase CRK2 [Beta
  misc_feature (9)..(442): Homolog of NCBI NO: 34897492 NR Description: putative protein kinase [Oryza sativa (japonica group)] >gi|29244698|gb|AAO73290.1| putative protein kinase
  misc_feature (9)..(291): Homolog of NCBI NO: 27948450 NR Description: GAMYB-binding protein [Hordeum vulgare subsp.
  misc_feature (9)..(291): Homolog of NCBI NO: 18415242 NR Description: kinase-like protein; protein id: At4g19110.1, by cDNA: gi_13430555, supported by cDNA: gi_14532759 [Arabidopsis >gi|13430556|gb|AAK25900.1|AF360190_1 putative kinase
  misc_feature (9)..(291): Homolog of NCBI NO: 30684655 NR Description: protein kinase, putative [Arabidopsis thaliana]
  misc_feature (11)..(293): Homolog of NCBI NO: 7488272 NR Description: protein kinase homolog T18B16.80 - Arabidopsis
  misc_feature (9)..(291): Homolog of NCBI NO: 15450860 NR Description: serine/threonine-protein kinase Mak (male germ
MMVFVVFVMCRYKILEELGDGTCGSVYKAVNLETYEVVAVKKMKRKFYYWEECVNLREVKALRKLNHPHIIKLKEIVREHNELFFIFECMDHNLYHIMKERERPFSEGEIRSFMSQMLQGLAHMHKNGYFHRDLKPENLLVTNNILKIADFGLAREVASMPPYTEYVSTRWYRAPEVLLQSSLYTPAVDMWAVGAILAELYALTPLFPGESEIDQLYKICCVLGKPDWTTFPEAKSISRIMSISHTEFPQTRIADLLPNAAPEAIDLINRLCSWDPLKRPTADEALNHPFFSMATQASYPIHDLELRLDNMAALPNLELNLWDFNREPEECFLGLTLAVKPSAPKLEMLRNVSQDMSENFLFCPGVNNDREPSVFWSLLSPDENGLHAPVESSPLSLSFSPMQQHTVGPPQSSGFTMTSSMQPNMLDRPWMAVSAPFQQSHYL

SEQ ID NO: 82249 - protein, 442 aa, Arabidopsis thaliana
  peptide (1)..(442): Ceres Seq. ID no. 12664692
  misc_feature (11)..(290): Pfam Name: Protein kinase domain Pfam Description: Protein kinase domain
  misc_feature (1)..(442): Homolog of NCBI NO: 15235551 NR Description: serine/threonine-specific protein kinase MHK; id: At4g13020.1, supported by cDNA: gi_166810 [Arabidopsis
  misc_feature (1)..(442): Homolog of NCBI NO: 481207 NR Description: serine/threonine-specific protein kinase MHK (EC
  misc_feature (8)..(442): Homolog of NCBI NO: 30682312 NR Description: serine/threonine protein kinase (MHK)
  misc_feature (8)..(442): Homolog of NCBI NO: 7710959 NR Description: putative Cdc2-related protein kinase CRK2 [Beta
  misc_feature (8)..(441): Homolog of NCBI NO: 34897492 NR Description: putative protein kinase [Oryza sativa (japonica group)] >gi|29244698|gb|AAO73290.1| putative protein kinase
  misc_feature (8)..(290): Homolog of NCBI NO: 27948450 NR Description: GAMYB-binding protein [Hordeum vulgare subsp.
  misc_feature (8)..(290): Homolog of NCBI NO: 18415242 NR Description: kinase-like protein; protein id: At4g19110.1, by cDNA: gi_13430555, supported by cDNA: gi_14532759 [Arabidopsis >gi|13430556|gb|AAK25900.1|AF360190_1 putative kinase
  misc_feature (8)..(290): Homolog of NCBI NO: 30684655 NR Description: protein kinase, putative [Arabidopsis thaliana]
  misc_feature (10)..(292): Homolog of NCBI NO: 7488272 NR Description: protein kinase homolog T18B16.80 - Arabidopsis
  misc_feature (8)..(290): Homolog of NCBI NO: 15450860 NR Description: serine/threonine-protein kinase Mak (male germ
MVFVVFVMCRYKILEELGDGTCGSVYKAVNLETYEVVAVKKMKRKFYYWEECVNLREVKALRKLNHPHIIKLKEIVREHNELFFIFECMDHNLYHIMKERERPFSEGEIRSFMSQMLQGLAHMHKNGYFHRDLKPENLLVTNNILKIADFGLAREVASMPPYTEYVSTRWYRAPEVLLQSSLYTPAVDMWAVGAILAELYALTPLFPGESEIDQLYKICCVLGKPDWTTFPEAKSISRIMSISHTEFPQTRIADLLPNAAPEAIDLINRLCSWDPLKRPTADEALNHPFFSMATQASYPIHDLELRLDNMAALPNLELNLWDFNREPEECFLGLTLAVKPSAPKLEMLRNVSQDMSENFLFCPGVNNDREPSVFWSLLSPDENGLHAPVESSPLSLSFSPMQQHTVGPPQSSGFTMTSSMQPNMLDRPWMAVSAPFQQSHYL

SEQ ID NO: 82250 - protein, 435 aa, Arabidopsis thaliana
  peptide (1)..(435): Ceres Seq. ID no. 12664693
  misc_feature (4)..(283): Pfam Name: Protein kinase domain Pfam Description: Protein kinase domain
  misc_feature (1)..(435): Homolog of NCBI NO: 15235551 NR Description: serine/threonine-specific protein kinase MHK; id: At4g13020.1, supported by cDNA: gi_166810 [Arabidopsis
  misc_feature (1)..(435): Homolog of NCBI NO: 481207 NR Description: serine/threonine-specific protein kinase MHK (EC
  misc_feature (1)..(435): Homolog of NCBI NO: 30682312 NR Description: serine/threonine protein kinase (MHK)
  misc_feature (1)..(435): Homolog of NCBI NO: 7710959 NR Description: putative Cdc2-related protein kinase CRK2 [Beta
  misc_feature (1)..(434): Homolog of NCBI NO: 34897492 NR Description: putative protein kinase [Oryza sativa (japonica group)] >gi|29244698|gb|AAO73290.1| putative protein kinase
  misc_feature (1)..(283): Homolog of NCBI NO: 27948450 NR Description: GAMYB-binding protein [Hordeum vulgare subsp.
  misc_feature (1)..(283): Homolog of NCBI NO: 18415242 NR Description: kinase-like protein; protein id: At4g19110.1, by cDNA: gi_13430555, supported by cDNA: gi_14532759 [Arabidopsis >gi|13430556|gb|AAK25900.1|AF360190_1 putative kinase
  misc_feature (1)..(283): Homolog of NCBI NO: 30684655 NR Description: protein kinase, putative [Arabidopsis thaliana]
  misc_feature (3)..(285): Homolog of NCBI NO: 7488272 NR Description: protein kinase homolog T18B16.80 - Arabidopsis
  misc_feature (1)..(283): Homolog of NCBI NO: 15450860 NR Description: serine/threonine-protein kinase Mak (male germ
MCRYKILEELGDGTCGSVYKAVNLETYEVVAVKKMKRKFYYWEECVNLREVKALRKLNHPHIIKLKEIVREHNELFFIFECMDHNLYHIMKERERPFSEGEIRSFMSQMLQGLAHMHKNGYFHRDLKPENLLVTNNILKIADFGLAREVASMPPYTEYVSTRWYRAPEVLLQSSLYTPAVDMWAVGAILAELYALTPLFPGESEIDQLYKICCVLGKPDWTTFPEAKSISRIMSISHTEFPQTRIADLLPNAAPEAIDLINRLCSWDPLKRPTADEALNHPFFSMATQASYPIHDLELRLDNMAALPNLELNLWDFNREPEECFLGLTLAVKPSAPKLEMLRNVSQDMSENFLFCPGVNNDREPSVFWSLLSPDENGLHAPVESSPLSLSFSPMQQHTVGPPQSSGFTMTSSMQPNMLDRPWMAVSAPFQQSHYL

SEQ ID NO: 82251 - DNA, 879 bp, Arabidopsis thaliana
  misc_feature (1)..(879): Ceres Seq. ID no. 12664698
  misc_feature: MA Experiment ID: 20000355 Result: Up-regulated in Transcription
  misc_feature: MA Experiment 20000355 PARAMETER Experiment Name: At_Siliques_Sub_P Parameter: Age (day) Value: 21
  misc_feature: MA Experiment 20000355 PARAMETER Experiment Name: At_Siliques_Sub_P Parameter: Organism Value: A. thaliana
  misc_feature: MA Experiment 20000355 PARAMETER Experiment Name: At_Siliques_Sub_P Parameter: Plant Line Value: WS
  misc_feature: MA Experiment 20000355 PARAMETER Experiment Name: At_Siliques_Sub_P Parameter: Tissue Value: Less Than 5mm Siliques vs. Whole Plant
atggaatatctttcaatcttcggttttgtttcagttttgtatttgatcattagggttgatgctagggcttatgaagttaatggaatcgaccaaagcaaagtaggtttcgatgataactacgtcgttacgtggggacaaaataatgtcttgaaacttaaccaagggaaagaagttcagctttcattggatcattcttcaggttctggttttgaatctaagaatcattacgaatcaggattcttccaaataagaatcaaagtgcctccaaaagatacctcaggcgttgtcaccgctttctatttgacttcgaagggaaacacacatgatgaagttgattttgaattcttgggaaacaaagaagggaaactagcagtgcaaacaaatgtgtttactaatggtaaaggcaatagagaacagaagttagctctctggttcgatccttctaaagatttccacacttacgcaattctgtggaacccgtatcaaattgtgctttatgtggacaacattccagtacgggtgttcaagaacaccacaagccaaggcatgaactacccatcaaaacctatgcaagttgtggttagcttgtggaacggtgaaaactgggcgacagacggtggtaaaagcaagattaattggtctttggctccctttaaggctaattttcaaggctttaacaactctggttgtttcaccaatgctgaaaagaatgcttgtggttcgtcagcgtactggtggaatactgggagttatagtaagctaagtgactccgaacagaaagcctacacaaatgtgagacaaaagtacatgaattatgattattgttctgataaggttagattccatgttcctccaagtgaatgtaaatggaacaactga

SEQ ID NO: 82252 - protein, 292 aa, Arabidopsis thaliana
  peptide (1)..(292): Ceres Seq. ID no. 12664699
  misc_feature (36)..(215): Pfam Name: Glycosyl hydrolases family 16 Pfam Description: Glycosyl hydrolases family 16
  misc_feature (1)..(292): Homolog of NCBI NO: 22328589 NR Description: xyloglucan endotransglycosylase, putative;
  misc_feature (1)..(292): Homolog of NCBI NO: 38605518 NR Description: Putative xyloglucan
  misc_feature (7)..(291): Homolog of NCBI NO: 15235587 NR Description: xyloglucan endotransglycosylase, putative;
  misc_feature (1)..(288): Homolog of NCBI NO: 15230246 NR Description: xyloglucan endotransglycosylase, putative; id: At3g25050.1 [Arabidopsis thaliana]
  misc_feature (34)..(289): Homolog of NCBI NO: 15225605 NR Description: xyloglucan endotransglycosylase (ext/EXGT-A1); id: At2g06850.1, supported by cDNA: 15276., supported by cDNA:
  misc_feature (34)..(289): Homolog of NCBI NO: 15240733 NR Description: xyloglucan endotransglycosylase (EXGT-A4); id: At5g13870.1 [Arabidopsis thaliana] endoxyloglucan transferase [Arabidopsis thaliana]
  misc_feature (34)..(289): Homolog of NCBI NO: 22947847 NR Description: xyloglucan endotransglycosylase [Malus x
  misc_feature (34)..(289): Homolog of NCBI NO: 38605539 NR Description: Probable xyloglucan
  misc_feature (4)..(289): Homolog of NCBI NO: 950299 NR Description: xyloglucan endotransglycosylase precursor
  misc_feature (34)..(289): Homolog of NCBI NO: 1885310 NR Description: Endoxyloglucan transferase (EXT) [Hordeum vulgare
MEYLSIFGFVSVLYLIIRVDARAYEVNGIDQSKVGFDDNYVVTWGQNNVLKLNQGKEVQLSLDHSSGSGFESKNHYESGFFQIRIKVPPKDTSGVVTAFYLTSKGNTHDEVDFEFLGNKEGKLAVQTNVFTNGKGNREQKLALWFDPSKDFHTYAILWNPYQIVLYVDNIPVRVFKNTTSQGMNYPSKPMQVVVSLWNGENWATDGGKSKINWSLAPFKANFQGFNNSGCFTNAEKNACGSSAYWWNTGSYSKLSDSEQKAYTNVRQKYMNYDYCSDKVRFHVPPSECKWNN

SEQ ID NO: 82253 - DNA, 879 bp, Arabidopsis thaliana
  misc_feature (1)..(879): Ceres Seq. ID no. 12664700
  misc_feature: MA Experiment ID: 20000307 Result: Up-regulated in Transcription
  misc_feature: MA Experiment 20000307 PARAMETER Experiment Name: At_Germinating_Seeds_Sub_P Parameter: Age (hr) Value: 24 vs. 0
  misc_feature: MA Experiment 20000307 PARAMETER Experiment Name: At_Germinating_Seeds_Sub_P Parameter: Organism Value: A. thaliana
  misc_feature: MA Experiment 20000307 PARAMETER Experiment Name: At_Germinating_Seeds_Sub_P Parameter: Plant Line Value: WS
  misc_feature: MA Experiment 20000307 PARAMETER Experiment Name: At_Germinating_Seeds_Sub_P Parameter: Tissue Value: Germinating Seeds
  misc_feature: MA Experiment ID: 20000440 Result: Up-regulated in Transcription
  misc_feature: MA Experiment 20000440 PARAMETER Experiment Name: At_Closed-Flower__Sub_P Parameter: Tissue Value: Closed Flower vs. Whole Plant
atgaataggataagatattgttttgaattagtttcagtattgttcttgatgtttactgctaatgcaagagctcgtggacgtggagctatagatttcgatgtgaactatgtcgttacatggggacaagatcatatcttgaaactcaaccaaggaaaagaagttcagctctccatggattattcttcaggttctggctttgagtctaaaagccactacggatcaggattcttccaaatgagaatcaaattgcctccaagagattccgccggtgttgtcacagctttctacttgacttctaagggagacacccacgatgaggttgactttgagttcttggggaatagacaaggaaaaccgatagcaattcaaacaaatgtatttagcaatggacaaggaggtagagaacaaaagtttgttccttggttcgatcccactacaagtttccacacttatgggattctttggaatccgtatcagattgtgttttacgtggacaaagttccaataagagtattcaagaatatcaaaaaaagtggtgtgaactatccatcaaagcccatgcaacttgtggctagtttgtggaacggtgagaactgggcaacaagcggtggtaaagaaaagataaattgggcctatgctccatttaaggctcaataccaaggcttctccgaccatggttgtcacgtaaatggtcagagcaataatgcgaacgtttgtggttcgacaaggtactggtggaacacaaggacatatagtcagttaagtgcaaatgagcagaaggtaatggagaatgtgagagcaaagtacatgacctatgattattgttctgatcggcctagatatcctgttcctcctagtgaatgtcgatggaatcaatga

SEQ ID NO: 82254 - protein, 292 aa, Arabidopsis thaliana
  peptide (1)..(292): Ceres Seq. ID no. 12664701
  misc_feature (32)..(212): Pfam Name: Glycosyl hydrolases family 16 Pfam Description: Glycosyl hydrolases family 16
  misc_feature (1)..(292): Homolog of NCBI NO: 15235587 NR Description: xyloglucan endotransglycosylase, putative;
  misc_feature (1)..(291): Homolog of NCBI NO: 38605518 NR Description: Putative xyloglucan
  misc_feature (8)..(291): Homolog of NCBI NO: 22328589 NR Description: xyloglucan endotransglycosylase, putative;
  misc_feature (8)..(288): Homolog of NCBI NO: 15230246 NR Description: xyloglucan endotransglycosylase, putative; id: At3g25050.1 [Arabidopsis thaliana]
  misc_feature (14)..(289): Homolog of NCBI NO: 15225605 NR Description: xyloglucan endotransglycosylase (ext/EXGT-A1); id: At2g06850.1, supported by cDNA: 15276., supported by cDNA:
  misc_feature (30)..(289): Homolog of NCBI NO: 15240733 NR Description: xyloglucan endotransglycosylase (EXGT-A4); id: At5g13870.1 [Arabidopsis thaliana] endoxyloglucan transferase [Arabidopsis thaliana]
  misc_feature (11)..(289): Homolog of NCBI NO: 22947847 NR Description: xyloglucan endotransglycosylase [Malus x
  misc_feature (14)..(289): Homolog of NCBI NO: 950299 NR Description: xyloglucan endotransglycosylase precursor
  misc_feature (7)..(288): Homolog of NCBI NO: 38605156 NR Description: Xyloglucan endotransglucosylase/hydrolase protein
  misc_feature (6)..(289): Homolog of NCBI NO: 27228078 NR Description: xyloglucan endotransglycosylase precursor
MNRIRYCFELVSVLFLMFTANARARGRGAIDFDVNYVVTWGQDHILKLNQGKEVQLSMDYSSGSGFESKSHYGSGFFQMRIKLPPRDSAGVVTAFYLTSKGDTHDEVDFEFLGNRQGKPIAIQTNVFSNGQGGREQKFVPWFDPTTSFHTYGILWNPYQIVFYVDKVPIRVFKNIKKSGVNYPSKPMQLVASLWNGENWATSGGKEKINWAYAPFKAQYQGFSDHGCHVNGQSNNANVCGSTRYWWNTRTYSQLSANEQKVMENVRAKYMTYDYCSDRPRYPVPPSECRWNQ

SEQ ID NO: 82255 - protein, 276 aa, Arabidopsis thaliana
  peptide (1)..(276): Ceres Seq. ID no. 12664702
  misc_feature (16)..(196): Pfam Name: Glycosyl hydrolases family 16 Pfam Description: Glycosyl hydrolases family 16
  misc_feature (1)..(276): Homolog of NCBI NO: 15235587 NR Description: xyloglucan endotransglycosylase, putative;
  misc_feature (1)..(275): Homolog of NCBI NO: 38605518 NR Description: Putative xyloglucan
  misc_feature (1)..(275): Homolog of NCBI NO: 22328589 NR Description: xyloglucan endotransglycosylase, putative;
  misc_feature (1)..(272): Homolog of NCBI NO: 15230246 NR Description: xyloglucan endotransglycosylase, putative; id: At3g25050.1 [Arabidopsis thaliana]
  misc_feature (1)..(273): Homolog of NCBI NO: 15225605 NR Description: xyloglucan endotransglycosylase (ext/EXGT-A1); id: At2g06850.1, supported by cDNA: 15276., supported by cDNA:
  misc_feature (14)..(273): Homolog of NCBI NO: 15240733 NR Description: xyloglucan endotransglycosylase (EXGT-A4); id: At5g13870.1 [Arabidopsis thaliana] endoxyloglucan transferase [Arabidopsis thaliana]
  misc_feature (1)..(273): Homolog of NCBI NO: 22947847 NR Description: xyloglucan endotransglycosylase [Malus x
  misc_feature (1)..(273): Homolog of NCBI NO: 950299 NR Description: xyloglucan endotransglycosylase precursor
  misc_feature (1)..(272): Homolog of NCBI NO: 38605156 NR Description: Xyloglucan endotransglucosylase/hydrolase protein
  misc_feature (1)..(273): Homolog of NCBI NO: 27228078 NR Description: xyloglucan endotransglycosylase precursor
MFTANARARGRGAIDFDVNYVVTWGQDHILKLNQGKEVQLSMDYSSGSGFESKSHYGSGFFQMRIKLPPRDSAGVVTAFYLTSKGDTHDEVDFEFLGNRQGKPIAIQTNVFSNGQGGREQKFVPWFDPTTSFHTYGILWNPYQIVFYVDKVPIRVFKNIKKSGVNYPSKPMQLVASLWNGENWATSGGKEKINWAYAPFKAQYQGFSDHGCHVNGQSNNANVCGSTRYWWNTRTYSQLSANEQKVMENVRAKYMTYDYCSDRPRYPVPPSECRWNQ

SEQ ID NO: 82256 - protein, 235 aa, Arabidopsis thaliana
  peptide (1)..(235): Ceres Seq. ID no. 12664703
  misc_feature (1)..(155): Pfam Name: Glycosyl hydrolases family 16 Pfam Description: Glycosyl hydrolases family 16
  misc_feature (1)..(235): Homolog of NCBI NO: 15235587 NR Description: xyloglucan endotransglycosylase, putative;
  misc_feature (1)..(234): Homolog of NCBI NO: 38605518 NR Description: Putative xyloglucan
  misc_feature (1)..(234): Homolog of NCBI NO: 22328589 NR Description: xyloglucan endotransglycosylase, putative;
  misc_feature (1)..(231): Homolog of NCBI NO: 15230246 NR Description: xyloglucan endotransglycosylase, putative; id: At3g25050.1 [Arabidopsis thaliana]
  misc_feature (1)..(232): Homolog of NCBI NO: 15225605 NR Description: xyloglucan endotransglycosylase (ext/EXGT-A1); id: At2g06850.1, supported by cDNA: 15276., supported by cDNA:
  misc_feature (1)..(232): Homolog of NCBI NO: 15240733 NR Description: xyloglucan endotransglycosylase (EXGT-A4); id: At5g13870.1 [Arabidopsis thaliana] endoxyloglucan transferase [Arabidopsis thaliana]
  misc_feature (1)..(232): Homolog of NCBI NO: 22947847 NR Description: xyloglucan endotransglycosylase [Malus x
  misc_feature (1)..(232): Homolog of NCBI NO: 950299 NR Description: xyloglucan endotransglycosylase precursor
  misc_feature (1)..(231): Homolog of NCBI NO: 38605156 NR Description: Xyloglucan endotransglucosylase/hydrolase protein
  misc_feature (1)..(232): Homolog of NCBI NO: 27228078 NR Description: xyloglucan endotransglycosylase precursor
MDYSSGSGFESKSHYGSGFFQMRIKLPPRDSAGVVTAFYLTSKGDTHDEVDFEFLGNRQGKPIAIQTNVFSNGQGGREQKFVPWFDPTTSFHTYGILWNPYQIVFYVDKVPIRVFKNIKKSGVNYPSKPMQLVASLWNGENWATSGGKEKINWAYAPFKAQYQGFSDHGCHVNGQSNNANVCGSTRYWWNTRTYSQLSANEQKVMENVRAKYMTYDYCSDRPRYPVPPSECRWNQ

SEQ ID NO: 82257 - DNA, 1554 bp, Arabidopsis thaliana
  misc_feature (1)..(1554): Ceres Seq. ID no. 12664727
  misc_feature: MA Experiment ID: 20001910 Result: Up-regulated in Transcription
  misc_feature: MA Experiment 20001910 PARAMETER Experiment Name: At_Drought_Reproduction_P Parameter: Age (day) Value: 37
  misc_feature: MA Experiment 20001910 PARAMETER Experiment Name: At_Drought_Reproduction_P Parameter: Organism Value: A. thaliana
  misc_feature: MA Experiment 20001910 PARAMETER Experiment Name: At_Drought_Reproduction_P Parameter: Plant Line Value: WS
  misc_feature: MA Experiment 20001910 PARAMETER Experiment Name: At_Drought_Reproduction_P Parameter: Timepoint (day) Value: 7
  misc_feature: MA Experiment 20001910 PARAMETER Experiment Name: At_Drought_Reproduction_P Parameter: Tissue Value: Flowers
  misc_feature: MA Experiment 20001910 PARAMETER Experiment Name: At_Drought_Reproduction_P Parameter: Treatment Value: Drought vs. No Drought
atggttccatcgttggaacgaggaataagcatcacgagttcattcaatcttgatagaatgtttgattcctcaccgggaaaagaacaacaacaacctcatctcgcggaaacaaccatgccggagagtcaaactcaagacagcctcggtggaagtcccgtggagactagccgcccgatgacttctcgtctgatttcccgtagacaggacaagcaacaatccgagacggagatgatgaaagatagattcacgaaattacttcttggagaagatatgtctggtggtggtaaaggtgtatcttctgctttggcactatcaaatgccatcacgaatctagccgcgtcaatattcggggaacagacaaagttgcagccgatggcaccggatagacgagcgaggtggaagaaagagatcgattggttgttgtccgtgactgatcacatcgtcgagtttgttccatctcaacagattagtaaggaaggagtctgcaccgagattatggtgacaagacaaagaggtgatctcctcatgaacatccctgcccttcgcaaactcgacgccatgctcattgatacattggacaattttagaggacacaatgagttttggtatgtatcgagagattcagaagaagggaaacaagcacggaatgagaggacaaaggacaagtggtggcttcctccggttaaagtccctcctaatggcttgtccgaatcagcccgaagaatgcttcattttcaaaaagattcagtctcacaagtccaaaaagccgccatggctattaacgcgcaagttctgtcagaaatggctatccctgatagctatatcgagtctcttccaaagaatggaagagtaagccttggggattcgttatacaagagcataacagaagagtggtttgatccagagcagttcttgtcaacacttgacttatctacagagcacaaagtgttggatgtgaagaataggattgaggcctcaatcgttatatggaaaagaaaacttcatctaaaagacaacaaatcttcttggggatcagctgtgagcttggagaaacgagagttgttcgaagagagagccgagacgatcttggtcttgcttaaacaaaagttccctggtcttccccaatcttcccttgacatttccaaaattcagtataacaaggatgtgggacatgcggttttggagagctactcaaggatattagagagcttagggtacacggaaatgtcgagaatcgacgatgtactttatgcggattctttagcccggaagcaatgcacaggtgaagaaacatcagatggtgggaaaatagcaacggaaacggactcagcgtctgctggatcttcgaactactcaggagaggaaatagagaagcttgaatcacaaaactcatcaaagacgacattgcttgattttattggttggagtgacaatagttcaaaagggcagtcagagaaacctccaaaatctccgagaatgacgccaaagaaactctcatatttggagaagcttgagaacttaaatggttttaggagccctaaagataggcattga

SEQ ID NO: 82258 - protein, 517 aa, Arabidopsis thaliana
  peptide (1)..(517): Ceres Seq. ID no. 12664728
  misc_feature (18)..(426): Pfam Name: Domain of unknown function (DUF315) Pfam Description: Domain of unknown function (DUF315)
  misc_feature (1)..(517): Homolog of NCBI NO: 15235630 NR Description: putative protein; protein id: At4g13240.1
  misc_feature (1)..(517): Homolog of NCBI NO: 15230137 NR Description: hypothetical protein; protein id: At3g24620.1 thaliana] >gi|9294058|dbj|BAB02015.1|
  misc_feature (65)..(517): Homolog of NCBI NO: 15239773 NR Description: putative protein; protein id: At5g19560.1
  misc_feature (65)..(471): Homolog of NCBI NO: 15220004 NR Description: hypothetical protein; protein id: At1g79860.1
  misc_feature (20)..(517): Homolog of NCBI NO: 25349303 NR Description: unknown protein [imported] - Arabidopsis thaliana
  misc_feature (48)..(509): Homolog of NCBI NO: 34911076 NR Description: P0485G01.25 [Oryza sativa (japonica
  misc_feature (73)..(517): Homolog of NCBI NO: 34909732 NR Description: contains EST AU069857(E4450)~similar to
  misc_feature (30)..(513): Homolog of NCBI NO: 9294460 NR Description: gb|AAF29411.1~gene_id:MSL1.17~strong similarity
  misc_feature (73)..(513): Homolog of NCBI NO: 15233289 NR Description: unknown protein; protein id: At3g16130.1
  misc_feature (20)..(387): Homolog of NCBI NO: 30695174 NR Description: expressed protein [Arabidopsis thaliana]
MVPSLERGISITSSFNLDRMFDSSPGKEQQQPHLAETTMPESQTQDSLGGSPVETSRPMTSRLISRRQDKQQSETEMMKDRFTKLLLGEDMSGGGKGVSSALALSNAITNLAASIFGEQTKLQPMAPDRRARWKKEIDWLLSVTDHIVEFVPSQQISKEGVCTEIMVTRQRGDLLMNIPALRKLDAMLIDTLDNFRGHNEFWYVSRDSEEGKQARNERTKDKWWLPPVKVPPNGLSESARRMLHFQKDSVSQVQKAAMAINAQVLSEMAIPDSYIESLPKNGRVSLGDSLYKSITEEWFDPEQFLSTLDLSTEHKVLDVKNRIEASIVIWKRKLHLKDNKSSWGSAVSLEKRELFEERAETILVLLKQKFPGLPQSSLDISKIQYNKDVGHAVLESYSRILESLGYTEMSRIDDVLYADSLARKQCTGEETSDGGKIATETDSASAGSSNYSGEEIEKLESQNSSKTTLLDFIGWSDNSSKGQSEKPPKSPRMTPKKLSYLEKLENLNGFRSPKDRH

SEQ ID NO: 82259 - protein, 498 aa, Arabidopsis thaliana
  peptide (1)..(498): Ceres Seq. ID no. 12664729
  misc_feature (1)..(407): Pfam Name: Domain of unknown function (DUF315) Pfam Description: Domain of unknown function (DUF315)
  misc_feature (1)..(498): Homolog of NCBI NO: 15235630 NR Description: putative protein; protein id: At4g13240.1
  misc_feature (1)..(498): Homolog of NCBI NO: 15230137 NR Description: hypothetical protein; protein id: At3g24620.1 thaliana] >gi|9294058|dbj|BAB02015.1|
  misc_feature (46)..(498): Homolog of NCBI NO: 15239773 NR Description: putative protein; protein id: At5g19560.1
  misc_feature (46)..(452): Homolog of NCBI NO: 15220004 NR Description: hypothetical protein; protein id: At1g79860.1
  misc_feature (1)..(498): Homolog of NCBI NO: 25349303 NR Description: unknown protein [imported] - Arabidopsis thaliana
  misc_feature (29)..(490): Homolog of NCBI NO: 34911076 NR Description: P0485G01.25 [Oryza sativa (japonica
  misc_feature (54)..(498): Homolog of NCBI NO: 34909732 NR Description: contains EST AU069857(E4450)~similar to
  misc_feature (11)..(494): Homolog of NCBI NO: 9294460 NR Description: gb|AAF29411.1~gene_id:MSL1.17~strong similarity
  misc_feature (54)..(494): Homolog of NCBI NO: 15233289 NR Description: unknown protein; protein id: At3g16130.1
  misc_feature (1)..(368): Homolog of NCBI NO: 30695174 NR Description: expressed protein [Arabidopsis thaliana]
MFDSSPGKEQQQPHLAETTMPESQTQDSLGGSPVETSRPMTSRLISRRQDKQQSETEMMKDRFTKLLLGEDMSGGGKGVSSALALSNAITNLAASIFGEQTKLQPMAPDRRARWKKEIDWLLSVTDHIVEFVPSQQISKEGVCTEIMVTRQRGDLLMNIPALRKLDAMLIDTLDNFRGHNEFWYVSRDSEEGKQARNERTKDKWWLPPVKVPPNGLSESARRMLHFQKDSVSQVQKAAMAINAQVLSEMAIPDSYIESLPKNGRVSLGDSLYKSITEEWFDPEQFLSTLDLSTEHKVLDVKNRIEASIVIWKRKLHLKDNKSSWGSAVSLEKRELFEERAETILVLLKQKFPGLPQSSLDISKIQYNKDVGHAVLESYSRILESLGYTEMSRIDDVLYADSLARKQCTGEETSDGGKIATETDSASAGSSNYSGEEIEKLESQNSSKTTLLDFIGWSDNSSKGQSEKPPKSPRMTPKKLSYLEKLENLNGFRSPKDRH

SEQ ID NO: 82260 - protein, 479 aa, Arabidopsis thaliana
  peptide (1)..(479): Ceres Seq. ID no. 12664730
  misc_feature (1)..(388): Pfam Name: Domain of unknown function (DUF315) Pfam Description: Domain of unknown function (DUF315)
  misc_feature (1)..(479): Homolog of NCBI NO: 15235630 NR Description: putative protein; protein id: At4g13240.1
  misc_feature (1)..(479): Homolog of NCBI NO: 15230137 NR Description: hypothetical protein; protein id: At3g24620.1 thaliana] >gi|9294058|dbj|BAB02015.1|
  misc_feature (27)..(479): Homolog of NCBI NO: 15239773 NR Description: putative protein; protein id: At5g19560.1
  misc_feature (27)..(433): Homolog of NCBI NO: 15220004 NR Description: hypothetical protein; protein id: At1g79860.1
  misc_feature (1)..(479): Homolog of NCBI NO: 25349303 NR Description: unknown protein [imported] - Arabidopsis thaliana
  misc_feature (10)..(471): Homolog of NCBI NO: 34911076 NR Description: P0485G01.25 [Oryza sativa (japonica
  misc_feature (35)..(479): Homolog of NCBI NO: 34909732 NR Description: contains EST AU069857(E4450)~similar to
  misc_feature (1)..(475): Homolog of NCBI NO: 9294460 NR Description: gb|AAF29411.1~gene_id:MSL1.17~strong similarity
  misc_feature (35)..(475): Homolog of NCBI NO: 15233289 NR Description: unknown protein; protein id: At3g16130.1
  misc_feature (1)..(349): Homolog of NCBI NO: 30695174 NR Description: expressed protein [Arabidopsis thaliana]
MPESQTQDSLGGSPVETSRPMTSRLISRRQDKQQSETEMMKDRFTKLLLGEDMSGGGKGVSSALALSNAITNLAASIFGEQTKLQPMAPDRRARWKKEIDWLLSVTDHIVEFVPSQQISKEGVCTEIMVTRQRGDLLMNIPALRKLDAMLIDTLDNFRGHNEFWYVSRDSEEGKQARNERTKDKWWLPPVKVPPNGLSESARRMLHFQKDSVSQVQKAAMAINAQVLSEMAIPDSYIESLPKNGRVSLGDSLYKSITEEWFDPEQFLSTLDLSTEHKVLDVKNRIEASIVIWKRKLHLKDNKSSWGSAVSLEKRELFEERAETILVLLKQKFPGLPQSSLDISKIQYNKDVGHAVLESYSRILESLGYTEMSRIDDVLYADSLARKQCTGEETSDGGKIATETDSASAGSSNYSGEEIEKLESQNSSKTTLLDFIGWSDNSSKGQSEKPPKSPRMTPKKLSYLEKLENLNGFRSPKDRH

SEQ ID NO: 82261 - DNA, 1277 bp, Arabidopsis thaliana
  misc_feature (1)..(1277): Ceres Seq. ID no. 12664739
  misc_feature: MA Experiment ID: 20000184 Result: Up-regulated in Transcription
  misc_feature: MA Experiment 20000184 PARAMETER Experiment Name: At_Shoots__P Parameter: Age (day) Value: 7
  misc_feature: MA Experiment 20000184 PARAMETER Experiment Name: At_Shoots__P Parameter: Tissue Value: Shoots vs. Whole Plant
  misc_feature: MA Experiment ID: 20001247 Result: Up-regulated in Transcription
  misc_feature: MA Experiment 20001247 PARAMETER Experiment Name: At_Far-red-induction_P Parameter: Age (day) Value: 7
  misc_feature: MA Experiment 20001247 PARAMETER Experiment Name: At_Far-red-induction_P Parameter: Light Value: Far-red vs. White
  misc_feature: MA Experiment 20001247 PARAMETER Experiment Name: At_Far-red-induction_P Parameter: Organism Value: A. thaliana
  misc_feature: MA Experiment 20001247 PARAMETER Experiment Name: At_Far-red-induction_P Parameter: Plant Line Value: Columbia
  misc_feature: MA Experiment 20001247 PARAMETER Experiment Name: At_Far-red-induction_P Parameter: Timepoint (hr) Value: 1
  misc_feature: MA Experiment 20001247 PARAMETER Experiment Name: At_Far-red-induction_P Parameter: Tissue Value: Whole Plant
  misc_feature: MA Experiment ID: 20001554 Result: Down-regulated in Transcription
  misc_feature: MA Experiment 20001554 PARAMETER Experiment Name: At_Drought_Soil_Dry_P Parameter: Age (day) Value: 21
  misc_feature: MA Experiment 20001554 PARAMETER Experiment Name: At_Drought_Soil_Dry_P Parameter: Organism Value: A. thaliana
  misc_feature: MA Experiment 20001554 PARAMETER Experiment Name: At_Drought_Soil_Dry_P Parameter: Plant Line Value: WS
  misc_feature: MA Experiment 20001554 PARAMETER Experiment Name: At_Drought_Soil_Dry_P Parameter: Post Timepoint (hr) Value: None
  misc_feature: MA Experiment 20001554 PARAMETER Experiment Name: At_Drought_Soil_Dry_P Parameter: Post-Treatment Value: None
  misc_feature: MA Experiment 20001554 PARAMETER Experiment Name: At_Drought_Soil_Dry_P Parameter: Timepoint (day) Value: 7
  misc_feature: MA Experiment 20001554 PARAMETER Experiment Name: At_Drought_Soil_Dry_P Parameter: Treatment Value: Drought vs. No Drought
  misc_feature: MA Experiment ID: 20001555 Result: Down-regulated in Transcription
  misc_feature: MA Experiment 20001555 PARAMETER Experiment Name: At_Drought_Soil_Dry_P Parameter: Age (day) Value: 24
  misc_feature: MA Experiment 20001555 PARAMETER Experiment Name: At_Drought_Soil_Dry_P Parameter: Organism Value: A. thaliana
  misc_feature: MA Experiment 20001555 PARAMETER Experiment Name: At_Drought_Soil_Dry_P Parameter: Plant Line Value: WS
  misc_feature: MA Experiment 20001555 PARAMETER Experiment Name: At_Drought_Soil_Dry_P Parameter: Post Timepoint (hr) Value: None
  misc_feature: MA Experiment 20001555 PARAMETER Experiment Name: At_Drought_Soil_Dry_P Parameter: Post-Treatment Value: None
  misc_feature: MA Experiment 20001555 PARAMETER Experiment Name: At_Drought_Soil_Dry_P Parameter: Timepoint (day) Value: 10
  misc_feature: MA Experiment 20001555 PARAMETER Experiment Name: At_Drought_Soil_Dry_P Parameter: Treatment Value: Drought vs. No Drought
atggagtttgttacagaaacgttaggcaagagaatccatgatccgtacgtggaggaaactaggtgcttaatgattcccggaccaatcattgtcggttccgggccgtcgggactggccacagcggcatgtttaaagtcgagagacatccctagtttgattctagaacgttccacttgcatagcgtcactatggcagcacaaaacatatgatcgtcttcgacttcatctccctaaagatttctgtgagcttccattgatgccttttccttcaagctaccctacttaccctacaaagcaacagttcgtccaataccttgagtcttacgccgaacattttgacctaaagcccgtttttaaccagaccgtggaggaagccaagttcgataggcggtgtgggttatggagggtgaggacaaccggagggaagaaggatgagacaatggagtatgtatcacggtggcttgttgtggcgaccggggagaatgccgaggaggtgatgccggagattgatggaatcccggattttggtggacctatcctccacacaagctcctataagagcggtgaaatatttagtgagaagaagattttggttgtaggatgtggaaactccgggatggaagtttgtttagacctttgcaacttcaatgctcttccttctcttgtggttcgtgactcggtacacgtattacctcaagaaatgctaggtatatcgactttcgggatatccacgagcctgctcaagtggtttccagtgcacgtggtggaccggttcttgttacgtatgtctcggttggttcttggtgacacggatcggttagggttagttcgaccaaaacttggccctcttgaacgcaagatcaaatgcggaaagactcctgttttggacgttggcactcttgccaaaatccgaagtggacacatcaaggtgtatccggagttgaaacgggtaatgcattattcggcagagtttgttgatgggagagtagataacttcgacgccattatactcgccacgggttacaaaagcaacgtacccatgtggctaaagggagtgaacatgttttctgagaaagatggatttccgcataaaccatttcctaacggttggaaaggcgaaagcggattgtatgcagtcggtttcacaaagcttggattgcttggtgcagccattgatgccaagaagatcgctgaggatattgaggttcaacgacatttcttaccattggctcgtcctcaacattgttaattaacctgagattcgggtttcgatttggc

SEQ ID NO: 82262 - protein, 415 aa, Arabidopsis thaliana
  peptide (1)..(415): Ceres Seq. ID no. 12664740
  misc_feature (27)..(377): Pfam Name: Pyridine nucleotide-disulphide oxidoreductase Pfam Description: Pyridine nucleotide-disulphide oxidoreductase
  misc_feature (1)..(415): Homolog of NCBI NO: 15235652 NR Description: putative protein; protein id: At4g13260.1
  misc_feature (6)..(400): Homolog of NCBI NO: 22327064 NR Description: putative protein; protein id: At5g25620.1, by cDNA: gi_17528989, supported by cDNA: gi_21280978 [Arabidopsis >gi|17528990|gb|AAL38705.1| unknown protein [Arabidopsis
  misc_feature (10)..(403): Homolog of NCBI NO: 34910176 NR Description: putative dimethylaniline monooxygenase [Oryza
  misc_feature (18)..(403): Homolog of NCBI NO: 15239020 NR Description: putative protein; protein id: At5g11320.1 thaliana] >gi|8953394|emb|CAB96667.1| putative protein
  misc_feature (14)..(400): Homolog of NCBI NO: 15219671 NR Description: putative dimethylaniline monooxygenase; protein At1g04180.1 [Arabidopsis thaliana] >gi|7485875|pir||T00955
  misc_feature (19)..(400): Homolog of NCBI NO: 15010541 NR Description: flavin monoxygenase-like protein floozy [Petunia
  misc_feature (21)..(400): Homolog of NCBI NO: 33147034 NR Description: putative dimethylaniline monooxygenase [Oryza
  misc_feature (21)..(400): Homolog of NCBI NO: 15219767 NR Description: putative dimethylaniline monooxygenase; protein At1g04610.1 [Arabidopsis thaliana] >gi|25406796|pir||G86178
  misc_feature (18)..(400): Homolog of NCBI NO: 15240026 NR Description: dimethylaniline monooxygenase-like; protein id: [Arabidopsis thaliana] >gi|8953750|dbj|BAA98069.1|
  misc_feature (21)..(400): Homolog of NCBI NO: 15225816 NR Description: putative flavin-containing monooxygenase; protein
MEFVTETLGKRIHDPYVEETRCLMIPGPIIVGSGPSGLATAACLKSRDIPSLILERSTCIASLWQHKTYDRLRLHLPKDFCELPLMPFPSSYPTYPTKQQFVQYLESYAEHFDLKPVFNQTVEEAKFDRRCGLWRVRTTGGKKDETMEYVSRWLVVATGENAEEVMPEIDGIPDFGGPILHTSSYKSGEIFSEKKILVVGCGNSGMEVCLDLCNFNALPSLVVRDSVHVLPQEMLGISTFGISTSLLKWFPVHVVDRFLLRMSRLVLGDTDRLGLVRPKLGPLERKIKCGKTPVLDVGTLAKIRSGHIKVYPELKRVMHYSAEFVDGRVDNFDAIILATGYKSNVPMWLKGVNMFSEKDGFPHKPFPNGWKGESGLYAVGFTKLGLLGAAIDAKKIAEDIEVQRHFLPLARPQHC

SEQ ID NO: 82263 - protein, 392 aa, Arabidopsis thaliana
  peptide (1)..(392): Ceres Seq. ID no. 12664741
  misc_feature (4)..(354): Pfam Name: Pyridine nucleotide-disulphide oxidoreductase Pfam Description: Pyridine nucleotide-disulphide oxidoreductase
  misc_feature (1)..(392): Homolog of NCBI NO: 15235652 NR Description: putative protein; protein id: At4g13260.1
  misc_feature (1)..(377): Homolog of NCBI NO: 22327064 NR Description: putative protein; protein id: At5g25620.1, by cDNA: gi_17528989, supported by cDNA: gi_21280978 [Arabidopsis >gi|17528990|gb|AAL38705.1| unknown protein [Arabidopsis
  misc_feature (1)..(380): Homolog of NCBI NO: 34910176 NR Description: putative dimethylaniline monooxygenase [Oryza
  misc_feature (1)..(380): Homolog of NCBI NO: 15239020 NR Description: putative protein; protein id: At5g11320.1 thaliana] >gi|8953394|emb|CAB96667.1| putative protein
  misc_feature (1)..(377): Homolog of NCBI NO: 15219671 NR Description: putative dimethylaniline monooxygenase; protein At1g04180.1 [Arabidopsis thaliana] >gi|7485875|pir||T00955
  misc_feature (1)..(377): Homolog of NCBI NO: 15010541 NR Description: flavin monoxygenase-like protein floozy [Petunia
  misc_feature (1)..(377): Homolog of NCBI NO: 33147034 NR Description: putative dimethylaniline monooxygenase [Oryza
  misc_feature (1)..(377): Homolog of NCBI NO: 15219767 NR Description: putative dimethylaniline monooxygenase; protein At1g04610.1 [Arabidopsis thaliana] >gi|25406796|pir||G86178
  misc_feature (1)..(377): Homolog of NCBI NO: 15240026 NR Description: dimethylaniline monooxygenase-like; protein id: [Arabidopsis thaliana] >gi|8953750|dbj|BAA98069.1|
  misc_feature (1)..(377): Homolog of NCBI NO: 15225816 NR Description: putative flavin-containing monooxygenase; protein
MIPGPIIVGSGPSGLATAACLKSRDIPSLILERSTCIASLWQHKTYDRLRLHLPKDFCELPLMPFPSSYPTYPTKQQFVQYLESYAEHFDLKPVFNQTVEEAKFDRRCGLWRVRTTGGKKDETMEYVSRWLVVATGENAEEVMPEIDGIPDFGGPILHTSSYKSGEIFSEKKILVVGCGNSGMEVCLDLCNFNALPSLVVRDSVHVLPQEMLGISTFGISTSLLKWFPVHVVDRFLLRMSRLVLGDTDRLGLVRPKLGPLERKIKCGKTPVLDVGTLAKIRSGHIKVYPELKRVMHYSAEFVDGRVDNFDAIILATGYKSNVPMWLKGVNMFSEKDGFPHKPFPNGWKGESGLYAVGFTKLGLLGAAIDAKKIAEDIEVQRHFLPLARPQHC

SEQ ID NO: 82264 - protein, 330 aa, Arabidopsis thaliana
  peptide (1)..(330): Ceres Seq. ID no. 12664742
  misc_feature (1)..(292): Pfam Name: Pyridine nucleotide-disulphide oxidoreductase Pfam Description: Pyridine nucleotide-disulphide oxidoreductase
  misc_feature (1)..(330): Homolog of NCBI NO: 15235652 NR Description: putative protein; protein id: At4g13260.1
  misc_feature (1)..(315): Homolog of NCBI NO: 22327064 NR Description: putative protein; protein id: At5g25620.1, by cDNA: gi_17528989, supported by cDNA: gi_21280978 [Arabidopsis >gi|17528990|gb|AAL38705.1| unknown protein [Arabidopsis
  misc_feature (1)..(318): Homolog of NCBI NO: 34910176 NR Description: putative dimethylaniline monooxygenase [Oryza
  misc_feature (1)..(318): Homolog of NCBI NO: 15239020 NR Description: putative protein; protein id: At5g11320.1 thaliana] >gi|8953394|emb|CAB96667.1| putative protein
  misc_feature (1)..(315): Homolog of NCBI NO: 15219671 NR Description: putative dimethylaniline monooxygenase; protein At1g04180.1 [Arabidopsis thaliana] >gi|7485875|pir||T00955
  misc_feature (1)..(315): Homolog of NCBI NO: 15010541 NR Description: flavin monoxygenase-like protein floozy [Petunia
  misc_feature (1)..(315): Homolog of NCBI NO: 33147034 NR Description: putative dimethylaniline monooxygenase [Oryza
  misc_feature (1)..(315): Homolog of NCBI NO: 15219767 NR Description: putative dimethylaniline monooxygenase; protein At1g04610.1 [Arabidopsis thaliana] >gi|25406796|pir||G86178
  misc_feature (1)..(315): Homolog of NCBI NO: 15240026 NR Description: dimethylaniline monooxygenase-like; protein id: [Arabidopsis thaliana] >gi|8953750|dbj|BAA98069.1|
  misc_feature (1)..(315): Homolog of NCBI NO: 15225816 NR Description: putative flavin-containing monooxygenase; protein
MPFPSSYPTYPTKQQFVQYLESYAEHFDLKPVFNQTVEEAKFDRRCGLWRVRTTGGKKDETMEYVSRWLVVATGENAEEVMPEIDGIPDFGGPILHTSSYKSGEIFSEKKILVVGCGNSGMEVCLDLCNFNALPSLVVRDSVHVLPQEMLGISTFGISTSLLKWFPVHVVDRFLLRMSRLVLGDTDRLGLVRPKLGPLERKIKCGKTPVLDVGTLAKIRSGHIKVYPELKRVMHYSAEFVDGRVDNFDAIILATGYKSNVPMWLKGVNMFSEKDGFPHKPFPNGWKGESGLYAVGFTKLGLLGAAIDAKKIAEDIEVQRHFLPLARPQHC

SEQ ID NO: 82265 - DNA, 1504 bp, Arabidopsis thaliana
  misc_feature (1)..(1504): Ceres Seq. ID no. 12664747
  misc_feature: MA Experiment ID: 20000171 Result: Up-regulated in Transcription
  misc_feature: MA Experiment 20000171 PARAMETER Experiment Name: At_42deg_Heat_P Parameter: Age (day) Value: 14
  misc_feature: MA Experiment 20000171 PARAMETER Experiment Name: At_42deg_Heat_P Parameter: Organism Value: A. thaliana
  misc_feature: MA Experiment 20000171 PARAMETER Experiment Name: At_42deg_Heat_P Parameter: Plant Line Value: WS
  misc_feature: MA Experiment 20000171 PARAMETER Experiment Name: At_42deg_Heat_P Parameter: Temperature (deg C) Value: 42 vs. 22
  misc_feature: MA Experiment 20000171 PARAMETER Experiment Name: At_42deg_Heat_P Parameter: Timepoint (hr) Value: 1
  misc_feature: MA Experiment 20000171 PARAMETER Experiment Name: At_42deg_Heat_P Parameter: Tissue Value: Aerial
  misc_feature: MA Experiment ID: 20000227 Result: Down-regulated in Transcription
  misc_feature: MA Experiment 20000227 PARAMETER Experiment Name: At_Root-Tips-vs-Tops_P Parameter: Tissue Value: Root Tips vs. Root Tops
  misc_feature: MA Experiment ID: 20000269 Result: Down-regulated in Transcription
  misc_feature: MA Experiment 20000269 PARAMETER Experiment Name: At_1mM_KNO3_L-vs-H_Roots_P Parameter: Age (day) Value: 7,10,12
  misc_feature: MA Experiment 20000269 PARAMETER Experiment Name: At_1mM_KNO3_L-vs-H_Roots_P Parameter: Organism Value: A. thaliana
  misc_feature: MA Experiment 20000269 PARAMETER Experiment Name: At_1mM_KNO3_L-vs-H_Roots_P Parameter: Plant Line Value: WS
  misc_feature: MA Experiment 20000269 PARAMETER Experiment Name: At_1mM_KNO3_L-vs-H_Roots_P Parameter: Timepoint (day) Value: 7,10,12
  misc_feature: MA Experiment 20000269 PARAMETER Experiment Name: At_1mM_KNO3_L-vs-H_Roots_P Parameter: Tissue Value: Roots
  misc_feature: MA Experiment 20000269 PARAMETER Experiment Name: At_1mM_KNO3_L-vs-H_Roots_P Parameter: Treatment Value: 1mM KNO3 vs. 50mM KNO3
  misc_feature: MA Experiment ID: 20000437 Result: Up-regulated in Transcription
  misc_feature: MA Experiment 20000437 PARAMETER Experiment Name: At_Drought_P Parameter: Age (day) Value: 8
  misc_feature: MA Experiment 20000437 PARAMETER Experiment Name: At_Drought_P Parameter: Organism Value: A. thaliana
  misc_feature: MA Experiment 20000437 PARAMETER Experiment Name: At_Drought_P Parameter: Plant Line Value: WS
  misc_feature: MA Experiment 20000437 PARAMETER Experiment Name: At_Drought_P Parameter: Timepoint (hr) Value: 24
  misc_feature: MA Experiment 20000437 PARAMETER Experiment Name: At_Drought_P Parameter: Tissue Value: Whole Plant
  misc_feature: MA Experiment 20000437 PARAMETER Experiment Name: At_Drought_P Parameter: Treatment Value: Drought vs. No Drought
  misc_feature: MA Experiment ID: 20001451 Result: Up-regulated in Transcription
  misc_feature: MA Experiment 20001451 PARAMETER Experiment Name: At_Far-red-induction_P Parameter: Age (day) Value: 7
  misc_feature: MA Experiment 20001451 PARAMETER Experiment Name: At_Far-red-induction_P Parameter: Light Value: Far-red vs. White
  misc_feature: MA Experiment 20001451 PARAMETER Experiment Name: At_Far-red-induction_P Parameter: Organism Value: A. thaliana
  misc_feature: MA Experiment 20001451 PARAMETER Experiment Name: At_Far-red-induction_P Parameter: Plant Line Value: Columbia
  misc_feature: MA Experiment 20001451 PARAMETER Experiment Name: At_Far-red-induction_P Parameter: Timepoint (hr) Value: 24
  misc_feature: MA Experiment 20001451 PARAMETER Experiment Name: At_Far-red-induction_P Parameter: Tissue Value: Whole Plant
atggaaataatattagtcactttgtgcttaacaacgctccttgcacttcttctccttaaatccatcctcaaaagaaccaccacgaacaatcttaacctaccaccatctccatggcgacttcccgtgatcggaaacctccaccagctcagcctcaatactcaccgttctctccgttccctaagtctccgatatggaccactcatgctccttcatttcggccgcacaccagtccttatagtctcctcagccgacgttgctcatgacatcttgaagacgtacgatgttatttgtgccaaccgcccaaaaacaaaagtgattgataaaattttgagaggtggcagagatgtggcttttgccccttacggagaatattggaaacaaatgaagagtatttgcattcagaatctactcagcaacaaaatggtccggtcttacaagaagataagagaagacgagataaaactaatgatagaaaaagtggaaaatgcgagttcttgttctcctccctcaccagtaaatctaagccaactctttatgactttgacaaacgatataatatgtagagctgccttgggaagaaaatatagcagcaaggaagatggaattgatgttgagaacatagttagggcattttccgcactcgtgggtgaatttcctatcggcgaatacattcctagtttgtcgtggatcgataaaatccgcggtcaggatcataaaatggaggaagtagataaaagatttgatgagtttttggaaagagtcgtaaaagaacatgaagatgccaataaagacaccagatcggacttggttgatacgttactaacgatccaaagtgataagagtgccttaaaacttataatatgggatatgtttttagcgggaacggcaacaagtctctcgtttcttgaatgggcaatgacagagcttatgagaaatcctaaggtcatgaagaaactccaagaagagattcgttcgagttcacgacaaggtttatttgtaacggagaaagaagctgagaagatggattatttgcaagcagttattaaggaggctttacggttgcgtcctcctgctccactaatggttccacgagtatttagtgaagatgtcacgttaaagggatacaatattcctgcaggaacacaggttataatcaatgcttgggcaatccaacgagatactacaacatgggggatagatgcagaagagtttaggccagaaaggcatttagactctattttggattttcagggacaagatttcaaatttattccattcggatcgggaaaaaggatatgtcctgggataggattcacatcggcattgatcggggtgacattggccaatatcgtgaaacggttcaactggagaatggatgtggaaccacaaagggttcaacatgacctaaccgaagcaaccggtctcgtggttttccgcaaattccctcttattgctattccatcttctgcttgattcctcgtgtcaacacttgtctctctcttgg

SEQ ID NO: 82266 - protein, 490 aa, Arabidopsis thaliana
  peptide (1)..(490): Ceres Seq. ID no. 12664748
  misc_feature (1)..(490): Homolog of NCBI NO: 15235661 NR Description: cytochrome p450 family; protein id: At4g13290.1
  misc_feature (1)..(490): Homolog of NCBI NO: 15238664 NR Description: cytochrome P450-like protein; protein id: [Arabidopsis thaliana] >gi|13878366|sp|P58045|C71E_ARATH
  misc_feature (1)..(489): Homolog of NCBI NO: 15224570 NR Description: cytochrome p450 family; protein id: At2g30770.1
  misc_feature (1)..(490): Homolog of NCBI NO: 15238652 NR Description: cytochrome p450 family; protein id: At5g24950.1
  misc_feature (1)..(489): Homolog of NCBI NO: 13878362 NR Description: Cytochrome P450 71A12 >gi|25282591|pir||C84712
  misc_feature (1)..(489): Homolog of NCBI NO: 30684709 NR Description: cytochrome p450 71A12 [Arabidopsis thaliana] At2g30750/T11J7.14 [Arabidopsis thaliana]
  misc_feature (1)..(490): Homolog of NCBI NO: 15239008 NR Description: cytochrome p450, putative; protein id: [Arabidopsis thaliana] >gi|13878374|sp|Q9FH66|C71G_ARATH P450 71A16 >gi|9759017|dbj|BAB09330.1| cytochrome P450
  misc_feature (1)..(490): Homolog of NCBI NO: 21542394 NR Description: Cytochrome P450 71A27
  misc_feature (1)..(489): Homolog of NCBI NO: 22329490 NR Description: cytochrome P450, putative; protein id: [Arabidopsis thaliana] >gi|13878394|sp|Q9SAB6|C71I_ARATH
  misc_feature (3)..(490): Homolog of NCBI NO: 13878368 NR Description: CYTOCHROME P450 71A28
MEIILVTLCLTTLLALLLLKSILKRTTTNNLNLPPSPWRLPVIGNLHQLSLNTHRSLRSLSLRYGPLMLLHFGRTPVLIVSSADVAHDILKTYDVICANRPKTKVIDKILRGGRDVAFAPYGEYWKQMKSICIQNLLSNKMVRSYKKIREDEIKLMIEKVENASSCSPPSPVNLSQLFMTLTNDIICRAALGRKYSSKEDGIDVENIVRAFSALVGEFPIGEYIPSLSWIDKIRGQDHKMEEVDKRFDEFLERVVKEHEDANKDTRSDLVDTLLTIQSDKSALKLIIWDMFLAGTATSLSFLEWAMTELMRNPKVMKKLQEEIRSSSRQGLFVTEKEAEKMDYLQAVIKEALRLRPPAPLMVPRVFSEDVTLKGYNIPAGTQVIINAWAIQRDTTTWGIDAEEFRPERHLDSILDFQGQDFKFIPFGSGKRICPGIGFTSALIGVTLANIVKRFNWRMDVEPQRVQHDLTEATGLVVFRKFPLIAIPSSA

SEQ ID NO: 82267 - protein, 423 aa, Arabidopsis thaliana
  peptide (1)..(423): Ceres Seq. ID no. 12664749
  misc_feature (1)..(423): Homolog of NCBI NO: 15235661 NR Description: cytochrome p450 family; protein id: At4g13290.1
  misc_feature (1)..(423): Homolog of NCBI NO: 15238664 NR Description: cytochrome P450-like protein; protein id: [Arabidopsis thaliana] >gi|13878366|sp|P58045|C71E_ARATH
  misc_feature (1)..(422): Homolog of NCBI NO: 15224570 NR Description: cytochrome p450 family; protein id: At2g30770.1
  misc_feature (1)..(423): Homolog of NCBI NO: 15238652 NR Description: cytochrome p450 family; protein id: At5g24950.1
  misc_feature (1)..(422): Homolog of NCBI NO: 13878362 NR Description: Cytochrome P450 71A12 >gi|25282591|pir||C84712
  misc_feature (1)..(422): Homolog of NCBI NO: 30684709 NR Description: cytochrome p450 71A12 [Arabidopsis thaliana] At2g30750/T11J7.14 [Arabidopsis thaliana]
  misc_feature (1)..(423): Homolog of NCBI NO: 15239008 NR Description: cytochrome p450, putative; protein id: [Arabidopsis thaliana] >gi|13878374|sp|Q9FH66|C71G_ARATH P450 71A16 >gi|9759017|dbj|BAB09330.1| cytochrome P450
  misc_feature (1)..(423): Homolog of NCBI NO: 21542394 NR Description: Cytochrome P450 71A27
  misc_feature (1)..(422): Homolog of NCBI NO: 22329490 NR Description: cytochrome P450, putative; protein id: [Arabidopsis thaliana] >gi|13878394|sp|Q9SAB6|C71I_ARATH
  misc_feature (1)..(423): Homolog of NCBI NO: 13878368 NR Description: CYTOCHROME P450 71A28
MLLHFGRTPVLIVSSADVAHDILKTYDVICANRPKTKVIDKILRGGRDVAFAPYGEYWKQMKSICIQNLLSNKMVRSYKKIREDEIKLMIEKVENASSCSPPSPVNLSQLFMTLTNDIICRAALGRKYSSKEDGIDVENIVRAFSALVGEFPIGEYIPSLSWIDKIRGQDHKMEEVDKRFDEFLERVVKEHEDANKDTRSDLVDTLLTIQSDKSALKLIIWDMFLAGTATSLSFLEWAMTELMRNPKVMKKLQEEIRSSSRQGLFVTEKEAEKMDYLQAVIKEALRLRPPAPLMVPRVFSEDVTLKGYNIPAGTQVIINAWAIQRDTTTWGIDAEEFRPERHLDSILDFQGQDFKFIPFGSGKRICPGIGFTSALIGVTLANIVKRFNWRMDVEPQRVQHDLTEATGLVVFRKFPLIAIPSSA

SEQ ID NO: 82268 - protein, 363 aa, Arabidopsis thaliana
  peptide (1)..(363): Ceres Seq. ID no. 12664750
  misc_feature (1)..(363): Homolog of NCBI NO: 15235661 NR Description: cytochrome p450 family; protein id: At4g13290.1
  misc_feature (1)..(363): Homolog of NCBI NO: 15238664 NR Description: cytochrome P450-like protein; protein id: [Arabidopsis thaliana] >gi|13878366|sp|P58045|C71E_ARATH
  misc_feature (1)..(362): Homolog of NCBI NO: 15224570 NR Description: cytochrome p450 family; protein id: At2g30770.1
  misc_feature (1)..(363): Homolog of NCBI NO: 15238652 NR Description: cytochrome p450 family; protein id: At5g24950.1
  misc_feature (1)..(362): Homolog of NCBI NO: 13878362 NR Description: Cytochrome P450 71A12 >gi|25282591|pir||C84712
  misc_feature (1)..(362): Homolog of NCBI NO: 30684709 NR Description: cytochrome p450 71A12 [Arabidopsis thaliana] At2g30750/T11J7.14 [Arabidopsis thaliana]
  misc_feature (1)..(363): Homolog of NCBI NO: 15239008 NR Description: cytochrome p450, putative; protein id: [Arabidopsis thaliana] >gi|13878374|sp|Q9FH66|C71G_ARATH P450 71A16 >gi|9759017|dbj|BAB09330.1| cytochrome P450
  misc_feature (1)..(363): Homolog of NCBI NO: 21542394 NR Description: Cytochrome P450 71A27
  misc_feature (1)..(362): Homolog of NCBI NO: 22329490 NR Description: cytochrome P450, putative; protein id: [Arabidopsis thaliana] >gi|13878394|sp|Q9SAB6|C71I_ARATH
  misc_feature (1)..(363): Homolog of NCBI NO: 13878368 NR Description: CYTOCHROME P450 71A28
MKSICIQNLLSNKMVRSYKKIREDEIKLMIEKVENASSCSPPSPVNLSQLFMTLTNDIICRAALGRKYSSKEDGIDVENIVRAFSALVGEFPIGEYIPSLSWIDKIRGQDHKMEEVDKRFDEFLERVVKEHEDANKDTRSDLVDTLLTIQSDKSALKLIIWDMFLAGTATSLSFLEWAMTELMRNPKVMKKLQEEIRSSSRQGLFVTEKEAEKMDYLQAVIKEALRLRPPAPLMVPRVFSEDVTLKGYNIPAGTQVIINAWAIQRDTTTWGIDAEEFRPERHLDSILDFQGQDFKFIPFGSGKRICPGIGFTSALIGVTLANIVKRFNWRMDVEPQRVQHDLTEATGLVVFRKFPLIAIPSSA

SEQ ID NO: 82269 - DNA, 817 bp, Arabidopsis thaliana
  misc_feature (1)..(817): Ceres Seq. ID no. 12664775
  misc_feature: MA Experiment ID: 20000437 Result: Up-regulated in Transcription
  misc_feature: MA Experiment 20000437 PARAMETER Experiment Name: At_Drought_P Parameter: Age (day) Value: 8
  misc_feature: MA Experiment 20000437 PARAMETER Experiment Name: At_Drought_P Parameter: Organism Value: A. thaliana
  misc_feature: MA Experiment 20000437 PARAMETER Experiment Name: At_Drought_P Parameter: Plant Line Value: WS
  misc_feature: MA Experiment 20000437 PARAMETER Experiment Name: At_Drought_P Parameter: Timepoint (hr) Value: 24
  misc_feature: MA Experiment 20000437 PARAMETER Experiment Name: At_Drought_P Parameter: Tissue Value: Whole Plant
  misc_feature: MA Experiment 20000437 PARAMETER Experiment Name: At_Drought_P Parameter: Treatment Value: Drought vs. No Drought
  misc_feature: MA Experiment ID: 20000575 Result: Up-regulated in Transcription
  misc_feature: MA Experiment 20000575 PARAMETER Experiment Name: At_100uM_ABA_Mutants__P Parameter: Organism Value: A. thaliana
  misc_feature: MA Experiment 20000575 PARAMETER Experiment Name: At_100uM_ABA_Mutants__P Parameter: Plant Line Value: CS22
  misc_feature: MA Experiment 20000575 PARAMETER Experiment Name: At_100uM_ABA_Mutants__P Parameter: Timepoint (hr) Value: 6
  misc_feature: MA Experiment 20000575 PARAMETER Experiment Name: At_100uM_ABA_Mutants__P Parameter: Tissue Value: Whole Plant
  misc_feature: MA Experiment 20000575 PARAMETER Experiment Name: At_100uM_ABA_Mutants__P Parameter: Treatment Value: 1uM ABA vs. No Treatment
  misc_feature: MA Experiment ID: 20001904 Result: Up-regulated in Transcription
  misc_feature: MA Experiment 20001904 PARAMETER Experiment Name: At_Drought_Reproduction_P Parameter: Age (day) Value: 37
  misc_feature: MA Experiment 20001904 PARAMETER Experiment Name: At_Drought_Reproduction_P Parameter: Organism Value: A. thaliana
  misc_feature: MA Experiment 20001904 PARAMETER Experiment Name: At_Drought_Reproduction_P Parameter: Plant Line Value: WS
  misc_feature: MA Experiment 20001904 PARAMETER Experiment Name: At_Drought_Reproduction_P Parameter: Timepoint (day) Value: 7
  misc_feature: MA Experiment 20001904 PARAMETER Experiment Name: At_Drought_Reproduction_P Parameter: Tissue Value: Rosettes
  misc_feature: MA Experiment 20001904 PARAMETER Experiment Name: At_Drought_Reproduction_P Parameter: Treatment Value: Drought vs. No Drought
atggtggaagaagtttggagaaagggtccatggaccgccgaagaagaccgtcttttgatcgaatacgtccgtgttcacggtgaaggtcgttggaactctgtctctaaactcgcaggattgaaaaggaatggcaaaagctgcagactaagatgggtgaattaccttagaccagacctcaagagaggacagatcactccacatgaagaaagtataatacttgagctacacgctaagtggggaaataggtggtcaacaattgcacgtagtttaccaggaagaacagacaatgagatcaagaactattggagaacccatttcaagaaaaaggcaaagcctacgactaacaatgcggagaagataaagagtcgtctcctaaaaaggcaacacttcaaggaacagagagaaatagagttgcaacaagaacagcagttgtttcagttcgaccaactcggtatgaaaaagatcatctctttactcgaagaaaacaatagcagtagcagtagcgatggcggtggtgatgtgttctattatcctgatcaaataacacattcatcaaaaccctttggctataactctaattcattagaggagcagttacaaggtagattttctcctgtaaacatacctgatgctaatactatgaacgaagacaatgccatatgggacgggttttggaacatggatgttgtaaatggacatggtgggaacttgggtgttgtggctgctactgctgcttgtggcccaaggaagccctatttccataacttggtgattccattttgttaagtatggtctacttttggacttcggttttctg

SEQ ID NO: 82270 - protein, 261 aa, Arabidopsis thaliana
  peptide (1)..(261): Ceres Seq. ID no. 12664776
  misc_feature (8)..(55): Pfam Name: Myb-like DNA-binding domain Pfam Description: Myb-like DNA-binding domain
  misc_feature (1)..(261): Homolog of NCBI NO: 15236297 NR Description: myb family transcription factor; protein id:
  misc_feature (1)..(261): Homolog of NCBI NO: 15230095 NR Description: myb family transcription factor; protein id:
  misc_feature (70)..(261): Homolog of NCBI NO: 11358556 NR Description: myb-related transcription factor MYB71 [imported] Arabidopsis thaliana (fragment) >gi|3941500|gb|AAC83626.1|
  misc_feature (1)..(111): Homolog of NCBI NO: 1732513 NR Description: snapdragon myb protein 305 homolog [Arabidopsis
  misc_feature (7)..(181): Homolog of NCBI NO: 15230123 NR Description: myb-like transcription factor, putative; protein At3g30210.1, supported by cDNA: gi_15375302 [Arabidopsis
  misc_feature (7)..(193): Homolog of NCBI NO: 7438338 NR Description: Myb26 protein - garden pea
  misc_feature (7)..(181): Homolog of NCBI NO: 18401993 NR Description: myb family transcription factor; protein id: supported by cDNA: gi_15375307 [Arabidopsis thaliana]
  misc_feature (7)..(181): Homolog of NCBI NO: 25294098 NR Description: hypothetical protein T2J15.9 [imported] -
  misc_feature (7)..(111): Homolog of NCBI NO: 19073328 NR Description: typical P-type R2R3 Myb protein [Sorghum bicolor]
  misc_feature (1)..(111): Homolog of NCBI NO: 11358547 NR Description: myb-related transcription factor MYB59 [imported] Arabidopsis thaliana >gi|3941480|gb|AAC83616.1| putative
MVEEVWRKGPWTAEEDRLLIEYVRVHGEGRWNSVSKLAGLKRNGKSCRLRWVNYLRPDLKRGQITPHEESIILELHAKWGNRWSTIARSLPGRTDNEIKNYWRTHFKKKAKPTTNNAEKIKSRLLKRQHFKEQREIELQQEQQLFQFDQLGMKKIISLLEENNSSSSSDGGGDVFYYPDQITHSSKPFGYNSNSLEEQLQGRFSPVNIPDANTMNEDNAIWDGFWNMDVVNGHGGNLGVVAATAACGPRKPYFHNLVIPFC

SEQ ID NO: 82271 - DNA, 893 bp, Arabidopsis thaliana
  misc_feature (1)..(893): Ceres Seq. ID no. 12664781
  misc_feature: MA Experiment ID: 20000184 Result: Up-regulated in Transcription
  misc_feature: MA Experiment 20000184 PARAMETER Experiment Name: At_Shoots__P Parameter: Age (day) Value: 7
  misc_feature: MA Experiment 20000184 PARAMETER Experiment Name: At_Shoots__P Parameter: Tissue Value: Shoots vs. Whole Plant
  misc_feature: MA Experiment ID: 20000185 Result: Up-regulated in Transcription
  misc_feature: MA Experiment 20000185 PARAMETER Experiment Name: At_Roots__P Parameter: Age (day) Value: 7 vs. 21
  misc_feature: MA Experiment 20000185 PARAMETER Experiment Name: At_Roots__P Parameter: Organism Value: A. thaliana
  misc_feature: MA Experiment 20000185 PARAMETER Experiment Name: At_Roots__P Parameter: Tissue Value: Roots vs. Whole Plant
  misc_feature: MA Experiment ID: 20000227 Result: Up-regulated in Transcription
  misc_feature: MA Experiment 20000227 PARAMETER Experiment Name: At_Root-Tips-vs-Tops_P Parameter: Tissue Value: Root Tips vs. Root Tops
  misc_feature: MA Experiment ID: 20000267 Result: Down-regulated in Transcription
  misc_feature: MA Experiment 20000267 PARAMETER Experiment Name: At_Drought_P Parameter: Age (day) Value: 7
  misc_feature: MA Experiment 20000267 PARAMETER Experiment Name: At_Drought_P Parameter: Organism Value: A. thaliana
  misc_feature: MA Experiment 20000267 PARAMETER Experiment Name: At_Drought_P Parameter: Plant Line Value: WS
  misc_feature: MA Experiment 20000267 PARAMETER Experiment Name: At_Drought_P Parameter: Timepoint (hr) Value: 6
  misc_feature: MA Experiment 20000267 PARAMETER Experiment Name: At_Drought_P Parameter: Tissue Value: Whole Plant
  misc_feature: MA Experiment 20000267 PARAMETER Experiment Name: At_Drought_P Parameter: Treatment Value: Drought vs. No Drought
  misc_feature: MA Experiment ID: 20000437 Result: Down-regulated in Transcription
  misc_feature: MA Experiment 20000437 PARAMETER Experiment Name: At_Drought_P Parameter: Age (day) Value: 8
  misc_feature: MA Experiment 20000437 PARAMETER Experiment Name: At_Drought_P Parameter: Organism Value: A. thaliana
  misc_feature: MA Experiment 20000437 PARAMETER Experiment Name: At_Drought_P Parameter: Plant Line Value: WS
  misc_feature: MA Experiment 20000437 PARAMETER Experiment Name: At_Drought_P Parameter: Timepoint (hr) Value: 24
  misc_feature: MA Experiment 20000437 PARAMETER Experiment Name: At_Drought_P Parameter: Tissue Value: Whole Plant
  misc_feature: MA Experiment 20000437 PARAMETER Experiment Name: At_Drought_P Parameter: Treatment Value: Drought vs. No Drought
  misc_feature: MA Experiment ID: 20000438 Result: Up-regulated in Transcription
  misc_feature: MA Experiment 20000438 PARAMETER Experiment Name: At_Shoots__P Parameter: Age (day) Value: 14
  misc_feature: MA Experiment 20000438 PARAMETER Experiment Name: At_Shoots__P Parameter: Tissue Value: Shoots vs. Whole Plant
  misc_feature: MA Experiment ID: 20000439 Result: Up-regulated in Transcription
  misc_feature: MA Experiment 20000439 PARAMETER Experiment Name: At_Roots__P Parameter: Age (day) Value: 14 vs. 21
  misc_feature: MA Experiment 20000439 PARAMETER Experiment Name: At_Roots__P Parameter: Organism Value: A. thaliana
  misc_feature: MA Experiment 20000439 PARAMETER Experiment Name: At_Roots__P Parameter: Tissue Value: Roots vs. Whole Plant
  misc_feature: MA Experiment ID: 20000573 Result: Down-regulated in Transcription
  misc_feature: MA Experiment 20000573 PARAMETER Experiment Name: At_100uM_ABA_Mutants__P Parameter: Organism Value: A. thaliana
  misc_feature: MA Experiment 20000573 PARAMETER Experiment Name: At_100uM_ABA_Mutants__P Parameter: Plant Line Value: CS22 vs. Ler wt
  misc_feature: MA Experiment 20000573 PARAMETER Experiment Name: At_100uM_ABA_Mutants__P Parameter: Timepoint (hr) Value: N/A
  misc_feature: MA Experiment 20000573 PARAMETER Experiment Name: At_100uM_ABA_Mutants__P Parameter: Tissue Value: Whole Plant
  misc_feature: MA Experiment 20000573 PARAMETER Experiment Name: At_100uM_ABA_Mutants__P Parameter: Treatment Value: None
  misc_feature: MA Experiment ID: 20001451 Result: Up-regulated in Transcription
  misc_feature: MA Experiment 20001451 PARAMETER Experiment Name: At_Far-red-induction_P Parameter: Age (day) Value: 7
  misc_feature: MA Experiment 20001451 PARAMETER Experiment Name: At_Far-red-induction_P Parameter: Light Value: Far-red vs. White
  misc_feature: MA Experiment 20001451 PARAMETER Experiment Name: At_Far-red-induction_P Parameter: Organism Value: A. thaliana
  misc_feature: MA Experiment 20001451 PARAMETER Experiment Name: At_Far-red-induction_P Parameter: Plant Line Value: Columbia
  misc_feature: MA Experiment 20001451 PARAMETER Experiment Name: At_Far-red-induction_P Parameter: Timepoint (hr) Value: 24
  misc_feature: MA Experiment 20001451 PARAMETER Experiment Name: At_Far-red-induction_P Parameter: Tissue Value: Whole Plant
aatctttcctacaaaacaaaaccaagaatcatacaaaacaagcatcctccaatatgatgaaacaatcaccattctcacttttaacatcaatctttctcatagctgctctttttactgcaactaccgcactcgatcctgcacccgaagacccgatttttgaattgtacatgcacgatatacttgggggaagcagtcccacagcaagacccattacgggtttgcttggaaacatctacaacggtcaagtaccgtttgctaagcagatcggttttgttccaccgcaaaacggtgtagccatacccaacgcaaatggggcaatgccaacggttaacggtatcaacggtattccattaggtactggtttgtctggaacagcgttttctggtcagaatctaaatgggattcagactcagttgggtcctgatggtctgagtcttgggtttggaacaatcacggtgattgacgacataatcacatctggtcctgacttggggtcacaaccacttggtaaggctcaaggtgtttatgttgccagctcagcagatggaagcacgcagatgatggctttcacagctatgcttgaaggtggagagtacaatgataatctaaatttctatggaatctataggataggaagcgccatgtcacatctgtcagtgactggaggaaccggaaggtttaagaacgcttgcggatttgcagaggttaggccgttgattcctgcgggccaacactttgttgatggagctgagatgctgttgaggatcattgtccatctgaaatactgagaattatgtttaaaacttgtgaatgaaatgtgtgtgaaatgtgtgatgccatttgtaattaagaatgtttccttcttgtgaattattccaacaactattctgaga

SEQ ID NO: 82272 - protein, 261 aa, Arabidopsis thaliana
  peptide (1)..(261): Ceres Seq. ID no. 12664782
  misc_feature (89)..(261): Pfam Name: Dirigent-like protein Pfam Description: Dirigent-like protein
  misc_feature (18)..(261): Homolog of NCBI NO: 15236315 NR Description: disease resistance response protein-related; id: At4g13580.1, supported by cDNA: gi_19698840 [Arabidopsis
  misc_feature (18)..(261): Homolog of NCBI NO: 15229564 NR Description: disease resistance response protein-related;
  misc_feature (18)..(223): Homolog of NCBI NO: 9294671 NR Description: contains similarity to disease resistance
  misc_feature (49)..(259): Homolog of NCBI NO: 27497202 NR Description: Putative disease resistance response protein
  misc_feature (49)..(261): Homolog of NCBI NO: 25407001 NR Description: hypothetical protein [imported] - Arabidopsis >gi|8439894|gb|AAF75080.1|AC007583_16 Contains similarity to resistance response protein from Pisum sativum gb|M18250. EST
  misc_feature (46)..(261): Homolog of NCBI NO: 15226923 NR Description: fibroin-related; protein id: At2g28670.1 thaliana] >gi|25408006|pir||G84687 probable disease resistance
  misc_feature (55)..(259): Homolog of NCBI NO: 34895944 NR Description: P0011G08.13 [Oryza sativa (japonica
  misc_feature (101)..(261): Homolog of NCBI NO: 15233217 NR Description: disease resistance response protein-related; id: At3g55230.1 [Arabidopsis thaliana] >gi|11282368|pir||T47662
  misc_feature (79)..(261): Homolog of NCBI NO: 15225466 NR Description: disease resistance response protein-related/
  misc_feature (127)..(239): Homolog of NCBI NO: 15218836 NR Description: disease resistance response protein-related/
SFLQNKTKNHTKQASSNMMKQSPFSLLTSIFLIAALFTATTALDPAPEDPIFELYMHDILGGSSPTARPITGLLGNIYNGQVPFAKQIGFVPPQNGVAIPNANGAMPTVNGINGIPLGTGLSGTAFSGQNLNGIQTQLGPDGLSLGFGTITVIDDIITSGPDLGSQPLGKAQGVYVASSADGSTQMMAFTAMLEGGEYNDNLNFYGIYRIGSAMSHLSVTGGTGRFKNACGFAEVRPLIPAGQHFVDGAEMLLRIIVHLKY

SEQ ID NO: 82273 - protein, 244 aa, Arabidopsis thaliana
  peptide (1)..(244): Ceres Seq. ID no. 12664783
  misc_feature (72)..(244): Pfam Name: Dirigent-like protein Pfam Description: Dirigent-like protein
  misc_feature (1)..(244): Homolog of NCBI NO: 15236315 NR Description: disease resistance response protein-related; id: At4g13580.1, supported by cDNA: gi_19698840 [Arabidopsis
  misc_feature (1)..(244): Homolog of NCBI NO: 15229564 NR Description: disease resistance response protein-related;
  misc_feature (1)..(206): Homolog of NCBI NO: 9294671 NR Description: contains similarity to disease resistance
  misc_feature (32)..(242): Homolog of NCBI NO: 27497202 NR Description: Putative disease resistance response protein
  misc_feature (32)..(244): Homolog of NCBI NO: 25407001 NR Description: hypothetical protein [imported] - Arabidopsis >gi|8439894|gb|AAF75080.1|AC007583_16 Contains similarity to resistance response protein from Pisum sativum gb|M18250. EST
  misc_feature (29)..(244): Homolog of NCBI NO: 15226923 NR Description: fibroin-related; protein id: At2g28670.1 thaliana] >gi|25408006|pir||G84687 probable disease resistance
  misc_feature (38)..(242): Homolog of NCBI NO: 34895944 NR Description: P0011G08.13 [Oryza sativa (japonica
  misc_feature (84)..(244): Homolog of NCBI NO: 15233217 NR Description: disease resistance response protein-related; id: At3g55230.1 [Arabidopsis thaliana] >gi|11282368|pir||T47662
  misc_feature (62)..(244): Homolog of NCBI NO: 15225466 NR Description: disease resistance response protein-related/
  misc_feature (110)..(222): Homolog of NCBI NO: 15218836 NR Description: disease resistance response protein-related/
MMKQSPFSLLTSIFLIAALFTATTALDPAPEDPIFELYMHDILGGSSPTARPITGLLGNIYNGQVPFAKQIGFVPPQNGVAIPNANGAMPTVNGINGIPLGTGLSGTAFSGQNLNGIQTQLGPDGLSLGFGTITVIDDIITSGPDLGSQPLGKAQGVYVASSADGSTQMMAFTAMLEGGEYNDNLNFYGIYRIGSAMSHLSVTGGTGRFKNACGFAEVRPLIPAGQHFVDGAEMLLRIIVHLKY

SEQ ID NO: 82274 - protein, 243 aa, Arabidopsis thaliana
  peptide (1)..(243): Ceres Seq. ID no. 12664784
  misc_feature (71)..(243): Pfam Name: Dirigent-like protein Pfam Description: Dirigent-like protein
  misc_feature (1)..(243): Homolog of NCBI NO: 15236315 NR Description: disease resistance response protein-related; id: At4g13580.1, supported by cDNA: gi_19698840 [Arabidopsis
  misc_feature (1)..(243): Homolog of NCBI NO: 15229564 NR Description: disease resistance response protein-related;
  misc_feature (1)..(205): Homolog of NCBI NO: 9294671 NR Description: contains similarity to disease resistance
  misc_feature (31)..(241): Homolog of NCBI NO: 27497202 NR Description: Putative disease resistance response protein
  misc_feature (31)..(243): Homolog of NCBI NO: 25407001 NR Description: hypothetical protein [imported] - Arabidopsis >gi|8439894|gb|AAF75080.1|AC007583_16 Contains similarity to resistance response protein from Pisum sativum gb|M18250. EST
  misc_feature (28)..(243): Homolog of NCBI NO: 15226923 NR Description: fibroin-related; protein id: At2g28670.1 thaliana] >gi|25408006|pir||G84687 probable disease resistance
  misc_feature (37)..(241): Homolog of NCBI NO: 34895944 NR Description: P0011G08.13 [Oryza sativa (japonica
  misc_feature (83)..(243): Homolog of NCBI NO: 15233217 NR Description: disease resistance response protein-related; id: At3g55230.1 [Arabidopsis thaliana] >gi|11282368|pir||T47662
  misc_feature (61)..(243): Homolog of NCBI NO: 15225466 NR Description: disease resistance response protein-related/
  misc_feature (109)..(221): Homolog of NCBI NO: 15218836 NR Description: disease resistance response protein-related/
MKQSPFSLLTSIFLIAALFTATTALDPAPEDPIFELYMHDILGGSSPTARPITGLLGNIYNGQVPFAKQIGFVPPQNGVAIPNANGAMPTVNGINGIPLGTGLSGTAFSGQNLNGIQTQLGPDGLSLGFGTITVIDDIITSGPDLGSQPLGKAQGVYVASSADGSTQMMAFTAMLEGGEYNDNLNFYGIYRIGSAMSHLSVTGGTGRFKNACGFAEVRPLIPAGQHFVDGAEMLLRIIVHLKY

SEQ ID NO: 82275 - DNA, 3075 bp, Arabidopsis thaliana
  misc_feature (1)..(3075): Ceres Seq. ID no. 12664793
  misc_feature: MA Experiment ID: 20000437 Result: Down-regulated in Transcription
  misc_feature: MA Experiment 20000437 PARAMETER Experiment Name: At_Drought_P Parameter: Age (day) Value: 8
  misc_feature: MA Experiment 20000437 PARAMETER Experiment Name: At_Drought_P Parameter: Organism Value: A. thaliana
  misc_feature: MA Experiment 20000437 PARAMETER Experiment Name: At_Drought_P Parameter: Plant Line Value: WS
  misc_feature: MA Experiment 20000437 PARAMETER Experiment Name: At_Drought_P Parameter: Timepoint (hr) Value: 24
  misc_feature: MA Experiment 20000437 PARAMETER Experiment Name: At_Drought_P Parameter: Tissue Value: Whole Plant
  misc_feature: MA Experiment 20000437 PARAMETER Experiment Name: At_Drought_P Parameter: Treatment Value: Drought vs. No Drought
  misc_feature: MA Experiment ID: 20000495 Result: Down-regulated in Transcription
  misc_feature: MA Experiment 20000495 PARAMETER Experiment Name: At_Guard_Cells_P Parameter: Harvest Date Value: 8/2/2002
  misc_feature: MA Experiment 20000495 PARAMETER Experiment Name: At_Guard_Cells_P Parameter: Organism Value: A. thaliana
  misc_feature: MA Experiment 20000495 PARAMETER Experiment Name: At_Guard_Cells_P Parameter: Tissue Value: Guard Cells vs. Leaves
  misc_feature: MA Experiment ID: 20001247 Result: Down-regulated in Transcription
  misc_feature: MA Experiment 20001247 PARAMETER Experiment Name: At_Far-red-induction_P Parameter: Age (day) Value: 7
  misc_feature: MA Experiment 20001247 PARAMETER Experiment Name: At_Far-red-induction_P Parameter: Light Value: Far-red vs. White
  misc_feature: MA Experiment 20001247 PARAMETER Experiment Name: At_Far-red-induction_P Parameter: Organism Value: A. thaliana
  misc_feature: MA Experiment 20001247 PARAMETER Experiment Name: At_Far-red-induction_P Parameter: Plant Line Value: Columbia
  misc_feature: MA Experiment 20001247 PARAMETER Experiment Name: At_Far-red-induction_P Parameter: Timepoint (hr) Value: 1
  misc_feature: MA Experiment 20001247 PARAMETER Experiment Name: At_Far-red-induction_P Parameter: Tissue Value: Whole Plant
  misc_feature: MA Experiment ID: 20001451 Result: Down-regulated in Transcription
  misc_feature: MA Experiment 20001451 PARAMETER Experiment Name: At_Far-red-induction_P Parameter: Age (day) Value: 7
  misc_feature: MA Experiment 20001451 PARAMETER Experiment Name: At_Far-red-induction_P Parameter: Light Value: Far-red vs. White
  misc_feature: MA Experiment 20001451 PARAMETER Experiment Name: At_Far-red-induction_P Parameter: Organism Value: A. thaliana
  misc_feature: MA Experiment 20001451 PARAMETER Experiment Name: At_Far-red-induction_P Parameter: Plant Line Value: Columbia
  misc_feature: MA Experiment 20001451 PARAMETER Experiment Name: At_Far-red-induction_P Parameter: Timepoint (hr) Value: 24
  misc_feature: MA Experiment 20001451 PARAMETER Experiment Name: At_Far-red-induction_P Parameter: Tissue Value: Whole Plant
  misc_feature: MA Experiment ID: 20001558 Result: Up-regulated in Transcription
  misc_feature: MA Experiment 20001558 PARAMETER Experiment Name: At_Drought_Soil_Dry_P Parameter: Age (day) Value: 27
  misc_feature: MA Experiment 20001558 PARAMETER Experiment Name: At_Drought_Soil_Dry_P Parameter: Organism Value: A. thaliana
  misc_feature: MA Experiment 20001558 PARAMETER Experiment Name: At_Drought_Soil_Dry_P Parameter: Plant Line Value: WS
  misc_feature: MA Experiment 20001558 PARAMETER Experiment Name: At_Drought_Soil_Dry_P Parameter: Post Timepoint (hr) Value: 6
  misc_feature: MA Experiment 20001558 PARAMETER Experiment Name: At_Drought_Soil_Dry_P Parameter: Post-Treatment Value: Re-Water vs. No Drought
  misc_feature: MA Experiment 20001558 PARAMETER Experiment Name: At_Drought_Soil_Dry_P Parameter: Timepoint (day) Value: 13
  misc_feature: MA Experiment 20001558 PARAMETER Experiment Name: At_Drought_Soil_Dry_P Parameter: Treatment Value: Drought vs. No Drought
atggtgttcctcactctttgtgggaccaggagagctagttttgctgctatatctgtttatatctctgaggatgaatcatttcaagaaaagagaattgattccgtggagaatcgtggaattcgacctaatcatcaaactttgaaatggcttcttgaaggatgtttgaagacaaatgggtctttagatgaaggaagaaagctacattcccagattttgaagttgggtttggatagcaatggttgcctctctgaaaagctttttgatttttatctttttaaaggagatttatatggtgctttcaaggtgtttgacgaaatgcctgagagaacgatttttacttggaataagatgataaaggagttagcttctaggaatttgattggagaagtgtttggtctttttgtgagaatggttagtgagaatgttactccgaatgaaggaactttcagtggtgttttggaagcatgtcgtggtggtagtgttgcttttgatgtagttgagcagattcatgcaaggattttatatcagggcttgagggatagtacggttgtgtgtaatcctttgattgacttgtactctaggaatgggtttgtggatttagctagaagggtttttgatgggttacgtctgaaggatcatagttcttgggttgcaatgatatccgggctttcgaaaaatgaatgtgaagcagaagccattagattgttctgcgatatgtatgttttaggtatcatgccaacgccttatgcgttttcaagtgttttaagtgcgtgtaagaagatagaatctcttgagattggtgagcagcttcatgggctcgtattgaagttagggttttcctccgacacttatgtttgcaatgcacttgtgtctttgtactttcatttgggaaatttgatatcagcagaacacatcttcagtaacatgtcacagagagatgcagttacttataacactcttatcaacgggctttctcagtgtggttatggtgagaaagctatggaattgttcaaaagaatgcaccttgatggacttgaaccagacagtaatactcttgcgagccttgtggttgcatgttcagctgatggaactctgtttaggggacaacagctacatgcatacacaactaaacttggttttgcttcaaacaacaagattgaaggtgcgctccttaatctgtatgcaaaatgcgctgatattgaaaccgcccttgattattttcttgagactgaggttgaaaatgtagttctctggaatgtgatgctagtagcttatgggttattagacgatttaagaaattcttttaggattttcagacagatgcagatagaggaaattgttccaaatcaatatacctacccgagtattttgaaaacttgcatacgacttggggatctggagcttggagaacaaatccatagtcaaataataaaaactaactttcagctcaatgcctatgtttgtagtgtgctcatcgatatgtatgcaaaattaggaaagttggatactgcctgggatatacttataaggtttgctggaaaagatgttgtgtcttggacaacaatgattgcaggttacacgcaatacaatttcgacgacaaagctttaacaactttcaggcagatgttggatcgagggattcggtctgatgaagttggattgacaaatgcagttagtgcatgtgctggtcttcaagccttaaaggaaggacagcaaattcatgctcaagcttgtgtatctggtttctcatctgacctgccatttcaaaatgcactggttacactttattctagatgcggaaaaatagaggaatcgtatttagcgtttgaacaaactgaagctggagataatatagcatggaatgctctggtatccggatttcagcagagtggaaacaatgaagaagcacttcgtgtcttcgttcgaatgaacagagaaggaattgacaataataatttcacgtttgggtctgctgtgaaagctgcttctgagacagctaacatgaaacaagggaagcaggttcatgctgtgatcaccaaaaccggatacgattcagaaaccgaagtttgcaatgctttaatctctatgtatgccaagtgtgggagcatttctgatgcagagaagcagttccttgaagtctccacgaaaaatgaagtttcgtggaatgcgataattaatgcttattctaaacatgggtttggttctgaagcactagattcttttgaccagatgatacattctaatgtaaggcctaatcatgtgacgcttgtgggagttctatcagcatgtagccacataggactagtggacaaggggattgcatactttgaatccatgaattcagaatatggattatctcctaaaccggaacactatgtgtgtgtagtggatatgctaactcgagctggtcttttgagccgtgcgaaagagttcattcaggaaatgcctattaagccagatgccttggtctggagaacacttttgagtgcttgtgtagtgcacaagaacatggaaataggagaatttgcagcgcatcatctcctagagttagaacctgaagactcagcaacatatgttcttctgtcaaatctgtatgcggtgtccaagaaatgggatgctagggatcttacaagacaaaagatgaaagaaaagggtgtgaagaaagaaccgggacaaagttggattgaagttaaaaactcaattcactctttctatgttggtgaccagaatcacccgttagcagatgagatacatgaatacttccaagatcttaccaaacgagcatctgaaatcgggtatgtgcaagactgtttcagcctattgaatgaactgcagcacgagcaaaaagatccaataattttcatccacagcgagaaattagcaatttcatttggactccttagcttgcctgcaacagtgcctataaatgtaatgaagaacctacgtgtttgcaacgattgccatgcttggataaagtttgtatctaaggtatcaaatcgagaaatcatagtgagggatgcatataggtttcatcattttgaaggaggtgcttgctcttgtaaagattactggtaa

SEQ ID NO: 82276 - protein, 1024 aa, Arabidopsis thaliana
  peptide (1)..(1024): Ceres Seq. ID no. 12664794
  misc_feature (719)..(753): Pfam Name: PPR repeat Pfam Description: PPR repeat
  misc_feature (260)..(1024): Homolog of NCBI NO: 25354624 NR Description: protein F3O9.28 [imported] - Arabidopsis thaliana
  misc_feature (169)..(338): Homolog of NCBI NO: 25354624 NR Description: protein F3O9.28 [imported] - Arabidopsis thaliana
  misc_feature (51)..(1024): Homolog of NCBI NO: 15242550 NR Description: selenium-binding protein-like; protein id:
  misc_feature (64)..(329): Homolog of NCBI NO: 25354624 NR Description: protein F3O9.28 [imported] - Arabidopsis thaliana
  misc_feature (60)..(1024): Homolog of NCBI NO: 34903762 NR Description: unnamed protein product [Oryza sativa (japonica group)] >gi|7340873|dbj|BAA92963.1| unnamed protein product
  misc_feature (201)..(1024): Homolog of NCBI NO: 15226200 NR Description: putative selenium-binding protein; protein id:
  misc_feature (166)..(1024): Homolog of NCBI NO: 15228590 NR Description: hypothetical protein; protein id: At3g03580.1 thaliana] >gi|6091764|gb|AAF03474.1|AC009327_13 hypothetical [Arabidopsis thaliana] >gi|28393735|gb|AAO42278.1| unknown
  misc_feature (134)..(1024): Homolog of NCBI NO: 15219258 NR Description: hypothetical protein; protein id: At1g16480.1
  misc_feature (243)..(1024): Homolog of NCBI NO: 30693150 NR Description: pentatricopeptide (PPR) repeat-containing protein
  misc_feature (151)..(1024): Homolog of NCBI NO: 18394615 NR Description: hypothetical protein; protein id: At1g18485.1
MVFLTLCGTRRASFAAISVYISEDESFQEKRIDSVENRGIRPNHQTLKWLLEGCLKTNGSLDEGRKLHSQILKLGLDSNGCLSEKLFDFYLFKGDLYGAFKVFDEMPERTIFTWNKMIKELASRNLIGEVFGLFVRMVSENVTPNEGTFSGVLEACRGGSVAFDVVEQIHARILYQGLRDSTVVCNPLIDLYSRNGFVDLARRVFDGLRLKDHSSWVAMISGLSKNECEAEAIRLFCDMYVLGIMPTPYAFSSVLSACKKIESLEIGEQLHGLVLKLGFSSDTYVCNALVSLYFHLGNLISAEHIFSNMSQRDAVTYNTLINGLSQCGYGEKAMELFKRMHLDGLEPDSNTLASLVVACSADGTLFRGQQLHAYTTKLGFASNNKIEGALLNLYAKCADIETALDYFLETEVENVVLWNVMLVAYGLLDDLRNSFRIFRQMQIEEIVPNQYTYPSILKTCIRLGDLELGEQIHSQIIKTNFQLNAYVCSVLIDMYAKLGKLDTAWDILIRFAGKDVVSWTTMIAGYTQYNFDDKALTTFRQMLDRGIRSDEVGLTNAVSACAGLQALKEGQQIHAQACVSGFSSDLPFQNALVTLYSRCGKIEESYLAFEQTEAGDNIAWNALVSGFQQSGNNEEALRVFVRMNREGIDNNNFTFGSAVKAASETANMKQGKQVHAVITKTGYDSETEVCNALISMYAKCGSISDAEKQFLEVSTKNEVSWNAIINAYSKHGFGSEALDSFDQMIHSNVRPNHVTLVGVLSACSHIGLVDKGIAYFESMNSEYGLSPKPEHYVCVVDMLTRAGLLSRAKEFIQEMPIKPDALVWRTLLSACVVHKNMEIGEFAAHHLLELEPEDSATYVLLSNLYAVSKKWDARDLTRQKMKEKGVKKEPGQSWIEVKNSIHSFYVGDQNHPLADEIHEYFQDLTKRASEIGYVQDCFSLLNELQHEQKDPIIFIHSEKLAISFGLLSLPATVPINVMKNLRVCNDCHAWIKFVSKVSNREIIVRDAYRFHHFEGGACSCKDYW

SEQ ID NO: 82277 - protein, 919 aa, Arabidopsis thaliana
  peptide (1)..(919): Ceres Seq. ID no. 12664795
  misc_feature (614)..(648): Pfam Name: PPR repeat Pfam Description: PPR repeat
  misc_feature (155)..(919): Homolog of NCBI NO: 25354624 NR Description: protein F3O9.28 [imported] - Arabidopsis thaliana
  misc_feature (64)..(233): Homolog of NCBI NO: 25354624 NR Description: protein F3O9.28 [imported] - Arabidopsis thaliana
  misc_feature (1)..(919): Homolog of NCBI NO: 15242550 NR Description: selenium-binding protein-like; protein id:
  misc_feature (1)..(224): Homolog of NCBI NO: 25354624 NR Description: protein F3O9.28 [imported] - Arabidopsis thaliana
  misc_feature (1)..(919): Homolog of NCBI NO: 34903762 NR Description: unnamed protein product [Oryza sativa (japonica group)] >gi|7340873|dbj|BAA92963.1| unnamed protein product
  misc_feature (96)..(919): Homolog of NCBI NO: 15226200 NR Description: putative selenium-binding protein; protein id:
  misc_feature (61)..(919): Homolog of NCBI NO: 15228590 NR Description: hypothetical protein; protein id: At3g03580.1 thaliana] >gi|6091764|gb|AAF03474.1|AC009327_13 hypothetical [Arabidopsis thaliana] >gi|28393735|gb|AAO42278.1| unknown
  misc_feature (29)..(919): Homolog of NCBI NO: 15219258 NR Description: hypothetical protein; protein id: At1g16480.1
  misc_feature (138)..(919): Homolog of NCBI NO: 30693150 NR Description: pentatricopeptide (PPR) repeat-containing protein
  misc_feature (46)..(919): Homolog of NCBI NO: 18394615 NR Description: hypothetical protein; protein id: At1g18485.1
MPERTIFTWNKMIKELASRNLIGEVFGLFVRMVSENVTPNEGTFSGVLEACRGGSVAFDVVEQIHARILYQGLRDSTVVCNPLIDLYSRNGFVDLARRVFDGLRLKDHSSWVAMISGLSKNECEAEAIRLFCDMYVLGIMPTPYAFSSVLSACKKIESLEIGEQLHGLVLKLGFSSDTYVCNALVSLYFHLGNLISAEHIFSNMSQRDAVTYNTLINGLSQCGYGEKAMELFKRMHLDGLEPDSNTLASLVVACSADGTLFRGQQLHAYTTKLGFASNNKIEGALLNLYAKCADIETALDYFLETEVENVVLWNVMLVAYGLLDDLRNSFRIFRQMQIEEIVPNQYTYPSILKTCIRLGDLELGEQIHSQIIKTNFQLNAYVCSVLIDMYAKLGKLDTAWDILIRFAGKDVVSWTTMIAGYTQYNFDDKALTTFRQMLDRGIRSDEVGLTNAVSACAGLQALKEGQQIHAQACVSGFSSDLPFQNALVTLYSRCGKIEESYLAFEQTEAGDNIAWNALVSGFQQSGNNEEALRVFVRMNREGIDNNNFTFGSAVKAASETANMKQGKQVHAVITKTGYDSETEVCNALISMYAKCGSISDAEKQFLEVSTKNEVSWNAIINAYSKHGFGSEALDSFDQMIHSNVRPNHVTLVGVLSACSHIGLVDKGIAYFESMNSEYGLSPKPEHYVCVVDMLTRAGLLSRAKEFIQEMPIKPDALVWRTLLSACVVHKNMEIGEFAAHHLLELEPEDSATYVLLSNLYAVSKKWDARDLTRQKMKEKGVKKEPGQSWIEVKNSIHSFYVGDQNHPLADEIHEYFQDLTKRASEIGYVQDCFSLLNELQHEQKDPIIFIHSEKLAISFGLLSLPATVPINVMKNLRVCNDCHAWIKFVSKVSNREIIVRDAYRFHHFEGGACSCKDYW

SEQ ID NO: 82278 - protein, 908 aa, Arabidopsis thaliana
  peptide (1)..(908): Ceres Seq. ID no. 12664796
  misc_feature (603)..(637): Pfam Name: PPR repeat Pfam Description: PPR repeat
  misc_feature (144)..(908): Homolog of NCBI NO: 25354624 NR Description: protein F3O9.28 [imported] - Arabidopsis thaliana
  misc_feature (53)..(222): Homolog of NCBI NO: 25354624 NR Description: protein F3O9.28 [imported] - Arabidopsis thaliana
  misc_feature (1)..(908): Homolog of NCBI NO: 15242550 NR Description: selenium-binding protein-like; protein id:
  misc_feature (1)..(213): Homolog of NCBI NO: 25354624 NR Description: protein F3O9.28 [imported] - Arabidopsis thaliana
  misc_feature (1)..(908): Homolog of NCBI NO: 34903762 NR Description: unnamed protein product [Oryza sativa (japonica group)] >gi|7340873|dbj|BAA92963.1| unnamed protein product
  misc_feature (85)..(908): Homolog of NCBI NO: 15226200 NR Description: putative selenium-binding protein; protein id:
  misc_feature (50)..(908): Homolog of NCBI NO: 15228590 NR Description: hypothetical protein; protein id: At3g03580.1 thaliana] >gi|6091764|gb|AAF03474.1|AC009327_13 hypothetical [Arabidopsis thaliana] >gi|28393735|gb|AAO42278.1| unknown
  misc_feature (18)..(908): Homolog of NCBI NO: 15219258 NR Description: hypothetical protein; protein id: At1g16480.1
  misc_feature (127)..(908): Homolog of NCBI NO: 30693150 NR Description: pentatricopeptide (PPR) repeat-containing protein
  misc_feature (35)..(908): Homolog of NCBI NO: 18394615 NR Description: hypothetical protein; protein id: At1g18485.1
MIKELASRNLIGEVFGLFVRMVSENVTPNEGTFSGVLEACRGGSVAFDVVEQIHARILYQGLRDSTVVCNPLIDLYSRNGFVDLARRVFDGLRLKDHSSWVAMISGLSKNECEAEAIRLFCDMYVLGIMPTPYAFSSVLSACKKIESLEIGEQLHGLVLKLGFSSDTYVCNALVSLYFHLGNLISAEHIFSNMSQRDAVTYNTLINGLSQCGYGEKAMELFKRMHLDGLEPDSNTLASLVVACSADGTLFRGQQLHAYTTKLGFASNNKIEGALLNLYAKCADIETALDYFLETEVENVVLWNVMLVAYGLLDDLRNSFRIFRQMQIEEIVPNQYTYPSILKTCIRLGDLELGEQIHSQIIKTNFQLNAYVCSVLIDMYAKLGKLDTAWDILIRFAGKDVVSWTTMIAGYTQYNFDDKALTTFRQMLDRGIRSDEVGLTNAVSACAGLQALKEGQQIHAQACVSGFSSDLPFQNALVTLYSRCGKIEESYLAFEQTEAGDNIAWNALVSGFQQSGNNEEALRVFVRMNREGIDNNNFTFGSAVKAASETANMKQGKQVHAVITKTGYDSETEVCNALISMYAKCGSISDAEKQFLEVSTKNEVSWNAIINAYSKHGFGSEALDSFDQMIHSNVRPNHVTLVGVLSACSHIGLVDKGIAYFESMNSEYGLSPKPEHYVCVVDMLTRAGLLSRAKEFIQEMPIKPDALVWRTLLSACVVHKNMEIGEFAAHHLLELEPEDSATYVLLSNLYAVSKKWDARDLTRQKMKEKGVKKEPGQSWIEVKNSIHSFYVGDQNHPLADEIHEYFQDLTKRASEIGYVQDCFSLLNELQHEQKDPIIFIHSEKLAISFGLLSLPATVPINVMKNLRVCNDCHAWIKFVSKVSNREIIVRDAYRFHHFEGGACSCKDYW

SEQ ID NO: 82279 - DNA, 1523 bp, Arabidopsis thaliana
  misc_feature (1)..(1523): Ceres Seq. ID no. 12664813
  misc_feature: MA Experiment ID: 20000173 Result: Down-regulated in Transcription
  misc_feature: MA Experiment 20000173 PARAMETER Experiment Name: At_42deg_Heat_P Parameter: Age (day) Value: 14
  misc_feature: MA Experiment 20000173 PARAMETER Experiment Name: At_42deg_Heat_P Parameter: Organism Value: A. thaliana
  misc_feature: MA Experiment 20000173 PARAMETER Experiment Name: At_42deg_Heat_P Parameter: Plant Line Value: WS
  misc_feature: MA Experiment 20000173 PARAMETER Experiment Name: At_42deg_Heat_P Parameter: Temperature (deg C) Value: 42 vs. 22
  misc_feature: MA Experiment 20000173 PARAMETER Experiment Name: At_42deg_Heat_P Parameter: Timepoint (hr) Value: 6
  misc_feature: MA Experiment 20000173 PARAMETER Experiment Name: At_42deg_Heat_P Parameter: Tissue Value: Aerial
  misc_feature: MA Experiment ID: 20000185 Result: Down-regulated in Transcription
  misc_feature: MA Experiment 20000185 PARAMETER Experiment Name: At_Roots__P Parameter: Age (day) Value: 7 vs. 21
  misc_feature: MA Experiment 20000185 PARAMETER Experiment Name: At_Roots__P Parameter: Organism Value: A. thaliana
  misc_feature: MA Experiment 20000185 PARAMETER Experiment Name: At_Roots__P Parameter: Tissue Value: Roots vs. Whole Plant
  misc_feature: MA Experiment ID: 20000264 Result: Down-regulated in Transcription
  misc_feature: MA Experiment 20000264 PARAMETER Experiment Name: At_Open_Flower_P Parameter: Age (day) Value: 21
  misc_feature: MA Experiment 20000264 PARAMETER Experiment Name: At_Open_Flower_P Parameter: Plant Line Value: WS
  misc_feature: MA Experiment 20000264 PARAMETER Experiment Name: At_Open_Flower_P Parameter: Tissue Value: Open Flower vs. Whole Plant
  misc_feature: MA Experiment ID: 20000265 Result: Down-regulated in Transcription
  misc_feature: MA Experiment 20000265 PARAMETER Experiment Name: At_Open_Flower_P Parameter: Age (day) Value: 21
  misc_feature: MA Experiment 20000265 PARAMETER Experiment Name: At_Open_Flower_P Parameter: Plant Line Value: WS
  misc_feature: MA Experiment 20000265 PARAMETER Experiment Name: At_Open_Flower_P Parameter: Tissue Value: Closed Flower vs. Whole Plant
  misc_feature: MA Experiment ID: 20000286 Result: Down-regulated in Transcription
  misc_feature: MA Experiment 20000286 PARAMETER Experiment Name: At_Open_Flower_P Parameter: Age (day) Value: 21
  misc_feature: MA Experiment 20000286 PARAMETER Experiment Name: At_Open_Flower_P Parameter: Plant Line Value: WS
  misc_feature: MA Experiment 20000286 PARAMETER Experiment Name: At_Open_Flower_P Parameter: Tissue Value: Half Open vs. Whole Plant
  misc_feature: MA Experiment ID: 20000436 Result: Down-regulated in Transcription
  misc_feature: MA Experiment 20000436 PARAMETER Experiment Name: At_Drought_P Parameter: Age (day) Value: 7
  misc_feature: MA Experiment 20000436 PARAMETER Experiment Name: At_Drought_P Parameter: Organism Value: A. thaliana
  misc_feature: MA Experiment 20000436 PARAMETER Experiment Name: At_Drought_P Parameter: Plant Line Value: WS
  misc_feature: MA Experiment 20000436 PARAMETER Experiment Name: At_Drought_P Parameter: Timepoint (hr) Value: 12
  misc_feature: MA Experiment 20000436 PARAMETER Experiment Name: At_Drought_P Parameter: Tissue Value: Whole Plant
  misc_feature: MA Experiment 20000436 PARAMETER Experiment Name: At_Drought_P Parameter: Treatment Value: Drought vs. No Drought
  misc_feature: MA Experiment ID: 20000438 Result: Up-regulated in Transcription
  misc_feature: MA Experiment 20000438 PARAMETER Experiment Name: At_Shoots__P Parameter: Age (day) Value: 14
  misc_feature: MA Experiment 20000438 PARAMETER Experiment Name: At_Shoots__P Parameter: Tissue Value: Shoots vs. Whole Plant
  misc_feature: MA Experiment ID: 20000439 Result: Down-regulated in Transcription
  misc_feature: MA Experiment 20000439 PARAMETER Experiment Name: At_Roots__P Parameter: Age (day) Value: 14 vs. 21
  misc_feature: MA Experiment 20000439 PARAMETER Experiment Name: At_Roots__P Parameter: Organism Value: A. thaliana
  misc_feature: MA Experiment 20000439 PARAMETER Experiment Name: At_Roots__P Parameter: Tissue Value: Roots vs. Whole Plant
  misc_feature: MA Experiment ID: 20000495 Result: Down-regulated in Transcription
  misc_feature: MA Experiment 20000495 PARAMETER Experiment Name: At_Guard_Cells_P Parameter: Harvest Date Value: 8/2/2002
  misc_feature: MA Experiment 20000495 PARAMETER Experiment Name: At_Guard_Cells_P Parameter: Organism Value: A. thaliana
  misc_feature: MA Experiment 20000495 PARAMETER Experiment Name: At_Guard_Cells_P Parameter: Tissue Value: Guard Cells vs. Leaves
  misc_feature: MA Experiment ID: 20000794 Result: Down-regulated in Transcription
  misc_feature: MA Experiment 20000794 PARAMETER Experiment Name: At_Petals_P Parameter: Age (day) Value: 23-25 days
  misc_feature: MA Experiment 20000794 PARAMETER Experiment Name: At_Petals_P Parameter: Plant Line Value: WS
  misc_feature: MA Experiment 20000794 PARAMETER Experiment Name: At_Petals_P Parameter: Tissue Value: Petals vs. Whole plant
  misc_feature: MA Experiment ID: 20001555 Result: Down-regulated in Transcription
  misc_feature: MA Experiment 20001555 PARAMETER Experiment Name: At_Drought_Soil_Dry_P Parameter: Age (day) Value: 24
  misc_feature: MA Experiment 20001555 PARAMETER Experiment Name: At_Drought_Soil_Dry_P Parameter: Organism Value: A. thaliana
  misc_feature: MA Experiment 20001555 PARAMETER Experiment Name: At_Drought_Soil_Dry_P Parameter: Plant Line Value: WS
  misc_feature: MA Experiment 20001555 PARAMETER Experiment Name: At_Drought_Soil_Dry_P Parameter: Post Timepoint (hr) Value: None
  misc_feature: MA Experiment 20001555 PARAMETER Experiment Name: At_Drought_Soil_Dry_P Parameter: Post-Treatment Value: None
  misc_feature: MA Experiment 20001555 PARAMETER Experiment Name: At_Drought_Soil_Dry_P Parameter: Timepoint (day) Value: 10
  misc_feature: MA Experiment 20001555 PARAMETER Experiment Name: At_Drought_Soil_Dry_P Parameter: Treatment Value: Drought vs. No Drought
  misc_feature: MA Experiment ID: 20001557 Result: Down-regulated in Transcription
  misc_feature: MA Experiment 20001557 PARAMETER Experiment Name: At_Drought_Soil_Dry_P Parameter: Age (day) Value: 27
  misc_feature: MA Experiment 20001557 PARAMETER Experiment Name: At_Drought_Soil_Dry_P Parameter: Organism Value: A. thaliana
  misc_feature: MA Experiment 20001557 PARAMETER Experiment Name: At_Drought_Soil_Dry_P Parameter: Plant Line Value: WS
  misc_feature: MA Experiment 20001557 PARAMETER Experiment Name: At_Drought_Soil_Dry_P Parameter: Post Timepoint (hr) Value: 3
  misc_feature: MA Experiment 20001557 PARAMETER Experiment Name: At_Drought_Soil_Dry_P Parameter: Post-Treatment Value: Re-Water vs. No Drought
  misc_feature: MA Experiment 20001557 PARAMETER Experiment Name: At_Drought_Soil_Dry_P Parameter: Timepoint (day) Value: 13
  misc_feature: MA Experiment 20001557 PARAMETER Experiment Name: At_Drought_Soil_Dry_P Parameter: Treatment Value: Drought vs. No Drought
  misc_feature: MA Experiment ID: 20001756 Result: Down-regulated in Transcription
  misc_feature: MA Experiment 20001756 PARAMETER Experiment Name: At_50mM_NH4NO3_L-to-H_P Parameter: Timepoint (hr) Value: 4
  misc_feature: MA Experiment 20001756 PARAMETER Experiment Name: At_50mM_NH4NO3_L-to-H_P Parameter: Tissue Value: Leaf
  misc_feature: MA Experiment 20001756 PARAMETER Experiment Name: At_50mM_NH4NO3_L-to-H_P Parameter: Treatment Value: 50mM NH4NO3 vs 100mM Mannitol
  misc_feature: MA Experiment ID: 20001904 Result: Down-regulated in Transcription
  misc_feature: MA Experiment 20001904 PARAMETER Experiment Name: At_Drought_Reproduction_P Parameter: Age (day) Value: 37
  misc_feature: MA Experiment 20001904 PARAMETER Experiment Name: At_Drought_Reproduction_P Parameter: Organism Value: A. thaliana
  misc_feature: MA Experiment 20001904 PARAMETER Experiment Name: At_Drought_Reproduction_P Parameter: Plant Line Value: WS
  misc_feature: MA Experiment 20001904 PARAMETER Experiment Name: At_Drought_Reproduction_P Parameter: Timepoint (day) Value: 7
  misc_feature: MA Experiment 20001904 PARAMETER Experiment Name: At_Drought_Reproduction_P Parameter: Tissue Value: Rosettes
  misc_feature: MA Experiment 20001904 PARAMETER Experiment Name: At_Drought_Reproduction_P Parameter: Treatment Value: Drought vs. No Drought
  misc_feature: MA Experiment ID: 20001905 Result: Down-regulated in Transcription
  misc_feature: MA Experiment 20001905 PARAMETER Experiment Name: At_Drought_Reproduction_P Parameter: Age (day) Value: 40
  misc_feature: MA Experiment 20001905 PARAMETER Experiment Name: At_Drought_Reproduction_P Parameter: Organism Value: A. thaliana
  misc_feature: MA Experiment 20001905 PARAMETER Experiment Name: At_Drought_Reproduction_P Parameter: Plant Line Value: WS
  misc_feature: MA Experiment 20001905 PARAMETER Experiment Name: At_Drought_Reproduction_P Parameter: Timepoint (day) Value: 10
  misc_feature: MA Experiment 20001905 PARAMETER Experiment Name: At_Drought_Reproduction_P Parameter: Tissue Value: Rosettes
  misc_feature: MA Experiment 20001905 PARAMETER Experiment Name: At_Drought_Reproduction_P Parameter: Treatment Value: Drought vs. No Drought
  misc_feature: MA Experiment ID: 20001910 Result: Up-regulated in Transcription
  misc_feature: MA Experiment 20001910 PARAMETER Experiment Name: At_Drought_Reproduction_P Parameter: Age (day) Value: 37
  misc_feature: MA Experiment 20001910 PARAMETER Experiment Name: At_Drought_Reproduction_P Parameter: Organism Value: A. thaliana
  misc_feature: MA Experiment 20001910 PARAMETER Experiment Name: At_Drought_Reproduction_P Parameter: Plant Line Value: WS
  misc_feature: MA Experiment 20001910 PARAMETER Experiment Name: At_Drought_Reproduction_P Parameter: Timepoint (day) Value: 7
  misc_feature: MA Experiment 20001910 PARAMETER Experiment Name: At_Drought_Reproduction_P Parameter: Tissue Value: Flowers
  misc_feature: MA Experiment 20001910 PARAMETER Experiment Name: At_Drought_Reproduction_P Parameter: Treatment Value: Drought vs. No Drought
atcacctacaaagcagagagagagagagagagagataaatgtccaagcaaaggttcatataattttatgttattaaatttgctttttttttgttaaagtgttacatacatcgatcgacttgttagttcaaagaatcagtttaactccactgagccatcatgggtcgatctcaagaacagggacagggacagggtccggttcacagcattcggctatctaccgtaggtgcgacccggccgacagagacgggtacgacccacgaaccaaccggtttagacctagccatgaagctccactacctcaaggcggcatacatttactcagccgagacagcacgtgacttaaccgtgagacacctgaaggaggccatgttcatgttgttcgaccagatcgcttggaccacaggcaggttctcaaggagagactcgggccgtccgtacatcaagtgcaacgactgcggcacacgtttcgtggaaggtcaatgcaatctcactgtggaggagtggctcagtaaaccggaccggtcagttgatgagtttctggtttatcatcatcctattggaccggaattgacgttctctcctttgatctacgttcagatgacccggtttaaatgcggaggattagggttgggcctaagctgggccaatataataggagacgcattctctctgttctatgccttcaacttatgggctaaggccattaccggagaaaagatttatgccccaacaacaccctctataggagagagaaggttccaaagcccaaacccgacggttaaagatccggtttcaattaaacgggtcgaacccgttggagatctctgggtcactccaaacgacaagaaattggcgaattactgtttcaatctctcagtcgccgatcagatatcaccacattttccggcgaagggagatgactcgattccggtgttcgagattctcgccggaatcatatggaaatgcatagctaaagttagggtagagccaaagcctgtaacggttacgatcattaaaaaagatccgaacgatctgaaacttaatgcgattcgaaacagtcaggtgatcagctcagtgagcgtggattttccggtggcggaagcgacggtggaggaattagtgaaagctatgggggaagcgaaggatgagagatgtggaattgaggagatcggagagagttgcgatgggaatttggattttgttgtttatggagcgaaattgacgtttctggatctgactggtgaggatttgtatgaggcgaaagtgatggggaagtcgccggagtcggtttattgtaatgtggaggggataggggaggagggattggtggttgtttacgcggcggcgaaatcggaggagagggttgtgacggttacgttgccggaggaagagatggagagggtaaaattggaatttaagaagtttggtttgatcgcgccatgagaaatcaaacggcaaataataagtgtaaacgtgaagtgatgaagtgttatgttatcgttttaaaacaagtaaagtttc

SEQ ID NO: 82280 - protein, 428 aa, Arabidopsis thaliana
  peptide (1)..(428): Ceres Seq. ID no. 12664814
  misc_feature (12)..(423): Pfam Name: Transferase family Pfam Description: Transferase family
  misc_feature (1)..(428): Homolog of NCBI NO: 15236357 NR Description: fatty acid elongase - like protein (cer2-like); id: At4g13840.1, supported by cDNA: gi_17933316 [Arabidopsis
  misc_feature (1)..(428): Homolog of NCBI NO: 21593424 NR Description: fatty acid elongase-like protein (cer2-like)
  misc_feature (1)..(428): Homolog of NCBI NO: 18403923 NR Description: expressed protein; protein id: At3g23840.1, by cDNA: 38849. [Arabidopsis thaliana]
  misc_feature (13)..(419): Homolog of NCBI NO: 15233851 NR Description: CER2; protein id: At4g24510.1, supported by cDNA:
  misc_feature (14)..(417): Homolog of NCBI NO: 38345799 NR Description: OSJNBa0085I10.16 [Oryza sativa (japonica
  misc_feature (1)..(417): Homolog of NCBI NO: 2130139 NR Description: hypothetical protein - maize
  misc_feature (156)..(417): Homolog of NCBI NO: 38568010 NR Description: OSJNBa0070C17.2 [Oryza sativa (japonica
  misc_feature (14)..(158): Homolog of NCBI NO: 38568009 NR Description: OSJNBa0070C17.1 [Oryza sativa (japonica
  misc_feature (95)..(416): Homolog of NCBI NO: 30017587 NR Description: unknown protein [Oryza sativa (japonica
  misc_feature (21)..(416): Homolog of NCBI NO: 18417362 NR Description: expressed protein; protein id: At4g29250.1,
MGRSQEQGQGQGPVHSIRLSTVGATRPTETGTTHEPTGLDLAMKLHYLKAAYIYSAETARDLTVRHLKEAMFMLFDQIAWTTGRFSRRDSGRPYIKCNDCGTRFVEGQCNLTVEEWLSKPDRSVDEFLVYHHPIGPELTFSPLIYVQMTRFKCGGLGLGLSWANIIGDAFSLFYAFNLWAKAITGEKIYAPTTPSIGERRFQSPNPTVKDPVSIKRVEPVGDLWVTPNDKKLANYCFNLSVADQISPHFPAKGDDSIPVFEILAGIIWKCIAKVRVEPKPVTVTIIKKDPNDLKLNAIRNSQVISSVSVDFPVAEATVEELVKAMGEAKDERCGIEEIGESCDGNLDFVVYGAKLTFLDLTGEDLYEAKVMGKSPESVYCNVEGIGEEGLVVVYAAAKSEERVVTVTLPEEEMERVKLEFKKFGLIAP

SEQ ID NO: 82281 - protein, 386 aa, Arabidopsis thaliana
  peptide (1)..(386): Ceres Seq. ID no. 12664815
  misc_feature (1)..(381): Pfam Name: Transferase family Pfam Description: Transferase family
  misc_feature (1)..(386): Homolog of NCBI NO: 15236357 NR Description: fatty acid elongase - like protein (cer2-like); id: At4g13840.1, supported by cDNA: gi_17933316 [Arabidopsis
  misc_feature (1)..(386): Homolog of NCBI NO: 21593424 NR Description: fatty acid elongase-like protein (cer2-like)
  misc_feature (1)..(386): Homolog of NCBI NO: 18403923 NR Description: expressed protein; protein id: At3g23840.1, by cDNA: 38849. [Arabidopsis thaliana]
  misc_feature (1)..(377): Homolog of NCBI NO: 15233851 NR Description: CER2; protein id: At4g24510.1, supported by cDNA:
  misc_feature (1)..(375): Homolog of NCBI NO: 38345799 NR Description: OSJNBa0085I10.16 [Oryza sativa (japonica
  misc_feature (1)..(375): Homolog of NCBI NO: 2130139 NR Description: hypothetical protein - maize
  misc_feature (114)..(375): Homolog of NCBI NO: 38568010 NR Description: OSJNBa0070C17.2 [Oryza sativa (japonica
  misc_feature (1)..(116): Homolog of NCBI NO: 38568009 NR Description: OSJNBa0070C17.1 [Oryza sativa (japonica
  misc_feature (53)..(374): Homolog of NCBI NO: 30017587 NR Description: unknown protein [Oryza sativa (japonica
  misc_feature (1)..(374): Homolog of NCBI NO: 18417362 NR Description: expressed protein; protein id: At4g29250.1,
MKLHYLKAAYIYSAETARDLTVRHLKEAMFMLFDQIAWTTGRFSRRDSGRPYIKCNDCGTRFVEGQCNLTVEEWLSKPDRSVDEFLVYHHPIGPELTFSPLIYVQMTRFKCGGLGLGLSWANIIGDAFSLFYAFNLWAKAITGEKIYAPTTPSIGERRFQSPNPTVKDPVSIKRVEPVGDLWVTPNDKKLANYCFNLSVADQISPHFPAKGDDSIPVFEILAGIIWKCIAKVRVEPKPVTVTIIKKDPNDLKLNAIRNSQVISSVSVDFPVAEATVEELVKAMGEAKDERCGIEEIGESCDGNLDFVVYGAKLTFLDLTGEDLYEAKVMGKSPESVYCNVEGIGEEGLVVVYAAAKSEERVVTVTLPEEEMERVKLEFKKFGLIAP

SEQ ID NO: 82282 - protein, 358 aa, Arabidopsis thaliana
  peptide (1)..(358): Ceres Seq. ID no. 12664816
  misc_feature (1)..(353): Pfam Name: Transferase family Pfam Description: Transferase family
  misc_feature (1)..(358): Homolog of NCBI NO: 15236357 NR Description: fatty acid elongase - like protein (cer2-like); id: At4g13840.1, supported by cDNA: gi_17933316 [Arabidopsis
  misc_feature (1)..(358): Homolog of NCBI NO: 21593424 NR Description: fatty acid elongase-like protein (cer2-like)
  misc_feature (1)..(358): Homolog of NCBI NO: 18403923 NR Description: expressed protein; protein id: At3g23840.1, by cDNA: 38849. [Arabidopsis thaliana]
  misc_feature (1)..(349): Homolog of NCBI NO: 15233851 NR Description: CER2; protein id: At4g24510.1, supported by cDNA:
  misc_feature (1)..(347): Homolog of NCBI NO: 38345799 NR Description: OSJNBa0085I10.16 [Oryza sativa (japonica
  misc_feature (1)..(347): Homolog of NCBI NO: 2130139 NR Description: hypothetical protein - maize
  misc_feature (86)..(347): Homolog of NCBI NO: 38568010 NR Description: OSJNBa0070C17.2 [Oryza sativa (japonica
  misc_feature (1)..(88): Homolog of NCBI NO: 38568009 NR Description: OSJNBa0070C17.1 [Oryza sativa (japonica
  misc_feature (25)..(346): Homolog of NCBI NO: 30017587 NR Description: unknown protein [Oryza sativa (japonica
  misc_feature (1)..(346): Homolog of NCBI NO: 18417362 NR Description: expressed protein; protein id: At4g29250.1,
MFMLFDQIAWTTGRFSRRDSGRPYIKCNDCGTRFVEGQCNLTVEEWLSKPDRSVDEFLVYHHPIGPELTFSPLIYVQMTRFKCGGLGLGLSWANIIGDAFSLFYAFNLWAKAITGEKIYAPTTPSIGERRFQSPNPTVKDPVSIKRVEPVGDLWVTPNDKKLANYCFNLSVADQISPHFPAKGDDSIPVFEILAGIIWKCIAKVRVEPKPVTVTIIKKDPNDLKLNAIRNSQVISSVSVDFPVAEATVEELVKAMGEAKDERCGIEEIGESCDGNLDFVVYGAKLTFLDLTGEDLYEAKVMGKSPESVYCNVEGIGEEGLVVVYAAAKSEERVVTVTLPEEEMERVKLEFKKFGLIAP

SEQ ID NO: 82283 - DNA, 1413 bp, Arabidopsis thaliana
  misc_feature (1)..(1413): Ceres Seq. ID no. 12664824
  misc_feature: MA Experiment ID: 20000185 Result: Up-regulated in Transcription
  misc_feature: MA Experiment 20000185 PARAMETER Experiment Name: At_Roots__P Parameter: Age (day) Value: 7 vs. 21
  misc_feature: MA Experiment 20000185 PARAMETER Experiment Name: At_Roots__P Parameter: Organism Value: A. thaliana
  misc_feature: MA Experiment 20000185 PARAMETER Experiment Name: At_Roots__P Parameter: Tissue Value: Roots vs. Whole Plant
  misc_feature: MA Experiment ID: 20000227 Result: Up-regulated in Transcription
  misc_feature: MA Experiment 20000227 PARAMETER Experiment Name: At_Root-Tips-vs-Tops_P Parameter: Tissue Value: Root Tips vs. Root Tops
atggaaccagtctattcttggggaaacacgcatcttgacttcgtcgatccggagatctacgacctaatcgagaaggagaaacatcgtcaatgtcgaggaatcgaactcatagcagccgagaatttcacttccgtggccgtcatggaagctctcggaagttgcttaaccaacaaatactcggaaggtatgcctggtaatcgttactacggaggtaccgagttcatcgatgagatagagagtctctgccgctcacgctctctcgaagccttccattgcaatccagagaaatggggcgttaacgttcagccttactctggttcccctgcgaatttcgcagcctacaccgccttgctccagcctcatgatcgtatcatggggcttgatttgccatcaggtggtcatataacgcatggttactatagctctggtgggaagaacatctccgcgacctcgatctactttgaaaaccttccctacaaggtggattccaagactggttacattgattacgacaaacttgaggagaaagctatggattttaggcctaagttaattatctgtggaggcacttcttaccctagggaatgggattacgcgagattcagggctgtcgccgacaaggttggagcttttttgctctgtgatatggctcataacagtgccctcgttgctgctcaggaagccgcagacccgttcgagtactgtgacgttgtgacaacgtcaactcacaagagcttgagaggtccaagggctggtatgatcttttatagaaagggaccaaaaccagccaagaagggccaacccgagggtgaagtctacgatttcgacgcaaaaatcaactctgcggtattccctgcgcttcaaagtggtcctcacaataacaagattggtgctctagctgttgcgttgaagcaggttatggctcctagcttcaaagtttatgcaaaacaggtgaaagctaatgctgcttgccttgcaagctacctaataaataagggatatactcttgtaaccgatggaactgataaccaccttattctttgggatcttcgccctcttggattgaccggtaacaaggttgagaaggtttgtgaattgtgctacattactttgaacaggaatgcggtattcggagacactagttttcttgctcccggaggtgtaagaatcggtacaccggcgatgacatcgagaggattggtggagaaggactttgagaagataggagagttcctgcaccgtgccgtgacaatcacgttggacatccaggagcagtacggtaaggtgatgaaggacttcaacaagggtttggtgaacaacaaggagatcgatgagataaaggctgacgttgaggagttcacgtacgattttgatatgcctggatttttcatctctgagtcaaggaacgattag

SEQ ID NO: 82284 - protein, 470 aa, Arabidopsis thaliana
  peptide (1)..(470): Ceres Seq. ID no. 12664825
  misc_feature (12)..(412): Pfam Name: Serine hydroxymethyltransferase Pfam Description: Serine hydroxymethyltransferase
  misc_feature (1)..(470): Homolog of NCBI NO: 15236371 NR Description: glycine hydroxymethyltransferase - like protein; id: At4g13890.1 [Arabidopsis thaliana] >gi|7433549|pir||T05258
  misc_feature (1)..(468): Homolog of NCBI NO: 15236375 NR Description: hydroxymethyltransferase; protein id: supported by cDNA: 29662., supported by cDNA: gi_13358183, by cDNA: gi_13605526, supported by cDNA: gi_20334773 [Arabidopsis
  misc_feature (1)..(468): Homolog of NCBI NO: 21592544 NR Description: hydroxymethyltransferase [Arabidopsis thaliana]
  misc_feature (1)..(468): Homolog of NCBI NO: 11762130 NR Description: AT4g13930 [Arabidopsis thaliana]
  misc_feature (4)..(464): Homolog of NCBI NO: 18400090 NR Description: putative hydroxymethyltransferase; protein id: supported by cDNA: 122515. [Arabidopsis thaliana]
  misc_feature (4)..(464): Homolog of NCBI NO: 25286207 NR Description: probable hydroxymethyltransferase, 49598-47322 - Arabidopsis thaliana >gi|12324475|gb|AAG52195.1|AC021199_1
  misc_feature (4)..(464): Homolog of NCBI NO: 21537165 NR Description: putative hydroxymethyltransferase [Arabidopsis
  misc_feature (4)..(462): Homolog of NCBI NO: 15219182 NR Description: glycine hydroxymethyltransferase, putative; id: At1g22020.1 [Arabidopsis thaliana] F2E2.7 [Arabidopsis thaliana] >gi|21928157|gb|AAM78106.1|
  misc_feature (9)..(462): Homolog of NCBI NO: 17066746 NR Description: serine hydroxymethyltransferase [Chlamydomonas
  misc_feature (15)..(461): Homolog of NCBI NO: 18418028 NR Description: glycine hydroxymethyltransferase (EC 2.1.2.1) - protein; protein id: At4g32520.1, supported by cDNA: gi_14030718
MEPVYSWGNTHLDFVDPEIYDLIEKEKHRQCRGIELIAAENFTSVAVMEALGSCLTNKYSEGMPGNRYYGGTEFIDEIESLCRSRSLEAFHCNPEKWGVNVQPYSGSPANFAAYTALLQPHDRIMGLDLPSGGHITHGYYSSGGKNISATSIYFENLPYKVDSKTGYIDYDKLEEKAMDFRPKLIICGGTSYPREWDYARFRAVADKVGAFLLCDMAHNSALVAAQEAADPFEYCDVVTTSTHKSLRGPRAGMIFYRKGPKPAKKGQPEGEVYDFDAKINSAVFPALQSGPHNNKIGALAVALKQVMAPSFKVYAKQVKANAACLASYLINKGYTLVTDGTDNHLILWDLRPLGLTGNKVEKVCELCYITLNRNAVFGDTSFLAPGGVRIGTPAMTSRGLVEKDFEKIGEFLHRAVTITLDIQEQYGKVMKDFNKGLVNNKEIDEIKADVEEFTYDFDMPGFFISESRND

SEQ ID NO: 82285 - protein, 423 aa, Arabidopsis thaliana
  peptide (1)..(423): Ceres Seq. ID no. 12664826
  misc_feature (1)..(365): Pfam Name: Serine hydroxymethyltransferase Pfam Description: Serine hydroxymethyltransferase
  misc_feature (1)..(423): Homolog of NCBI NO: 15236371 NR Description: glycine hydroxymethyltransferase - like protein; id: At4g13890.1 [Arabidopsis thaliana] >gi|7433549|pir||T05258
  misc_feature (1)..(421): Homolog of NCBI NO: 15236375 NR Description: hydroxymethyltransferase; protein id: supported by cDNA: 29662., supported by cDNA: gi_13358183, by cDNA: gi_13605526, supported by cDNA: gi_20334773 [Arabidopsis
  misc_feature (1)..(421): Homolog of NCBI NO: 21592544 NR Description: hydroxymethyltransferase [Arabidopsis thaliana]
  misc_feature (1)..(421): Homolog of NCBI NO: 11762130 NR Description: AT4g13930 [Arabidopsis thaliana]
  misc_feature (1)..(417): Homolog of NCBI NO: 18400090 NR Description: putative hydroxymethyltransferase; protein id: supported by cDNA: 122515. [Arabidopsis thaliana]
  misc_feature (1)..(417): Homolog of NCBI NO: 25286207 NR Description: probable hydroxymethyltransferase, 49598-47322 - Arabidopsis thaliana >gi|12324475|gb|AAG52195.1|AC021199_1
  misc_feature (1)..(417): Homolog of NCBI NO: 21537165 NR Description: putative hydroxymethyltransferase [Arabidopsis
  misc_feature (1)..(415): Homolog of NCBI NO: 15219182 NR Description: glycine hydroxymethyltransferase, putative; id: At1g22020.1 [Arabidopsis thaliana] F2E2.7 [Arabidopsis thaliana] >gi|21928157|gb|AAM78106.1|
  misc_feature (1)..(415): Homolog of NCBI NO: 17066746 NR Description: serine hydroxymethyltransferase [Chlamydomonas
  misc_feature (1)..(414): Homolog of NCBI NO: 18418028 NR Description: glycine hydroxymethyltransferase (EC 2.1.2.1) - protein; protein id: At4g32520.1, supported by cDNA: gi_14030718
MEALGSCLTNKYSEGMPGNRYYGGTEFIDEIESLCRSRSLEAFHCNPEKWGVNVQPYSGSPANFAAYTALLQPHDRIMGLDLPSGGHITHGYYSSGGKNISATSIYFENLPYKVDSKTGYIDYDKLEEKAMDFRPKLIICGGTSYPREWDYARFRAVADKVGAFLLCDMAHNSALVAAQEAADPFEYCDVVTTSTHKSLRGPRAGMIFYRKGPKPAKKGQPEGEVYDFDAKINSAVFPALQSGPHNNKIGALAVALKQVMAPSFKVYAKQVKANAACLASYLINKGYTLVTDGTDNHLILWDLRPLGLTGNKVEKVCELCYITLNRNAVFGDTSFLAPGGVRIGTPAMTSRGLVEKDFEKIGEFLHRAVTITLDIQEQYGKVMKDFNKGLVNNKEIDEIKADVEEFTYDFDMPGFFISESRND

SEQ ID NO: 82286 - protein, 408 aa, Arabidopsis thaliana
  peptide (1)..(408): Ceres Seq. ID no. 12664827
  misc_feature (1)..(350): Pfam Name: Serine hydroxymethyltransferase Pfam Description: Serine hydroxymethyltransferase
  misc_feature (1)..(408): Homolog of NCBI NO: 15236371 NR Description: glycine hydroxymethyltransferase - like protein; id: At4g13890.1 [Arabidopsis thaliana] >gi|7433549|pir||T05258
  misc_feature (1)..(406): Homolog of NCBI NO: 15236375 NR Description: hydroxymethyltransferase; protein id: supported by cDNA: 29662., supported by cDNA: gi_13358183, by cDNA: gi_13605526, supported by cDNA: gi_20334773 [Arabidopsis
  misc_feature (1)..(406): Homolog of NCBI NO: 21592544 NR Description: hydroxymethyltransferase [Arabidopsis thaliana]
  misc_feature (1)..(406): Homolog of NCBI NO: 11762130 NR Description: AT4g13930 [Arabidopsis thaliana]
  misc_feature (1)..(402): Homolog of NCBI NO: 18400090 NR Description: putative hydroxymethyltransferase; protein id: supported by cDNA: 122515. [Arabidopsis thaliana]
  misc_feature (1)..(402): Homolog of NCBI NO: 25286207 NR Description: probable hydroxymethyltransferase, 49598-47322 - Arabidopsis thaliana >gi|12324475|gb|AAG52195.1|AC021199_1
  misc_feature (1)..(402): Homolog of NCBI NO: 21537165 NR Description: putative hydroxymethyltransferase [Arabidopsis
  misc_feature (1)..(400): Homolog of NCBI NO: 15219182 NR Description: glycine hydroxymethyltransferase, putative; id: At1g22020.1 [Arabidopsis thaliana] F2E2.7 [Arabidopsis thaliana] >gi|21928157|gb|AAM78106.1|
  misc_feature (1)..(400): Homolog of NCBI NO: 17066746 NR Description: serine hydroxymethyltransferase [Chlamydomonas
  misc_feature (1)..(399): Homolog of NCBI NO: 18418028 NR Description: glycine hydroxymethyltransferase (EC 2.1.2.1) - protein; protein id: At4g32520.1, supported by cDNA: gi_14030718
MPGNRYYGGTEFIDEIESLCRSRSLEAFHCNPEKWGVNVQPYSGSPANFAAYTALLQPHDRIMGLDLPSGGHITHGYYSSGGKNISATSIYFENLPYKVDSKTGYIDYDKLEEKAMDFRPKLIICGGTSYPREWDYARFRAVADKVGAFLLCDMAHNSALVAAQEAADPFEYCDVVTTSTHKSLRGPRAGMIFYRKGPKPAKKGQPEGEVYDFDAKINSAVFPALQSGPHNNKIGALAVALKQVMAPSFKVYAKQVKANAACLASYLINKGYTLVTDGTDNHLILWDLRPLGLTGNKVEKVCELCYITLNRNAVFGDTSFLAPGGVRIGTPAMTSRGLVEKDFEKIGEFLHRAVTITLDIQEQYGKVMKDFNKGLVNNKEIDEIKADVEEFTYDFDMPGFFISESRND

SEQ ID NO: 82287 - DNA, 1839 bp, Arabidopsis thaliana
  misc_feature (1)..(1839): Ceres Seq. ID no. 12664848
  misc_feature: MA Experiment ID: 20000307 Result: Down-regulated in Transcription
  misc_feature: MA Experiment 20000307 PARAMETER Experiment Name: At_Germinating_Seeds_Sub_P Parameter: Age (hr) Value: 24 vs. 0
  misc_feature: MA Experiment 20000307 PARAMETER Experiment Name: At_Germinating_Seeds_Sub_P Parameter: Organism Value: A. thaliana
  misc_feature: MA Experiment 20000307 PARAMETER Experiment Name: At_Germinating_Seeds_Sub_P Parameter: Plant Line Value: WS
  misc_feature: MA Experiment 20000307 PARAMETER Experiment Name: At_Germinating_Seeds_Sub_P Parameter: Tissue Value: Germinating Seeds
  misc_feature: MA Experiment ID: 20000315 Result: Down-regulated in Transcription
  misc_feature: MA Experiment 20000315 PARAMETER Experiment Name: At_14day_Shoots-Roots_Sub_P Parameter: Age (day) Value: 14
  misc_feature: MA Experiment 20000315 PARAMETER Experiment Name: At_14day_Shoots-Roots_Sub_P Parameter: Organism Value: A. thaliana
  misc_feature: MA Experiment 20000315 PARAMETER Experiment Name: At_14day_Shoots-Roots_Sub_P Parameter: Plant Line Value: WS
  misc_feature: MA Experiment 20000315 PARAMETER Experiment Name: At_14day_Shoots-Roots_Sub_P Parameter: Tissue Value: Shoots vs. Whole Plant
atgcttatccctcactatcttcatcagctccagctctgcgccaggaatcgaaccctaaccactgctaaagccctccatgcccacatcgtcaagctcgggatcgttcaatgttgccctttggccaacacacttgtcaatgtctatgggaaatgcggtgctgcttctcatgctctccaggtgttcgacgaaatgcctcatagagatcacatcgcctgggcctcggttctcacagctcttaatcaagccaatctctctggtaagacactatcagtattttcttcagtgggttcgagctctgggttgcgtcctgatgattttgtgttctcggctcttgttaaggcttgtgctaacttaggatctattgatcacgggaggcaagttcattgccattttatagtctctgagtatgctaatgatgaagttgttaagtcttcactggttgatatgtatgctaaatgtggattgcttaatagtgctaaagcagttttcgattctataagagtgaaaaacaccatttcatggactgcaatggtatctggatatgctaaaagcggaagaaaggaagaagctttggagctttttaggatattaccagtcaagaatttgtattcttggactgcgttgatctctggttttgtacagagtgggaaagggcttgaagctttttctgttttcactgaaatgaggagagaaagagttgacattttggatcctttagttctttcgagcatcgttggcgcttgtgctaatttggcagcttctatagcggggaggcaggttcatgggttggttatagctctaggatttgattcttgtgtgtttattagtaacgcccttatcgatatgtacgctaaatgcagcgatgttatagctgcaaaggatattttcagtaggatgcgtcacagagatgtagtttcatggacatcgcttatagttggaatggctcagcacgggcaggctgagaaggcattagcgttgtatgatgacatggtttctcacggtgtaaagcccaatgaggtcacatttgttgggttgatatatgcgtgtagccatgtcggttttgttgagaaaggccgtgagcttttccaatcaatgactaaggactatggaattcgcccatctttgcagcattatacatgcttattggatcttctcggtcgctctggactccttgatgaggctgagaacttaattcatacaatgccgtttcctccagatgaaccaacatgggctgctttacttagcgcttgcaagcgccagggacgaggtcagatgggtataagaatcgctgatcatctcgtaagcagctttaaactgaaagatccatcgacttatatacttttatcaaacatctatgcaagtgcttctttgtggggaaaagtatcagaagcaagaaggaaactaggagaaatggaagttagaaaggatccagggcacagtagcgtcgaggtacggaaagaaaccgaagtgttttacgcaggagaaacatctcatcctctaaaagaagacatttttcgattgcttaagaagctagaggaagaaatgaggataagaaatggttatgttcctgatactagttggatcctacacgacatggatgagcaagagaaagaaaagcttttgttttggcatagcgaacgatccgctgttgcatacggattgcttaaagctgttccgggaactcctatacggattgtgaaaaatctaagggtttgtggagattgtcatgttgttctgaaacatataagtgagattacagaaagagagattatagttagagatgcgactagatatcatcattttaagggaggaaaatgttcctgcaatgacttctggtaa

SEQ ID NO: 82288 - protein, 612 aa, Arabidopsis thaliana
  peptide (1)..(612): Ceres Seq. ID no. 12664849
  misc_feature (376)..(410): Pfam Name: PPR repeat Pfam Description: PPR repeat
  misc_feature (16)..(611): Homolog of NCBI NO: 25346315 NR Description: hypothetical protein AT4g14050 [imported] - thaliana >gi|5280987|emb|CAB46001.1| hypothetical protein thaliana] >gi|7268109|emb|CAB78447.1| hypothetical protein
  misc_feature (64)..(611): Homolog of NCBI NO: 7488184 NR Description: probable selenium-binding protein - Arabidopsis
  misc_feature (43)..(612): Homolog of NCBI NO: 34393605 NR Description: pentatricopeptide (PPR) repeat-containing
  misc_feature (145)..(612): Homolog of NCBI NO: 15234095 NR Description: putative protein; protein id: At4g33170.1
  misc_feature (19)..(193): Homolog of NCBI NO: 15234095 NR Description: putative protein; protein id: At4g33170.1
  misc_feature (177)..(612): Homolog of NCBI NO: 34915012 NR Description: P0458A05.10 [Oryza sativa (japonica
  misc_feature (25)..(224): Homolog of NCBI NO: 34915012 NR Description: P0458A05.10 [Oryza sativa (japonica
  misc_feature (42)..(612): Homolog of NCBI NO: 15235498 NR Description: hypothetical protein; protein id: At4g02750.1
  misc_feature (176)..(612): Homolog of NCBI NO: 15232837 NR Description: hypothetical protein; protein id: At3g02010.1 thaliana] >gi|6091739|gb|AAF03451.1|AC010797_27 hypothetical [Arabidopsis thaliana] >gi|6513930|gb|AAF14834.1|AC011664_16
  misc_feature (25)..(195): Homolog of NCBI NO: 15232837 NR Description: hypothetical protein; protein id: At3g02010.1 thaliana] >gi|6091739|gb|AAF03451.1|AC010797_27 hypothetical [Arabidopsis thaliana] >gi|6513930|gb|AAF14834.1|AC011664_16
MLIPHYLHQLQLCARNRTLTTAKALHAHIVKLGIVQCCPLANTLVNVYGKCGAASHALQVFDEMPHRDHIAWASVLTALNQANLSGKTLSVFSSVGSSSGLRPDDFVFSALVKACANLGSIDHGRQVHCHFIVSEYANDEVVKSSLVDMYAKCGLLNSAKAVFDSIRVKNTISWTAMVSGYAKSGRKEEALELFRILPVKNLYSWTALISGFVQSGKGLEAFSVFTEMRRERVDILDPLVLSSIVGACANLAASIAGRQVHGLVIALGFDSCVFISNALIDMYAKCSDVIAAKDIFSRMRHRDVVSWTSLIVGMAQHGQAEKALALYDDMVSHGVKPNEVTFVGLIYACSHVGFVEKGRELFQSMTKDYGIRPSLQHYTCLLDLLGRSGLLDEAENLIHTMPFPPDEPTWAALLSACKRQGRGQMGIRIADHLVSSFKLKDPSTYILLSNIYASASLWGKVSEARRKLGEMEVRKDPGHSSVEVRKETEVFYAGETSHPLKEDIFRLLKKLEEEMRIRNGYVPDTSWILHDMDEQEKEKLLFWHSERSAVAYGLLKAVPGTPIRIVKNLRVCGDCHVVLKHISEITEREIIVRDATRYHHFKGGKCSCNDFW

SEQ ID NO: 82289 - protein, 549 aa, Arabidopsis thaliana
  peptide (1)..(549): Ceres Seq. ID no. 12664850
  misc_feature (313)..(347): Pfam Name: PPR repeat Pfam Description: PPR repeat
  misc_feature (1)..(548): Homolog of NCBI NO: 25346315 NR Description: hypothetical protein AT4g14050 [imported] - thaliana >gi|5280987|emb|CAB46001.1| hypothetical protein thaliana] >gi|7268109|emb|CAB78447.1| hypothetical protein
  misc_feature (1)..(548): Homolog of NCBI NO: 7488184 NR Description: probable selenium-binding protein - Arabidopsis
  misc_feature (1)..(549): Homolog of NCBI NO: 34393605 NR Description: pentatricopeptide (PPR) repeat-containing
  misc_feature (82)..(549): Homolog of NCBI NO: 15234095 NR Description: putative protein; protein id: At4g33170.1
  misc_feature (1)..(130): Homolog of NCBI NO: 15234095 NR Description: putative protein; protein id: At4g33170.1
  misc_feature (114)..(549): Homolog of NCBI NO: 34915012 NR Description: P0458A05.10 [Oryza sativa (japonica
  misc_feature (1)..(161): Homolog of NCBI NO: 34915012 NR Description: P0458A05.10 [Oryza sativa (japonica
  misc_feature (1)..(549): Homolog of NCBI NO: 15235498 NR Description: hypothetical protein; protein id: At4g02750.1
  misc_feature (113)..(549): Homolog of NCBI NO: 15232837 NR Description: hypothetical protein; protein id: At3g02010.1 thaliana] >gi|6091739|gb|AAF03451.1|AC010797_27 hypothetical [Arabidopsis thaliana] >gi|6513930|gb|AAF14834.1|AC011664_16
  misc_feature (1)..(132): Homolog of NCBI NO: 15232837 NR Description: hypothetical protein; protein id: At3g02010.1 thaliana] >gi|6091739|gb|AAF03451.1|AC010797_27 hypothetical [Arabidopsis thaliana] >gi|6513930|gb|AAF14834.1|AC011664_16
MPHRDHIAWASVLTALNQANLSGKTLSVFSSVGSSSGLRPDDFVFSALVKACANLGSIDHGRQVHCHFIVSEYANDEVVKSSLVDMYAKCGLLNSAKAVFDSIRVKNTISWTAMVSGYAKSGRKEEALELFRILPVKNLYSWTALISGFVQSGKGLEAFSVFTEMRRERVDILDPLVLSSIVGACANLAASIAGRQVHGLVIALGFDSCVFISNALIDMYAKCSDVIAAKDIFSRMRHRDVVSWTSLIVGMAQHGQAEKALALYDDMVSHGVKPNEVTFVGLIYACSHVGFVEKGRELFQSMTKDYGIRPSLQHYTCLLDLLGRSGLLDEAENLIHTMPFPPDEPTWAALLSACKRQGRGQMGIRIADHLVSSFKLKDPSTYILLSNIYASASLWGKVSEARRKLGEMEVRKDPGHSSVEVRKETEVFYAGETSHPLKEDIFRLLKKLEEEMRIRNGYVPDTSWILHDMDEQEKEKLLFWHSERSAVAYGLLKAVPGTPIRIVKNLRVCGDCHVVLKHISEITEREIIVRDATRYHHFKGGKCSCNDFW

SEQ ID NO: 82290 - protein, 464 aa, Arabidopsis thaliana
  peptide (1)..(464): Ceres Seq. ID no. 12664851
  misc_feature (228)..(262): Pfam Name: PPR repeat Pfam Description: PPR repeat
  misc_feature (1)..(463): Homolog of NCBI NO: 25346315 NR Description: hypothetical protein AT4g14050 [imported] - thaliana >gi|5280987|emb|CAB46001.1| hypothetical protein thaliana] >gi|7268109|emb|CAB78447.1| hypothetical protein
  misc_feature (1)..(463): Homolog of NCBI NO: 7488184 NR Description: probable selenium-binding protein - Arabidopsis
  misc_feature (1)..(464): Homolog of NCBI NO: 34393605 NR Description: pentatricopeptide (PPR) repeat-containing
  misc_feature (1)..(464): Homolog of NCBI NO: 15234095 NR Description: putative protein; protein id: At4g33170.1
  misc_feature (1)..(45): Homolog of NCBI NO: 15234095 NR Description: putative protein; protein id: At4g33170.1
  misc_feature (29)..(464): Homolog of NCBI NO: 34915012 NR Description: P0458A05.10 [Oryza sativa (japonica
  misc_feature (1)..(76): Homolog of NCBI NO: 34915012 NR Description: P0458A05.10 [Oryza sativa (japonica
  misc_feature (1)..(464): Homolog of NCBI NO: 15235498 NR Description: hypothetical protein; protein id: At4g02750.1
  misc_feature (28)..(464): Homolog of NCBI NO: 15232837 NR Description: hypothetical protein; protein id: At3g02010.1 thaliana] >gi|6091739|gb|AAF03451.1|AC010797_27 hypothetical [Arabidopsis thaliana] >gi|6513930|gb|AAF14834.1|AC011664_16
  misc_feature (1)..(47): Homolog of NCBI NO: 15232837 NR Description: hypothetical protein; protein id: At3g02010.1 thaliana] >gi|6091739|gb|AAF03451.1|AC010797_27 hypothetical [Arabidopsis thaliana] >gi|6513930|gb|AAF14834.1|AC011664_16
MYAKCGLLNSAKAVFDSIRVKNTISWTAMVSGYAKSGRKEEALELFRILPVKNLYSWTALISGFVQSGKGLEAFSVFTEMRRERVDILDPLVLSSIVGACANLAASIAGRQVHGLVIALGFDSCVFISNALIDMYAKCSDVIAAKDIFSRMRHRDVVSWTSLIVGMAQHGQAEKALALYDDMVSHGVKPNEVTFVGLIYACSHVGFVEKGRELFQSMTKDYGIRPSLQHYTCLLDLLGRSGLLDEAENLIHTMPFPPDEPTWAALLSACKRQGRGQMGIRIADHLVSSFKLKDPSTYILLSNIYASASLWGKVSEARRKLGEMEVRKDPGHSSVEVRKETEVFYAGETSHPLKEDIFRLLKKLEEEMRIRNGYVPDTSWILHDMDEQEKEKLLFWHSERSAVAYGLLKAVPGTPIRIVKNLRVCGDCHVVLKHISEITEREIIVRDATRYHHFKGGKCSCNDFW

SEQ ID NO: 82291 - DNA, 1546 bp, Arabidopsis thaliana
  misc_feature (1)..(1546): Ceres Seq. ID no. 12664860
  misc_feature: MA Experiment ID: 20001807 Result: Down-regulated in Transcription
  misc_feature: MA Experiment 20001807 PARAMETER Experiment Name: At_50mM_NH4NO3_L-to-H_Sub_P Parameter: Timepoint (hr) Value: 6
  misc_feature: MA Experiment 20001807 PARAMETER Experiment Name: At_50mM_NH4NO3_L-to-H_Sub_P Parameter: Tissue Value: Leaf
  misc_feature: MA Experiment 20001807 PARAMETER Experiment Name: At_50mM_NH4NO3_L-to-H_Sub_P Parameter: Treatment Value: 50mM NH4NO3 vs 100mM Mannitol
aaaacttataacatcttcaaaacattctaaaatggccacttccgtcaatggttcccatcgtcgtccacattacttgcttgtaacattcccagcgcaaggtcacatcaacccggcgcttcaactagccaaccgcctcatccaccacggtgcaaccgtcacatactccaccgcagtctctgctcaccgacgtatgggcgagccaccttccacaaaaggtctatccttcgcttggttcaccgatggattcgacgacggtctcaagtcattcgaagaccagaaaatctacatgtccgaactcaaacgatgtggttcaaacgccctgagagacatcatcaaagccaatcttgacgccaccaccgaaacagagcctatcaccggggtaatctactctgttctcgtcccgtgggtttctacggtagcgcgtgagtttcacctcccaactacacttctctggattgaaccagctactgtactagacatctactactactacttcaacacctcttacaaacatctcttcgacgttgaaccgattaaattaccgaaactgccactgatcaccaccggtgacctcccgtcgtttcttcaaccttcgaaggcattaccgtcagctcttgtgactctaagagaacatatcgaagctctcgaaacggaatcaaaccctaagattcttgttaacacattctctgctttggaacacgatgctttaacctctgttgagaaactcaagatgatcccaatcggaccgttggtttcttcctccgagggtaaaaccgatcttttcaaatcttccgacgaggattacacgaaatggttagactcgaagctcgagagatcagtgatttacatttccttaggcacacacgccgatgatttaccagagaaacacatggaagcgcttactcacggcgtgttagctacaaacagaccgtttttatggatcgtgagggagaaaaatccagaagagaagaagaagaatcggtttcttgaattgatcagaggaagtgatcgaggattggtggtgggatggtgttctcagacagctgttttggcgcattgtgctgtgggatgttttgtgactcattgtggttggaattcgacgttggagagtttagagagtggtgttccggtggttgcgtttccgcagtttgctgatcagtgtacaacggcgaagcttgtggaggatacgtggaggattggagtgaaggtgaaggttggggaggaaggagatgtggatggggaggagattagaaggtgtttggagaaggtgatgagtggtggagaagaggcggaggagatgagagagaatgcagagaagtggaaggcgatggctgttgatgcggcagcggaaggtggaccgtcggatttgaatcttaaaggttttgtggacgaggatgagtagtgggttttaagtttttgaagttaaagaatgtgcatcttaccttgttcaaataaagagaacaaacagagaagaaggtctcgtttattcactcttgtactcctcctgattggtcatctagaagaaaagaaggtctcgttaattaac

SEQ ID NO: 82292 - protein, 466 aa, Arabidopsis thaliana
  peptide (1)..(466): Ceres Seq. ID no. 12664861
  misc_feature (11)..(466): Pfam Name: UDP-glucoronosyl and UDP-glucosyl transferase Pfam Description: UDP-glucoronosyl and UDP-glucosyl transferase
  misc_feature (1)..(466): Homolog of NCBI NO: 18491183 NR Description: putative glucosyltransferase [Arabidopsis
  misc_feature (11)..(466): Homolog of NCBI NO: 15236407 NR Description: UDP-glycosyltransferase family; protein id: supported by cDNA: gi_17065025 [Arabidopsis thaliana]
  misc_feature (21)..(464): Homolog of NCBI NO: 4115563 NR Description: UDP-glucose:anthocyanin 5-O-glucosyltransferase
  misc_feature (21)..(464): Homolog of NCBI NO: 4115559 NR Description: UDP-glucose:anthocysnin 5-O-glucosyltransferase
  misc_feature (11)..(464): Homolog of NCBI NO: 2149127 NR Description: UDP-glucose:indole-3-acetate
  misc_feature (11)..(464): Homolog of NCBI NO: 18414478 NR Description: glucosyltransferase like protein; protein id:
  misc_feature (22)..(464): Homolog of NCBI NO: 18390540 NR Description: UDP-glucose transferase(UGT1); protein id: supported by cDNA: gi_13605917, supported by cDNA: gi_13661274, by cDNA: gi_18700283 [Arabidopsis thaliana]
  misc_feature (21)..(447): Homolog of NCBI NO: 4115561 NR Description: UDP-glucose:anthocyanin 5-O-glucosyltransferase
  misc_feature (23)..(464): Homolog of NCBI NO: 7433904 NR Description: glucosyl transferase, jasmonate-induced - common >gi|1805359|dbj|BAA19155.1| glucosyl transferase [Nicotiana
  misc_feature (21)..(462): Homolog of NCBI NO: 15220556 NR Description: UDP-glycosyltransferase family; protein id: [Arabidopsis thaliana] >gi|8778724|gb|AAF79732.1|AC005106_13
KLITSSKHSKMATSVNGSHRRPHYLLVTFPAQGHINPALQLANRLIHHGATVTYSTAVSAHRRMGEPPSTKGLSFAWFTDGFDDGLKSFEDQKIYMSELKRCGSNALRDIIKANLDATTETEPITGVIYSVLVPWVSTVAREFHLPTTLLWIEPATVLDIYYYYFNTSYKHLFDVEPIKLPKLPLITTGDLPSFLQPSKALPSALVTLREHIEALETESNPKILVNTFSALEHDALTSVEKLKMIPIGPLVSSSEGKTDLFKSSDEDYTKWLDSKLERSVIYISLGTHADDLPEKHMEALTHGVLATNRPFLWIVREKNPEEKKKNRFLELIRGSDRGLVVGWCSQTAVLAHCAVGCFVTHCGWNSTLESLESGVPVVAFPQFADQCTTAKLVEDTWRIGVKVKVGEEGDVDGEEIRRCLEKVMSGGEEAEEMRENAEKWKAMAVDAAAEGGPSDLNLKGFVDEDE

SEQ ID NO: 82293 - protein, 456 aa, Arabidopsis thaliana
  peptide (1)..(456): Ceres Seq. ID no. 12664862
  misc_feature (1)..(456): Pfam Name: UDP-glucoronosyl and UDP-glucosyl transferase Pfam Description: UDP-glucoronosyl and UDP-glucosyl transferase
  misc_feature (1)..(456): Homolog of NCBI NO: 18491183 NR Description: putative glucosyltransferase [Arabidopsis
  misc_feature (1)..(456): Homolog of NCBI NO: 15236407 NR Description: UDP-glycosyltransferase family; protein id: supported by cDNA: gi_17065025 [Arabidopsis thaliana]
  misc_feature (11)..(454): Homolog of NCBI NO: 4115563 NR Description: UDP-glucose:anthocyanin 5-O-glucosyltransferase
  misc_feature (11)..(454): Homolog of NCBI NO: 4115559 NR Description: UDP-glucose:anthocysnin 5-O-glucosyltransferase
  misc_feature (1)..(454): Homolog of NCBI NO: 2149127 NR Description: UDP-glucose:indole-3-acetate
  misc_feature (1)..(454): Homolog of NCBI NO: 18414478 NR Description: glucosyltransferase like protein; protein id:
  misc_feature (12)..(454): Homolog of NCBI NO: 18390540 NR Description: UDP-glucose transferase(UGT1); protein id: supported by cDNA: gi_13605917, supported by cDNA: gi_13661274, by cDNA: gi_18700283 [Arabidopsis thaliana]
  misc_feature (11)..(437): Homolog of NCBI NO: 4115561 NR Description: UDP-glucose:anthocyanin 5-O-glucosyltransferase
  misc_feature (13)..(454): Homolog of NCBI NO: 7433904 NR Description: glucosyl transferase, jasmonate-induced - common >gi|1805359|dbj|BAA19155.1| glucosyl transferase [Nicotiana
  misc_feature (11)..(452): Homolog of NCBI NO: 15220556 NR Description: UDP-glycosyltransferase family; protein id: [Arabidopsis thaliana] >gi|8778724|gb|AAF79732.1|AC005106_13
MATSVNGSHRRPHYLLVTFPAQGHINPALQLANRLIHHGATVTYSTAVSAHRRMGEPPSTKGLSFAWFTDGFDDGLKSFEDQKIYMSELKRCGSNALRDIIKANLDATTETEPITGVIYSVLVPWVSTVAREFHLPTTLLWIEPATVLDIYYYYFNTSYKHLFDVEPIKLPKLPLITTGDLPSFLQPSKALPSALVTLREHIEALETESNPKILVNTFSALEHDALTSVEKLKMIPIGPLVSSSEGKTDLFKSSDEDYTKWLDSKLERSVIYISLGTHADDLPEKHMEALTHGVLATNRPFLWIVREKNPEEKKKNRFLELIRGSDRGLVVGWCSQTAVLAHCAVGCFVTHCGWNSTLESLESGVPVVAFPQFADQCTTAKLVEDTWRIGVKVKVGEEGDVDGEEIRRCLEKVMSGGEEAEEMRENAEKWKAMAVDAAAEGGPSDLNLKGFVDEDE

SEQ ID NO: 82294 - protein, 403 aa, Arabidopsis thaliana
  peptide (1)..(403): Ceres Seq. ID no. 12664863
  misc_feature (1)..(403): Pfam Name: UDP-glucoronosyl and UDP-glucosyl transferase Pfam Description: UDP-glucoronosyl and UDP-glucosyl transferase
  misc_feature (1)..(403): Homolog of NCBI NO: 18491183 NR Description: putative glucosyltransferase [Arabidopsis
  misc_feature (1)..(403): Homolog of NCBI NO: 15236407 NR Description: UDP-glycosyltransferase family; protein id: supported by cDNA: gi_17065025 [Arabidopsis thaliana]
  misc_feature (1)..(401): Homolog of NCBI NO: 4115563 NR Description: UDP-glucose:anthocyanin 5-O-glucosyltransferase
  misc_feature (1)..(401): Homolog of NCBI NO: 4115559 NR Description: UDP-glucose:anthocysnin 5-O-glucosyltransferase
  misc_feature (1)..(401): Homolog of NCBI NO: 2149127 NR Description: UDP-glucose:indole-3-acetate
  misc_feature (1)..(401): Homolog of NCBI NO: 18414478 NR Description: glucosyltransferase like protein; protein id:
  misc_feature (1)..(401): Homolog of NCBI NO: 18390540 NR Description: UDP-glucose transferase(UGT1); protein id: supported by cDNA: gi_13605917, supported by cDNA: gi_13661274, by cDNA: gi_18700283 [Arabidopsis thaliana]
  misc_feature (1)..(384): Homolog of NCBI NO: 4115561 NR Description: UDP-glucose:anthocyanin 5-O-glucosyltransferase
  misc_feature (1)..(401): Homolog of NCBI NO: 7433904 NR Description: glucosyl transferase, jasmonate-induced - common >gi|1805359|dbj|BAA19155.1| glucosyl transferase [Nicotiana
  misc_feature (1)..(399): Homolog of NCBI NO: 15220556 NR Description: UDP-glycosyltransferase family; protein id: [Arabidopsis thaliana] >gi|8778724|gb|AAF79732.1|AC005106_13
MGEPPSTKGLSFAWFTDGFDDGLKSFEDQKIYMSELKRCGSNALRDIIKANLDATTETEPITGVIYSVLVPWVSTVAREFHLPTTLLWIEPATVLDIYYYYFNTSYKHLFDVEPIKLPKLPLITTGDLPSFLQPSKALPSALVTLREHIEALETESNPKILVNTFSALEHDALTSVEKLKMIPIGPLVSSSEGKTDLFKSSDEDYTKWLDSKLERSVIYISLGTHADDLPEKHMEALTHGVLATNRPFLWIVREKNPEEKKKNRFLELIRGSDRGLVVGWCSQTAVLAHCAVGCFVTHCGWNSTLESLESGVPVVAFPQFADQCTTAKLVEDTWRIGVKVKVGEEGDVDGEEIRRCLEKVMSGGEEAEEMRENAEKWKAMAVDAAAEGGPSDLNLKGFVDEDE

SEQ ID NO: 82295 - DNA, 1287 bp, Arabidopsis thaliana
  misc_feature (1)..(1287): Ceres Seq. ID no. 12664888
  misc_feature: MA Experiment ID: 20000327 Result: Up-regulated in Transcription
  misc_feature: MA Experiment 20000327 PARAMETER Experiment Name: At_42deg_Heat_Sub_P Parameter: Age (day) Value: 14
  misc_feature: MA Experiment 20000327 PARAMETER Experiment Name: At_42deg_Heat_Sub_P Parameter: Organism Value: A. thaliana
  misc_feature: MA Experiment 20000327 PARAMETER Experiment Name: At_42deg_Heat_Sub_P Parameter: Plant Line Value: WS
  misc_feature: MA Experiment 20000327 PARAMETER Experiment Name: At_42deg_Heat_Sub_P Parameter: Temperature (deg C) Value: 42 vs. 22
  misc_feature: MA Experiment 20000327 PARAMETER Experiment Name: At_42deg_Heat_Sub_P Parameter: Timepoint (hr) Value: 1
  misc_feature: MA Experiment 20000327 PARAMETER Experiment Name: At_42deg_Heat_Sub_P Parameter: Tissue Value: Aerial
atgttcttgaaagctcgagctttatcagtaactacacagaatcctcctgatctcttctcgcttctacatcattctccaaacgctaaacatctacgccatctccacgctcaccttcttcgtacatttctctattccaacgttgtgctcagctccaagctcgtcctcgcttattccaagctgaaccatctctttcctacttcgctttctgtcttctggcacatgccttatcgcaacattttctcttggaatataatcatcggtgagttctctagatcgggttttgcttccaagtcaattgatttgtttcttcgtatgtggcgagagtcttgtgttagaccggatgattttacgcttcctcttattctacgagcttgctctgcgtctagggaagcgaaatctggagatttgattcatgttctgtgtttgaaacttgggtttagctcaagtttgtttgttagttcggctttagtgataatgtatgtagatatggggaaacttttacatgcacctatgtttggtgggtatgttcagcaaggagaagctatgttgggtttagccatgttcagagaaatggggtattctggatttgcgctggattcagtggtgatgcacgggaagagcgtccatggatggtgtatcaggagatgctcctgcttgggcttgaatctcggcaatgctataacagatatgtatgtaaagtgctcgatactggactatgcgcacactgtatttgtaaatatgtcgagacgagatgtgatctcttggagctcgcttattttggggtatggtttggatggagacgtggtaatgtcttttaaactctttgatgagatgcttaaggaaggaattgaacccaatgctgtcacttttcttggtgtcttatcagcctgtgcccatggcggtcttgtggaaaaatcttggctgtatttcagactaatgcaggaatataatatagttcctgaactgaaacactatgctagtgtggcggattgtatgtctcgagcaggtcttctggaggaagcagagaagtttctggaagatatgcccgtgaaacctgatgaggctgttatgggtgcggtgttgagtgggtgcaaggtgtatggaaatgtagaagttggggaaagagtggcgagggagctgattcaacttaagccgagaaaagctagctactatgtaacgttggccggtctatattcagctgcaggtcggtttgatgaagctgagagtctgaggcagtggatgaaggagaaacagatttctaaggttcccgggtgtagctcaatatga

SEQ ID NO: 82296 - protein, 428 aa, Arabidopsis thaliana
  peptide (1)..(428): Ceres Seq. ID no. 12664889
  misc_feature (80)..(114): Pfam Name: PPR repeat Pfam Description: PPR repeat
  misc_feature (1)..(428): Homolog of NCBI NO: 15236432 NR Description: hypothetical protein; protein id: At4g14170.1
  misc_feature (205)..(428): Homolog of NCBI NO: 15228590 NR Description: hypothetical protein; protein id: At3g03580.1 thaliana] >gi|6091764|gb|AAF03474.1|AC009327_13 hypothetical [Arabidopsis thaliana] >gi|28393735|gb|AAO42278.1| unknown
  misc_feature (11)..(169): Homolog of NCBI NO: 15228590 NR Description: hypothetical protein; protein id: At3g03580.1 thaliana] >gi|6091764|gb|AAF03474.1|AC009327_13 hypothetical [Arabidopsis thaliana] >gi|28393735|gb|AAO42278.1| unknown
  misc_feature (223)..(428): Homolog of NCBI NO: 15239745 NR Description: selenium-binding protein-like; protein id:
  misc_feature (9)..(164): Homolog of NCBI NO: 15239745 NR Description: selenium-binding protein-like; protein id:
  misc_feature (205)..(424): Homolog of NCBI NO: 15232648 NR Description: putative protein; protein id: At3g46790.1
  misc_feature (32)..(166): Homolog of NCBI NO: 15232648 NR Description: putative protein; protein id: At3g46790.1
  misc_feature (205)..(428): Homolog of NCBI NO: 15223099 NR Description: unknown protein; protein id: At1g08070.1 thaliana] >gi|8778839|gb|AAF79838.1|AC026875_18 T6D22.15
  misc_feature (13)..(166): Homolog of NCBI NO: 15223099 NR Description: unknown protein; protein id: At1g08070.1 thaliana] >gi|8778839|gb|AAF79838.1|AC026875_18 T6D22.15
  misc_feature (205)..(428): Homolog of NCBI NO: 18418348 NR Description: putative protein; protein id: At4g33990.1
MFLKARALSVTTQNPPDLFSLLHHSPNAKHLRHLHAHLLRTFLYSNVVLSSKLVLAYSKLNHLFPTSLSVFWHMPYRNIFSWNIIIGEFSRSGFASKSIDLFLRMWRESCVRPDDFTLPLILRACSASREAKSGDLIHVLCLKLGFSSSLFVSSALVIMYVDMGKLLHAPMFGGYVQQGEAMLGLAMFREMGYSGFALDSVVMHGKSVHGWCIRRCSCLGLNLGNAITDMYVKCSILDYAHTVFVNMSRRDVISWSSLILGYGLDGDVVMSFKLFDEMLKEGIEPNAVTFLGVLSACAHGGLVEKSWLYFRLMQEYNIVPELKHYASVADCMSRAGLLEEAEKFLEDMPVKPDEAVMGAVLSGCKVYGNVEVGERVARELIQLKPRKASYYVTLAGLYSAAGRFDEAESLRQWMKEKQISKVPGCSSI

SEQ ID NO: 82297 - protein, 355 aa, Arabidopsis thaliana
  peptide (1)..(355): Ceres Seq. ID no. 12664890
  misc_feature (7)..(41): Pfam Name: PPR repeat Pfam Description: PPR repeat
  misc_feature (1)..(355): Homolog of NCBI NO: 15236432 NR Description: hypothetical protein; protein id: At4g14170.1
  misc_feature (132)..(355): Homolog of NCBI NO: 15228590 NR Description: hypothetical protein; protein id: At3g03580.1 thaliana] >gi|6091764|gb|AAF03474.1|AC009327_13 hypothetical [Arabidopsis thaliana] >gi|28393735|gb|AAO42278.1| unknown
  misc_feature (1)..(96): Homolog of NCBI NO: 15228590 NR Description: hypothetical protein; protein id: At3g03580.1 thaliana] >gi|6091764|gb|AAF03474.1|AC009327_13 hypothetical [Arabidopsis thaliana] >gi|28393735|gb|AAO42278.1| unknown
  misc_feature (150)..(355): Homolog of NCBI NO: 15239745 NR Description: selenium-binding protein-like; protein id:
  misc_feature (1)..(91): Homolog of NCBI NO: 15239745 NR Description: selenium-binding protein-like; protein id:
  misc_feature (132)..(351): Homolog of NCBI NO: 15232648 NR Description: putative protein; protein id: At3g46790.1
  misc_feature (1)..(93): Homolog of NCBI NO: 15232648 NR Description: putative protein; protein id: At3g46790.1
  misc_feature (132)..(355): Homolog of NCBI NO: 15223099 NR Description: unknown protein; protein id: At1g08070.1 thaliana] >gi|8778839|gb|AAF79838.1|AC026875_18 T6D22.15
  misc_feature (1)..(93): Homolog of NCBI NO: 15223099 NR Description: unknown protein; protein id: At1g08070.1 thaliana] >gi|8778839|gb|AAF79838.1|AC026875_18 T6D22.15
  misc_feature (132)..(355): Homolog of NCBI NO: 18418348 NR Description: putative protein; protein id: At4g33990.1
MPYRNIFSWNIIIGEFSRSGFASKSIDLFLRMWRESCVRPDDFTLPLILRACSASREAKSGDLIHVLCLKLGFSSSLFVSSALVIMYVDMGKLLHAPMFGGYVQQGEAMLGLAMFREMGYSGFALDSVVMHGKSVHGWCIRRCSCLGLNLGNAITDMYVKCSILDYAHTVFVNMSRRDVISWSSLILGYGLDGDVVMSFKLFDEMLKEGIEPNAVTFLGVLSACAHGGLVEKSWLYFRLMQEYNIVPELKHYASVADCMSRAGLLEEAEKFLEDMPVKPDEAVMGAVLSGCKVYGNVEVGERVARELIQLKPRKASYYVTLAGLYSAAGRFDEAESLRQWMKEKQISKVPGCSSI

SEQ ID NO: 82298 - protein, 324 aa, Arabidopsis thaliana
  peptide (1)..(324): Ceres Seq. ID no. 12664891
  misc_feature (1)..(324): Homolog of NCBI NO: 15236432 NR Description: hypothetical protein; protein id: At4g14170.1
  misc_feature (101)..(324): Homolog of NCBI NO: 15228590 NR Description: hypothetical protein; protein id: At3g03580.1 thaliana] >gi|6091764|gb|AAF03474.1|AC009327_13 hypothetical [Arabidopsis thaliana] >gi|28393735|gb|AAO42278.1| unknown
  misc_feature (1)..(65): Homolog of NCBI NO: 15228590 NR Description: hypothetical protein; protein id: At3g03580.1 thaliana] >gi|6091764|gb|AAF03474.1|AC009327_13 hypothetical [Arabidopsis thaliana] >gi|28393735|gb|AAO42278.1| unknown
  misc_feature (119)..(324): Homolog of NCBI NO: 15239745 NR Description: selenium-binding protein-like; protein id:
  misc_feature (1)..(60): Homolog of NCBI NO: 15239745 NR Description: selenium-binding protein-like; protein id:
  misc_feature (101)..(320): Homolog of NCBI NO: 15232648 NR Description: putative protein; protein id: At3g46790.1
  misc_feature (1)..(62): Homolog of NCBI NO: 15232648 NR Description: putative protein; protein id: At3g46790.1
  misc_feature (101)..(324): Homolog of NCBI NO: 15223099 NR Description: unknown protein; protein id: At1g08070.1 thaliana] >gi|8778839|gb|AAF79838.1|AC026875_18 T6D22.15
  misc_feature (1)..(62): Homolog of NCBI NO: 15223099 NR Description: unknown protein; protein id: At1g08070.1 thaliana] >gi|8778839|gb|AAF79838.1|AC026875_18 T6D22.15
  misc_feature (101)..(324): Homolog of NCBI NO: 18418348 NR Description: putative protein; protein id: At4g33990.1
MWRESCVRPDDFTLPLILRACSASREAKSGDLIHVLCLKLGFSSSLFVSSALVIMYVDMGKLLHAPMFGGYVQQGEAMLGLAMFREMGYSGFALDSVVMHGKSVHGWCIRRCSCLGLNLGNAITDMYVKCSILDYAHTVFVNMSRRDVISWSSLILGYGLDGDVVMSFKLFDEMLKEGIEPNAVTFLGVLSACAHGGLVEKSWLYFRLMQEYNIVPELKHYASVADCMSRAGLLEEAEKFLEDMPVKPDEAVMGAVLSGCKVYGNVEVGERVARELIQLKPRKASYYVTLAGLYSAAGRFDEAESLRQWMKEKQISKVPGCSSI

SEQ ID NO: 82299 - DNA, 1236 bp, Arabidopsis thaliana
  misc_feature (1)..(1236): Ceres Seq. ID no. 12664906
  misc_feature: MA Experiment ID: 20000171 Result: Up-regulated in Transcription
  misc_feature: MA Experiment 20000171 PARAMETER Experiment Name: At_42deg_Heat_P Parameter: Age (day) Value: 14
  misc_feature: MA Experiment 20000171 PARAMETER Experiment Name: At_42deg_Heat_P Parameter: Organism Value: A. thaliana
  misc_feature: MA Experiment 20000171 PARAMETER Experiment Name: At_42deg_Heat_P Parameter: Plant Line Value: WS
  misc_feature: MA Experiment 20000171 PARAMETER Experiment Name: At_42deg_Heat_P Parameter: Temperature (deg C) Value: 42 vs. 22
  misc_feature: MA Experiment 20000171 PARAMETER Experiment Name: At_42deg_Heat_P Parameter: Timepoint (hr) Value: 1
  misc_feature: MA Experiment 20000171 PARAMETER Experiment Name: At_42deg_Heat_P Parameter: Tissue Value: Aerial
  misc_feature: MA Experiment ID: 20000173 Result: Up-regulated in Transcription
  misc_feature: MA Experiment 20000173 PARAMETER Experiment Name: At_42deg_Heat_P Parameter: Age (day) Value: 14
  misc_feature: MA Experiment 20000173 PARAMETER Experiment Name: At_42deg_Heat_P Parameter: Organism Value: A. thaliana
  misc_feature: MA Experiment 20000173 PARAMETER Experiment Name: At_42deg_Heat_P Parameter: Plant Line Value: WS
  misc_feature: MA Experiment 20000173 PARAMETER Experiment Name: At_42deg_Heat_P Parameter: Temperature (deg C) Value: 42 vs. 22
  misc_feature: MA Experiment 20000173 PARAMETER Experiment Name: At_42deg_Heat_P Parameter: Timepoint (hr) Value: 6
  misc_feature: MA Experiment 20000173 PARAMETER Experiment Name: At_42deg_Heat_P Parameter: Tissue Value: Aerial
  misc_feature: MA Experiment ID: 20000184 Result: Up-regulated in Transcription
  misc_feature: MA Experiment 20000184 PARAMETER Experiment Name: At_Shoots__P Parameter: Age (day) Value: 7
  misc_feature: MA Experiment 20000184 PARAMETER Experiment Name: At_Shoots__P Parameter: Tissue Value: Shoots vs. Whole Plant
  misc_feature: MA Experiment ID: 20000495 Result: Down-regulated in Transcription
  misc_feature: MA Experiment 20000495 PARAMETER Experiment Name: At_Guard_Cells_P Parameter: Harvest Date Value: 8/2/2002
  misc_feature: MA Experiment 20000495 PARAMETER Experiment Name: At_Guard_Cells_P Parameter: Organism Value: A. thaliana
  misc_feature: MA Experiment 20000495 PARAMETER Experiment Name: At_Guard_Cells_P Parameter: Tissue Value: Guard Cells vs. Leaves
  misc_feature: MA Experiment ID: 20000496 Result: Down-regulated in Transcription
  misc_feature: MA Experiment 20000496 PARAMETER Experiment Name: At_Guard_Cells_P Parameter: Harvest Date Value: 7/19/2002
  misc_feature: MA Experiment 20000496 PARAMETER Experiment Name: At_Guard_Cells_P Parameter: Organism Value: Canola
  misc_feature: MA Experiment 20000496 PARAMETER Experiment Name: At_Guard_Cells_P Parameter: Tissue Value: Guard Cells vs. Leaves
  misc_feature: MA Experiment ID: 20001757 Result: Up-regulated in Transcription
  misc_feature: MA Experiment 20001757 PARAMETER Experiment Name: At_50mM_NH4NO3_L-to-H_P Parameter: Timepoint (hr) Value: 6
  misc_feature: MA Experiment 20001757 PARAMETER Experiment Name: At_50mM_NH4NO3_L-to-H_P Parameter: Tissue Value: Leaf
  misc_feature: MA Experiment 20001757 PARAMETER Experiment Name: At_50mM_NH4NO3_L-to-H_P Parameter: Treatment Value: 50mM NH4NO3 vs 100mM Mannitol
atggattcggatcaaggaaagctttttgtcggtggtatttcatgggaaactgatgaagataagctgagagaacatttcaccaactatggagaggtttctcaggctattgtgatgagagacaagctcacaggtcgacctaggggttttgggttcgttatcttctcggatccttctgttctcgatagggttcttcaagagaaacacagcattgataccagagaggttgatgtgaagagagccatgtcaagagaggagcagcaagtctctggaagaactgggaatcttaatacatctagaagttctggaggtgatgcttacaataaaaccaagaagatctttgttggaggcttgccacctactttgactgatgaagagtttcgccagtactttgaagtttatggccctgtgactgatgttgcaatcatgtatgaccaggctaccaaccgtcctcgtgggtttggatttgtttccttcgactctgaagatgcggtagacagtgttttgcacaagactttccatgatttgagcggtaaacaagttgaagtaaagcgtgctcttcctaaagatgccaatcctggaggtggtggacgatcaatgggtggtggtggctctggtggttaccagggttatggtggcaatgaaagcagttatgatggacgtatggattccaataggtttttgcagcatcaaagtgttggaaatggtttaccatcttatggttcttctggttatggcgctggctatggaaatggtagtaatggtgccgggtatggtgcctatggaggttacactggttctgctggaggttatggcgctggtgctactgctggatatggagcaacgaacattccaggtgctggctatggaagtagtactggagttgctccgagaaactcatgggacactccagcttctagtggttatgggaacccaggctatgggagtggtgctgctcatagtggatatggagttcctggtgcagctcctcctacgcagtcaccatctggctatagtaaccaaggctacggttatggagggtacagtggaagtgattctggttatggaaatcaagctgcatatggtgtggttggagggcgtcctagtggtggcggttcaaacaaccctggtagtggtggctacatgggaggtggttatggtgatggatcttggcgatctgacccgtcacaaggttatggtggtgggtacaatgatggtcagggtcgacaaggccagtag

SEQ ID NO: 82300 - protein, 411 aa, Arabidopsis thaliana
  peptide (1)..(411): Ceres Seq. ID no. 12664907
  misc_feature (112)..(182): Pfam Name: RNA recognition motif. (a.k.a. RRM, RBD, or RNP domain) Pfam Description: RNA recognition motif. (a.k.a. RRM, RBD, or RNP
  misc_feature (1)..(411): Homolog of NCBI NO: 22328624 NR Description: heterogeneous nuclear ribonucleoprotein(hnRNP), protein id: At4g14300.1 [Arabidopsis thaliana]
  misc_feature (1)..(411): Homolog of NCBI NO: 7439958 NR Description: probable ribonucleoprotein - Arabidopsis thaliana ribonucleoprotein like protein [Arabidopsis thaliana]
  misc_feature (1)..(411): Homolog of NCBI NO: 15226106 NR Description: heterogeneous nuclear ribonucleoprotein(hnRNP), protein id: At2g33410.1 [Arabidopsis thaliana]
  misc_feature (1)..(410): Homolog of NCBI NO: 37535274 NR Description: putative RNA-binding protein [Oryza sativa
  misc_feature (56)..(407): Homolog of NCBI NO: 37535274 NR Description: putative RNA-binding protein [Oryza sativa
  misc_feature (1)..(380): Homolog of NCBI NO: 38175737 NR Description: putative heterogeneous nuclear ribonucleoprotein
  misc_feature (1)..(400): Homolog of NCBI NO: 6648193 NR Description: putative RNA-binding protein [Arabidopsis
  misc_feature (1)..(400): Homolog of NCBI NO: 18398061 NR Description: heterogeneous nuclear ribonucleoprotein (hnRNP), protein id: At3g07810.1, supported by cDNA: gi_15292696, by cDNA: gi_16930692 [Arabidopsis thaliana]
  misc_feature (1)..(400): Homolog of NCBI NO: 30680456 NR Description: heterogeneous nuclear ribonucleoprotein (hnRNP),
  misc_feature (1)..(400): Homolog of NCBI NO: 15292697 NR Description: putative RNA-binding protein [Arabidopsis
MDSDQGKLFVGGISWETDEDKLREHFTNYGEVSQAIVMRDKLTGRPRGFGFVIFSDPSVLDRVLQEKHSIDTREVDVKRAMSREEQQVSGRTGNLNTSRSSGGDAYNKTKKIFVGGLPPTLTDEEFRQYFEVYGPVTDVAIMYDQATNRPRGFGFVSFDSEDAVDSVLHKTFHDLSGKQVEVKRALPKDANPGGGGRSMGGGGSGGYQGYGGNESSYDGRMDSNRFLQHQSVGNGLPSYGSSGYGAGYGNGSNGAGYGAYGGYTGSAGGYGAGATAGYGATNIPGAGYGSSTGVAPRNSWDTPASSGYGNPGYGSGAAHSGYGVPGAAPPTQSPSGYSNQGYGYGGYSGSDSGYGNQAAYGVVGGRPSGGGSNNPGSGGYMGGGYGDGSWRSDPSQGYGGGYNDGQGRQGQ

SEQ ID NO: 82301 - protein, 374 aa, Arabidopsis thaliana
  peptide (1)..(374): Ceres Seq. ID no. 12664908
  misc_feature (75)..(145): Pfam Name: RNA recognition motif. (a.k.a. RRM, RBD, or RNP domain) Pfam Description: RNA recognition motif. (a.k.a. RRM, RBD, or RNP
  misc_feature (1)..(374): Homolog of NCBI NO: 22328624 NR Description: heterogeneous nuclear ribonucleoprotein(hnRNP), protein id: At4g14300.1 [Arabidopsis thaliana]
  misc_feature (1)..(374): Homolog of NCBI NO: 7439958 NR Description: probable ribonucleoprotein - Arabidopsis thaliana ribonucleoprotein like protein [Arabidopsis thaliana]
  misc_feature (1)..(374): Homolog of NCBI NO: 15226106 NR Description: heterogeneous nuclear ribonucleoprotein(hnRNP), protein id: At2g33410.1 [Arabidopsis thaliana]
  misc_feature (1)..(373): Homolog of NCBI NO: 37535274 NR Description: putative RNA-binding protein [Oryza sativa
  misc_feature (19)..(370): Homolog of NCBI NO: 37535274 NR Description: putative RNA-binding protein [Oryza sativa
  misc_feature (1)..(343): Homolog of NCBI NO: 38175737 NR Description: putative heterogeneous nuclear ribonucleoprotein
  misc_feature (1)..(363): Homolog of NCBI NO: 6648193 NR Description: putative RNA-binding protein [Arabidopsis
  misc_feature (1)..(363): Homolog of NCBI NO: 18398061 NR Description: heterogeneous nuclear ribonucleoprotein (hnRNP), protein id: At3g07810.1, supported by cDNA: gi_15292696, by cDNA: gi_16930692 [Arabidopsis thaliana]
  misc_feature (1)..(363): Homolog of NCBI NO: 30680456 NR Description: heterogeneous nuclear ribonucleoprotein (hnRNP),
  misc_feature (1)..(363): Homolog of NCBI NO: 15292697 NR Description: putative RNA-binding protein [Arabidopsis
MRDKLTGRPRGFGFVIFSDPSVLDRVLQEKHSIDTREVDVKRAMSREEQQVSGRTGNLNTSRSSGGDAYNKTKKIFVGGLPPTLTDEEFRQYFEVYGPVTDVAIMYDQATNRPRGFGFVSFDSEDAVDSVLHKTFHDLSGKQVEVKRALPKDANPGGGGRSMGGGGSGGYQGYGGNESSYDGRMDSNRFLQHQSVGNGLPSYGSSGYGAGYGNGSNGAGYGAYGGYTGSAGGYGAGATAGYGATNIPGAGYGSSTGVAPRNSWDTPASSGYGNPGYGSGAAHSGYGVPGAAPPTQSPSGYSNQGYGYGGYSGSDSGYGNQAAYGVVGGRPSGGGSNNPGSGGYMGGGYGDGSWRSDPSQGYGGGYNDGQGRQGQ

SEQ ID NO: 82302 - protein, 331 aa, Arabidopsis thaliana
  peptide (1)..(331): Ceres Seq. ID no. 12664909
  misc_feature (32)..(102): Pfam Name: RNA recognition motif. (a.k.a. RRM, RBD, or RNP domain) Pfam Description: RNA recognition motif. (a.k.a. RRM, RBD, or RNP
  misc_feature (1)..(331): Homolog of NCBI NO: 22328624 NR Description: heterogeneous nuclear ribonucleoprotein(hnRNP), protein id: At4g14300.1 [Arabidopsis thaliana]
  misc_feature (1)..(331): Homolog of NCBI NO: 7439958 NR Description: probable ribonucleoprotein - Arabidopsis thaliana ribonucleoprotein like protein [Arabidopsis thaliana]
  misc_feature (1)..(331): Homolog of NCBI NO: 15226106 NR Description: heterogeneous nuclear ribonucleoprotein(hnRNP), protein id: At2g33410.1 [Arabidopsis thaliana]
  misc_feature (1)..(330): Homolog of NCBI NO: 37535274 NR Description: putative RNA-binding protein [Oryza sativa
  misc_feature (1)..(327): Homolog of NCBI NO: 37535274 NR Description: putative RNA-binding protein [Oryza sativa
  misc_feature (1)..(300): Homolog of NCBI NO: 38175737 NR Description: putative heterogeneous nuclear ribonucleoprotein
  misc_feature (1)..(320): Homolog of NCBI NO: 6648193 NR Description: putative RNA-binding protein [Arabidopsis
  misc_feature (1)..(320): Homolog of NCBI NO: 18398061 NR Description: heterogeneous nuclear ribonucleoprotein (hnRNP), protein id: At3g07810.1, supported by cDNA: gi_15292696, by cDNA: gi_16930692 [Arabidopsis thaliana]
  misc_feature (1)..(320): Homolog of NCBI NO: 30680456 NR Description: heterogeneous nuclear ribonucleoprotein (hnRNP),
  misc_feature (1)..(320): Homolog of NCBI NO: 15292697 NR Description: putative RNA-binding protein [Arabidopsis
MSREEQQVSGRTGNLNTSRSSGGDAYNKTKKIFVGGLPPTLTDEEFRQYFEVYGPVTDVAIMYDQATNRPRGFGFVSFDSEDAVDSVLHKTFHDLSGKQVEVKRALPKDANPGGGGRSMGGGGSGGYQGYGGNESSYDGRMDSNRFLQHQSVGNGLPSYGSSGYGAGYGNGSNGAGYGAYGGYTGSAGGYGAGATAGYGATNIPGAGYGSSTGVAPRNSWDTPASSGYGNPGYGSGAAHSGYGVPGAAPPTQSPSGYSNQGYGYGGYSGSDSGYGNQAAYGVVGGRPSGGGSNNPGSGGYMGGGYGDGSWRSDPSQGYGGGYNDGQGRQGQ

SEQ ID NO: 82303 - DNA, 1464 bp, Arabidopsis thaliana
  misc_feature (1)..(1464): Ceres Seq. ID no. 12664926
  misc_feature: MA Experiment ID: 20000314 Result: Down-regulated in Transcription
  misc_feature: MA Experiment 20000314 PARAMETER Experiment Name: At_14day_Shoots-Roots_Sub_P Parameter: Age (day) Value: 14
  misc_feature: MA Experiment 20000314 PARAMETER Experiment Name: At_14day_Shoots-Roots_Sub_P Parameter: Organism Value: A. thaliana
  misc_feature: MA Experiment 20000314 PARAMETER Experiment Name: At_14day_Shoots-Roots_Sub_P Parameter: Plant Line Value: WS
  misc_feature: MA Experiment 20000314 PARAMETER Experiment Name: At_14day_Shoots-Roots_Sub_P Parameter: Tissue Value: Roots vs. Whole Plant
  misc_feature: MA Experiment ID: 20000327 Result: Down-regulated in Transcription
  misc_feature: MA Experiment 20000327 PARAMETER Experiment Name: At_42deg_Heat_Sub_P Parameter: Age (day) Value: 14
  misc_feature: MA Experiment 20000327 PARAMETER Experiment Name: At_42deg_Heat_Sub_P Parameter: Organism Value: A. thaliana
  misc_feature: MA Experiment 20000327 PARAMETER Experiment Name: At_42deg_Heat_Sub_P Parameter: Plant Line Value: WS
  misc_feature: MA Experiment 20000327 PARAMETER Experiment Name: At_42deg_Heat_Sub_P Parameter: Temperature (deg C) Value: 42 vs. 22
  misc_feature: MA Experiment 20000327 PARAMETER Experiment Name: At_42deg_Heat_Sub_P Parameter: Timepoint (hr) Value: 1
  misc_feature: MA Experiment 20000327 PARAMETER Experiment Name: At_42deg_Heat_Sub_P Parameter: Tissue Value: Aerial
  misc_feature: MA Experiment ID: 20000328 Result: Down-regulated in Transcription
  misc_feature: MA Experiment 20000328 PARAMETER Experiment Name: At_42deg_Heat_Sub_P Parameter: Age (day) Value: 14
  misc_feature: MA Experiment 20000328 PARAMETER Experiment Name: At_42deg_Heat_Sub_P Parameter: Organism Value: A. thaliana
  misc_feature: MA Experiment 20000328 PARAMETER Experiment Name: At_42deg_Heat_Sub_P Parameter: Plant Line Value: WS
  misc_feature: MA Experiment 20000328 PARAMETER Experiment Name: At_42deg_Heat_Sub_P Parameter: Temperature (deg C) Value: 42 vs. 22
  misc_feature: MA Experiment 20000328 PARAMETER Experiment Name: At_42deg_Heat_Sub_P Parameter: Timepoint (hr) Value: 6
  misc_feature: MA Experiment 20000328 PARAMETER Experiment Name: At_42deg_Heat_Sub_P Parameter: Tissue Value: Aerial
  misc_feature: MA Experiment ID: 20000355 Result: Down-regulated in Transcription
  misc_feature: MA Experiment 20000355 PARAMETER Experiment Name: At_Siliques_Sub_P Parameter: Age (day) Value: 21
  misc_feature: MA Experiment 20000355 PARAMETER Experiment Name: At_Siliques_Sub_P Parameter: Organism Value: A. thaliana
  misc_feature: MA Experiment 20000355 PARAMETER Experiment Name: At_Siliques_Sub_P Parameter: Plant Line Value: WS
  misc_feature: MA Experiment 20000355 PARAMETER Experiment Name: At_Siliques_Sub_P Parameter: Tissue Value: Less Than 5mm Siliques vs. Whole Plant
atggctcggaacaagctcgagttccctcttgatgctgaagcctacgagatcatctgcaagataggcgttggtgttagtgcttcggtctacaaggccatatgcattccgatgaactcaatggtagttgctatcaaagccatcgatcttgatcagtcgcgggctgactttgacagtcttcgccgtgaaaccaagacgatgtctctgctttctcatccgaatattctcaatgcttattgttcattcaccgttgatcgatgtctctgggtggttatgccattcatgtcttgtggctctcttcattcgatcgtctcttcgtcttttccaagtgggttaccagaaaactgcatttccgtcttcctcaaggaaactctgaatgcaatctcgtatcttcacgatcagggtcatttgcaccgtgacatcaaggcaggtaacattctggtagattctgatggatccgtgaagctcgctgatttcggagtatctgcatccatctatgaacccgtgacatcttcctctggaacaacatcttcttctttaaggttaactgatatagcgggaacaccgtattggatggctccggaagtggttcattcccacacagggtatggtttcaaagcagacatttggtctttcgggataacagcgttggagttagcacatggaagacctccgttatctcacttaccgccgttgaagagtctgctcatgaagatcaccaaaaggtttcatttttctgattacgagatcaatacgagcggaagcagcaaaaagggtaacaagaagttctcaaaagcttttagagaaatggttggtttgtgtctagagcaagatcctactaaaagaccatcggcagagaagttgttgaagcatccttttttcaagaactgtaaaggactcgactttgtggtcaagaacgtgttgcatagcttgtcaaacgcagagcagatgtttatggagagtcagattttgatcaagagtgttggagatgatgatgaagaagaagaagaagaagacgaagagatagtgaagaatagaagaatcagtgggtggaatttccgtgaagacgatctccaacttagtccagtgttcccagctactgaatcagactcttctgagtccagtccacgtgaagaagatcaatcaaaagacaaaaaggaagacgataacgtcacaataacggggtatgaactcggtttaggtttgtcgaacgaggaagctaagaaccaagaaggtgaggttgttgggtttgataaagatttggtgttagagaaactgaaagtgttgaagaaaagtttagagcatcaaagagcaagagtgtcgattataatcgaagcattgagtggggacaaggaagagaagagcagagaagaagagcttctagagatggtggagaagttaaagattgaattggaaactgagaagctaaagaccttgcgtgctgataaagatagtgttttgggttaa

SEQ ID NO: 82304 - protein, 487 aa, Arabidopsis thaliana
  peptide (1)..(487): Ceres Seq. ID no. 12664927
  misc_feature (15)..(293): Pfam Name: Protein kinase domain Pfam Description: Protein kinase domain
  misc_feature (1)..(487): Homolog of NCBI NO: 15233460 NR Description: kinase like protein; protein id: At4g14480.1
  misc_feature (8)..(473): Homolog of NCBI NO: 29150394 NR Description: putative MAP kinase [Oryza sativa (japonica
  misc_feature (7)..(389): Homolog of NCBI NO: 17529280 NR Description: putative protein kinase [Arabidopsis thaliana]
  misc_feature (7)..(389): Homolog of NCBI NO: 30685021 NR Description: protein kinase family [Arabidopsis thaliana]
  misc_feature (7)..(389): Homolog of NCBI NO: 11358725 NR Description: protein kinase-like protein - Arabidopsis thaliana
  misc_feature (8)..(378): Homolog of NCBI NO: 22328895 NR Description: putative protein; protein id: At4g24100.1, by cDNA: gi_20268685 [Arabidopsis thaliana] unknown protein [Arabidopsis thaliana]
  misc_feature (8)..(405): Homolog of NCBI NO: 17998578 NR Description: putative Ste-20 related kinase, 3'-partial [Oryza
  misc_feature (3)..(421): Homolog of NCBI NO: 7486904 NR Description: hypothetical protein T12H20.4 - Arabidopsis >gi|3600036|gb|AAC35524.1| contains similarity to protein kinase
  misc_feature (8)..(384): Homolog of NCBI NO: 2262107 NR Description: Ser/Thr protein kinase isolog [Arabidopsis
  misc_feature (8)..(358): Homolog of NCBI NO: 7487178 NR Description: hypothetical protein T19F6.90 - Arabidopsis >gi|5668638|emb|CAB51653.1| putative protein [Arabidopsis >gi|7269259|emb|CAB81328.1| putative protein [Arabidopsis
MARNKLEFPLDAEAYEIICKIGVGVSASVYKAICIPMNSMVVAIKAIDLDQSRADFDSLRRETKTMSLLSHPNILNAYCSFTVDRCLWVVMPFMSCGSLHSIVSSSFPSGLPENCISVFLKETLNAISYLHDQGHLHRDIKAGNILVDSDGSVKLADFGVSASIYEPVTSSSGTTSSSLRLTDIAGTPYWMAPEVVHSHTGYGFKADIWSFGITALELAHGRPPLSHLPPLKSLLMKITKRFHFSDYEINTSGSSKKGNKKFSKAFREMVGLCLEQDPTKRPSAEKLLKHPFFKNCKGLDFVVKNVLHSLSNAEQMFMESQILIKSVGDDDEEEEEEDEEIVKNRRISGWNFREDDLQLSPVFPATESDSSESSPREEDQSKDKKEDDNVTITGYELGLGLSNEEAKNQEGEVVGFDKDLVLEKLKVLKKSLEHQRARVSIIIEALSGDKEEKSREEELLEMVEKLKIELETEKLKTLRADKDSVLG

SEQ ID NO: 82305 - protein, 451 aa, Arabidopsis thaliana
  peptide (1)..(451): Ceres Seq. ID no. 12664928
  misc_feature (1)..(257): Pfam Name: Protein kinase domain Pfam Description: Protein kinase domain
  misc_feature (1)..(451): Homolog of NCBI NO: 15233460 NR Description: kinase like protein; protein id: At4g14480.1
  misc_feature (1)..(437): Homolog of NCBI NO: 29150394 NR Description: putative MAP kinase [Oryza sativa (japonica
  misc_feature (1)..(353): Homolog of NCBI NO: 17529280 NR Description: putative protein kinase [Arabidopsis thaliana]
  misc_feature (1)..(353): Homolog of NCBI NO: 30685021 NR Description: protein kinase family [Arabidopsis thaliana]
  misc_feature (1)..(353): Homolog of NCBI NO: 11358725 NR Description: protein kinase-like protein - Arabidopsis thaliana
  misc_feature (1)..(342): Homolog of NCBI NO: 22328895 NR Description: putative protein; protein id: At4g24100.1, by cDNA: gi_20268685 [Arabidopsis thaliana] unknown protein [Arabidopsis thaliana]
  misc_feature (1)..(369): Homolog of NCBI NO: 17998578 NR Description: putative Ste-20 related kinase, 3'-partial [Oryza
  misc_feature (1)..(385): Homolog of NCBI NO: 7486904 NR Description: hypothetical protein T12H20.4 - Arabidopsis >gi|3600036|gb|AAC35524.1| contains similarity to protein kinase
  misc_feature (1)..(348): Homolog of NCBI NO: 2262107 NR Description: Ser/Thr protein kinase isolog [Arabidopsis
  misc_feature (1)..(322): Homolog of NCBI NO: 7487178 NR Description: hypothetical protein T19F6.90 - Arabidopsis >gi|5668638|emb|CAB51653.1| putative protein [Arabidopsis >gi|7269259|emb|CAB81328.1| putative protein [Arabidopsis
MNSMVVAIKAIDLDQSRADFDSLRRETKTMSLLSHPNILNAYCSFTVDRCLWVVMPFMSCGSLHSIVSSSFPSGLPENCISVFLKETLNAISYLHDQGHLHRDIKAGNILVDSDGSVKLADFGVSASIYEPVTSSSGTTSSSLRLTDIAGTPYWMAPEVVHSHTGYGFKADIWSFGITALELAHGRPPLSHLPPLKSLLMKITKRFHFSDYEINTSGSSKKGNKKFSKAFREMVGLCLEQDPTKRPSAEKLLKHPFFKNCKGLDFVVKNVLHSLSNAEQMFMESQILIKSVGDDDEEEEEEDEEIVKNRRISGWNFREDDLQLSPVFPATESDSSESSPREEDQSKDKKEDDNVTITGYELGLGLSNEEAKNQEGEVVGFDKDLVLEKLKVLKKSLEHQRARVSIIIEALSGDKEEKSREEELLEMVEKLKIELETEKLKTLRADKDSVLG

SEQ ID NO: 82306 - protein, 448 aa, Arabidopsis thaliana
  peptide (1)..(448): Ceres Seq. ID no. 12664929
  misc_feature (1)..(254): Pfam Name: Protein kinase domain Pfam Description: Protein kinase domain
  misc_feature (1)..(448): Homolog of NCBI NO: 15233460 NR Description: kinase like protein; protein id: At4g14480.1
  misc_feature (1)..(434): Homolog of NCBI NO: 29150394 NR Description: putative MAP kinase [Oryza sativa (japonica
  misc_feature (1)..(350): Homolog of NCBI NO: 17529280 NR Description: putative protein kinase [Arabidopsis thaliana]
  misc_feature (1)..(350): Homolog of NCBI NO: 30685021 NR Description: protein kinase family [Arabidopsis thaliana]
  misc_feature (1)..(350): Homolog of NCBI NO: 11358725 NR Description: protein kinase-like protein - Arabidopsis thaliana
  misc_feature (1)..(339): Homolog of NCBI NO: 22328895 NR Description: putative protein; protein id: At4g24100.1, by cDNA: gi_20268685 [Arabidopsis thaliana] unknown protein [Arabidopsis thaliana]
  misc_feature (1)..(366): Homolog of NCBI NO: 17998578 NR Description: putative Ste-20 related kinase, 3'-partial [Oryza
  misc_feature (1)..(382): Homolog of NCBI NO: 7486904 NR Description: hypothetical protein T12H20.4 - Arabidopsis >gi|3600036|gb|AAC35524.1| contains similarity to protein kinase
  misc_feature (1)..(345): Homolog of NCBI NO: 2262107 NR Description: Ser/Thr protein kinase isolog [Arabidopsis
  misc_feature (1)..(319): Homolog of NCBI NO: 7487178 NR Description: hypothetical protein T19F6.90 - Arabidopsis >gi|5668638|emb|CAB51653.1| putative protein [Arabidopsis >gi|7269259|emb|CAB81328.1| putative protein [Arabidopsis
MVVAIKAIDLDQSRADFDSLRRETKTMSLLSHPNILNAYCSFTVDRCLWVVMPFMSCGSLHSIVSSSFPSGLPENCISVFLKETLNAISYLHDQGHLHRDIKAGNILVDSDGSVKLADFGVSASIYEPVTSSSGTTSSSLRLTDIAGTPYWMAPEVVHSHTGYGFKADIWSFGITALELAHGRPPLSHLPPLKSLLMKITKRFHFSDYEINTSGSSKKGNKKFSKAFREMVGLCLEQDPTKRPSAEKLLKHPFFKNCKGLDFVVKNVLHSLSNAEQMFMESQILIKSVGDDDEEEEEEDEEIVKNRRISGWNFREDDLQLSPVFPATESDSSESSPREEDQSKDKKEDDNVTITGYELGLGLSNEEAKNQEGEVVGFDKDLVLEKLKVLKKSLEHQRARVSIIIEALSGDKEEKSREEELLEMVEKLKIELETEKLKTLRADKDSVLG

SEQ ID NO: 82307 - DNA, 1281 bp, Arabidopsis thaliana
  misc_feature (1)..(1281): Ceres Seq. ID no. 12664940
  misc_feature: MA Experiment ID: 20000328 Result: Up-regulated in Transcription
  misc_feature: MA Experiment 20000328 PARAMETER Experiment Name: At_42deg_Heat_Sub_P Parameter: Age (day) Value: 14
  misc_feature: MA Experiment 20000328 PARAMETER Experiment Name: At_42deg_Heat_Sub_P Parameter: Organism Value: A. thaliana
  misc_feature: MA Experiment 20000328 PARAMETER Experiment Name: At_42deg_Heat_Sub_P Parameter: Plant Line Value: WS
  misc_feature: MA Experiment 20000328 PARAMETER Experiment Name: At_42deg_Heat_Sub_P Parameter: Temperature (deg C) Value: 42 vs. 22
  misc_feature: MA Experiment 20000328 PARAMETER Experiment Name: At_42deg_Heat_Sub_P Parameter: Timepoint (hr) Value: 6
  misc_feature: MA Experiment 20000328 PARAMETER Experiment Name: At_42deg_Heat_Sub_P Parameter: Tissue Value: Aerial
  misc_feature: MA Experiment ID: 20000329 Result: Up-regulated in Transcription
  misc_feature: MA Experiment 20000329 PARAMETER Experiment Name: At_4deg_Cold_Sub_P Parameter: Age (day) Value: 14
  misc_feature: MA Experiment 20000329 PARAMETER Experiment Name: At_4deg_Cold_Sub_P Parameter: Organism Value: A. thaliana
  misc_feature: MA Experiment 20000329 PARAMETER Experiment Name: At_4deg_Cold_Sub_P Parameter: Plant Line Value: WS
  misc_feature: MA Experiment 20000329 PARAMETER Experiment Name: At_4deg_Cold_Sub_P Parameter: Temperature (deg C) Value: 4 vs. 22
  misc_feature: MA Experiment 20000329 PARAMETER Experiment Name: At_4deg_Cold_Sub_P Parameter: Timepoint (hr) Value: 6
  misc_feature: MA Experiment 20000329 PARAMETER Experiment Name: At_4deg_Cold_Sub_P Parameter: Tissue Value: Aerial
  misc_feature: MA Experiment ID: 20000348 Result: Up-regulated in Transcription
  misc_feature: MA Experiment 20000348 PARAMETER Experiment Name: At_100uM_ABA_Sub_P Parameter: Age (day) Value: 14
  misc_feature: MA Experiment 20000348 PARAMETER Experiment Name: At_100uM_ABA_Sub_P Parameter: Organism Value: A. thaliana
  misc_feature: MA Experiment 20000348 PARAMETER Experiment Name: At_100uM_ABA_Sub_P Parameter: Plant Line Value: WS
  misc_feature: MA Experiment 20000348 PARAMETER Experiment Name: At_100uM_ABA_Sub_P Parameter: Timepoint (hr) Value: 1
  misc_feature: MA Experiment 20000348 PARAMETER Experiment Name: At_100uM_ABA_Sub_P Parameter: Tissue Value: Aerial
  misc_feature: MA Experiment 20000348 PARAMETER Experiment Name: At_100uM_ABA_Sub_P Parameter: Treatment Value: 100uM ABA vs. No Treatment
  misc_feature: MA Experiment ID: 20000355 Result: Down-regulated in Transcription
  misc_feature: MA Experiment 20000355 PARAMETER Experiment Name: At_Siliques_Sub_P Parameter: Age (day) Value: 21
  misc_feature: MA Experiment 20000355 PARAMETER Experiment Name: At_Siliques_Sub_P Parameter: Organism Value: A. thaliana
  misc_feature: MA Experiment 20000355 PARAMETER Experiment Name: At_Siliques_Sub_P Parameter: Plant Line Value: WS
  misc_feature: MA Experiment 20000355 PARAMETER Experiment Name: At_Siliques_Sub_P Parameter: Tissue Value: Less Than 5mm Siliques vs. Whole Plant
  misc_feature: MA Experiment ID: 20000440 Result: Down-regulated in Transcription
  misc_feature: MA Experiment 20000440 PARAMETER Experiment Name: At_Closed-Flower__Sub_P Parameter: Tissue Value: Closed Flower vs. Whole Plant
atggaatctccatatccaaaatcaccggaaaaaatcacagggacagttcttctcggaaaatacgaactcggtcgtcgactaggaagcggaagcttcgctaaagtccatgtagctcgttccatctccaccggcgaactcgtagctatcaaaatcatcgacaagcaaaaaaccatagattccggtatggagccgagaataatccgagagatcgaagcgatgcgccgcctccacaaccacccaaacgtcctcaaaatccacgaagtcatggccactaaatccaagatctacctcgtcgtcgaatacgccgccggaggagaactcttcaccaaactcatccgattcggccgccttaacgaatcggcggcgcgtcgttatttccaacaactcgcctccgcgctcagtttctgccaccgcgacggaatcgctcatcgcgacgtgaagccacagaatctcctccttgataagcaaggaaacctcaaggtctccgactttggtctatcggctttaccggagcatcgaagtaataacggattgcttcacacggcatgtggcacaccggcttatacagcaccggaagtaattgctcagagaggttacgacggtgctaaagctgatgcgtggtcgtgtggtgtgtttctctttgttcttcttgctggttacgttcctttcgatgatgccaacattgttgctatgtataggaagattcataaaagagattaccggtttccgagctggatctcgaaaccggctcgatctattatatataagttgcttgatccgaatccggagacgaggatgagtatagaagctgtgatgggaacggtttggtttcaaaaatctctagagatttcggagtttcagtctagtgtgtttgagttggatcggtttcttgagaaagaagcgaagtcgagcaatgcgattactgcgtttgatttgatctcgttgtcatcgggattggatctttcggggttgtttgagaggaggaagaggaaagagaagaggtttacggcgagagtgtcggcggaaagagtggtggagaaggcggggatgataggggaaaagttagggtttagagtggagaagaaggaagagactaaggtggtgggattgggaaaaggaagaactgcggtggtggttgaggtggtggagtttgcggaagggttggttgtggcggatgtgaaggttgtggtggaaggtgaagaggaggaggaggaggtggagtctcattggtcggagctaattgtagagcttgaggagattgtgctctcatggcacaattga

SEQ ID NO: 82308 - protein, 426 aa, Arabidopsis thaliana
  peptide (1)..(426): Ceres Seq. ID no. 12664941
  misc_feature (21)..(277): Pfam Name: Protein kinase domain Pfam Description: Protein kinase domain
  misc_feature (1)..(426): Homolog of NCBI NO: 15233500 NR Description: SNF1 like protein kinase; protein id: supported by cDNA: gi_13249502 [Arabidopsis thaliana]
  misc_feature (1)..(426): Homolog of NCBI NO: 15228920 NR Description: SNF1 related protein kinase (ATSRPK1); protein At3g23000.1, supported by cDNA: gi_13249112, supported by cDNA: supported by cDNA: gi_15451211, supported by cDNA: gi_5478790,
  misc_feature (1)..(426): Homolog of NCBI NO: 9798601 NR Description: serine/threonine protein kinase [Arabidopsis
  misc_feature (1)..(426): Homolog of NCBI NO: 15451212 NR Description: SNF1 related protein kinase [Arabidopsis thaliana]
  misc_feature (14)..(425): Homolog of NCBI NO: 15241066 NR Description: serine/threonine protein kinase ATPK10; protein At5g01810.1, supported by cDNA: gi_13249133, supported by cDNA: supported by cDNA: gi_1777311 [Arabidopsis thaliana]
  misc_feature (14)..(425): Homolog of NCBI NO: 1777312 NR Description: novel serine/threonine protein kinase
  misc_feature (3)..(304): Homolog of NCBI NO: 15218854 NR Description: protein kinase PK4, putative; protein id: supported by cDNA: gi_14334387 [Arabidopsis thaliana]
  misc_feature (279)..(421): Homolog of NCBI NO: 15218854 NR Description: protein kinase PK4, putative; protein id: supported by cDNA: gi_14334387 [Arabidopsis thaliana]
  misc_feature (13)..(394): Homolog of NCBI NO: 15235768 NR Description: (NM_119244) putative protein kinase; protein id: supported by cDNA: gi_13448032, supported by cDNA: gi_14334745, by cDNA: gi_15293234, supported by cDNA: gi_16930694, supported
MESPYPKSPEKITGTVLLGKYELGRRLGSGSFAKVHVARSISTGELVAIKIIDKQKTIDSGMEPRIIREIEAMRRLHNHPNVLKIHEVMATKSKIYLVVEYAAGGELFTKLIRFGRLNESAARRYFQQLASALSFCHRDGIAHRDVKPQNLLLDKQGNLKVSDFGLSALPEHRSNNGLLHTACGTPAYTAPEVIAQRGYDGAKADAWSCGVFLFVLLAGYVPFDDANIVAMYRKIHKRDYRFPSWISKPARSIIYKLLDPNPETRMSIEAVMGTVWFQKSLEISEFQSSVFELDRFLEKEAKSSNAITAFDLISLSSGLDLSGLFERRKRKEKRFTARVSAERVVEKAGMIGEKLGFRVEKKEETKVVGLGKGRTAVVVEVVEFAEGLVVADVKVVVEGEEEEEEVESHWSELIVELEEIVLSWHN

SEQ ID NO: 82309 - protein, 365 aa, Arabidopsis thaliana
  peptide (1)..(365): Ceres Seq. ID no. 12664942
  misc_feature (1)..(216): Pfam Name: Protein kinase domain Pfam Description: Protein kinase domain
  misc_feature (1)..(365): Homolog of NCBI NO: 15233500 NR Description: SNF1 like protein kinase; protein id: supported by cDNA: gi_13249502 [Arabidopsis thaliana]
  misc_feature (1)..(365): Homolog of NCBI NO: 15228920 NR Description: SNF1 related protein kinase (ATSRPK1); protein At3g23000.1, supported by cDNA: gi_13249112, supported by cDNA: supported by cDNA: gi_15451211, supported by cDNA: gi_5478790,
  misc_feature (1)..(365): Homolog of NCBI NO: 9798601 NR Description: serine/threonine protein kinase [Arabidopsis
  misc_feature (1)..(365): Homolog of NCBI NO: 15451212 NR Description: SNF1 related protein kinase [Arabidopsis thaliana]
  misc_feature (1)..(364): Homolog of NCBI NO: 15241066 NR Description: serine/threonine protein kinase ATPK10; protein At5g01810.1, supported by cDNA: gi_13249133, supported by cDNA: supported by cDNA: gi_1777311 [Arabidopsis thaliana]
  misc_feature (1)..(364): Homolog of NCBI NO: 1777312 NR Description: novel serine/threonine protein kinase
  misc_feature (1)..(243): Homolog of NCBI NO: 15218854 NR Description: protein kinase PK4, putative; protein id: supported by cDNA: gi_14334387 [Arabidopsis thaliana]
  misc_feature (218)..(360): Homolog of NCBI NO: 15218854 NR Description: protein kinase PK4, putative; protein id: supported by cDNA: gi_14334387 [Arabidopsis thaliana]
  misc_feature (1)..(333): Homolog of NCBI NO: 15235768 NR Description: (NM_119244) putative protein kinase; protein id: supported by cDNA: gi_13448032, supported by cDNA: gi_14334745, by cDNA: gi_15293234, supported by cDNA: gi_16930694, supported
MEPRIIREIEAMRRLHNHPNVLKIHEVMATKSKIYLVVEYAAGGELFTKLIRFGRLNESAARRYFQQLASALSFCHRDGIAHRDVKPQNLLLDKQGNLKVSDFGLSALPEHRSNNGLLHTACGTPAYTAPEVIAQRGYDGAKADAWSCGVFLFVLLAGYVPFDDANIVAMYRKIHKRDYRFPSWISKPARSIIYKLLDPNPETRMSIEAVMGTVWFQKSLEISEFQSSVFELDRFLEKEAKSSNAITAFDLISLSSGLDLSGLFERRKRKEKRFTARVSAERVVEKAGMIGEKLGFRVEKKEETKVVGLGKGRTAVVVEVVEFAEGLVVADVKVVVEGEEEEEEVESHWSELIVELEEIVLSWHN

SEQ ID NO: 82310 - protein, 354 aa, Arabidopsis thaliana
  peptide (1)..(354): Ceres Seq. ID no. 12664943
  misc_feature (1)..(205): Pfam Name: Protein kinase domain Pfam Description: Protein kinase domain
  misc_feature (1)..(354): Homolog of NCBI NO: 15233500 NR Description: SNF1 like protein kinase; protein id: supported by cDNA: gi_13249502 [Arabidopsis thaliana]
  misc_feature (1)..(354): Homolog of NCBI NO: 15228920 NR Description: SNF1 related protein kinase (ATSRPK1); protein At3g23000.1, supported by cDNA: gi_13249112, supported by cDNA: supported by cDNA: gi_15451211, supported by cDNA: gi_5478790,
  misc_feature (1)..(354): Homolog of NCBI NO: 9798601 NR Description: serine/threonine protein kinase [Arabidopsis
  misc_feature (1)..(354): Homolog of NCBI NO: 15451212 NR Description: SNF1 related protein kinase [Arabidopsis thaliana]
  misc_feature (1)..(353): Homolog of NCBI NO: 15241066 NR Description: serine/threonine protein kinase ATPK10; protein At5g01810.1, supported by cDNA: gi_13249133, supported by cDNA: supported by cDNA: gi_1777311 [Arabidopsis thaliana]
  misc_feature (1)..(353): Homolog of NCBI NO: 1777312 NR Description: novel serine/threonine protein kinase
  misc_feature (1)..(232): Homolog of NCBI NO: 15218854 NR Description: protein kinase PK4, putative; protein id: supported by cDNA: gi_14334387 [Arabidopsis thaliana]
  misc_feature (207)..(349): Homolog of NCBI NO: 15218854 NR Description: protein kinase PK4, putative; protein id: supported by cDNA: gi_14334387 [Arabidopsis thaliana]
  misc_feature (1)..(322): Homolog of NCBI NO: 15235768 NR Description: (NM_119244) putative protein kinase; protein id: supported by cDNA: gi_13448032, supported by cDNA: gi_14334745, by cDNA: gi_15293234, supported by cDNA: gi_16930694, supported
MRRLHNHPNVLKIHEVMATKSKIYLVVEYAAGGELFTKLIRFGRLNESAARRYFQQLASALSFCHRDGIAHRDVKPQNLLLDKQGNLKVSDFGLSALPEHRSNNGLLHTACGTPAYTAPEVIAQRGYDGAKADAWSCGVFLFVLLAGYVPFDDANIVAMYRKIHKRDYRFPSWISKPARSIIYKLLDPNPETRMSIEAVMGTVWFQKSLEISEFQSSVFELDRFLEKEAKSSNAITAFDLISLSSGLDLSGLFERRKRKEKRFTARVSAERVVEKAGMIGEKLGFRVEKKEETKVVGLGKGRTAVVVEVVEFAEGLVVADVKVVVEGEEEEEEVESHWSELIVELEEIVLSWHN

SEQ ID NO: 82311 - DNA, 795 bp, Arabidopsis thaliana
  misc_feature (1)..(795): Ceres Seq. ID no. 12664948
  misc_feature: MA Experiment ID: 20000307 Result: Up-regulated in Transcription
  misc_feature: MA Experiment 20000307 PARAMETER Experiment Name: At_Germinating_Seeds_Sub_P Parameter: Age (hr) Value: 24 vs. 0
  misc_feature: MA Experiment 20000307 PARAMETER Experiment Name: At_Germinating_Seeds_Sub_P Parameter: Organism Value: A. thaliana
  misc_feature: MA Experiment 20000307 PARAMETER Experiment Name: At_Germinating_Seeds_Sub_P Parameter: Plant Line Value: WS
  misc_feature: MA Experiment 20000307 PARAMETER Experiment Name: At_Germinating_Seeds_Sub_P Parameter: Tissue Value: Germinating Seeds
  misc_feature: MA Experiment ID: 20000314 Result: Down-regulated in Transcription
  misc_feature: MA Experiment 20000314 PARAMETER Experiment Name: At_14day_Shoots-Roots_Sub_P Parameter: Age (day) Value: 14
  misc_feature: MA Experiment 20000314 PARAMETER Experiment Name: At_14day_Shoots-Roots_Sub_P Parameter: Organism Value: A. thaliana
  misc_feature: MA Experiment 20000314 PARAMETER Experiment Name: At_14day_Shoots-Roots_Sub_P Parameter: Plant Line Value: WS
  misc_feature: MA Experiment 20000314 PARAMETER Experiment Name: At_14day_Shoots-Roots_Sub_P Parameter: Tissue Value: Roots vs. Whole Plant
  misc_feature: MA Experiment ID: 20000315 Result: Down-regulated in Transcription
  misc_feature: MA Experiment 20000315 PARAMETER Experiment Name: At_14day_Shoots-Roots_Sub_P Parameter: Age (day) Value: 14
  misc_feature: MA Experiment 20000315 PARAMETER Experiment Name: At_14day_Shoots-Roots_Sub_P Parameter: Organism Value: A. thaliana
  misc_feature: MA Experiment 20000315 PARAMETER Experiment Name: At_14day_Shoots-Roots_Sub_P Parameter: Plant Line Value: WS
  misc_feature: MA Experiment 20000315 PARAMETER Experiment Name: At_14day_Shoots-Roots_Sub_P Parameter: Tissue Value: Shoots vs. Whole Plant
  misc_feature: MA Experiment ID: 20000347 Result: Up-regulated in Transcription
  misc_feature: MA Experiment 20000347 PARAMETER Experiment Name: At_2mM_SA_Sub_P Parameter: Age (day) Value: 14
  misc_feature: MA Experiment 20000347 PARAMETER Experiment Name: At_2mM_SA_Sub_P Parameter: Organism Value: A. thaliana
  misc_feature: MA Experiment 20000347 PARAMETER Experiment Name: At_2mM_SA_Sub_P Parameter: Plant Line Value: WS
  misc_feature: MA Experiment 20000347 PARAMETER Experiment Name: At_2mM_SA_Sub_P Parameter: Timepoint (hr) Value: 6
  misc_feature: MA Experiment 20000347 PARAMETER Experiment Name: At_2mM_SA_Sub_P Parameter: Tissue Value: Aerial
  misc_feature: MA Experiment 20000347 PARAMETER Experiment Name: At_2mM_SA_Sub_P Parameter: Treatment Value: 2mM SA vs. No Treatment
  misc_feature: MA Experiment ID: 20000440 Result: Down-regulated in Transcription
  misc_feature: MA Experiment 20000440 PARAMETER Experiment Name: At_Closed-Flower__Sub_P Parameter: Tissue Value: Closed Flower vs. Whole Plant
  misc_feature: MA Experiment ID: 20000634 Result: Down-regulated in Transcription
  misc_feature: MA Experiment 20000634 PARAMETER Experiment Name: At_10percent_PEG_Sub_P Parameter: Age (day) Value: 12
  misc_feature: MA Experiment 20000634 PARAMETER Experiment Name: At_10percent_PEG_Sub_P Parameter: Organism Value: A. thaliana
  misc_feature: MA Experiment 20000634 PARAMETER Experiment Name: At_10percent_PEG_Sub_P Parameter: Plant Line Value: WS
  misc_feature: MA Experiment 20000634 PARAMETER Experiment Name: At_10percent_PEG_Sub_P Parameter: Timepoint (day) Value: 12
  misc_feature: MA Experiment 20000634 PARAMETER Experiment Name: At_10percent_PEG_Sub_P Parameter: Tissue Value: Whole Plant
  misc_feature: MA Experiment 20000634 PARAMETER Experiment Name: At_10percent_PEG_Sub_P Parameter: Treatment Value: 10% PEG vs. No Treatment
atgacgataaaaagtctctcttttcttgcggctctatctctctttgctttgacacttccattagtaattgcttccgatccaagcccccttcaagacttttgtgttggtgtcaacacaccagcagatggcgtgtttgtgaatggaaagttttgcaaggatccaaggatagttttcgcggatgatttctttttctcgagcctcaacagacctggaaatacaaataacgcggttgggtccaacgtgacaaccgtcaatgttaacaaccttggaggactaaacactcttggtatctcacttgttcgtatagactatgcacccaacggtcagaacccacctcacacccacccacgtgccaccgagatcttggttgttcaacaaggaactctacttgtagggtttatctcatcaaaccaagacggaaaccgtcttttcgccaaaacactcaacgtgggtgacgtatttgtgtttccagaaggactcatccatttccagttcaacctaggaggaactccagcagttgcaatcgctgctttgagcagccaaaacgcaggtgttatcacaattgctaacacaatatttgggtctaaaccagatgtagacccgaatgttcttgcaagagcattccaaatggatgttaatgcggtcaggaatttacaagccaggttctaataatgtaataagaaatatagtctttggaattactttattaatacaagcatggttcagccgtactgtgacatgtatatgatgttggttgttgttttatcttaataatattttggtcattgattaatt

SEQ ID NO: 82312 - protein, 222 aa, Arabidopsis thaliana
  peptide (1)..(222): Ceres Seq. ID no. 12664949
  misc_feature (65)..(216): Pfam Name: Cupin Pfam Description: Cupin
  misc_feature (1)..(222): Homolog of NCBI NO: 15233510 NR Description: germin precursor oxalate oxidase; protein id:
  misc_feature (5)..(222): Homolog of NCBI NO: 4098968 NR Description: germin-like protein [Arabidopsis thaliana]
  misc_feature (1)..(222): Homolog of NCBI NO: 18202910 NR Description: Germin-like protein subfamily 1 member 11
  misc_feature (3)..(222): Homolog of NCBI NO: 15241585 NR Description: germin - like protein; protein id: At5g38940.1
  misc_feature (1)..(222): Homolog of NCBI NO: 15241583 NR Description: germin - like protein; protein id: At5g38930.1
  misc_feature (1)..(222): Homolog of NCBI NO: 18202909 NR Description: Putative germin-like protein subfamily 1 member
  misc_feature (3)..(222): Homolog of NCBI NO: 15241589 NR Description: germin - like protein; protein id: At5g38960.1
  misc_feature (9)..(222): Homolog of NCBI NO: 15241636 NR Description: germin -like protein; protein id: At5g39110.1
  misc_feature (11)..(222): Homolog of NCBI NO: 15241653 NR Description: germin - like protein; protein id: At5g39150.1
  misc_feature (9)..(222): Homolog of NCBI NO: 15241640 NR Description: germin - like protein; protein id: At5g39130.1, by cDNA: gi_17065441 [Arabidopsis thaliana]
MTIKSLSFLAALSLFALTLPLVIASDPSPLQDFCVGVNTPADGVFVNGKFCKDPRIVFADDFFFSSLNRPGNTNNAVGSNVTTVNVNNLGGLNTLGISLVRIDYAPNGQNPPHTHPRATEILVVQQGTLLVGFISSNQDGNRLFAKTLNVGDVFVFPEGLIHFQFNLGGTPAVAIAALSSQNAGVITIANTIFGSKPDVDPNVLARAFQMDVNAVRNLQARF

SEQ ID NO: 82313 - DNA, 753 bp, Arabidopsis thaliana
  misc_feature (1)..(753): Ceres Seq. ID no. 12664954
  misc_feature: MA Experiment ID: 20000169 Result: Up-regulated in Transcription
  misc_feature: MA Experiment 20000169 PARAMETER Experiment Name: At_100uM_ABA_P Parameter: Age (day) Value: 14
  misc_feature: MA Experiment 20000169 PARAMETER Experiment Name: At_100uM_ABA_P Parameter: Organism Value: A. thaliana
  misc_feature: MA Experiment 20000169 PARAMETER Experiment Name: At_100uM_ABA_P Parameter: Plant Line Value: WS
  misc_feature: MA Experiment 20000169 PARAMETER Experiment Name: At_100uM_ABA_P Parameter: Timepoint (hr) Value: 6
  misc_feature: MA Experiment 20000169 PARAMETER Experiment Name: At_100uM_ABA_P Parameter: Tissue Value: Aerial
  misc_feature: MA Experiment 20000169 PARAMETER Experiment Name: At_100uM_ABA_P Parameter: Treatment Value: 100uM ABA vs. No Treatment
  misc_feature: MA Experiment ID: 20000182 Result: Up-regulated in Transcription
  misc_feature: MA Experiment 20000182 PARAMETER Experiment Name: At_2mM_SA_P Parameter: Age (day) Value: 14
  misc_feature: MA Experiment 20000182 PARAMETER Experiment Name: At_2mM_SA_P Parameter: Organism Value: A. thaliana
  misc_feature: MA Experiment 20000182 PARAMETER Experiment Name: At_2mM_SA_P Parameter: Plant Line Value: WS
  misc_feature: MA Experiment 20000182 PARAMETER Experiment Name: At_2mM_SA_P Parameter: Timepoint (hr) Value: 6
  misc_feature: MA Experiment 20000182 PARAMETER Experiment Name: At_2mM_SA_P Parameter: Tissue Value: Aerial
  misc_feature: MA Experiment 20000182 PARAMETER Experiment Name: At_2mM_SA_P Parameter: Treatment Value: 2mM SA vs. No Treatment
  misc_feature: MA Experiment ID: 20000267 Result: Up-regulated in Transcription
  misc_feature: MA Experiment 20000267 PARAMETER Experiment Name: At_Drought_P Parameter: Age (day) Value: 7
  misc_feature: MA Experiment 20000267 PARAMETER Experiment Name: At_Drought_P Parameter: Organism Value: A. thaliana
  misc_feature: MA Experiment 20000267 PARAMETER Experiment Name: At_Drought_P Parameter: Plant Line Value: WS
  misc_feature: MA Experiment 20000267 PARAMETER Experiment Name: At_Drought_P Parameter: Timepoint (hr) Value: 6
  misc_feature: MA Experiment 20000267 PARAMETER Experiment Name: At_Drought_P Parameter: Tissue Value: Whole Plant
  misc_feature: MA Experiment 20000267 PARAMETER Experiment Name: At_Drought_P Parameter: Treatment Value: Drought vs. No Drought
  misc_feature: MA Experiment ID: 20000436 Result: Up-regulated in Transcription
  misc_feature: MA Experiment 20000436 PARAMETER Experiment Name: At_Drought_P Parameter: Age (day) Value: 7
  misc_feature: MA Experiment 20000436 PARAMETER Experiment Name: At_Drought_P Parameter: Organism Value: A. thaliana
  misc_feature: MA Experiment 20000436 PARAMETER Experiment Name: At_Drought_P Parameter: Plant Line Value: WS
  misc_feature: MA Experiment 20000436 PARAMETER Experiment Name: At_Drought_P Parameter: Timepoint (hr) Value: 12
  misc_feature: MA Experiment 20000436 PARAMETER Experiment Name: At_Drought_P Parameter: Tissue Value: Whole Plant
  misc_feature: MA Experiment 20000436 PARAMETER Experiment Name: At_Drought_P Parameter: Treatment Value: Drought vs. No Drought
  misc_feature: MA Experiment ID: 20000437 Result: Up-regulated in Transcription
  misc_feature: MA Experiment 20000437 PARAMETER Experiment Name: At_Drought_P Parameter: Age (day) Value: 8
  misc_feature: MA Experiment 20000437 PARAMETER Experiment Name: At_Drought_P Parameter: Organism Value: A. thaliana
  misc_feature: MA Experiment 20000437 PARAMETER Experiment Name: At_Drought_P Parameter: Plant Line Value: WS
  misc_feature: MA Experiment 20000437 PARAMETER Experiment Name: At_Drought_P Parameter: Timepoint (hr) Value: 24
  misc_feature: MA Experiment 20000437 PARAMETER Experiment Name: At_Drought_P Parameter: Tissue Value: Whole Plant
  misc_feature: MA Experiment 20000437 PARAMETER Experiment Name: At_Drought_P Parameter: Treatment Value: Drought vs. No Drought
  misc_feature: MA Experiment ID: 20000453 Result: Up-regulated in Transcription
  misc_feature: MA Experiment 20000453 PARAMETER Experiment Name: At_100uM_ABA_P Parameter: Age (day) Value: 15
  misc_feature: MA Experiment 20000453 PARAMETER Experiment Name: At_100uM_ABA_P Parameter: Organism Value: A. thaliana
  misc_feature: MA Experiment 20000453 PARAMETER Experiment Name: At_100uM_ABA_P Parameter: Plant Line Value: WS
  misc_feature: MA Experiment 20000453 PARAMETER Experiment Name: At_100uM_ABA_P Parameter: Timepoint (hr) Value: 24
  misc_feature: MA Experiment 20000453 PARAMETER Experiment Name: At_100uM_ABA_P Parameter: Tissue Value: Aerial
  misc_feature: MA Experiment 20000453 PARAMETER Experiment Name: At_100uM_ABA_P Parameter: Treatment Value: 100uM ABA vs. No Treatment
  misc_feature: MA Experiment ID: 20001557 Result: Up-regulated in Transcription
  misc_feature: MA Experiment 20001557 PARAMETER Experiment Name: At_Drought_Soil_Dry_P Parameter: Age (day) Value: 27
  misc_feature: MA Experiment 20001557 PARAMETER Experiment Name: At_Drought_Soil_Dry_P Parameter: Organism Value: A. thaliana
  misc_feature: MA Experiment 20001557 PARAMETER Experiment Name: At_Drought_Soil_Dry_P Parameter: Plant Line Value: WS
  misc_feature: MA Experiment 20001557 PARAMETER Experiment Name: At_Drought_Soil_Dry_P Parameter: Post Timepoint (hr) Value: 3
  misc_feature: MA Experiment 20001557 PARAMETER Experiment Name: At_Drought_Soil_Dry_P Parameter: Post-Treatment Value: Re-Water vs. No Drought
  misc_feature: MA Experiment 20001557 PARAMETER Experiment Name: At_Drought_Soil_Dry_P Parameter: Timepoint (day) Value: 13
  misc_feature: MA Experiment 20001557 PARAMETER Experiment Name: At_Drought_Soil_Dry_P Parameter: Treatment Value: Drought vs. No Drought
atggctcgtcttaggaacacactctgtcttgttgctgctttacttctgatcaaccagaagacagctacttccgatttcctttctcctcttttcgctcctgtgtatgggaaatgcaaagcaccttcaaacacaacttttatgtatgaatgtgagtgtgaagacggttggaagcagtttgatcaacacctcaagtttctcccttgcatcacccccaactgtaatatctctcccttgatcactgcttctccagcacaacccaaaccgcctcccaaagacaacattacttcatttttcgaccgtaaatctctaatctcattctttttatgcttttccggccctaggcatatagtccccgtgggtcgaagatcagagcatgttaatattagcctcttccccaggatgagactagaacttgagaccttgagacacatttcctttacaaggtctcctacttgtcaatggatggactgtggaggagggctttgcaacagttcaatgccgtttcaatacagctgcaattgccgtgaaggttacagcaatctcatgaacataaccacatttccttgcttgaagcaatgtgcacttggaatggactgtttgaatcttgggattcctttgtcaaactcatcatcgtcttctccacctgctctgcctgatagcagcaagaatcaaggattaaatctaagaggatcatcgttgtggtggataacattatgtgtctctttagcgccatggaggatactcttcatttga

SEQ ID NO: 82314 - protein, 250 aa, Arabidopsis thaliana
  peptide (1)..(250): Ceres Seq. ID no. 12664955
  misc_feature (1)..(250): Homolog of NCBI NO: 22328632 NR Description: hypothetical protein; protein id: At4g14746.1
  misc_feature (146)..(221): Homolog of NCBI NO: 37534414 NR Description: putative protein C prepropeptide [Oryza sativa
  misc_feature (148)..(216): Homolog of NCBI NO: 37534418 NR Description: hypothetical protein [Oryza sativa (japonica group)] >gi|31432128|gb|AAP53798.1| hypothetical protein [Oryza
MARLRNTLCLVAALLLINQKTATSDFLSPLFAPVYGKCKAPSNTTFMYECECEDGWKQFDQHLKFLPCITPNCNISPLITASPAQPKPPPKDNITSFFDRKSLISFFLCFSGPRHIVPVGRRSEHVNISLFPRMRLELETLRHISFTRSPTCQWMDCGGGLCNSSMPFQYSCNCREGYSNLMNITTFPCLKQCALGMDCLNLGIPLSNSSSSSPPALPDSSKNQGLNLRGSSLWWITLCVSLAPWRILFI

SEQ ID NO: 82315 - protein, 204 aa, Arabidopsis thaliana
  peptide (1)..(204): Ceres Seq. ID no. 12664956
  misc_feature (1)..(204): Homolog of NCBI NO: 22328632 NR Description: hypothetical protein; protein id: At4g14746.1
  misc_feature (100)..(175): Homolog of NCBI NO: 37534414 NR Description: putative protein C prepropeptide [Oryza sativa
  misc_feature (102)..(170): Homolog of NCBI NO: 37534418 NR Description: hypothetical protein [Oryza sativa (japonica group)] >gi|31432128|gb|AAP53798.1| hypothetical protein [Oryza
MYECECEDGWKQFDQHLKFLPCITPNCNISPLITASPAQPKPPPKDNITSFFDRKSLISFFLCFSGPRHIVPVGRRSEHVNISLFPRMRLELETLRHISFTRSPTCQWMDCGGGLCNSSMPFQYSCNCREGYSNLMNITTFPCLKQCALGMDCLNLGIPLSNSSSSSPPALPDSSKNQGLNLRGSSLWWITLCVSLAPWRILFI

SEQ ID NO: 82316 - DNA, 2169 bp, Arabidopsis thaliana
  misc_feature (1)..(2169): Ceres Seq. ID no. 12664968
  misc_feature: MA Experiment ID: 20000180 Result: Down-regulated in Transcription
  misc_feature: MA Experiment 20000180 PARAMETER Experiment Name: At_Germinating_Seeds_P Parameter: Age (hr) Value: 24 vs. 0
  misc_feature: MA Experiment 20000180 PARAMETER Experiment Name: At_Germinating_Seeds_P Parameter: Tissue Value: Germinating Seeds
  misc_feature: MA Experiment ID: 20001248 Result: Up-regulated in Transcription
  misc_feature: MA Experiment 20001248 PARAMETER Experiment Name: At_Far-red-induction_P Parameter: Age (day) Value: 7
  misc_feature: MA Experiment 20001248 PARAMETER Experiment Name: At_Far-red-induction_P Parameter: Light Value: Far-red vs. White
  misc_feature: MA Experiment 20001248 PARAMETER Experiment Name: At_Far-red-induction_P Parameter: Organism Value: A. thaliana
  misc_feature: MA Experiment 20001248 PARAMETER Experiment Name: At_Far-red-induction_P Parameter: Plant Line Value: Columbia
  misc_feature: MA Experiment 20001248 PARAMETER Experiment Name: At_Far-red-induction_P Parameter: Timepoint (hr) Value: 4
  misc_feature: MA Experiment 20001248 PARAMETER Experiment Name: At_Far-red-induction_P Parameter: Tissue Value: Whole Plant
atgacacttccgccgccaatagcgtcaacggccgcgaatacaattctagagaaactctcattctgcaaatcactcaaccacatcaagcaactccatgctcacatcctccgtacagtgatcaaccacaaactcaactcctttctctttaacctctccgtctcttcttcctctatcaatctcagctacgctctcaatgtcttttcatctattccctctccgcctgaatccatcgtcttcaatccatttctccgggatctatctcgttccagtgaacctagagcgacgattctgttctatcagaggattagacatgttggtggtcgtcttgatcaattcagcttccttccgattcttaaagcagtttccaaagtctcggccttgttcgagggtatggagcttcacggcgttgcgttcaagattgcgactttgtgcgacccttttgttgagactggttttatggatatgtacgcgtcttgtggtagaattaactacgcgcgcaatgtgttcgacgaaatgtcgcatagagatgttgttacgtggaatactatgattgagaggtattgccgattcggtcttgtagatgaagcctttaagctttttgaggagatgaaggattctaatgtgatgccagatgaaatgattctctgtaacattgtctctgcatgtggtcgtactgggaatatgagatataacagagctatttacgagtttttgatagaaaatgatgttaggatggatactcatttgttgactgctcttgttactatgtatgctggagctggttgtatggatatggcaagggagttttttaggaagatgtcagtgagaaacttgtttgtttcgactgccatggtttctgggtattcaaaatgtgggagactcgatgatgctcaggttatatttgaccaaacggaaaagaaagatttggtgtgttggaccacaatgatttcggcttatgttgaaagtgattatcctcaagaagctttaagagtttttgaggaaatgtgttgctctgggatcaaacctgatgtggttagcatgttcagtgttatatctgcttgtgctaaccttggtattctggataaagcgaaatgggttcacagttgcatacatgttaacgggttggaatcagagttgtcaataaataatgccctcattaacatgtatgcgaaatgtggaggtttggatgcaacaagagacgtgtttgagaagatgccaaggaggaatgtagtgtcgtggagctctatgatcaatgcgttatctatgcatggagaagccagtgatgcacttagcttatttgcccgaatgaaacaggaaaatgtcgagcccaatgaagtcacttttgtaggagttctctatggttgtagccactcaggactagttgaagaaggtaaaaagatctttgcatcaatgactgatgaatacaatattactccaaaacttgagcattatggatgcatggtggatctctttggccgagctaatctcttacgagaagctcttgaggttatagaatcaatgccagtagcgtctaatgtagtcatatggggatcactgatgtcagcttgtagaatccatggtgagcttgagttaggcaaatttgcagccaaacgtatcctcgagctggagcctgatcatgacggggctcttgtgttaatgtccaatatatacgctagagaacagagatgggaggacgtaaggaacataagacgtgtaatggaggaaaagaatgtgttcaaggagaaaggtcttagccggattgaccaaaacgggaaatcacacgagtttctcatcggtgacaagagacataagcaatcaaatgagatttatgcgaagctagacgaggttgtaagtaaactgaagctagccggttacgttccagactgtggtagcgttttggtggatgtagaggaggaagaaaagaaggatttggttctatggcatagcgaaaagctcgcgctctgcttcggtctgatgaatgaggaaaaagaagaagagaaagactcgtgcggtgttattagaatagtgaagaatctaagggtgtgtgaggattgtcaccttttcttcaagctcgtctctaaagtgtatgaacgagagatcatagtgagagatcgaactaggtttcactgttataaaaacggtctgtgttcttgcagagattactggtga

SEQ ID NO: 82317 - protein, 722 aa, Arabidopsis thaliana
  peptide (1)..(722): Ceres Seq. ID no. 12664969
  misc_feature (310)..(344): Pfam Name: PPR repeat Pfam Description: PPR repeat
  misc_feature (6)..(722): Homolog of NCBI NO: 15227619 NR Description: hypothetical protein; protein id: At2g29760.1
  misc_feature (5)..(722): Homolog of NCBI NO: 15223099 NR Description: unknown protein; protein id: At1g08070.1 thaliana] >gi|8778839|gb|AAF79838.1|AC026875_18 T6D22.15
  misc_feature (99)..(722): Homolog of NCBI NO: 34910298 NR Description: P0013F10.8 [Oryza sativa (japonica
  misc_feature (94)..(722): Homolog of NCBI NO: 9279687 NR Description: gb|AAC35225.1~gene_id:MWI23.6~strong similarity
  misc_feature (94)..(721): Homolog of NCBI NO: 15228829 NR Description: hypothetical protein; protein id: At3g22690.1
  misc_feature (155)..(722): Homolog of NCBI NO: 15227144 NR Description: hypothetical protein; protein id: At2g22070.1
  misc_feature (129)..(722): Homolog of NCBI NO: 10178152 NR Description: selenium-binding protein-like [Arabidopsis
  misc_feature (160)..(722): Homolog of NCBI NO: 34896896 NR Description: hypothetical protein [Oryza sativa (japonica group)] >gi|24899461|gb|AAN65031.1| hypothetical protein [Oryza
  misc_feature (246)..(722): Homolog of NCBI NO: 34910594 NR Description: putative selenium-binding protein [Oryza sativa
  misc_feature (161)..(722): Homolog of NCBI NO: 15235498 NR Description: hypothetical protein; protein id: At4g02750.1
MTLPPPIASTAANTILEKLSFCKSLNHIKQLHAHILRTVINHKLNSFLFNLSVSSSSINLSYALNVFSSIPSPPESIVFNPFLRDLSRSSEPRATILFYQRIRHVGGRLDQFSFLPILKAVSKVSALFEGMELHGVAFKIATLCDPFVETGFMDMYASCGRINYARNVFDEMSHRDVVTWNTMIERYCRFGLVDEAFKLFEEMKDSNVMPDEMILCNIVSACGRTGNMRYNRAIYEFLIENDVRMDTHLLTALVTMYAGAGCMDMAREFFRKMSVRNLFVSTAMVSGYSKCGRLDDAQVIFDQTEKKDLVCWTTMISAYVESDYPQEALRVFEEMCCSGIKPDVVSMFSVISACANLGILDKAKWVHSCIHVNGLESELSINNALINMYAKCGGLDATRDVFEKMPRRNVVSWSSMINALSMHGEASDALSLFARMKQENVEPNEVTFVGVLYGCSHSGLVEEGKKIFASMTDEYNITPKLEHYGCMVDLFGRANLLREALEVIESMPVASNVVIWGSLMSACRIHGELELGKFAAKRILELEPDHDGALVLMSNIYAREQRWEDVRNIRRVMEEKNVFKEKGLSRIDQNGKSHEFLIGDKRHKQSNEIYAKLDEVVSKLKLAGYVPDCGSVLVDVEEEEKKDLVLWHSEKLALCFGLMNEEKEEEKDSCGVIRIVKNLRVCEDCHLFFKLVSKVYEREIIVRDRTRFHCYKNGLCSCRDYW

SEQ ID NO: 82318 - protein, 592 aa, Arabidopsis thaliana
  peptide (1)..(592): Ceres Seq. ID no. 12664970
  misc_feature (180)..(214): Pfam Name: PPR repeat Pfam Description: PPR repeat
  misc_feature (1)..(592): Homolog of NCBI NO: 15227619 NR Description: hypothetical protein; protein id: At2g29760.1
  misc_feature (1)..(592): Homolog of NCBI NO: 15223099 NR Description: unknown protein; protein id: At1g08070.1 thaliana] >gi|8778839|gb|AAF79838.1|AC026875_18 T6D22.15
  misc_feature (1)..(592): Homolog of NCBI NO: 34910298 NR Description: P0013F10.8 [Oryza sativa (japonica
  misc_feature (1)..(592): Homolog of NCBI NO: 9279687 NR Description: gb|AAC35225.1~gene_id:MWI23.6~strong similarity
  misc_feature (1)..(591): Homolog of NCBI NO: 15228829 NR Description: hypothetical protein; protein id: At3g22690.1
  misc_feature (25)..(592): Homolog of NCBI NO: 15227144 NR Description: hypothetical protein; protein id: At2g22070.1
  misc_feature (1)..(592): Homolog of NCBI NO: 10178152 NR Description: selenium-binding protein-like [Arabidopsis
  misc_feature (30)..(592): Homolog of NCBI NO: 34896896 NR Description: hypothetical protein [Oryza sativa (japonica group)] >gi|24899461|gb|AAN65031.1| hypothetical protein [Oryza
  misc_feature (116)..(592): Homolog of NCBI NO: 34910594 NR Description: putative selenium-binding protein [Oryza sativa
  misc_feature (31)..(592): Homolog of NCBI NO: 15235498 NR Description: hypothetical protein; protein id: At4g02750.1
MELHGVAFKIATLCDPFVETGFMDMYASCGRINYARNVFDEMSHRDVVTWNTMIERYCRFGLVDEAFKLFEEMKDSNVMPDEMILCNIVSACGRTGNMRYNRAIYEFLIENDVRMDTHLLTALVTMYAGAGCMDMAREFFRKMSVRNLFVSTAMVSGYSKCGRLDDAQVIFDQTEKKDLVCWTTMISAYVESDYPQEALRVFEEMCCSGIKPDVVSMFSVISACANLGILDKAKWVHSCIHVNGLESELSINNALINMYAKCGGLDATRDVFEKMPRRNVVSWSSMINALSMHGEASDALSLFARMKQENVEPNEVTFVGVLYGCSHSGLVEEGKKIFASMTDEYNITPKLEHYGCMVDLFGRANLLREALEVIESMPVASNVVIWGSLMSACRIHGELELGKFAAKRILELEPDHDGALVLMSNIYAREQRWEDVRNIRRVMEEKNVFKEKGLSRIDQNGKSHEFLIGDKRHKQSNEIYAKLDEVVSKLKLAGYVPDCGSVLVDVEEEEKKDLVLWHSEKLALCFGLMNEEKEEEKDSCGVIRIVKNLRVCEDCHLFFKLVSKVYEREIIVRDRTRFHCYKNGLCSCRDYW

SEQ ID NO: 82319 - protein, 570 aa, Arabidopsis thaliana
  peptide (1)..(570): Ceres Seq. ID no. 12664971
  misc_feature (158)..(192): Pfam Name: PPR repeat Pfam Description: PPR repeat
  misc_feature (1)..(570): Homolog of NCBI NO: 15227619 NR Description: hypothetical protein; protein id: At2g29760.1
  misc_feature (1)..(570): Homolog of NCBI NO: 15223099 NR Description: unknown protein; protein id: At1g08070.1 thaliana] >gi|8778839|gb|AAF79838.1|AC026875_18 T6D22.15
  misc_feature (1)..(570): Homolog of NCBI NO: 34910298 NR Description: P0013F10.8 [Oryza sativa (japonica
  misc_feature (1)..(570): Homolog of NCBI NO: 9279687 NR Description: gb|AAC35225.1~gene_id:MWI23.6~strong similarity
  misc_feature (1)..(569): Homolog of NCBI NO: 15228829 NR Description: hypothetical protein; protein id: At3g22690.1
  misc_feature (3)..(570): Homolog of NCBI NO: 15227144 NR Description: hypothetical protein; protein id: At2g22070.1
  misc_feature (1)..(570): Homolog of NCBI NO: 10178152 NR Description: selenium-binding protein-like [Arabidopsis
  misc_feature (8)..(570): Homolog of NCBI NO: 34896896 NR Description: hypothetical protein [Oryza sativa (japonica group)] >gi|24899461|gb|AAN65031.1| hypothetical protein [Oryza
  misc_feature (94)..(570): Homolog of NCBI NO: 34910594 NR Description: putative selenium-binding protein [Oryza sativa
  misc_feature (9)..(570): Homolog of NCBI NO: 15235498 NR Description: hypothetical protein; protein id: At4g02750.1
MDMYASCGRINYARNVFDEMSHRDVVTWNTMIERYCRFGLVDEAFKLFEEMKDSNVMPDEMILCNIVSACGRTGNMRYNRAIYEFLIENDVRMDTHLLTALVTMYAGAGCMDMAREFFRKMSVRNLFVSTAMVSGYSKCGRLDDAQVIFDQTEKKDLVCWTTMISAYVESDYPQEALRVFEEMCCSGIKPDVVSMFSVISACANLGILDKAKWVHSCIHVNGLESELSINNALINMYAKCGGLDATRDVFEKMPRRNVVSWSSMINALSMHGEASDALSLFARMKQENVEPNEVTFVGVLYGCSHSGLVEEGKKIFASMTDEYNITPKLEHYGCMVDLFGRANLLREALEVIESMPVASNVVIWGSLMSACRIHGELELGKFAAKRILELEPDHDGALVLMSNIYAREQRWEDVRNIRRVMEEKNVFKEKGLSRIDQNGKSHEFLIGDKRHKQSNEIYAKLDEVVSKLKLAGYVPDCGSVLVDVEEEEKKDLVLWHSEKLALCFGLMNEEKEEEKDSCGVIRIVKNLRVCEDCHLFFKLVSKVYEREIIVRDRTRFHCYKNGLCSCRDYW

SEQ ID NO: 82320 - DNA, 459 bp, Arabidopsis thaliana
  misc_feature (1)..(459): Ceres Seq. ID no. 12664972
  misc_feature: MA Experiment ID: 20000328 Result: Down-regulated in Transcription
  misc_feature: MA Experiment 20000328 PARAMETER Experiment Name: At_42deg_Heat_Sub_P Parameter: Age (day) Value: 14
  misc_feature: MA Experiment 20000328 PARAMETER Experiment Name: At_42deg_Heat_Sub_P Parameter: Organism Value: A. thaliana
  misc_feature: MA Experiment 20000328 PARAMETER Experiment Name: At_42deg_Heat_Sub_P Parameter: Plant Line Value: WS
  misc_feature: MA Experiment 20000328 PARAMETER Experiment Name: At_42deg_Heat_Sub_P Parameter: Temperature (deg C) Value: 42 vs. 22
  misc_feature: MA Experiment 20000328 PARAMETER Experiment Name: At_42deg_Heat_Sub_P Parameter: Timepoint (hr) Value: 6
  misc_feature: MA Experiment 20000328 PARAMETER Experiment Name: At_42deg_Heat_Sub_P Parameter: Tissue Value: Aerial
atgaaaatccacccattacccagaaacgaaaataacaacaatctgatccatcacgctcgtgatccgacccgagaacccggaaagaagctccgtcgtctcccacatatcttcagccgtgttctagagctgcccttgaagtcagacgctgacgtggctgttgaagagagtcatgactgcttcaggttcgtcgcggaaacagacgggggaggaggaggaggtgtgagggcttacatggttgagattcatcctggtgtgaccaagattcttgtgagaaccaatggttcatcgtctcttggtttgtcgcttgatgagcttgagcttgacgtgtggcgtttcaggctaccggaatcaactaggcctgagctcgttaccgtggattgcgacggcgatggagaattgattgtcactgtgcctaagattgaagacaatggtagagatttgatagtgcttgtacagtaa

SEQ ID NO: 82321 - protein, 152 aa, Arabidopsis thaliana
  peptide (1)..(152): Ceres Seq. ID no. 12664973
  misc_feature (1)..(152): Homolog of NCBI NO: 15233585 NR Description: hypothetical protein; protein id: At4g14830.1
  misc_feature (1)..(139): Homolog of NCBI NO: 11994285 NR Description: emb|CAB10262.1~gene_id:F16J14.9~similar to
  misc_feature (1)..(139): Homolog of NCBI NO: 18403425 NR Description: expressed protein; protein id: At3g22530.1, by cDNA: 14572., supported by cDNA: gi_18252912 [Arabidopsis >gi|18252913|gb|AAL62383.1| unknown protein [Arabidopsis
  misc_feature (1)..(139): Homolog of NCBI NO: 21553463 NR Description: unknown [Arabidopsis thaliana]
  misc_feature (1)..(139): Homolog of NCBI NO: 34394452 NR Description: hypothetical protein [Oryza sativa (japonica
  misc_feature (27)..(144): Homolog of NCBI NO: 22773244 NR Description: Hypothetical protein [Oryza sativa (japonica
  misc_feature (25)..(144): Homolog of NCBI NO: 37534622 NR Description: putative DNA-binding protein [Oryza sativa
MKIHPLPRNENNNNLIHHARDPTREPGKKLRRLPHIFSRVLELPLKSDADVAVEESHDCFRFVAETDGGGGGGVRAYMVEIHPGVTKILVRTNGSSSLGLSLDELELDVWRFRLPESTRPELVTVDCDGDGELIVTVPKIEDNGRDLIVLVQ

SEQ ID NO: 82322 - DNA, 1353 bp, Arabidopsis thaliana
  misc_feature (1)..(1353): Ceres Seq. ID no. 12664974
  misc_feature: MA Experiment ID: 108434 Result: Up-regulated in Transcription
  misc_feature: MA Experiment 108434 PARAMETER Experiment Name: At_Root_Tips_cDNA_P Parameter: Tissue Value: Root Tips
  misc_feature: MA Experiment ID: 108461 Result: Up-regulated in Transcription
  misc_feature: MA Experiment 108461 PARAMETER Experiment Name: At_Germinating_Seeds_cDNA_P Parameter: Age (day) Value: 1 vs. 0
  misc_feature: MA Experiment 108461 PARAMETER Experiment Name: At_Germinating_Seeds_cDNA_P Parameter: Tissue Value: Germinating Seeds
  misc_feature: MA Experiment ID: 108462 Result: Up-regulated in Transcription
  misc_feature: MA Experiment 108462 PARAMETER Experiment Name: At_Germinating_Seeds_cDNA_P Parameter: Age (day) Value: 2 vs. 0
  misc_feature: MA Experiment 108462 PARAMETER Experiment Name: At_Germinating_Seeds_cDNA_P Parameter: Tissue Value: Germinating Seeds
  misc_feature: MA Experiment ID: 108585 Result: Up-regulated in Transcription
  misc_feature: MA Experiment 108585 PARAMETER Experiment Name: At_5mM_NaNP_cDNA_P Parameter: Timepoint (hr) Value: 6
  misc_feature: MA Experiment 108585 PARAMETER Experiment Name: At_5mM_NaNP_cDNA_P Parameter: Tissue Value: Aerial
  misc_feature: MA Experiment 108585 PARAMETER Experiment Name: At_5mM_NaNP_cDNA_P Parameter: Treatment Value: null
  misc_feature: MA Experiment ID: 108595 Result: Down-regulated in Transcription
  misc_feature: MA Experiment 108595 PARAMETER Experiment Name: At_Ler-pi_Ovule_cDNA_P Parameter: Plant Line Value: null
  misc_feature: MA Experiment ID: 108668 Result: Down-regulated in Transcription
  misc_feature: MA Experiment 108668 PARAMETER Experiment Name: At_2mM_SA_cDNA_P Parameter: Plant Line Value: WS
  misc_feature: MA Experiment 108668 PARAMETER Experiment Name: At_2mM_SA_cDNA_P Parameter: Timepoint (hr) Value: 6
  misc_feature: MA Experiment 108668 PARAMETER Experiment Name: At_2mM_SA_cDNA_P Parameter: Treatment Value: 2mM SA vs. No Treatment
  misc_feature: MA Experiment ID: 20000087 Result: Down-regulated in Transcription
  misc_feature: MA Experiment 20000087 PARAMETER Experiment Name: At_100uM_ABA_Mutants_cDNA_P Parameter: Plant Line Value: WS
  misc_feature: MA Experiment 20000087 PARAMETER Experiment Name: At_100uM_ABA_Mutants_cDNA_P Parameter: Timepoint (hr) Value: 6
  misc_feature: MA Experiment 20000087 PARAMETER Experiment Name: At_100uM_ABA_Mutants_cDNA_P Parameter: Tissue Value: Aerial
  misc_feature: MA Experiment 20000087 PARAMETER Experiment Name: At_100uM_ABA_Mutants_cDNA_P Parameter: Treatment Value: 100uM ABA vs. No Treatment
  misc_feature: MA Experiment ID: 20000113 Result: Down-regulated in Transcription
  misc_feature: MA Experiment 20000113 PARAMETER Experiment Name: At_42deg_Heat_cDNA_P Parameter: Temperature (deg C) Value: 42 vs. 22
  misc_feature: MA Experiment 20000113 PARAMETER Experiment Name: At_42deg_Heat_cDNA_P Parameter: Timepoint (hr) Value: 8
  misc_feature: MA Experiment 20000113 PARAMETER Experiment Name: At_42deg_Heat_cDNA_P Parameter: Tissue Value: Aerial
  misc_feature: MA Experiment ID: 20000117 Result: Down-regulated in Transcription
  misc_feature: MA Experiment 20000117 PARAMETER Experiment Name: At_100uM_ABA_Mutants_cDNA_P Parameter: Plant Line Value: Columbia
  misc_feature: MA Experiment 20000117 PARAMETER Experiment Name: At_100uM_ABA_Mutants_cDNA_P Parameter: Timepoint (hr) Value: 6
  misc_feature: MA Experiment 20000117 PARAMETER Experiment Name: At_100uM_ABA_Mutants_cDNA_P Parameter: Tissue Value: Aerial
  misc_feature: MA Experiment 20000117 PARAMETER Experiment Name: At_100uM_ABA_Mutants_cDNA_P Parameter: Treatment Value: 100uM ABA vs. No Treatment
  misc_feature: MA Experiment ID: 20000224 Result: Down-regulated in Transcription
  misc_feature: MA Experiment ID: 20000306 Result: Up-regulated in Transcription
  misc_feature: MA Experiment 20000306 PARAMETER Experiment Name: At_Germinating_Seeds_Sub_P Parameter: Age (hr) Value: 6 vs. 0
  misc_feature: MA Experiment 20000306 PARAMETER Experiment Name: At_Germinating_Seeds_Sub_P Parameter: Organism Value: A. thaliana
  misc_feature: MA Experiment 20000306 PARAMETER Experiment Name: At_Germinating_Seeds_Sub_P Parameter: Plant Line Value: WS
  misc_feature: MA Experiment 20000306 PARAMETER Experiment Name: At_Germinating_Seeds_Sub_P Parameter: Tissue Value: Germinating Seeds
  misc_feature: MA Experiment ID: 20000307 Result: Up-regulated in Transcription
  misc_feature: MA Experiment 20000307 PARAMETER Experiment Name: At_Germinating_Seeds_Sub_P Parameter: Age (hr) Value: 24 vs. 0
  misc_feature: MA Experiment 20000307 PARAMETER Experiment Name: At_Germinating_Seeds_Sub_P Parameter: Organism Value: A. thaliana
  misc_feature: MA Experiment 20000307 PARAMETER Experiment Name: At_Germinating_Seeds_Sub_P Parameter: Plant Line Value: WS
  misc_feature: MA Experiment 20000307 PARAMETER Experiment Name: At_Germinating_Seeds_Sub_P Parameter: Tissue Value: Germinating Seeds
  misc_feature: MA Experiment ID: 20000347 Result: Down-regulated in Transcription
  misc_feature: MA Experiment 20000347 PARAMETER Experiment Name: At_2mM_SA_Sub_P Parameter: Age (day) Value: 14
  misc_feature: MA Experiment 20000347 PARAMETER Experiment Name: At_2mM_SA_Sub_P Parameter: Organism Value: A. thaliana
  misc_feature: MA Experiment 20000347 PARAMETER Experiment Name: At_2mM_SA_Sub_P Parameter: Plant Line Value: WS
  misc_feature: MA Experiment 20000347 PARAMETER Experiment Name: At_2mM_SA_Sub_P Parameter: Timepoint (hr) Value: 6
  misc_feature: MA Experiment 20000347 PARAMETER Experiment Name: At_2mM_SA_Sub_P Parameter: Tissue Value: Aerial
  misc_feature: MA Experiment 20000347 PARAMETER Experiment Name: At_2mM_SA_Sub_P Parameter: Treatment Value: 2mM SA vs. No Treatment
atgagagagtgcatttcgatccacattggtcaggctggtattcaagtcggaaatgcttgctgggagctttactgtcttgaacatggcattcagcctgatggccagatgcctggtgacaagactgttggtggaggtgatgatgctttcaacaccttcttcagtgaaaccggtgcaggtaagcacgtcccacgtgctgtctttgttgatcttgagccaactgtgatcgacgaggtcaggactggtacttaccgtcagcttttccaccctgaacaactcatcagtggtaaagaagacgctgctaacaatttcgcccgtggtcattacaccattgggaaagagattgttgatctctgcttggaccggatcagaaagctcgctgataactgtactggtcttcaaggattccttgttttcaacgctgttggtggtgggactggatctggtcttggatctcttctccttgagagactttctgttgactatgggaaaaagtccaagttgggtttcactgtttacccatctccacaggtgtctacctctgtggttgagccttacaacagtgtcctctccactcactctctcttggaacacactgatgtctccatcctcctcgacaatgaagctatctatgacatctgtagacgctcccttaacattgagagacctacctacaccaacctcaaccgtctcgtctctcaggttatttcttccttgactgcttctctgaggttcgatggtgccttgaatgttgatgttactgagttccaaaccaacttggttccatacccaaggatccacttcatgctttcgtcctatgcaccagtcatctccgcggagaaggccttccatgagcaactctcagttgctgagatcacgaacagtgcctttgaacctgcttccatgatggcaaagtgtgacccgcgacatggaaagtacatggcttgctgtttgatgtaccgtggtgatgtagtccccaaggatgtgaacgcagcggttggcaccatcaagaccaagcgaactattcagtttgttgactggtgtcctactggattcaagtgtggtatcaactaccagccaccaactgttgttcctggaggtgatcttgctaaagtccagagagctgtttgtatgatctcaaactcaaccagtgttgctgaggtattctcccgtattgatcacaagtttgatcttatgtacgccaaacgtgctttcgttcactggtatgttggtgagggtatggaagaaggagaattctcagaggctcgtgaggatcttgcagcattggagaaggattatgaagaggtcggtgctgaaggtggtgacgatgaggatgatgaaggagaggaatactaa

SEQ ID NO: 82323 - protein, 450 aa, Arabidopsis thaliana; identical to SEQ ID NO: 46322
  peptide (1)..(450): Ceres Seq. ID no. 12664975
  misc_feature (49)..(246): Pfam Name: Tubulin/FtsZ family, GTPase domain Pfam Description: Tubulin/FtsZ family, GTPase domain
  misc_feature (1)..(450): Homolog of NCBI NO: 15233627 NR Description: tubulin alpha-6 chain (TUA6); protein id: supported by cDNA: gi_16226461, supported by cDNA: gi_16604479,
  misc_feature (1)..(450): Homolog of NCBI NO: 15220329 NR Description: tubulin alpha-2/alpha-4 chain; protein id:
  misc_feature (1)..(450): Homolog of NCBI NO: 16226462 NR Description: AT4g14960/dl3520c [Arabidopsis thaliana]
  misc_feature (1)..(450): Homolog of NCBI NO: 464849 NR Description: TUBULIN ALPHA CHAIN >gi|486847|pir||S36232
  misc_feature (1)..(449): Homolog of NCBI NO: 1174592 NR Description: TUBULIN ALPHA-1 CHAIN >gi|2119270|pir||S60233
  misc_feature (1)..(450): Homolog of NCBI NO: 29124983 NR Description: alpha-tubulin 1 [Populus tremuloides]
  misc_feature (1)..(450): Homolog of NCBI NO: 15029368 NR Description: alpha tubulin subunit [Rosa hybrid cultivar]
  misc_feature (1)..(450): Homolog of NCBI NO: 8928432 NR Description: Tubulin alpha-3 chain >gi|4165488|emb|CAA10663.1|
  misc_feature (1)..(450): Homolog of NCBI NO: 17402469 NR Description: alpha-tubulin [Nicotiana tabacum]
  misc_feature (1)..(450): Homolog of NCBI NO: 8928422 NR Description: Tubulin alpha-2 chain >gi|1619297|emb|CAA69724.1|

SEQ ID NO: 82324 - protein, 415 aa, Arabidopsis thaliana; identical to SEQ ID NO: 46323
  peptide (1)..(415): Ceres Seq. ID no. 12664976
  misc_feature (14)..(211): Pfam Name: Tubulin/FtsZ family, GTPase domain Pfam Description: Tubulin/FtsZ family, GTPase domain
  misc_feature (1)..(415): Homolog of NCBI NO: 15233627 NR Description: tubulin alpha-6 chain (TUA6); protein id: supported by cDNA: gi_16226461, supported by cDNA: gi_16604479,
  misc_feature (1)..(415): Homolog of NCBI NO: 15220329 NR Description: tubulin alpha-2/alpha-4 chain; protein id:
  misc_feature (1)..(415): Homolog of NCBI NO: 16226462 NR Description: AT4g14960/dl3520c [Arabidopsis thaliana]
  misc_feature (1)..(415): Homolog of NCBI NO: 464849 NR Description: TUBULIN ALPHA CHAIN >gi|486847|pir||S36232
  misc_feature (1)..(414): Homolog of NCBI NO: 1174592 NR Description: TUBULIN ALPHA-1 CHAIN >gi|2119270|pir||S60233
  misc_feature (1)..(415): Homolog of NCBI NO: 29124983 NR Description: alpha-tubulin 1 [Populus tremuloides]
  misc_feature (1)..(415): Homolog of NCBI NO: 15029368 NR Description: alpha tubulin subunit [Rosa hybrid cultivar]
  misc_feature (1)..(415): Homolog of NCBI NO: 8928432 NR Description: Tubulin alpha-3 chain >gi|4165488|emb|CAA10663.1|
  misc_feature (1)..(415): Homolog of NCBI NO: 17402469 NR Description: alpha-tubulin [Nicotiana tabacum]
  misc_feature (1)..(415): Homolog of NCBI NO: 8928422 NR Description: Tubulin alpha-2 chain >gi|1619297|emb|CAA69724.1|

SEQ ID NO: 82325 - DNA, 1475 bp, Arabidopsis thaliana
  misc_feature (1)..(1475): Ceres Seq. ID no. 12664989
  misc_feature: MA Experiment ID: 20000184 Result: Down-regulated in Transcription
  misc_feature: MA Experiment 20000184 PARAMETER Experiment Name: At_Shoots__P Parameter: Age (day) Value: 7
  misc_feature: MA Experiment 20000184 PARAMETER Experiment Name: At_Shoots__P Parameter: Tissue Value: Shoots vs. Whole Plant
  misc_feature: MA Experiment ID: 20000185 Result: Up-regulated in Transcription
  misc_feature: MA Experiment 20000185 PARAMETER Experiment Name: At_Roots__P Parameter: Age (day) Value: 7 vs. 21
  misc_feature: MA Experiment 20000185 PARAMETER Experiment Name: At_Roots__P Parameter: Organism Value: A. thaliana
  misc_feature: MA Experiment 20000185 PARAMETER Experiment Name: At_Roots__P Parameter: Tissue Value: Roots vs. Whole Plant
  misc_feature: MA Experiment ID: 20000794 Result: Up-regulated in Transcription
  misc_feature: MA Experiment 20000794 PARAMETER Experiment Name: At_Petals_P Parameter: Age (day) Value: 23-25 days
  misc_feature: MA Experiment 20000794 PARAMETER Experiment Name: At_Petals_P Parameter: Plant Line Value: WS
  misc_feature: MA Experiment 20000794 PARAMETER Experiment Name: At_Petals_P Parameter: Tissue Value: Petals vs. Whole plant
  misc_feature: MA Experiment ID: 20001451 Result: Down-regulated in Transcription
  misc_feature: MA Experiment 20001451 PARAMETER Experiment Name: At_Far-red-induction_P Parameter: Age (day) Value: 7
  misc_feature: MA Experiment 20001451 PARAMETER Experiment Name: At_Far-red-induction_P Parameter: Light Value: Far-red vs. White
  misc_feature: MA Experiment 20001451 PARAMETER Experiment Name: At_Far-red-induction_P Parameter: Organism Value: A. thaliana
  misc_feature: MA Experiment 20001451 PARAMETER Experiment Name: At_Far-red-induction_P Parameter: Plant Line Value: Columbia
  misc_feature: MA Experiment 20001451 PARAMETER Experiment Name: At_Far-red-induction_P Parameter: Timepoint (hr) Value: 24
  misc_feature: MA Experiment 20001451 PARAMETER Experiment Name: At_Far-red-induction_P Parameter: Tissue Value: Whole Plant
  misc_feature: MA Experiment ID: 20001558 Result: Down-regulated in Transcription
  misc_feature: MA Experiment 20001558 PARAMETER Experiment Name: At_Drought_Soil_Dry_P Parameter: Age (day) Value: 27
  misc_feature: MA Experiment 20001558 PARAMETER Experiment Name: At_Drought_Soil_Dry_P Parameter: Organism Value: A. thaliana
  misc_feature: MA Experiment 20001558 PARAMETER Experiment Name: At_Drought_Soil_Dry_P Parameter: Plant Line Value: WS
  misc_feature: MA Experiment 20001558 PARAMETER Experiment Name: At_Drought_Soil_Dry_P Parameter: Post Timepoint (hr) Value: 6
  misc_feature: MA Experiment 20001558 PARAMETER Experiment Name: At_Drought_Soil_Dry_P Parameter: Post-Treatment Value: Re-Water vs. No Drought
  misc_feature: MA Experiment 20001558 PARAMETER Experiment Name: At_Drought_Soil_Dry_P Parameter: Timepoint (day) Value: 13
  misc_feature: MA Experiment 20001558 PARAMETER Experiment Name: At_Drought_Soil_Dry_P Parameter: Treatment Value: Drought vs. No Drought
  misc_feature: MA Experiment ID: 20001560 Result: Down-regulated in Transcription
  misc_feature: MA Experiment 20001560 PARAMETER Experiment Name: At_Drought_Soil_Dry_P Parameter: Age (day) Value: 28
  misc_feature: MA Experiment 20001560 PARAMETER Experiment Name: At_Drought_Soil_Dry_P Parameter: Organism Value: A. thaliana
  misc_feature: MA Experiment 20001560 PARAMETER Experiment Name: At_Drought_Soil_Dry_P Parameter: Plant Line Value: WS
  misc_feature: MA Experiment 20001560 PARAMETER Experiment Name: At_Drought_Soil_Dry_P Parameter: Post Timepoint (hr) Value: None
  misc_feature: MA Experiment 20001560 PARAMETER Experiment Name: At_Drought_Soil_Dry_P Parameter: Post-Treatment Value: None
  misc_feature: MA Experiment 20001560 PARAMETER Experiment Name: At_Drought_Soil_Dry_P Parameter: Timepoint (day) Value: 14
  misc_feature: MA Experiment 20001560 PARAMETER Experiment Name: At_Drought_Soil_Dry_P Parameter: Treatment Value: Drought vs. No Drought
agaaagtgaaaaagagagcgagcgatgaacagtatcttctccattgacgatttctccgatcctttctgggaaactcctccgattcctctcaatcccgactcttctaagcctgttacggcggatgaagttagccagagtcaaccggaatggactttcgagatgtttctcgaagagatttcttcgtcggcggtgagctctgagccacttggtaacaacaacaacgcgatcgtcggtgtttcttcggcgcaatctcttccttctgtttccggacagaatgatttcgaggatgatagtcgatttcgtgatcgcgattcgggaaatttggattgtgctgctcccatgacgacgaagacggtgattgttgattccgatgattatcgtcgtgttcttaagaacaagcttgagactgagtgcgctactgttgtttctcttcgggttgggtctgtgaagcctgaagattcgactagttctccagaaactcaacttcaaccagttcaatccagtcctcttactcaaggttctttgatgaccccaggagaacttggtgttacttcttccttaccagctgaggtgaaaaaaactggtgtatcaatgaagcaggttactagtggatcgtcgagagaatattctgatgacgaggaccttgatgaagagaatgaaaccaccggttccttgaagccagaggacgttaaaaaatctagaaggatgctgtcaaatcgtgagtcagctaggcgatctagaaggagaaagcaggagcaaacaagtgacctcgaaacacaggttaatgatctaaaaggtgagcattcatcacttcttaaacaactgagcaacatgaatcacaagtatgacgaggctgctgttggcaatagaatactaaaggctgacattgagacattaagagctaaggtgaaaatggcggaagaaaccgtgaagagagtaacaggaatgaatccgatgcttctcggaagatcaagtggacataacaacaacaacagaatgccaataactggtaacaacaggatggattcttctagcattattccagcttatcaaccacactcaaacctaaaccatatgtcaaaccaaaacatcgggatcccaaccattctacctccaagactcggaaacaatttcgctgctcctccatcccaaaccagctctcccttgcagagaattagaaatgggcaaaatcaccatgttactccaagcgccaacccgtatggctggaataccgaacctcagaacgattcagcatggccgaaaaaatgcgtggactgatcaaacaagaagcgggtttcgcactatattaatgtctatgcatctgtaatttgtaagtgttattaagttacgaatcatgagaaaacatcttgtgaaaatacagtctcatggcttatatatatatataagctctgtcttataacattacaagattcttatttgagaatcgtctttctatttatagctaataacagagt

SEQ ID NO: 82326 - protein, 417 aa, Arabidopsis thaliana
  peptide (1)..(417): Ceres Seq. ID no. 12664990
  misc_feature (219)..(283): Pfam Name: bZIP transcription factor Pfam Description: bZIP transcription factor
  misc_feature (1)..(417): Homolog of NCBI NO: 30679226 NR Description: bZIP protein [Arabidopsis thaliana]
  misc_feature (1)..(417): Homolog of NCBI NO: 15235433 NR Description: bZIP protein; protein id: At4g02640.1, supported
  misc_feature (8)..(417): Homolog of NCBI NO: 19423919 NR Description: unknown protein [Arabidopsis thaliana]
  misc_feature (1)..(358): Homolog of NCBI NO: 30694089 NR Description: bZIP transcription factor-related protein
  misc_feature (111)..(384): Homolog of NCBI NO: 100163 NR Description: light-induced protein CPRF-2 - parsley
  misc_feature (111)..(384): Homolog of NCBI NO: 2842757 NR Description: Light-inducible protein CPRF-2
  misc_feature (52)..(374): Homolog of NCBI NO: 16797791 NR Description: bZIP transcription factor [Nicotiana tabacum]
MNSIFSIDDFSDPFWETPPIPLNPDSSKPVTADEVSQSQPEWTFEMFLEEISSSAVSSEPLGNNNNAIVGVSSAQSLPSVSGQNDFEDDSRFRDRDSGNLDCAAPMTTKTVIVDSDDYRRVLKNKLETECATVVSLRVGSVKPEDSTSSPETQLQPVQSSPLTQGSLMTPGELGVTSSLPAEVKKTGVSMKQVTSGSSREYSDDEDLDEENETTGSLKPEDVKKSRRMLSNRESARRSRRRKQEQTSDLETQVNDLKGEHSSLLKQLSNMNHKYDEAAVGNRILKADIETLRAKVKMAEETVKRVTGMNPMLLGRSSGHNNNNRMPITGNNRMDSSSIIPAYQPHSNLNHMSNQNIGIPTILPPRLGNNFAAPPSQTSSPLQRIRNGQNHHVTPSANPYGWNTEPQNDSAWPKKCVD

SEQ ID NO: 82327 - protein, 372 aa, Arabidopsis thaliana
  peptide (1)..(372): Ceres Seq. ID no. 12664991
  misc_feature (174)..(238): Pfam Name: bZIP transcription factor Pfam Description: bZIP transcription factor
  misc_feature (1)..(372): Homolog of NCBI NO: 30679226 NR Description: bZIP protein [Arabidopsis thaliana]
  misc_feature (1)..(372): Homolog of NCBI NO: 15235433 NR Description: bZIP protein; protein id: At4g02640.1, supported
  misc_feature (1)..(372): Homolog of NCBI NO: 19423919 NR Description: unknown protein [Arabidopsis thaliana]
  misc_feature (1)..(313): Homolog of NCBI NO: 30694089 NR Description: bZIP transcription factor-related protein
  misc_feature (66)..(339): Homolog of NCBI NO: 100163 NR Description: light-induced protein CPRF-2 - parsley
  misc_feature (66)..(339): Homolog of NCBI NO: 2842757 NR Description: Light-inducible protein CPRF-2
  misc_feature (7)..(329): Homolog of NCBI NO: 16797791 NR Description: bZIP transcription factor [Nicotiana tabacum]
MFLEEISSSAVSSEPLGNNNNAIVGVSSAQSLPSVSGQNDFEDDSRFRDRDSGNLDCAAPMTTKTVIVDSDDYRRVLKNKLETECATVVSLRVGSVKPEDSTSSPETQLQPVQSSPLTQGSLMTPGELGVTSSLPAEVKKTGVSMKQVTSGSSREYSDDEDLDEENETTGSLKPEDVKKSRRMLSNRESARRSRRRKQEQTSDLETQVNDLKGEHSSLLKQLSNMNHKYDEAAVGNRILKADIETLRAKVKMAEETVKRVTGMNPMLLGRSSGHNNNNRMPITGNNRMDSSSIIPAYQPHSNLNHMSNQNIGIPTILPPRLGNNFAAPPSQTSSPLQRIRNGQNHHVTPSANPYGWNTEPQNDSAWPKKCVD

SEQ ID NO: 82328 - protein, 312 aa, Arabidopsis thaliana
  peptide (1)..(312): Ceres Seq. ID no. 12664992
  misc_feature (114)..(178): Pfam Name: bZIP transcription factor Pfam Description: bZIP transcription factor
  misc_feature (1)..(312): Homolog of NCBI NO: 30679226 NR Description: bZIP protein [Arabidopsis thaliana]
  misc_feature (1)..(312): Homolog of NCBI NO: 15235433 NR Description: bZIP protein; protein id: At4g02640.1, supported
  misc_feature (1)..(312): Homolog of NCBI NO: 19423919 NR Description: unknown protein [Arabidopsis thaliana]
  misc_feature (1)..(253): Homolog of NCBI NO: 30694089 NR Description: bZIP transcription factor-related protein
  misc_feature (6)..(279): Homolog of NCBI NO: 100163 NR Description: light-induced protein CPRF-2 - parsley
  misc_feature (6)..(279): Homolog of NCBI NO: 2842757 NR Description: Light-inducible protein CPRF-2
  misc_feature (1)..(269): Homolog of NCBI NO: 16797791 NR Description: bZIP transcription factor [Nicotiana tabacum]
MTTKTVIVDSDDYRRVLKNKLETECATVVSLRVGSVKPEDSTSSPETQLQPVQSSPLTQGSLMTPGELGVTSSLPAEVKKTGVSMKQVTSGSSREYSDDEDLDEENETTGSLKPEDVKKSRRMLSNRESARRSRRRKQEQTSDLETQVNDLKGEHSSLLKQLSNMNHKYDEAAVGNRILKADIETLRAKVKMAEETVKRVTGMNPMLLGRSSGHNNNNRMPITGNNRMDSSSIIPAYQPHSNLNHMSNQNIGIPTILPPRLGNNFAAPPSQTSSPLQRIRNGQNHHVTPSANPYGWNTEPQNDSAWPKKCVD

SEQ ID NO: 82329 - DNA, 747 bp, Arabidopsis thaliana
  misc_feature (1)..(747): Ceres Seq. ID no. 12665001
  misc_feature: MA Experiment ID: 20000327 Result: Up-regulated in Transcription
  misc_feature: MA Experiment 20000327 PARAMETER Experiment Name: At_42deg_Heat_Sub_P Parameter: Age (day) Value: 14
  misc_feature: MA Experiment 20000327 PARAMETER Experiment Name: At_42deg_Heat_Sub_P Parameter: Organism Value: A. thaliana
  misc_feature: MA Experiment 20000327 PARAMETER Experiment Name: At_42deg_Heat_Sub_P Parameter: Plant Line Value: WS
  misc_feature: MA Experiment 20000327 PARAMETER Experiment Name: At_42deg_Heat_Sub_P Parameter: Temperature (deg C) Value: 42 vs. 22
  misc_feature: MA Experiment 20000327 PARAMETER Experiment Name: At_42deg_Heat_Sub_P Parameter: Timepoint (hr) Value: 1
  misc_feature: MA Experiment 20000327 PARAMETER Experiment Name: At_42deg_Heat_Sub_P Parameter: Tissue Value: Aerial
atgtatcagtggaacttaccgtaccggaaagatgacgtggaaacaggcgttagctcaagaaggcctttactatacccagcgatgcatgaaaatcccgagctccggtggggatttatacgcaaggtctactctataatcgcctttcagcttctagccaccgtcgctgtcgctgccacggtggtcaccgtccgtccaatcgctctgttcttcgccaccaccggacttggattagctctttacatagtcatcatcatcacacctctcatagtgttgtgtccgttgtactattaccatcagaaacatccggtgaattacttgctcttggggattttcactttggctctggcttttgttgttggattaacatgtgccttcaccaatgggaaagtgattctcgagtcagtgatcttgacatcggtagtggtgctttcgctcacattatatactttttgggctgctaggaaaggatatgactttaatttccttggacccttcttgtttggcgctctcaccgtgcttattttcttcgccttaatacaaattttgttcccattagggagggtatcagtgatgatctatggttgtttggtatcgataatattctgcggatacatagtttacgatacagacaatctgatcaagagacacacgtatgatgagtatatttgggcagcggtttcactctacctagacatcatcaacctcttcttgtatcttcttactgtgttgagagccttacagagatga

SEQ ID NO: 82330 - protein, 248 aa, Arabidopsis thaliana
  peptide (1)..(248): Ceres Seq. ID no. 12665002
  misc_feature (31)..(247): Pfam Name: Uncharacterised protein family UPF0005 Pfam Description: Uncharacterised protein family UPF0005
  misc_feature (1)..(248): Homolog of NCBI NO: 15235466 NR Description: putative glutamate-/aspartate-binding peptide; id: At4g02690.1 [Arabidopsis thaliana] >gi|7486855|pir||T01080
  misc_feature (1)..(247): Homolog of NCBI NO: 15218701 NR Description: putative glutamate/aspartate-binding peptide;
  misc_feature (4)..(246): Homolog of NCBI NO: 15229411 NR Description: putative protein; protein id: At3g63310.1
  misc_feature (21)..(245): Homolog of NCBI NO: 14626300 NR Description: putative receptor-associated protein [Oryza
  misc_feature (8)..(245): Homolog of NCBI NO: 34393841 NR Description: putative z-protein [Oryza sativa (japonica
  misc_feature (10)..(244): Homolog of NCBI NO: 18414455 NR Description: Expressed protein; protein id: At4g15470.1, by cDNA: gi_15215826, supported by cDNA: gi_15810200, supported cDNA: gi_20453266 [Arabidopsis thaliana]
  misc_feature (28)..(245): Homolog of NCBI NO: 34393840 NR Description: putative z-protein [Oryza sativa (japonica
  misc_feature (10)..(208): Homolog of NCBI NO: 15810201 NR Description: AT4g15470/dl3775w [Arabidopsis thaliana]
  misc_feature (34)..(248): Homolog of NCBI NO: 40018604 NR Description: Unknown (protein for MGC:73002) [Rattus >gi|38014718|gb|AAH60596.1| Unknown (protein for MGC:73002)
  misc_feature (34)..(248): Homolog of NCBI NO: 21311865 NR Description: RIKEN cDNA 0610007H07 [Mus musculus]
MYQWNLPYRKDDVETGVSSRRPLLYPAMHENPELRWGFIRKVYSIIAFQLLATVAVAATVVTVRPIALFFATTGLGLALYIVIIITPLIVLCPLYYYHQKHPVNYLLLGIFTLALAFVVGLTCAFTNGKVILESVILTSVVVLSLTLYTFWAARKGYDFNFLGPFLFGALTVLIFFALIQILFPLGRVSVMIYGCLVSIIFCGYIVYDTDNLIKRHTYDEYIWAAVSLYLDIINLFLYLLTVLRALQR

SEQ ID NO: 82331 - protein, 221 aa, Arabidopsis thaliana
  peptide (1)..(221): Ceres Seq. ID no. 12665003
  misc_feature (4)..(220): Pfam Name: Uncharacterised protein family UPF0005 Pfam Description: Uncharacterised protein family UPF0005
  misc_feature (1)..(221): Homolog of NCBI NO: 15235466 NR Description: putative glutamate-/aspartate-binding peptide; id: At4g02690.1 [Arabidopsis thaliana] >gi|7486855|pir||T01080
  misc_feature (1)..(220): Homolog of NCBI NO: 15218701 NR Description: putative glutamate/aspartate-binding peptide;
  misc_feature (1)..(219): Homolog of NCBI NO: 15229411 NR Description: putative protein; protein id: At3g63310.1
  misc_feature (1)..(218): Homolog of NCBI NO: 14626300 NR Description: putative receptor-associated protein [Oryza
  misc_feature (1)..(218): Homolog of NCBI NO: 34393841 NR Description: putative z-protein [Oryza sativa (japonica
  misc_feature (1)..(217): Homolog of NCBI NO: 18414455 NR Description: Expressed protein; protein id: At4g15470.1, by cDNA: gi_15215826, supported by cDNA: gi_15810200, supported cDNA: gi_20453266 [Arabidopsis thaliana]
  misc_feature (1)..(218): Homolog of NCBI NO: 34393840 NR Description: putative z-protein [Oryza sativa (japonica
  misc_feature (1)..(181): Homolog of NCBI NO: 15810201 NR Description: AT4g15470/dl3775w [Arabidopsis thaliana]
  misc_feature (7)..(221): Homolog of NCBI NO: 40018604 NR Description: Unknown (protein for MGC:73002) [Rattus >gi|38014718|gb|AAH60596.1| Unknown (protein for MGC:73002)
  misc_feature (7)..(221): Homolog of NCBI NO: 21311865 NR Description: RIKEN cDNA 0610007H07 [Mus musculus]
MHENPELRWGFIRKVYSIIAFQLLATVAVAATVVTVRPIALFFATTGLGLALYIVIIITPLIVLCPLYYYHQKHPVNYLLLGIFTLALAFVVGLTCAFTNGKVILESVILTSVVVLSLTLYTFWAARKGYDFNFLGPFLFGALTVLIFFALIQILFPLGRVSVMIYGCLVSIIFCGYIVYDTDNLIKRHTYDEYIWAAVSLYLDIINLFLYLLTVLRALQR

SEQ ID NO: 82332 - DNA, 2037 bp, Arabidopsis thaliana
  misc_feature (1)..(2037): Ceres Seq. ID no. 12665004
  misc_feature: MA Experiment ID: 20000180 Result: Up-regulated in Transcription
  misc_feature: MA Experiment 20000180 PARAMETER Experiment Name: At_Germinating_Seeds_P Parameter: Age (hr) Value: 24 vs. 0
  misc_feature: MA Experiment 20000180 PARAMETER Experiment Name: At_Germinating_Seeds_P Parameter: Tissue Value: Germinating Seeds
  misc_feature: MA Experiment ID: 20000264 Result: Up-regulated in Transcription
  misc_feature: MA Experiment 20000264 PARAMETER Experiment Name: At_Open_Flower_P Parameter: Age (day) Value: 21
  misc_feature: MA Experiment 20000264 PARAMETER Experiment Name: At_Open_Flower_P Parameter: Plant Line Value: WS
  misc_feature: MA Experiment 20000264 PARAMETER Experiment Name: At_Open_Flower_P Parameter: Tissue Value: Open Flower vs. Whole Plant
tcaatctcattaatccaaattaaatagttaaactagaagatgagcagcaaaagggcatcacaatatcaccaagtagaaatccctccaccacaacctttcttgaaatcactaaagaacactctcaatgagatccttttcgccgacgatccgttccgtagaatcaggaacgaatcgaaaacgtcgaaaaagatcgagttagggttgagacacgtgttccctatcttggaatgggctcgtggttacagtttggagtatttgaaatcagatgttatctcagggataacaattgcaagtcttgctattcctcaagggattagctatgctcagctcgctaatctccctccaatccttggtctttactcgagcttggtgccgccgttggtatacgcgatcatgggaagttcaagagatttagcggtgggaacagtggcggtggcctcgctgttgacggctgcgatgttggggaaagaggtaaacgcagtggtgaatccaaagctttaccttcacttagctttcaccgccactttcttcgccggactcatgcaaacctgccttggcctcttacggttagggttcgtggtggagatattgtcgcacgcggcgattgtagggttcatgggaggagccgcaacagtggtgtgtctgcagcaactgaaaggattacttggcctccatcatttcactcattccaccgatatcgtcactgttctccgctccattttttctcaatctcatatgtggagatgggaaagtggagtgctagggtgttgcttcctaatcttccttcttacaactaaatacattagcaagaagagaccaaagctgttctggatatctgcaatgtctccacttgtttctgtcatttttggaaccattttcctttacttcctccatgaccaattccatggtatccaatttatcggagaactaaagaaagggataaatccaccgtcaatcacacatttggttttcacgccaccttatgtcatgttggctctcaaagttggcattatcactggagtcatagctctcgctgaaggtatagcagtggggagaagctttgcaatgtacaagaattacaatatagatgggaacaaagagatgatagcctttgggatgatgaacattcttggttccttctcctcttgctatctcactaccgggccattttcacgttcggcggtgaactacaacgcgggttgcaaaacggcgttatcaaacgtggtgatggcggttgcagtggcggtgacgttactgttcttaacgccgttattcttctacacgccattagtagttctgtcgtcgatcataatcgctgccatgctaggcctagtcgactacgaagcagccattcatctttggaaactcgacaagttcgatttcttcgtttgtctctctgcttacttgggcgttgtttttggtaccatcgaaattggtctcatcctctccgtgggaatatcagtgatgaggttagtgttgttcgtgggaagaccaaagatttatgtaatgggaaacattcaaaactcagaaatatataggaacattgagcattaccctcaagccatcactcgctcttctcttctcattctccacatcgatggtcctatttacttcgccaactctacctacttgcgagacagaattggaaggtggatcgatgaagaggaagataaattgagaactagcggagatatcagtctacaatatattgtactcgacatgagtgctgtggggaacatcgacacgagcggtataagcatgcttgaggaactcaacaaaatcctgggacgtagagagcttaagctagtgatagcgaacccgggagcagaggtgatgaagaagctaagcaagtccaccttcattgagagcattggtaaagaacggatttatctcacggtggcagaagccgtcgcagcttgcgatttcatgctccacacggctaaacccgactcgccggtaccggaatttaacaacgtttaagatttcatattgaaaatttcacatttctaaaaagttttattgtcattaagaaataag

SEQ ID NO: 82333 - protein, 646 aa, Arabidopsis thaliana
  peptide (1)..(646): Ceres Seq. ID no. 12665005
  misc_feature (172)..(482): Pfam Name: Sulfate transporter family Pfam Description: Sulfate transporter family
  misc_feature (8)..(646): Homolog of NCBI NO: 11279065 NR Description: sulfate transporter ATST1 [imported] - thaliana >gi|2285885|dbj|BAA21657.1| sulfate transporter
  misc_feature (8)..(646): Homolog of NCBI NO: 11279064 NR Description: hypothetical protein [imported] - Arabidopsis
  misc_feature (8)..(646): Homolog of NCBI NO: 15231069 NR Description: sulfate transporter ATST1; protein id: supported by cDNA: gi_20466813, supported by cDNA: gi_2285884
  misc_feature (8)..(646): Homolog of NCBI NO: 11279066 NR Description: sulfate transporter AST12 [imported] - thaliana >gi|2967456|dbj|BAA25175.1| sulfate transporter
  misc_feature (14)..(636): Homolog of NCBI NO: 34902632 NR Description: Putative sulfate transporter ATST1 [Oryza sativa
  misc_feature (8)..(625): Homolog of NCBI NO: 15233255 NR Description: putative sulfate transporter; protein id: supported by cDNA: gi_12381948 [Arabidopsis thaliana] sulfate transporter [Arabidopsis thaliana]
  misc_feature (10)..(631): Homolog of NCBI NO: 13487717 NR Description: sulfate transporter 2 [Lycopersicon esculentum]
  misc_feature (8)..(626): Homolog of NCBI NO: 15220016 NR Description: putative sulphate transporter protein; protein
  misc_feature (1)..(624): Homolog of NCBI NO: 13625941 NR Description: sulfate transporter ST1 [Zea mays]
  misc_feature (1)..(624): Homolog of NCBI NO: 24421083 NR Description: sulphate transporter [Triticum aestivum]
MSSKRASQYHQVEIPPPQPFLKSLKNTLNEILFADDPFRRIRNESKTSKKIELGLRHVFPILEWARGYSLEYLKSDVISGITIASLAIPQGISYAQLANLPPILGLYSSLVPPLVYAIMGSSRDLAVGTVAVASLLTAAMLGKEVNAVVNPKLYLHLAFTATFFAGLMQTCLGLLRLGFVVEILSHAAIVGFMGGAATVVCLQQLKGLLGLHHFTHSTDIVTVLRSIFSQSHMWRWESGVLGCCFLIFLLTTKYISKKRPKLFWISAMSPLVSVIFGTIFLYFLHDQFHGIQFIGELKKGINPPSITHLVFTPPYVMLALKVGIITGVIALAEGIAVGRSFAMYKNYNIDGNKEMIAFGMMNILGSFSSCYLTTGPFSRSAVNYNAGCKTALSNVVMAVAVAVTLLFLTPLFFYTPLVVLSSIIIAAMLGLVDYEAAIHLWKLDKFDFFVCLSAYLGVVFGTIEIGLILSVGISVMRLVLFVGRPKIYVMGNIQNSEIYRNIEHYPQAITRSSLLILHIDGPIYFANSTYLRDRIGRWIDEEEDKLRTSGDISLQYIVLDMSAVGNIDTSGISMLEELNKILGRRELKLVIANPGAEVMKKLSKSTFIESIGKERIYLTVAEAVAACDFMLHTAKPDSPVPEFNNV

SEQ ID NO: 82334 - protein, 528 aa, Arabidopsis thaliana
  peptide (1)..(528): Ceres Seq. ID no. 12665006
  misc_feature (54)..(364): Pfam Name: Sulfate transporter family Pfam Description: Sulfate transporter family
  misc_feature (1)..(528): Homolog of NCBI NO: 11279065 NR Description: sulfate transporter ATST1 [imported] - thaliana >gi|2285885|dbj|BAA21657.1| sulfate transporter
  misc_feature (1)..(528): Homolog of NCBI NO: 11279064 NR Description: hypothetical protein [imported] - Arabidopsis
  misc_feature (1)..(528): Homolog of NCBI NO: 15231069 NR Description: sulfate transporter ATST1; protein id: supported by cDNA: gi_20466813, supported by cDNA: gi_2285884
  misc_feature (1)..(528): Homolog of NCBI NO: 11279066 NR Description: sulfate transporter AST12 [imported] - thaliana >gi|2967456|dbj|BAA25175.1| sulfate transporter
  misc_feature (1)..(518): Homolog of NCBI NO: 34902632 NR Description: Putative sulfate transporter ATST1 [Oryza sativa
  misc_feature (1)..(507): Homolog of NCBI NO: 15233255 NR Description: putative sulfate transporter; protein id: supported by cDNA: gi_12381948 [Arabidopsis thaliana] sulfate transporter [Arabidopsis thaliana]
  misc_feature (1)..(513): Homolog of NCBI NO: 13487717 NR Description: sulfate transporter 2 [Lycopersicon esculentum]
  misc_feature (1)..(508): Homolog of NCBI NO: 15220016 NR Description: putative sulphate transporter protein; protein
  misc_feature (1)..(506): Homolog of NCBI NO: 13625941 NR Description: sulfate transporter ST1 [Zea mays]
  misc_feature (1)..(506): Homolog of NCBI NO: 24421083 NR Description: sulphate transporter [Triticum aestivum]
MGSSRDLAVGTVAVASLLTAAMLGKEVNAVVNPKLYLHLAFTATFFAGLMQTCLGLLRLGFVVEILSHAAIVGFMGGAATVVCLQQLKGLLGLHHFTHSTDIVTVLRSIFSQSHMWRWESGVLGCCFLIFLLTTKYISKKRPKLFWISAMSPLVSVIFGTIFLYFLHDQFHGIQFIGELKKGINPPSITHLVFTPPYVMLALKVGIITGVIALAEGIAVGRSFAMYKNYNIDGNKEMIAFGMMNILGSFSSCYLTTGPFSRSAVNYNAGCKTALSNVVMAVAVAVTLLFLTPLFFYTPLVVLSSIIIAAMLGLVDYEAAIHLWKLDKFDFFVCLSAYLGVVFGTIEIGLILSVGISVMRLVLFVGRPKIYVMGNIQNSEIYRNIEHYPQAITRSSLLILHIDGPIYFANSTYLRDRIGRWIDEEEDKLRTSGDISLQYIVLDMSAVGNIDTSGISMLEELNKILGRRELKLVIANPGAEVMKKLSKSTFIESIGKERIYLTVAEAVAACDFMLHTAKPDSPVPEFNNV

SEQ ID NO: 82335 - protein, 507 aa, Arabidopsis thaliana
  peptide (1)..(507): Ceres Seq. ID no. 12665007
  misc_feature (33)..(343): Pfam Name: Sulfate transporter family Pfam Description: Sulfate transporter family
  misc_feature (1)..(507): Homolog of NCBI NO: 11279065 NR Description: sulfate transporter ATST1 [imported] - thaliana >gi|2285885|dbj|BAA21657.1| sulfate transporter
  misc_feature (1)..(507): Homolog of NCBI NO: 11279064 NR Description: hypothetical protein [imported] - Arabidopsis
  misc_feature (1)..(507): Homolog of NCBI NO: 15231069 NR Description: sulfate transporter ATST1; protein id: supported by cDNA: gi_20466813, supported by cDNA: gi_2285884
  misc_feature (1)..(507): Homolog of NCBI NO: 11279066 NR Description: sulfate transporter AST12 [imported] - thaliana >gi|2967456|dbj|BAA25175.1| sulfate transporter
  misc_feature (1)..(497): Homolog of NCBI NO: 34902632 NR Description: Putative sulfate transporter ATST1 [Oryza sativa
  misc_feature (1)..(486): Homolog of NCBI NO: 15233255 NR Description: putative sulfate transporter; protein id: supported by cDNA: gi_12381948 [Arabidopsis thaliana] sulfate transporter [Arabidopsis thaliana]
  misc_feature (1)..(492): Homolog of NCBI NO: 13487717 NR Description: sulfate transporter 2 [Lycopersicon esculentum]
  misc_feature (1)..(487): Homolog of NCBI NO: 15220016 NR Description: putative sulphate transporter protein; protein
  misc_feature (1)..(485): Homolog of NCBI NO: 13625941 NR Description: sulfate transporter ST1 [Zea mays]
  misc_feature (1)..(485): Homolog of NCBI NO: 24421083 NR Description: sulphate transporter [Triticum aestivum]
MLGKEVNAVVNPKLYLHLAFTATFFAGLMQTCLGLLRLGFVVEILSHAAIVGFMGGAATVVCLQQLKGLLGLHHFTHSTDIVTVLRSIFSQSHMWRWESGVLGCCFLIFLLTTKYISKKRPKLFWISAMSPLVSVIFGTIFLYFLHDQFHGIQFIGELKKGINPPSITHLVFTPPYVMLALKVGIITGVIALAEGIAVGRSFAMYKNYNIDGNKEMIAFGMMNILGSFSSCYLTTGPFSRSAVNYNAGCKTALSNVVMAVAVAVTLLFLTPLFFYTPLVVLSSIIIAAMLGLVDYEAAIHLWKLDKFDFFVCLSAYLGVVFGTIEIGLILSVGISVMRLVLFVGRPKIYVMGNIQNSEIYRNIEHYPQAITRSSLLILHIDGPIYFANSTYLRDRIGRWIDEEEDKLRTSGDISLQYIVLDMSAVGNIDTSGISMLEELNKILGRRELKLVIANPGAEVMKKLSKSTFIESIGKERIYLTVAEAVAACDFMLHTAKPDSPVPEFNNV

SEQ ID NO: 82336 - DNA, 3336 bp, Arabidopsis thaliana
  misc_feature (1)..(3336): Ceres Seq. ID no. 12665008
  misc_feature: MA Experiment ID: 20000184 Result: Down-regulated in Transcription
  misc_feature: MA Experiment 20000184 PARAMETER Experiment Name: At_Shoots__P Parameter: Age (day) Value: 7
  misc_feature: MA Experiment 20000184 PARAMETER Experiment Name: At_Shoots__P Parameter: Tissue Value: Shoots vs. Whole Plant
  misc_feature: MA Experiment ID: 20000438 Result: Down-regulated in Transcription
  misc_feature: MA Experiment 20000438 PARAMETER Experiment Name: At_Shoots__P Parameter: Age (day) Value: 14
  misc_feature: MA Experiment 20000438 PARAMETER Experiment Name: At_Shoots__P Parameter: Tissue Value: Shoots vs. Whole Plant
  misc_feature: MA Experiment ID: 20000495 Result: Up-regulated in Transcription
  misc_feature: MA Experiment 20000495 PARAMETER Experiment Name: At_Guard_Cells_P Parameter: Harvest Date Value: 8/2/2002
  misc_feature: MA Experiment 20000495 PARAMETER Experiment Name: At_Guard_Cells_P Parameter: Organism Value: A. thaliana
  misc_feature: MA Experiment 20000495 PARAMETER Experiment Name: At_Guard_Cells_P Parameter: Tissue Value: Guard Cells vs. Leaves
  misc_feature: MA Experiment ID: 20001247 Result: Down-regulated in Transcription
  misc_feature: MA Experiment 20001247 PARAMETER Experiment Name: At_Far-red-induction_P Parameter: Age (day) Value: 7
  misc_feature: MA Experiment 20001247 PARAMETER Experiment Name: At_Far-red-induction_P Parameter: Light Value: Far-red vs. White
  misc_feature: MA Experiment 20001247 PARAMETER Experiment Name: At_Far-red-induction_P Parameter: Organism Value: A. thaliana
  misc_feature: MA Experiment 20001247 PARAMETER Experiment Name: At_Far-red-induction_P Parameter: Plant Line Value: Columbia
  misc_feature: MA Experiment 20001247 PARAMETER Experiment Name: At_Far-red-induction_P Parameter: Timepoint (hr) Value: 1
  misc_feature: MA Experiment 20001247 PARAMETER Experiment Name: At_Far-red-induction_P Parameter: Tissue Value: Whole Plant
  misc_feature: MA Experiment ID: 20001757 Result: Down-regulated in Transcription
  misc_feature: MA Experiment 20001757 PARAMETER Experiment Name: At_50mM_NH4NO3_L-to-H_P Parameter: Timepoint (hr) Value: 6
  misc_feature: MA Experiment 20001757 PARAMETER Experiment Name: At_50mM_NH4NO3_L-to-H_P Parameter: Tissue Value: Leaf
  misc_feature: MA Experiment 20001757 PARAMETER Experiment Name: At_50mM_NH4NO3_L-to-H_P Parameter: Treatment Value: 50mM NH4NO3 vs 100mM Mannitol
atggagattgcagcaaagagtaactcgaaacgtatgtattcatggtggtgggatagtcacaatacccccaagaattctaaatggcttcaggacaatctcgcagatatggatagtaatgtgaagcagatgattaaggttcttgaagaagatgcagattcttttgccaggcgagcagagatgtattaccgtaaacgtcctgagcttatgaaattagttgaagagttctatcgtgcatatcgtgcattagctgagaggtataatcatgctacgggcgtaatccacaaggctcatgagactatagcagaagcgtttccaaaccaagttcctttgatatttggtgatgagtcacatggtggtgctttgacaaatgatgttgatccacaaacaccggacatgcctcctcctttccgagctcggggtaacccggatgagttccaacaagatgctttggggttctctttatctcatgtccatgatgtaaagaggaatatagattttagtgaagagcctctgtttgtgagtaatggaaaagcaagaaagggactgaattttaatgatcatggagatggaaaaggaagaaatggtcttaaggatcatattctttccgaatctgaacgagctagcaaagctgaggctgaagttgtggctttaaaagattccttgtctaagatgcaggctgaaaaacaagctagcttagcattgtttgagaagaatttggagagactatcaaatctagaatctgaagtctctcgtgcacaggcagactcaaggggaattaatgacagagccgcaagtgcagaagctgagatccaaacgctcagagaaaccctctacaaactagagtctgaaaaggaatccagctttcttcagtatcataaatgcctgcaaaagatagctgatttggaagatggactctctgtagcccataaagaagctggggagcgagccagcaaagctgaaactgaaactctcgctttgaagcggagccttgccaaggccgaaactgacaaggaaactgctcttattcaatacaggcaatgcttgaatacgatatctaacctagaagagagactaaggaaggctgaggaagatgcaaggcttatcaatgagcgggctgaaaaggctggggtagaagttgaaaacttgaagcaaacagtctcgaaattgatcaaggataaggaagcttctgaacttcagttccaacagtgcctgaatataattgcgagtctaaaagtcaaactacaccatgctcaagaagaaacacagagtcttagccatgaaatagaggatggagttgctaagttaaagttttctgaggagaaatgtcttttgcttgagagatcaaatcagaatctccactctgagctggatagtctcttggagaaactggggaatcaaagtcagaagctcacagagaaacaaaccgagctagtcaaattgtggagctgtgtgcaagcagagcatttgcatttccaggaagctgagaccgcgtttcaaaccctacagcaattgcactctcagtctcaagaggagctaaataatttggctgtggaacttcaaaccgtgtctcagatcatgaaagacatggagatgcgaaacaatgagttgcatgaggaacttgagcaagccaaggttgagaacaaaggtctcaatgacctcaatttcactatggaaaagcttgttcagaaaaaccttatgctggaaaaatctatatcttatttgaattctgagttggaatcattcagaaggaagctgaagacgtttgaggaagcttgtcagtcactctcagaagagaaatcatgtcttatttctgaaaaccagcacaatgttattgagaacactgttcttattgaatggcttcggcaacttcggttagaagcagttggtatagcaacagagaagactgaccttgagggtaaggcaaagacgattggtgataagttaacagatgcagaaactgaaaatttgcagctaaagagaaacctgctttctatcagatcggagaaacatcacttagaagatgaaattactaatgtgaaggatcagttacatgagaaggagaaggaatttgaagaaatcaaaatggagaaagaaaagctgatacaagaggttttcaaagagaggaaacaggttgaattgtgggagtctcaagctgcgacattcttctgcgataagcaaatctcggttgtacatgaaacattgattgaagcaacgacacgtgagcttgctgaagcatgcaagaaccttgaaagtaaaagcgcatcgagagatgcggatattgaaaagcttaagcgaagccaaactatagtcttgttgaatgaaagcattaaatctttggaggattatgttttcacacaccgtgaatctgcgggtgaagtttcaaagggagctgatttgatggatgaatttctcaagttggaaggtatgtgtttgagaatcaaagctatcgcagaagcaataatggaaaaggaaaagtttttgatgcttgagaacactaatacctactctatgcttgaggcgtcattgaaacaaatcaaagaattgaagacaggaggaggaagaagcatgaggaagcaagatggaggaagtggcagaatgcggaagcagagtcacgaaaccgagatggtaatgaaagatattgtgcttgatcaaacgtctgatggatcatcgtatgagattgtaagtaagaaagggaattcggagttggatcatctcggttttgttgagctaaagccagtgaagactcacaagacagaaactaaagccttgtctgaagagtcactgattgtcgagaaagtagagattttcgacggattcatggatccaaaccgtgaagtaaacaagagaagagttctagaaagacttgattcggatttacagaagctggagaatcttcagatcactgtagaagatttgaaaagcaaagtcgaaacagtggagaaggaaaagacgaaagtaggagaaaacgagtataaaacgatcaaaggacagcttgaagaaggagaggaagcaatagagaaactgtttactgtcaatcgaaagctgaccacaaaagccgaatcagagaaggatattgatagaagaaggagaatattcgaacatgcgaggagaggaacagagaagattgggaggttacagtcggagatacagaggattcagtttctgttgatgaagcttgaaggagagagagagcatcgacttaggtcgaagatttcagataccaaagttcttcttcgagactatatctatgggagaactagaagcgtatcgatgaagaaaaggacgaagaagcggtctgtgttttgtggttgcgttcagcagccagagtctccttga

SEQ ID NO: 82337 - protein, 1111 aa, Arabidopsis thaliana
  peptide (1)..(1111): Ceres Seq. ID no. 12665009
  misc_feature (203)..(1017): Pfam Name: Myosin tail Pfam Description: Myosin tail
  misc_feature (1)..(874): Homolog of NCBI NO: 15218702 NR Description: unknown protein; protein id: At1g03080.1
  misc_feature (1)..(766): Homolog of NCBI NO: 15228859 NR Description: unknown protein; protein id: At3g22790.1
  misc_feature (1)..(766): Homolog of NCBI NO: 9279697 NR Description: centromere protein [Arabidopsis thaliana]
  misc_feature (210)..(1111): Homolog of NCBI NO: 15218702 NR Description: unknown protein; protein id: At1g03080.1
  misc_feature (4)..(1096): Homolog of NCBI NO: 37534452 NR Description: putative centromere protein [Oryza sativa
  misc_feature (196)..(1021): Homolog of NCBI NO: 15218702 NR Description: unknown protein; protein id: At1g03080.1
  misc_feature (201)..(1110): Homolog of NCBI NO: 15228859 NR Description: unknown protein; protein id: At3g22790.1
  misc_feature (201)..(1110): Homolog of NCBI NO: 9279697 NR Description: centromere protein [Arabidopsis thaliana]
  misc_feature (201)..(1083): Homolog of NCBI NO: 15233570 NR Description: centromere protein homolog; protein id:
  misc_feature (36)..(1024): Homolog of NCBI NO: 15233570 NR Description: centromere protein homolog; protein id:
MEIAAKSNSKRMYSWWWDSHNTPKNSKWLQDNLADMDSNVKQMIKVLEEDADSFARRAEMYYRKRPELMKLVEEFYRAYRALAERYNHATGVIHKAHETIAEAFPNQVPLIFGDESHGGALTNDVDPQTPDMPPPFRARGNPDEFQQDALGFSLSHVHDVKRNIDFSEEPLFVSNGKARKGLNFNDHGDGKGRNGLKDHILSESERASKAEAEVVALKDSLSKMQAEKQASLALFEKNLERLSNLESEVSRAQADSRGINDRAASAEAEIQTLRETLYKLESEKESSFLQYHKCLQKIADLEDGLSVAHKEAGERASKAETETLALKRSLAKAETDKETALIQYRQCLNTISNLEERLRKAEEDARLINERAEKAGVEVENLKQTVSKLIKDKEASELQFQQCLNIIASLKVKLHHAQEETQSLSHEIEDGVAKLKFSEEKCLLLERSNQNLHSELDSLLEKLGNQSQKLTEKQTELVKLWSCVQAEHLHFQEAETAFQTLQQLHSQSQEELNNLAVELQTVSQIMKDMEMRNNELHEELEQAKVENKGLNDLNFTMEKLVQKNLMLEKSISYLNSELESFRRKLKTFEEACQSLSEEKSCLISENQHNVIENTVLIEWLRQLRLEAVGIATEKTDLEGKAKTIGDKLTDAETENLQLKRNLLSIRSEKHHLEDEITNVKDQLHEKEKEFEEIKMEKEKLIQEVFKERKQVELWESQAATFFCDKQISVVHETLIEATTRELAEACKNLESKSASRDADIEKLKRSQTIVLLNESIKSLEDYVFTHRESAGEVSKGADLMDEFLKLEGMCLRIKAIAEAIMEKEKFLMLENTNTYSMLEASLKQIKELKTGGGRSMRKQDGGSGRMRKQSHETEMVMKDIVLDQTSDGSSYEIVSKKGNSELDHLGFVELKPVKTHKTETKALSEESLIVEKVEIFDGFMDPNREVNKRRVLERLDSDLQKLENLQITVEDLKSKVETVEKEKTKVGENEYKTIKGQLEEGEEAIEKLFTVNRKLTTKAESEKDIDRRRRIFEHARRGTEKIGRLQSEIQRIQFLLMKLEGEREHRLRSKISDTKVLLRDYIYGRTRSVSMKKRTKKRSVFCGCVQQPESP

SEQ ID NO: 82338 - protein, 1100 aa, Arabidopsis thaliana
  peptide (1)..(1100): Ceres Seq. ID no. 12665010
  misc_feature (192)..(1006): Pfam Name: Myosin tail Pfam Description: Myosin tail
  misc_feature (1)..(863): Homolog of NCBI NO: 15218702 NR Description: unknown protein; protein id: At1g03080.1
  misc_feature (1)..(755): Homolog of NCBI NO: 15228859 NR Description: unknown protein; protein id: At3g22790.1
  misc_feature (1)..(755): Homolog of NCBI NO: 9279697 NR Description: centromere protein [Arabidopsis thaliana]
  misc_feature (199)..(1100): Homolog of NCBI NO: 15218702 NR Description: unknown protein; protein id: At1g03080.1
  misc_feature (1)..(1085): Homolog of NCBI NO: 37534452 NR Description: putative centromere protein [Oryza sativa
  misc_feature (185)..(1010): Homolog of NCBI NO: 15218702 NR Description: unknown protein; protein id: At1g03080.1
  misc_feature (190)..(1099): Homolog of NCBI NO: 15228859 NR Description: unknown protein; protein id: At3g22790.1
  misc_feature (190)..(1099): Homolog of NCBI NO: 9279697 NR Description: centromere protein [Arabidopsis thaliana]
  misc_feature (190)..(1072): Homolog of NCBI NO: 15233570 NR Description: centromere protein homolog; protein id:
  misc_feature (25)..(1013): Homolog of NCBI NO: 15233570 NR Description: centromere protein homolog; protein id:
MYSWWWDSHNTPKNSKWLQDNLADMDSNVKQMIKVLEEDADSFARRAEMYYRKRPELMKLVEEFYRAYRALAERYNHATGVIHKAHETIAEAFPNQVPLIFGDESHGGALTNDVDPQTPDMPPPFRARGNPDEFQQDALGFSLSHVHDVKRNIDFSEEPLFVSNGKARKGLNFNDHGDGKGRNGLKDHILSESERASKAEAEVVALKDSLSKMQAEKQASLALFEKNLERLSNLESEVSRAQADSRGINDRAASAEAEIQTLRETLYKLESEKESSFLQYHKCLQKIADLEDGLSVAHKEAGERASKAETETLALKRSLAKAETDKETALIQYRQCLNTISNLEERLRKAEEDARLINERAEKAGVEVENLKQTVSKLIKDKEASELQFQQCLNIIASLKVKLHHAQEETQSLSHEIEDGVAKLKFSEEKCLLLERSNQNLHSELDSLLEKLGNQSQKLTEKQTELVKLWSCVQAEHLHFQEAETAFQTLQQLHSQSQEELNNLAVELQTVSQIMKDMEMRNNELHEELEQAKVENKGLNDLNFTMEKLVQKNLMLEKSISYLNSELESFRRKLKTFEEACQSLSEEKSCLISENQHNVIENTVLIEWLRQLRLEAVGIATEKTDLEGKAKTIGDKLTDAETENLQLKRNLLSIRSEKHHLEDEITNVKDQLHEKEKEFEEIKMEKEKLIQEVFKERKQVELWESQAATFFCDKQISVVHETLIEATTRELAEACKNLESKSASRDADIEKLKRSQTIVLLNESIKSLEDYVFTHRESAGEVSKGADLMDEFLKLEGMCLRIKAIAEAIMEKEKFLMLENTNTYSMLEASLKQIKELKTGGGRSMRKQDGGSGRMRKQSHETEMVMKDIVLDQTSDGSSYEIVSKKGNSELDHLGFVELKPVKTHKTETKALSEESLIVEKVEIFDGFMDPNREVNKRRVLERLDSDLQKLENLQITVEDLKSKVETVEKEKTKVGENEYKTIKGQLEEGEEAIEKLFTVNRKLTTKAESEKDIDRRRRIFEHARRGTEKIGRLQSEIQRIQFLLMKLEGEREHRLRSKISDTKVLLRDYIYGRTRSVSMKKRTKKRSVFCGCVQQPESP

SEQ ID NO: 82339 - protein, 1076 aa, Arabidopsis thaliana
  peptide (1)..(1076): Ceres Seq. ID no. 12665011
  misc_feature (168)..(982): Pfam Name: Myosin tail Pfam Description: Myosin tail
  misc_feature (1)..(839): Homolog of NCBI NO: 15218702 NR Description: unknown protein; protein id: At1g03080.1
  misc_feature (1)..(731): Homolog of NCBI NO: 15228859 NR Description: unknown protein; protein id: At3g22790.1
  misc_feature (1)..(731): Homolog of NCBI NO: 9279697 NR Description: centromere protein [Arabidopsis thaliana]
  misc_feature (175)..(1076): Homolog of NCBI NO: 15218702 NR Description: unknown protein; protein id: At1g03080.1
  misc_feature (1)..(1061): Homolog of NCBI NO: 37534452 NR Description: putative centromere protein [Oryza sativa
  misc_feature (161)..(986): Homolog of NCBI NO: 15218702 NR Description: unknown protein; protein id: At1g03080.1
  misc_feature (166)..(1075): Homolog of NCBI NO: 15228859 NR Description: unknown protein; protein id: At3g22790.1
  misc_feature (166)..(1075): Homolog of NCBI NO: 9279697 NR Description: centromere protein [Arabidopsis thaliana]
  misc_feature (166)..(1048): Homolog of NCBI NO: 15233570 NR Description: centromere protein homolog; protein id:
  misc_feature (1)..(989): Homolog of NCBI NO: 15233570 NR Description: centromere protein homolog; protein id:
MDSNVKQMIKVLEEDADSFARRAEMYYRKRPELMKLVEEFYRAYRALAERYNHATGVIHKAHETIAEAFPNQVPLIFGDESHGGALTNDVDPQTPDMPPPFRARGNPDEFQQDALGFSLSHVHDVKRNIDFSEEPLFVSNGKARKGLNFNDHGDGKGRNGLKDHILSESERASKAEAEVVALKDSLSKMQAEKQASLALFEKNLERLSNLESEVSRAQADSRGINDRAASAEAEIQTLRETLYKLESEKESSFLQYHKCLQKIADLEDGLSVAHKEAGERASKAETETLALKRSLAKAETDKETALIQYRQCLNTISNLEERLRKAEEDARLINERAEKAGVEVENLKQTVSKLIKDKEASELQFQQCLNIIASLKVKLHHAQEETQSLSHEIEDGVAKLKFSEEKCLLLERSNQNLHSELDSLLEKLGNQSQKLTEKQTELVKLWSCVQAEHLHFQEAETAFQTLQQLHSQSQEELNNLAVELQTVSQIMKDMEMRNNELHEELEQAKVENKGLNDLNFTMEKLVQKNLMLEKSISYLNSELESFRRKLKTFEEACQSLSEEKSCLISENQHNVIENTVLIEWLRQLRLEAVGIATEKTDLEGKAKTIGDKLTDAETENLQLKRNLLSIRSEKHHLEDEITNVKDQLHEKEKEFEEIKMEKEKLIQEVFKERKQVELWESQAATFFCDKQISVVHETLIEATTRELAEACKNLESKSASRDADIEKLKRSQTIVLLNESIKSLEDYVFTHRESAGEVSKGADLMDEFLKLEGMCLRIKAIAEAIMEKEKFLMLENTNTYSMLEASLKQIKELKTGGGRSMRKQDGGSGRMRKQSHETEMVMKDIVLDQTSDGSSYEIVSKKGNSELDHLGFVELKPVKTHKTETKALSEESLIVEKVEIFDGFMDPNREVNKRRVLERLDSDLQKLENLQITVEDLKSKVETVEKEKTKVGENEYKTIKGQLEEGEEAIEKLFTVNRKLTTKAESEKDIDRRRRIFEHARRGTEKIGRLQSEIQRIQFLLMKLEGEREHRLRSKISDTKVLLRDYIYGRTRSVSMKKRTKKRSVFCGCVQQPESP

SEQ ID NO: 82340 - DNA, 1930 bp, Arabidopsis thaliana
  misc_feature (1)..(1930): Ceres Seq. ID no. 12665016
  misc_feature: MA Experiment ID: 20000171 Result: Down-regulated in Transcription
  misc_feature: MA Experiment 20000171 PARAMETER Experiment Name: At_42deg_Heat_P Parameter: Age (day) Value: 14
  misc_feature: MA Experiment 20000171 PARAMETER Experiment Name: At_42deg_Heat_P Parameter: Organism Value: A. thaliana
  misc_feature: MA Experiment 20000171 PARAMETER Experiment Name: At_42deg_Heat_P Parameter: Plant Line Value: WS
  misc_feature: MA Experiment 20000171 PARAMETER Experiment Name: At_42deg_Heat_P Parameter: Temperature (deg C) Value: 42 vs. 22
  misc_feature: MA Experiment 20000171 PARAMETER Experiment Name: At_42deg_Heat_P Parameter: Timepoint (hr) Value: 1
  misc_feature: MA Experiment 20000171 PARAMETER Experiment Name: At_42deg_Heat_P Parameter: Tissue Value: Aerial
  misc_feature: MA Experiment ID: 20000180 Result: Down-regulated in Transcription
  misc_feature: MA Experiment 20000180 PARAMETER Experiment Name: At_Germinating_Seeds_P Parameter: Age (hr) Value: 24 vs. 0
  misc_feature: MA Experiment 20000180 PARAMETER Experiment Name: At_Germinating_Seeds_P Parameter: Tissue Value: Germinating Seeds
  misc_feature: MA Experiment ID: 20000227 Result: Up-regulated in Transcription
  misc_feature: MA Experiment 20000227 PARAMETER Experiment Name: At_Root-Tips-vs-Tops_P Parameter: Tissue Value: Root Tips vs. Root Tops
  misc_feature: MA Experiment ID: 20000437 Result: Down-regulated in Transcription
  misc_feature: MA Experiment 20000437 PARAMETER Experiment Name: At_Drought_P Parameter: Age (day) Value: 8
  misc_feature: MA Experiment 20000437 PARAMETER Experiment Name: At_Drought_P Parameter: Organism Value: A. thaliana
  misc_feature: MA Experiment 20000437 PARAMETER Experiment Name: At_Drought_P Parameter: Plant Line Value: WS
  misc_feature: MA Experiment 20000437 PARAMETER Experiment Name: At_Drought_P Parameter: Timepoint (hr) Value: 24
  misc_feature: MA Experiment 20000437 PARAMETER Experiment Name: At_Drought_P Parameter: Tissue Value: Whole Plant
  misc_feature: MA Experiment 20000437 PARAMETER Experiment Name: At_Drought_P Parameter: Treatment Value: Drought vs. No Drought
  misc_feature: MA Experiment ID: 20001905 Result: Down-regulated in Transcription
  misc_feature: MA Experiment 20001905 PARAMETER Experiment Name: At_Drought_Reproduction_P Parameter: Age (day) Value: 40
  misc_feature: MA Experiment 20001905 PARAMETER Experiment Name: At_Drought_Reproduction_P Parameter: Organism Value: A. thaliana
  misc_feature: MA Experiment 20001905 PARAMETER Experiment Name: At_Drought_Reproduction_P Parameter: Plant Line Value: WS
  misc_feature: MA Experiment 20001905 PARAMETER Experiment Name: At_Drought_Reproduction_P Parameter: Timepoint (day) Value: 10
  misc_feature: MA Experiment 20001905 PARAMETER Experiment Name: At_Drought_Reproduction_P Parameter: Tissue Value: Rosettes
  misc_feature: MA Experiment 20001905 PARAMETER Experiment Name: At_Drought_Reproduction_P Parameter: Treatment Value: Drought vs. No Drought
aaactaaacaaaaatgaataaaaacatgttggttcgctctgcccggccaaccctagcctccattcaccgccttttctccgccgccgccgccgcgactgtggacacggcgacggcacccgtggtgaagcctcgcagcggaggaggaaaaggaggagaatcggccaacaaaaaagaaacggtagttggaggaagagacactctaggagggagattactaagccttgtgtatacgaaacgcagcgccgttgttactatccgtaaatggaaagaagaaggccattccgttcgcaaatacgaacttaatcgtatcgttagagagcttcgtaagatcaaacgctataaacacgctcttgagatatgtgaatggatggttgtacaggaagatataaagctacaagcaggtgattatgctgtacatttggatttgatatctaaaatccgtggtttaaacagtgctgagaagtttttcgaagatatgccagatcaaatgagaggtcatgctgcgtgtacatctcttttacatagctatgtgcagaacaagttgtctgataaagctgaggcattgtttgagaaaatgggtgaatgtggtttcttgaagtcttgtttgccttacaatcatatgttatcgatgtatatatcgagaggacagtttgagaaagtccctgtgttgattaaggagttgaagattagaacatctcctgatattgttacttataatctctggcttactgcgtttgcttctggaaatgatgtcgagggtgcggagaaagtttatcttaaggcgaaggaagagaagttgaatccggattgggtgacttatagtgtgttaacgaatttgtatgctaagactgataatgtcgaaaaggcgagacttgctttgaaggagatggagaagttggtttctaagaagaaccgggttgcttatgcttctcttattagtctgcatgcgaatttgggtgacaaagatggagtgaacttaacctggaagaaggttaagtcttctttcaagaaaatgaatgatgcggagtatctcagtatgatatctgcggttgtgaagcttggagagtttgaacaagctaaaggtttgtatgacgaatgggaatctgtttcgggaacaggagatgctagaatcccgaatctaatccttgctgagtacatgaacagagatgaggttcttctaggagaaaagttttacgaacggattgtggagaaagggataaacccgagctattctacatgggaaattctcacatgggcttatttgaagcgtaaagacatggagaaagtattagattgttttgggaaagctattgattctgtgaagaaatggactgtgaatgtaagattggttaaaggagcgtgcaaggaacttgaggaacaagggaatgttaaaggagcagagaagctaatgactctgctccaaaaggctggttatgtgaacactcagctctacaattccttgttacggacatacgctaaagcaggggaaatggcactcatagttgaagagcgaatggcaaaggataatgtagagttagatgaagagactaaggagcttataagactaaccagtcaaatgcgtgtgactgaaatctcgtccaccatttcttagtatgaaagctacagagttagtttcagtctgcaacttccacaaaccgaagaatacagaaaccgttctctcaagtccgtaccaatcgagatactcgtcttgaagcagtaacattccacttactcggacatttagaccttgaggagagtgttcaaagctgctaaggaatgaagttgctacaaagatatgatttttcctgttttttaattttcagaatttaatatgattaaaatctcgttttatatttttggttctctatagttcttctgatgatgtcaaatgatctttgagaggttgactaactgaaaaacctacttcgac

SEQ ID NO: 82341 - protein, 532 aa, Arabidopsis thaliana
  peptide (1)..(532): Ceres Seq. ID no. 12665017
  misc_feature (407)..(441): Pfam Name: PPR repeat Pfam Description: PPR repeat
  misc_feature (1)..(532): Homolog of NCBI NO: 15235508 NR Description: hypothetical protein; protein id: At4g02820.1, by cDNA: gi_17064737 [Arabidopsis thaliana]
  misc_feature (1)..(532): Homolog of NCBI NO: 17064738 NR Description: Unknown protein [Arabidopsis thaliana]
  misc_feature (77)..(516): Homolog of NCBI NO: 22329290 NR Description: hypothetical protein; protein id: At1g02150.1, by cDNA: gi_20453084 [Arabidopsis thaliana]
  misc_feature (77)..(516): Homolog of NCBI NO: 20453085 NR Description: At1g02150/T7I23.8 [Arabidopsis thaliana]
  misc_feature (91)..(521): Homolog of NCBI NO: 15219808 NR Description: hypothetical protein; protein id: At1g60770.1
  misc_feature (74)..(506): Homolog of NCBI NO: 15240937 NR Description: putative protein; protein id: At5g27460.1
  misc_feature (61)..(513): Homolog of NCBI NO: 15225409 NR Description: hypothetical protein; protein id: At2g20710.1
  misc_feature (78)..(506): Homolog of NCBI NO: 34393591 NR Description: putative DNA-binding protein [Oryza sativa
  misc_feature (22)..(517): Homolog of NCBI NO: 15217734 NR Description: hypothetical protein; protein id: At1g02370.1, by cDNA: gi_17529323 [Arabidopsis thaliana]
  misc_feature (22)..(517): Homolog of NCBI NO: 17529324 NR Description: unknown protein [Arabidopsis thaliana]
MNKNMLVRSARPTLASIHRLFSAAAAATVDTATAPVVKPRSGGGKGGESANKKETVVGGRDTLGGRLLSLVYTKRSAVVTIRKWKEEGHSVRKYELNRIVRELRKIKRYKHALEICEWMVVQEDIKLQAGDYAVHLDLISKIRGLNSAEKFFEDMPDQMRGHAACTSLLHSYVQNKLSDKAEALFEKMGECGFLKSCLPYNHMLSMYISRGQFEKVPVLIKELKIRTSPDIVTYNLWLTAFASGNDVEGAEKVYLKAKEEKLNPDWVTYSVLTNLYAKTDNVEKARLALKEMEKLVSKKNRVAYASLISLHANLGDKDGVNLTWKKVKSSFKKMNDAEYLSMISAVVKLGEFEQAKGLYDEWESVSGTGDARIPNLILAEYMNRDEVLLGEKFYERIVEKGINPSYSTWEILTWAYLKRKDMEKVLDCFGKAIDSVKKWTVNVRLVKGACKELEEQGNVKGAEKLMTLLQKAGYVNTQLYNSLLRTYAKAGEMALIVEERMAKDNVELDEETKELIRLTSQMRVTEISSTIS

SEQ ID NO: 82342 - protein, 528 aa, Arabidopsis thaliana
  peptide (1)..(528): Ceres Seq. ID no. 12665018
  misc_feature (403)..(437): Pfam Name: PPR repeat Pfam Description: PPR repeat
  misc_feature (1)..(528): Homolog of NCBI NO: 15235508 NR Description: hypothetical protein; protein id: At4g02820.1, by cDNA: gi_17064737 [Arabidopsis thaliana]
  misc_feature (1)..(528): Homolog of NCBI NO: 17064738 NR Description: Unknown protein [Arabidopsis thaliana]
  misc_feature (73)..(512): Homolog of NCBI NO: 22329290 NR Description: hypothetical protein; protein id: At1g02150.1, by cDNA: gi_20453084 [Arabidopsis thaliana]
  misc_feature (73)..(512): Homolog of NCBI NO: 20453085 NR Description: At1g02150/T7I23.8 [Arabidopsis thaliana]
  misc_feature (87)..(517): Homolog of NCBI NO: 15219808 NR Description: hypothetical protein; protein id: At1g60770.1
  misc_feature (70)..(502): Homolog of NCBI NO: 15240937 NR Description: putative protein; protein id: At5g27460.1
  misc_feature (57)..(509): Homolog of NCBI NO: 15225409 NR Description: hypothetical protein; protein id: At2g20710.1
  misc_feature (74)..(502): Homolog of NCBI NO: 34393591 NR Description: putative DNA-binding protein [Oryza sativa
  misc_feature (18)..(513): Homolog of NCBI NO: 15217734 NR Description: hypothetical protein; protein id: At1g02370.1, by cDNA: gi_17529323 [Arabidopsis thaliana]
  misc_feature (18)..(513): Homolog of NCBI NO: 17529324 NR Description: unknown protein [Arabidopsis thaliana]
MLVRSARPTLASIHRLFSAAAAATVDTATAPVVKPRSGGGKGGESANKKETVVGGRDTLGGRLLSLVYTKRSAVVTIRKWKEEGHSVRKYELNRIVRELRKIKRYKHALEICEWMVVQEDIKLQAGDYAVHLDLISKIRGLNSAEKFFEDMPDQMRGHAACTSLLHSYVQNKLSDKAEALFEKMGECGFLKSCLPYNHMLSMYISRGQFEKVPVLIKELKIRTSPDIVTYNLWLTAFASGNDVEGAEKVYLKAKEEKLNPDWVTYSVLTNLYAKTDNVEKARLALKEMEKLVSKKNRVAYASLISLHANLGDKDGVNLTWKKVKSSFKKMNDAEYLSMISAVVKLGEFEQAKGLYDEWESVSGTGDARIPNLILAEYMNRDEVLLGEKFYERIVEKGINPSYSTWEILTWAYLKRKDMEKVLDCFGKAIDSVKKWTVNVRLVKGACKELEEQGNVKGAEKLMTLLQKAGYVNTQLYNSLLRTYAKAGEMALIVEERMAKDNVELDEETKELIRLTSQMRVTEISSTIS

SEQ ID NO: 82343 - protein, 414 aa, Arabidopsis thaliana
  peptide (1)..(414): Ceres Seq. ID no. 12665019
  misc_feature (289)..(323): Pfam Name: PPR repeat Pfam Description: PPR repeat
  misc_feature (1)..(414): Homolog of NCBI NO: 15235508 NR Description: hypothetical protein; protein id: At4g02820.1, by cDNA: gi_17064737 [Arabidopsis thaliana]
  misc_feature (1)..(414): Homolog of NCBI NO: 17064738 NR Description: Unknown protein [Arabidopsis thaliana]
  misc_feature (1)..(398): Homolog of NCBI NO: 22329290 NR Description: hypothetical protein; protein id: At1g02150.1, by cDNA: gi_20453084 [Arabidopsis thaliana]
  misc_feature (1)..(398): Homolog of NCBI NO: 20453085 NR Description: At1g02150/T7I23.8 [Arabidopsis thaliana]
  misc_feature (1)..(403): Homolog of NCBI NO: 15219808 NR Description: hypothetical protein; protein id: At1g60770.1
  misc_feature (1)..(388): Homolog of NCBI NO: 15240937 NR Description: putative protein; protein id: At5g27460.1
  misc_feature (1)..(395): Homolog of NCBI NO: 15225409 NR Description: hypothetical protein; protein id: At2g20710.1
  misc_feature (1)..(388): Homolog of NCBI NO: 34393591 NR Description: putative DNA-binding protein [Oryza sativa
  misc_feature (1)..(399): Homolog of NCBI NO: 15217734 NR Description: hypothetical protein; protein id: At1g02370.1, by cDNA: gi_17529323 [Arabidopsis thaliana]
  misc_feature (1)..(399): Homolog of NCBI NO: 17529324 NR Description: unknown protein [Arabidopsis thaliana]
MVVQEDIKLQAGDYAVHLDLISKIRGLNSAEKFFEDMPDQMRGHAACTSLLHSYVQNKLSDKAEALFEKMGECGFLKSCLPYNHMLSMYISRGQFEKVPVLIKELKIRTSPDIVTYNLWLTAFASGNDVEGAEKVYLKAKEEKLNPDWVTYSVLTNLYAKTDNVEKARLALKEMEKLVSKKNRVAYASLISLHANLGDKDGVNLTWKKVKSSFKKMNDAEYLSMISAVVKLGEFEQAKGLYDEWESVSGTGDARIPNLILAEYMNRDEVLLGEKFYERIVEKGINPSYSTWEILTWAYLKRKDMEKVLDCFGKAIDSVKKWTVNVRLVKGACKELEEQGNVKGAEKLMTLLQKAGYVNTQLYNSLLRTYAKAGEMALIVEERMAKDNVELDEETKELIRLTSQMRVTEISSTIS

SEQ ID NO: 82344 - DNA, 942 bp, Arabidopsis thaliana
  misc_feature (1)..(942): Ceres Seq. ID no. 12665023
  misc_feature: MA Experiment ID: 20000307 Result: Up-regulated in Transcription
  misc_feature: MA Experiment 20000307 PARAMETER Experiment Name: At_Germinating_Seeds_Sub_P Parameter: Age (hr) Value: 24 vs. 0
  misc_feature: MA Experiment 20000307 PARAMETER Experiment Name: At_Germinating_Seeds_Sub_P Parameter: Organism Value: A. thaliana
  misc_feature: MA Experiment 20000307 PARAMETER Experiment Name: At_Germinating_Seeds_Sub_P Parameter: Plant Line Value: WS
  misc_feature: MA Experiment 20000307 PARAMETER Experiment Name: At_Germinating_Seeds_Sub_P Parameter: Tissue Value: Germinating Seeds
  misc_feature: MA Experiment ID: 20000315 Result: Up-regulated in Transcription
  misc_feature: MA Experiment 20000315 PARAMETER Experiment Name: At_14day_Shoots-Roots_Sub_P Parameter: Age (day) Value: 14
  misc_feature: MA Experiment 20000315 PARAMETER Experiment Name: At_14day_Shoots-Roots_Sub_P Parameter: Organism Value: A. thaliana
  misc_feature: MA Experiment 20000315 PARAMETER Experiment Name: At_14day_Shoots-Roots_Sub_P Parameter: Plant Line Value: WS
  misc_feature: MA Experiment 20000315 PARAMETER Experiment Name: At_14day_Shoots-Roots_Sub_P Parameter: Tissue Value: Shoots vs. Whole Plant
  misc_feature: MA Experiment ID: 20000328 Result: Up-regulated in Transcription
  misc_feature: MA Experiment 20000328 PARAMETER Experiment Name: At_42deg_Heat_Sub_P Parameter: Age (day) Value: 14
  misc_feature: MA Experiment 20000328 PARAMETER Experiment Name: At_42deg_Heat_Sub_P Parameter: Organism Value: A. thaliana
  misc_feature: MA Experiment 20000328 PARAMETER Experiment Name: At_42deg_Heat_Sub_P Parameter: Plant Line Value: WS
  misc_feature: MA Experiment 20000328 PARAMETER Experiment Name: At_42deg_Heat_Sub_P Parameter: Temperature (deg C) Value: 42 vs. 22
  misc_feature: MA Experiment 20000328 PARAMETER Experiment Name: At_42deg_Heat_Sub_P Parameter: Timepoint (hr) Value: 6
  misc_feature: MA Experiment 20000328 PARAMETER Experiment Name: At_42deg_Heat_Sub_P Parameter: Tissue Value: Aerial
  misc_feature: MA Experiment ID: 20000349 Result: Down-regulated in Transcription
  misc_feature: MA Experiment 20000349 PARAMETER Experiment Name: At_100uM_ABA_Sub_P Parameter: Age (day) Value: 14
  misc_feature: MA Experiment 20000349 PARAMETER Experiment Name: At_100uM_ABA_Sub_P Parameter: Organism Value: A. thaliana
  misc_feature: MA Experiment 20000349 PARAMETER Experiment Name: At_100uM_ABA_Sub_P Parameter: Plant Line Value: WS
  misc_feature: MA Experiment 20000349 PARAMETER Experiment Name: At_100uM_ABA_Sub_P Parameter: Timepoint (hr) Value: 6
  misc_feature: MA Experiment 20000349 PARAMETER Experiment Name: At_100uM_ABA_Sub_P Parameter: Tissue Value: Aerial
  misc_feature: MA Experiment 20000349 PARAMETER Experiment Name: At_100uM_ABA_Sub_P Parameter: Treatment Value: 100uM ABA vs. No Treatment
  misc_feature: MA Experiment ID: 20000352 Result: Down-regulated in Transcription
  misc_feature: MA Experiment 20000352 PARAMETER Experiment Name: At_Drought_Sub_P Parameter: Age (day) Value: 7
  misc_feature: MA Experiment 20000352 PARAMETER Experiment Name: At_Drought_Sub_P Parameter: Organism Value: A. thaliana
  misc_feature: MA Experiment 20000352 PARAMETER Experiment Name: At_Drought_Sub_P Parameter: Plant Line Value: WS
  misc_feature: MA Experiment 20000352 PARAMETER Experiment Name: At_Drought_Sub_P Parameter: Timepoint (hr) Value: 6
  misc_feature: MA Experiment 20000352 PARAMETER Experiment Name: At_Drought_Sub_P Parameter: Tissue Value: Whole Plant
  misc_feature: MA Experiment 20000352 PARAMETER Experiment Name: At_Drought_Sub_P Parameter: Treatment Value: Drought vs. No Drought
atggcaaaaatagaaccaaaaacgtcaatggatatgaattttcctgtcaagtacttcgtggttgatgcattcactgagtcagccttcaaggggaaccaagctgcagtgtgttttcttgaagaggatcatgagagagacgacgtgtggcttcagtctatggcctctgagtttgaccttccattgacgtgttttcttattcccatccccggctccgaaccaccacgtttccttctgaggtggttcacggctgtagccgagatggatatatgtggtcatgcaacactagcatcagctcatagtatcttctcaaacagtttggttggttcatctgacactgtcgaattttccaccaactcggggattctaaccgctaaaaggctgtctgattgtgactctaaaagatctttcttgatcgaaatgaatttccctgtgattacaacttgtgagtacagctccaaggatgtctccatcttctctaaagccttgaatggagctaccattgtcgatgttcgagaaactaaaactgatagactcatctttaaacccttgataggagctttcaaaacaacttcaacagaccaaatcatcgttgtgctttcatcttgggaatctgtcattgaatttcagccaagagtggatgatatcgtgaaatgccctggcaaagtgatgattgttaccgctgctgctcctcaaggatctccttttgacttctgcagtcgactctttgctcctaaactagggctcaatgaggactctgtatgtggaagtgcacattgttcattagcacattactggagcctcaagatgaacaagtgtgatttcgtcgcttttgcggcttcgcaaagaagtggaacactcaaggttcattatgataaggagaagcagagagtcttgcttaccgggaaagctgtgactgtcatgaaaggctctatcttagtttaa

SEQ ID NO: 82345 - protein, 313 aa, Arabidopsis thaliana
  peptide (1)..(313): Ceres Seq. ID no. 12665024
  misc_feature (1)..(313): Homolog of NCBI NO: 15236201 NR Description: putative protein; protein id: At4g02850.1
  misc_feature (16)..(313): Homolog of NCBI NO: 15236203 NR Description: putative protein; protein id: At4g02860.1, by cDNA: gi_20466357 [Arabidopsis thaliana]
  misc_feature (16)..(313): Homolog of NCBI NO: 20466358 NR Description: putative protein [Arabidopsis thaliana]
  misc_feature (16)..(312): Homolog of NCBI NO: 34903112 NR Description: unnamed protein product [Oryza sativa (japonica group)] >gi|6630683|dbj|BAA88529.1| unnamed protein product
  misc_feature (16)..(179): Homolog of NCBI NO: 15218739 NR Description: unknown protein; protein id: At1g03210.1,
  misc_feature (110)..(313): Homolog of NCBI NO: 15218739 NR Description: unknown protein; protein id: At1g03210.1,
  misc_feature (12)..(143): Homolog of NCBI NO: 15612846 NR Description: BH0283~unknown conserved protein [Bacillus
  misc_feature (196)..(313): Homolog of NCBI NO: 15612846 NR Description: BH0283~unknown conserved protein [Bacillus
  misc_feature (15)..(179): Homolog of NCBI NO: 22297810 NR Description: ORF_ID:tll0266~hypothetical protein
  misc_feature (187)..(313): Homolog of NCBI NO: 22297810 NR Description: ORF_ID:tll0266~hypothetical protein
MAKIEPKTSMDMNFPVKYFVVDAFTESAFKGNQAAVCFLEEDHERDDVWLQSMASEFDLPLTCFLIPIPGSEPPRFLLRWFTAVAEMDICGHATLASAHSIFSNSLVGSSDTVEFSTNSGILTAKRLSDCDSKRSFLIEMNFPVITTCEYSSKDVSIFSKALNGATIVDVRETKTDRLIFKPLIGAFKTTSTDQIIVVLSSWESVIEFQPRVDDIVKCPGKVMIVTAAAPQGSPFDFCSRLFAPKLGLNEDSVCGSAHCSLAHYWSLKMNKCDFVAFAASQRSGTLKVHYDKEKQRVLLTGKAVTVMKGSILV

SEQ ID NO: 82346 - protein, 304 aa, Arabidopsis thaliana
  peptide (1)..(304): Ceres Seq. ID no. 12665025
  misc_feature (1)..(304): Homolog of NCBI NO: 15236201 NR Description: putative protein; protein id: At4g02850.1
  misc_feature (7)..(304): Homolog of NCBI NO: 15236203 NR Description: putative protein; protein id: At4g02860.1, by cDNA: gi_20466357 [Arabidopsis thaliana]
  misc_feature (7)..(304): Homolog of NCBI NO: 20466358 NR Description: putative protein [Arabidopsis thaliana]
  misc_feature (7)..(303): Homolog of NCBI NO: 34903112 NR Description: unnamed protein product [Oryza sativa (japonica group)] >gi|6630683|dbj|BAA88529.1| unnamed protein product
  misc_feature (7)..(170): Homolog of NCBI NO: 15218739 NR Description: unknown protein; protein id: At1g03210.1,
  misc_feature (101)..(304): Homolog of NCBI NO: 15218739 NR Description: unknown protein; protein id: At1g03210.1,
  misc_feature (3)..(134): Homolog of NCBI NO: 15612846 NR Description: BH0283~unknown conserved protein [Bacillus
  misc_feature (187)..(304): Homolog of NCBI NO: 15612846 NR Description: BH0283~unknown conserved protein [Bacillus
  misc_feature (6)..(170): Homolog of NCBI NO: 22297810 NR Description: ORF_ID:tll0266~hypothetical protein
  misc_feature (178)..(304): Homolog of NCBI NO: 22297810 NR Description: ORF_ID:tll0266~hypothetical protein
MDMNFPVKYFVVDAFTESAFKGNQAAVCFLEEDHERDDVWLQSMASEFDLPLTCFLIPIPGSEPPRFLLRWFTAVAEMDICGHATLASAHSIFSNSLVGSSDTVEFSTNSGILTAKRLSDCDSKRSFLIEMNFPVITTCEYSSKDVSIFSKALNGATIVDVRETKTDRLIFKPLIGAFKTTSTDQIIVVLSSWESVIEFQPRVDDIVKCPGKVMIVTAAAPQGSPFDFCSRLFAPKLGLNEDSVCGSAHCSLAHYWSLKMNKCDFVAFAASQRSGTLKVHYDKEKQRVLLTGKAVTVMKGSILV

SEQ ID NO: 82347 - protein, 302 aa, Arabidopsis thaliana
  peptide (1)..(302): Ceres Seq. ID no. 12665026
  misc_feature (1)..(302): Homolog of NCBI NO: 15236201 NR Description: putative protein; protein id: At4g02850.1
  misc_feature (5)..(302): Homolog of NCBI NO: 15236203 NR Description: putative protein; protein id: At4g02860.1, by cDNA: gi_20466357 [Arabidopsis thaliana]
  misc_feature (5)..(302): Homolog of NCBI NO: 20466358 NR Description: putative protein [Arabidopsis thaliana]
  misc_feature (5)..(301): Homolog of NCBI NO: 34903112 NR Description: unnamed protein product [Oryza sativa (japonica group)] >gi|6630683|dbj|BAA88529.1| unnamed protein product
  misc_feature (5)..(168): Homolog of NCBI NO: 15218739 NR Description: unknown protein; protein id: At1g03210.1,
  misc_feature (99)..(302): Homolog of NCBI NO: 15218739 NR Description: unknown protein; protein id: At1g03210.1,
  misc_feature (1)..(132): Homolog of NCBI NO: 15612846 NR Description: BH0283~unknown conserved protein [Bacillus
  misc_feature (185)..(302): Homolog of NCBI NO: 15612846 NR Description: BH0283~unknown conserved protein [Bacillus
  misc_feature (4)..(168): Homolog of NCBI NO: 22297810 NR Description: ORF_ID:tll0266~hypothetical protein
  misc_feature (176)..(302): Homolog of NCBI NO: 22297810 NR Description: ORF_ID:tll0266~hypothetical protein
MNFPVKYFVVDAFTESAFKGNQAAVCFLEEDHERDDVWLQSMASEFDLPLTCFLIPIPGSEPPRFLLRWFTAVAEMDICGHATLASAHSIFSNSLVGSSDTVEFSTNSGILTAKRLSDCDSKRSFLIEMNFPVITTCEYSSKDVSIFSKALNGATIVDVRETKTDRLIFKPLIGAFKTTSTDQIIVVLSSWESVIEFQPRVDDIVKCPGKVMIVTAAAPQGSPFDFCSRLFAPKLGLNEDSVCGSAHCSLAHYWSLKMNKCDFVAFAASQRSGTLKVHYDKEKQRVLLTGKAVTVMKGSILV

SEQ ID NO: 82348 - DNA, 1172 bp, Arabidopsis thaliana
  misc_feature (1)..(1172): Ceres Seq. ID no. 12665027
  misc_feature: MA Experiment ID: 20000173 Result: Down-regulated in Transcription
  misc_feature: MA Experiment 20000173 PARAMETER Experiment Name: At_42deg_Heat_P Parameter: Age (day) Value: 14
  misc_feature: MA Experiment 20000173 PARAMETER Experiment Name: At_42deg_Heat_P Parameter: Organism Value: A. thaliana
  misc_feature: MA Experiment 20000173 PARAMETER Experiment Name: At_42deg_Heat_P Parameter: Plant Line Value: WS
  misc_feature: MA Experiment 20000173 PARAMETER Experiment Name: At_42deg_Heat_P Parameter: Temperature (deg C) Value: 42 vs. 22
  misc_feature: MA Experiment 20000173 PARAMETER Experiment Name: At_42deg_Heat_P Parameter: Timepoint (hr) Value: 6
  misc_feature: MA Experiment 20000173 PARAMETER Experiment Name: At_42deg_Heat_P Parameter: Tissue Value: Aerial
  misc_feature: MA Experiment ID: 20000234 Result: Down-regulated in Transcription
  misc_feature: MA Experiment 20000234 PARAMETER Experiment Name: At_Siliques_P Parameter: Age (day) Value: 21
  misc_feature: MA Experiment 20000234 PARAMETER Experiment Name: At_Siliques_P Parameter: Organism Value: A. thaliana
  misc_feature: MA Experiment 20000234 PARAMETER Experiment Name: At_Siliques_P Parameter: Plant Line Value: WS
  misc_feature: MA Experiment 20000234 PARAMETER Experiment Name: At_Siliques_P Parameter: Tissue Value: Less Than 5mm Siliques vs. Whole Plant
  misc_feature: MA Experiment ID: 20000265 Result: Down-regulated in Transcription
  misc_feature: MA Experiment 20000265 PARAMETER Experiment Name: At_Open_Flower_P Parameter: Age (day) Value: 21
  misc_feature: MA Experiment 20000265 PARAMETER Experiment Name: At_Open_Flower_P Parameter: Plant Line Value: WS
  misc_feature: MA Experiment 20000265 PARAMETER Experiment Name: At_Open_Flower_P Parameter: Tissue Value: Closed Flower vs. Whole Plant
  misc_feature: MA Experiment ID: 20000286 Result: Down-regulated in Transcription
  misc_feature: MA Experiment 20000286 PARAMETER Experiment Name: At_Open_Flower_P Parameter: Age (day) Value: 21
  misc_feature: MA Experiment 20000286 PARAMETER Experiment Name: At_Open_Flower_P Parameter: Plant Line Value: WS
  misc_feature: MA Experiment 20000286 PARAMETER Experiment Name: At_Open_Flower_P Parameter: Tissue Value: Half Open vs. Whole Plant
  misc_feature: MA Experiment ID: 20000495 Result: Down-regulated in Transcription
  misc_feature: MA Experiment 20000495 PARAMETER Experiment Name: At_Guard_Cells_P Parameter: Harvest Date Value: 8/2/2002
  misc_feature: MA Experiment 20000495 PARAMETER Experiment Name: At_Guard_Cells_P Parameter: Organism Value: A. thaliana
  misc_feature: MA Experiment 20000495 PARAMETER Experiment Name: At_Guard_Cells_P Parameter: Tissue Value: Guard Cells vs. Leaves
gtgatggaaagaaagaaaaaaacataactttgctcaaaaagatcgatcgagatatggggaagaagaaaggtgtcaagtactttgtggtggatgctttcactgattcggctttcaaagggaatccagctgctgtttgttttctcaacgacgataacgagagagatgacacgtggcttcagtctctcgccgccgaattcaacatctccgaaacttgttttcttattcccatcactggtttccaagctcgcttcagtctacgctggtttacccctttagccgaggtggatctctgtggtcatgcaactttggcatctgctcattgtctcttctcaaatggtttggttgattcagacatggttgagtttgtcacaagatcagggattcttacagccaagcgtgtttcagatacttcagagctcagtgatggtgaagtgaaaggaggaacctttttgatcgaattgaatttccctgtggttacaacttgtgatgttaatctcagtgatgtatcctcttctatgatcaccaaggccttgaacggagctaccattgttgatataaaagctactgcaacaaacaacatcctcgttgtgcttccatctaaggaatctgtcactgaattgcaaccaagaatggatgatatattgaaatgcccctgtgatggcataattgtgacagctgctggttctacaggatcgtcctatgatttttacagtcggtactttgctcctaagttcggagttgatgaggaccctgtttgtggaagtgcacattgtgcattggcacattactggagcatcaagatgaataagtttgatttcttagcctaccaagcttcgagtaggagtggaacgataaggattcatctagacaaggagaagcagagggttctcctgagaggcaaagccgttactgtgatggaaggccatgtcttggtctgatctgaaattatatactgtgttgaattctgctacaaaacaagctcctataatgaataacaatgaatttactcttttcaaaacaaaatagtgtcagctgactgatccaccttacatgaggtgtggtcgctcgtaggagccactgataggatatgtccatgttttctgaccatgtgtgttcattttgaatgactctccaacagttctctttcactcacagacaatacatttattgtt

SEQ ID NO: 82349 - protein, 311 aa, Arabidopsis thaliana
  peptide (1)..(311): Ceres Seq. ID no. 12665028
  misc_feature (18)..(311): Homolog of NCBI NO: 15236203 NR Description: putative protein; protein id: At4g02860.1, by cDNA: gi_20466357 [Arabidopsis thaliana]
  misc_feature (18)..(311): Homolog of NCBI NO: 20466358 NR Description: putative protein [Arabidopsis thaliana]
  misc_feature (18)..(311): Homolog of NCBI NO: 15218739 NR Description: unknown protein; protein id: At1g03210.1,
  misc_feature (24)..(311): Homolog of NCBI NO: 15236201 NR Description: putative protein; protein id: At4g02850.1
  misc_feature (21)..(310): Homolog of NCBI NO: 34903112 NR Description: unnamed protein product [Oryza sativa (japonica group)] >gi|6630683|dbj|BAA88529.1| unnamed protein product
  misc_feature (194)..(311): Homolog of NCBI NO: 15612846 NR Description: BH0283~unknown conserved protein [Bacillus
  misc_feature (27)..(139): Homolog of NCBI NO: 15612846 NR Description: BH0283~unknown conserved protein [Bacillus
  misc_feature (151)..(311): Homolog of NCBI NO: 22297810 NR Description: ORF_ID:tll0266~hypothetical protein
  misc_feature (19)..(135): Homolog of NCBI NO: 22297810 NR Description: ORF_ID:tll0266~hypothetical protein
  misc_feature (167)..(307): Homolog of NCBI NO: 23017885 NR Description: hypothetical protein [Thermobifida fusca]
DGKKEKNITLLKKIDRDMGKKKGVKYFVVDAFTDSAFKGNPAAVCFLNDDNERDDTWLQSLAAEFNISETCFLIPITGFQARFSLRWFTPLAEVDLCGHATLASAHCLFSNGLVDSDMVEFVTRSGILTAKRVSDTSELSDGEVKGGTFLIELNFPVVTTCDVNLSDVSSSMITKALNGATIVDIKATATNNILVVLPSKESVTELQPRMDDILKCPCDGIIVTAAGSTGSSYDFYSRYFAPKFGVDEDPVCGSAHCALAHYWSIKMNKFDFLAYQASSRSGTIRIHLDKEKQRVLLRGKAVTVMEGHVLV

SEQ ID NO: 82350 - protein, 294 aa, Arabidopsis thaliana
  peptide (1)..(294): Ceres Seq. ID no. 12665029
  misc_feature (1)..(294): Homolog of NCBI NO: 15236203 NR Description: putative protein; protein id: At4g02860.1, by cDNA: gi_20466357 [Arabidopsis thaliana]
  misc_feature (1)..(294): Homolog of NCBI NO: 20466358 NR Description: putative protein [Arabidopsis thaliana]
  misc_feature (1)..(294): Homolog of NCBI NO: 15218739 NR Description: unknown protein; protein id: At1g03210.1,
  misc_feature (7)..(294): Homolog of NCBI NO: 15236201 NR Description: putative protein; protein id: At4g02850.1
  misc_feature (4)..(293): Homolog of NCBI NO: 34903112 NR Description: unnamed protein product [Oryza sativa (japonica group)] >gi|6630683|dbj|BAA88529.1| unnamed protein product
  misc_feature (177)..(294): Homolog of NCBI NO: 15612846 NR Description: BH0283~unknown conserved protein [Bacillus
  misc_feature (10)..(122): Homolog of NCBI NO: 15612846 NR Description: BH0283~unknown conserved protein [Bacillus
  misc_feature (134)..(294): Homolog of NCBI NO: 22297810 NR Description: ORF_ID:tll0266~hypothetical protein
  misc_feature (2)..(118): Homolog of NCBI NO: 22297810 NR Description: ORF_ID:tll0266~hypothetical protein
  misc_feature (150)..(290): Homolog of NCBI NO: 23017885 NR Description: hypothetical protein [Thermobifida fusca]
MGKKKGVKYFVVDAFTDSAFKGNPAAVCFLNDDNERDDTWLQSLAAEFNISETCFLIPITGFQARFSLRWFTPLAEVDLCGHATLASAHCLFSNGLVDSDMVEFVTRSGILTAKRVSDTSELSDGEVKGGTFLIELNFPVVTTCDVNLSDVSSSMITKALNGATIVDIKATATNNILVVLPSKESVTELQPRMDDILKCPCDGIIVTAAGSTGSSYDFYSRYFAPKFGVDEDPVCGSAHCALAHYWSIKMNKFDFLAYQASSRSGTIRIHLDKEKQRVLLRGKAVTVMEGHVLV

SEQ ID NO: 82351 - protein, 194 aa, Arabidopsis thaliana
  peptide (1)..(194): Ceres Seq. ID no. 12665030
  misc_feature (1)..(194): Homolog of NCBI NO: 15236203 NR Description: putative protein; protein id: At4g02860.1, by cDNA: gi_20466357 [Arabidopsis thaliana]
  misc_feature (1)..(194): Homolog of NCBI NO: 20466358 NR Description: putative protein [Arabidopsis thaliana]
  misc_feature (1)..(194): Homolog of NCBI NO: 15218739 NR Description: unknown protein; protein id: At1g03210.1,
  misc_feature (1)..(194): Homolog of NCBI NO: 15236201 NR Description: putative protein; protein id: At4g02850.1
  misc_feature (1)..(193): Homolog of NCBI NO: 34903112 NR Description: unnamed protein product [Oryza sativa (japonica group)] >gi|6630683|dbj|BAA88529.1| unnamed protein product
  misc_feature (77)..(194): Homolog of NCBI NO: 15612846 NR Description: BH0283~unknown conserved protein [Bacillus
  misc_feature (1)..(22): Homolog of NCBI NO: 15612846 NR Description: BH0283~unknown conserved protein [Bacillus
  misc_feature (34)..(194): Homolog of NCBI NO: 22297810 NR Description: ORF_ID:tll0266~hypothetical protein
  misc_feature (1)..(18): Homolog of NCBI NO: 22297810 NR Description: ORF_ID:tll0266~hypothetical protein
  misc_feature (50)..(190): Homolog of NCBI NO: 23017885 NR Description: hypothetical protein [Thermobifida fusca]
MVEFVTRSGILTAKRVSDTSELSDGEVKGGTFLIELNFPVVTTCDVNLSDVSSSMITKALNGATIVDIKATATNNILVVLPSKESVTELQPRMDDILKCPCDGIIVTAAGSTGSSYDFYSRYFAPKFGVDEDPVCGSAHCALAHYWSIKMNKFDFLAYQASSRSGTIRIHLDKEKQRVLLRGKAVTVMEGHVLV

SEQ ID NO: 82352 - DNA, 873 bp, Arabidopsis thaliana
  misc_feature (1)..(873): Ceres Seq. ID no. 12665169
  misc_feature: MA Experiment ID: 20000185 Result: Down-regulated in Transcription
  misc_feature: MA Experiment 20000185 PARAMETER Experiment Name: At_Roots__P Parameter: Age (day) Value: 7 vs. 21
  misc_feature: MA Experiment 20000185 PARAMETER Experiment Name: At_Roots__P Parameter: Organism Value: A. thaliana
  misc_feature: MA Experiment 20000185 PARAMETER Experiment Name: At_Roots__P Parameter: Tissue Value: Roots vs. Whole Plant
  misc_feature: MA Experiment ID: 20000439 Result: Down-regulated in Transcription
  misc_feature: MA Experiment 20000439 PARAMETER Experiment Name: At_Roots__P Parameter: Age (day) Value: 14 vs. 21
  misc_feature: MA Experiment 20000439 PARAMETER Experiment Name: At_Roots__P Parameter: Organism Value: A. thaliana
  misc_feature: MA Experiment 20000439 PARAMETER Experiment Name: At_Roots__P Parameter: Tissue Value: Roots vs. Whole Plant
  misc_feature: MA Experiment ID: 20000495 Result: Down-regulated in Transcription
  misc_feature: MA Experiment 20000495 PARAMETER Experiment Name: At_Guard_Cells_P Parameter: Harvest Date Value: 8/2/2002
  misc_feature: MA Experiment 20000495 PARAMETER Experiment Name: At_Guard_Cells_P Parameter: Organism Value: A. thaliana
  misc_feature: MA Experiment 20000495 PARAMETER Experiment Name: At_Guard_Cells_P Parameter: Tissue Value: Guard Cells vs. Leaves
  misc_feature: MA Experiment ID: 20000496 Result: Down-regulated in Transcription
  misc_feature: MA Experiment 20000496 PARAMETER Experiment Name: At_Guard_Cells_P Parameter: Harvest Date Value: 7/19/2002
  misc_feature: MA Experiment 20000496 PARAMETER Experiment Name: At_Guard_Cells_P Parameter: Organism Value: Canola
  misc_feature: MA Experiment 20000496 PARAMETER Experiment Name: At_Guard_Cells_P Parameter: Tissue Value: Guard Cells vs. Leaves
  misc_feature: MA Experiment ID: 20001451 Result: Down-regulated in Transcription
  misc_feature: MA Experiment 20001451 PARAMETER Experiment Name: At_Far-red-induction_P Parameter: Age (day) Value: 7
  misc_feature: MA Experiment 20001451 PARAMETER Experiment Name: At_Far-red-induction_P Parameter: Light Value: Far-red vs. White
  misc_feature: MA Experiment 20001451 PARAMETER Experiment Name: At_Far-red-induction_P Parameter: Organism Value: A. thaliana
  misc_feature: MA Experiment 20001451 PARAMETER Experiment Name: At_Far-red-induction_P Parameter: Plant Line Value: Columbia
  misc_feature: MA Experiment 20001451 PARAMETER Experiment Name: At_Far-red-induction_P Parameter: Timepoint (hr) Value: 24
  misc_feature: MA Experiment 20001451 PARAMETER Experiment Name: At_Far-red-induction_P Parameter: Tissue Value: Whole Plant
  misc_feature: MA Experiment ID: 20001557 Result: Up-regulated in Transcription
  misc_feature: MA Experiment 20001557 PARAMETER Experiment Name: At_Drought_Soil_Dry_P Parameter: Age (day) Value: 27
  misc_feature: MA Experiment 20001557 PARAMETER Experiment Name: At_Drought_Soil_Dry_P Parameter: Organism Value: A. thaliana
  misc_feature: MA Experiment 20001557 PARAMETER Experiment Name: At_Drought_Soil_Dry_P Parameter: Plant Line Value: WS
  misc_feature: MA Experiment 20001557 PARAMETER Experiment Name: At_Drought_Soil_Dry_P Parameter: Post Timepoint (hr) Value: 3
  misc_feature: MA Experiment 20001557 PARAMETER Experiment Name: At_Drought_Soil_Dry_P Parameter: Post-Treatment Value: Re-Water vs. No Drought
  misc_feature: MA Experiment 20001557 PARAMETER Experiment Name: At_Drought_Soil_Dry_P Parameter: Timepoint (day) Value: 13
  misc_feature: MA Experiment 20001557 PARAMETER Experiment Name: At_Drought_Soil_Dry_P Parameter: Treatment Value: Drought vs. No Drought
atgcttctacgaagcgcttcaacgccacttctaaactcattggttcatgtctcgagtccaagagattctccaatcgaaaccgttgaatctgttcatcagattcaacgacacagatccataacactctctgcgtcttcttcctcttgctgttatagcccgatgtctgtacactctagcgacgattcttcaaggaggatgaaaagaacggcgtcagatagcgatctacgacatttgacatcgacgaaaccgccggtgagtaagtttttgagcggtggtgctttgatggaggatgtggatgaaggaatcggattcggtcttatacgcacttcgtcttatgatggtataagttgggctttggatgaagatactgaggttgctggcggtggtggtggtgggatgtttcacggtggaggaaaaggaaggagtggtggtagatctgatggtggtgatggaggtgacgataacactgatgttcattatcgtaagatgattgaagctaatcctggaaatgggatttttctcagtaattatgctaaattcctgaaggaggttagaaaagattacttgaaagcagaggaatattgtgggagagctattctggtgagtcctaatgatgggaatgttctggctatgtacgctgagttggtttggaagatccataaggattcatctcgtgctgagaattacttcaatcaagctgttgcagctgctcctgaggactgttatgtacaagcttcgtatgcacggtttctatgggatgctgaagaggaagaagaagaggaaaaggaagagagacatgaagaagaacttgagcatcaaacttctcgaatgaatttcttcaccggaccttctccaatcacggccatgtcttaa

SEQ ID NO: 82353 - protein, 290 aa, Arabidopsis thaliana
  peptide (1)..(290): Ceres Seq. ID no. 12665170
  misc_feature (1)..(290): Homolog of NCBI NO: 15241290 NR Description: putative protein; protein id: At5g20190.1
  misc_feature (1)..(277): Homolog of NCBI NO: 18412668 NR Description: expressed protein; protein id: At1g80130.1, by cDNA: 35675., supported by cDNA: gi_14334635, supported by gi_17104606 [Arabidopsis thaliana] >gi|25406635|pir||H96832
  misc_feature (1)..(268): Homolog of NCBI NO: 18414994 NR Description: putative protein; protein id: At4g17940.1,
  misc_feature (66)..(269): Homolog of NCBI NO: 21592868 NR Description: unknown [Arabidopsis thaliana]
  misc_feature (66)..(268): Homolog of NCBI NO: 7487766 NR Description: hypothetical protein T6K21.120 - Arabidopsis >gi|2894603|emb|CAA17137.1| putative protein [Arabidopsis >gi|7268546|emb|CAB78796.1| putative protein [Arabidopsis
  misc_feature (121)..(274): Homolog of NCBI NO: 15236755 NR Description: putative protein; protein id: At4g32340.1, by cDNA: 34819., supported by cDNA: gi_14532727 [Arabidopsis
  misc_feature (127)..(274): Homolog of NCBI NO: 14532728 NR Description: unknown protein [Arabidopsis thaliana]
  misc_feature (119)..(270): Homolog of NCBI NO: 37537130 NR Description: unknown protein [Oryza sativa (japonica
  misc_feature (151)..(273): Homolog of NCBI NO: 18390404 NR Description: expressed protein; protein id: At1g04530.1, by cDNA: 2935., supported by cDNA: gi_17644166, supported by gi_20465342 [Arabidopsis thaliana] >gi|17644167|gb|AAL38781.1|
  misc_feature (151)..(273): Homolog of NCBI NO: 21555875 NR Description: unknown [Arabidopsis thaliana]
MLLRSASTPLLNSLVHVSSPRDSPIETVESVHQIQRHRSITLSASSSSCCYSPMSVHSSDDSSRRMKRTASDSDLRHLTSTKPPVSKFLSGGALMEDVDEGIGFGLIRTSSYDGISWALDEDTEVAGGGGGGMFHGGGKGRSGGRSDGGDGGDDNTDVHYRKMIEANPGNGIFLSNYAKFLKEVRKDYLKAEEYCGRAILVSPNDGNVLAMYAELVWKIHKDSSRAENYFNQAVAAAPEDCYVQASYARFLWDAEEEEEEEKEERHEEELEHQTSRMNFFTGPSPITAMS

SEQ ID NO: 82354 - protein, 237 aa, Arabidopsis thaliana
  peptide (1)..(237): Ceres Seq. ID no. 12665171
  misc_feature (1)..(237): Homolog of NCBI NO: 15241290 NR Description: putative protein; protein id: At5g20190.1
  misc_feature (1)..(224): Homolog of NCBI NO: 18412668 NR Description: expressed protein; protein id: At1g80130.1, by cDNA: 35675., supported by cDNA: gi_14334635, supported by gi_17104606 [Arabidopsis thaliana] >gi|25406635|pir||H96832
  misc_feature (1)..(215): Homolog of NCBI NO: 18414994 NR Description: putative protein; protein id: At4g17940.1,
  misc_feature (13)..(216): Homolog of NCBI NO: 21592868 NR Description: unknown [Arabidopsis thaliana]
  misc_feature (13)..(215): Homolog of NCBI NO: 7487766 NR Description: hypothetical protein T6K21.120 - Arabidopsis >gi|2894603|emb|CAA17137.1| putative protein [Arabidopsis >gi|7268546|emb|CAB78796.1| putative protein [Arabidopsis
  misc_feature (68)..(221): Homolog of NCBI NO: 15236755 NR Description: putative protein; protein id: At4g32340.1, by cDNA: 34819., supported by cDNA: gi_14532727 [Arabidopsis
  misc_feature (74)..(221): Homolog of NCBI NO: 14532728 NR Description: unknown protein [Arabidopsis thaliana]
  misc_feature (66)..(217): Homolog of NCBI NO: 37537130 NR Description: unknown protein [Oryza sativa (japonica
  misc_feature (98)..(220): Homolog of NCBI NO: 18390404 NR Description: expressed protein; protein id: At1g04530.1, by cDNA: 2935., supported by cDNA: gi_17644166, supported by gi_20465342 [Arabidopsis thaliana] >gi|17644167|gb|AAL38781.1|
  misc_feature (98)..(220): Homolog of NCBI NO: 21555875 NR Description: unknown [Arabidopsis thaliana]
MSVHSSDDSSRRMKRTASDSDLRHLTSTKPPVSKFLSGGALMEDVDEGIGFGLIRTSSYDGISWALDEDTEVAGGGGGGMFHGGGKGRSGGRSDGGDGGDDNTDVHYRKMIEANPGNGIFLSNYAKFLKEVRKDYLKAEEYCGRAILVSPNDGNVLAMYAELVWKIHKDSSRAENYFNQAVAAAPEDCYVQASYARFLWDAEEEEEEEKEERHEEELEHQTSRMNFFTGPSPITAMS

SEQ ID NO: 82355 - protein, 225 aa, Arabidopsis thaliana
  peptide (1)..(225): Ceres Seq. ID no. 12665172
  misc_feature (1)..(225): Homolog of NCBI NO: 15241290 NR Description: putative protein; protein id: At5g20190.1
  misc_feature (1)..(212): Homolog of NCBI NO: 18412668 NR Description: expressed protein; protein id: At1g80130.1, by cDNA: 35675., supported by cDNA: gi_14334635, supported by gi_17104606 [Arabidopsis thaliana] >gi|25406635|pir||H96832
  misc_feature (1)..(203): Homolog of NCBI NO: 18414994 NR Description: putative protein; protein id: At4g17940.1,
  misc_feature (1)..(204): Homolog of NCBI NO: 21592868 NR Description: unknown [Arabidopsis thaliana]
  misc_feature (1)..(203): Homolog of NCBI NO: 7487766 NR Description: hypothetical protein T6K21.120 - Arabidopsis >gi|2894603|emb|CAA17137.1| putative protein [Arabidopsis >gi|7268546|emb|CAB78796.1| putative protein [Arabidopsis
  misc_feature (56)..(209): Homolog of NCBI NO: 15236755 NR Description: putative protein; protein id: At4g32340.1, by cDNA: 34819., supported by cDNA: gi_14532727 [Arabidopsis
  misc_feature (62)..(209): Homolog of NCBI NO: 14532728 NR Description: unknown protein [Arabidopsis thaliana]
  misc_feature (54)..(205): Homolog of NCBI NO: 37537130 NR Description: unknown protein [Oryza sativa (japonica
  misc_feature (86)..(208): Homolog of NCBI NO: 18390404 NR Description: expressed protein; protein id: At1g04530.1, by cDNA: 2935., supported by cDNA: gi_17644166, supported by gi_20465342 [Arabidopsis thaliana] >gi|17644167|gb|AAL38781.1|
  misc_feature (86)..(208): Homolog of NCBI NO: 21555875 NR Description: unknown [Arabidopsis thaliana]
MKRTASDSDLRHLTSTKPPVSKFLSGGALMEDVDEGIGFGLIRTSSYDGISWALDEDTEVAGGGGGGMFHGGGKGRSGGRSDGGDGGDDNTDVHYRKMIEANPGNGIFLSNYAKFLKEVRKDYLKAEEYCGRAILVSPNDGNVLAMYAELVWKIHKDSSRAENYFNQAVAAAPEDCYVQASYARFLWDAEEEEEEEKEERHEEELEHQTSRMNFFTGPSPITAMS

SEQ ID NO: 82356 - DNA, 2526 bp, Arabidopsis thaliana
  misc_feature (1)..(2526): Ceres Seq. ID no. 12665173
agagagatttcttctataaggaagtggtaaattttttgagaaaggaacactgaaacaaagagagttcatggccactcaaggagaagcgacgttctccgcggccgcgacgacgacgtcgagctatccgacgggaggtgttggtggcaaattgaagcggcaatcggcgaggaggcatgcggcgacaccttattctcgaccaacacagaaccaggtacaacggaggccgtggatctcgagaatcgtcgatcctgcttatcggattatttccggcggcgctaccagaatacttccatatttcttctcgaacgccgcctccgctcctgctcttgctgctcctccagaggatcaaaatcaacatcaaggtgagttgcagaataatccacaggacaatgatcccagtgtaaccccaatttcaaataaaccggagccagcatcaattgaagtgggaggtcctagtggtactgcaaacgtgaacgaaggcaatttcagtatcagtgcacagagaagagggaaagcagctttaaatgacgacgttgcaatctcggagcttgaaaggctaatggaaggaaaaacgttttcacaagctgaaattgatcgtctcatagagatgataagttcgagggctattgatctacctgatgtcaagagagacgagagaaatttggagattcctttgagagagggagccaagaaaaatatgagtttatttgataaggcaaaagagcccattggtggcaaggatgctaatagtgaaatatgggctacaccaaccccacttgcaaagtcaataatacttgacggagacaaaatacgagatgaagttggtctttcaccggcagaacttgccaaggcatatatgggaggtcagacatcatcaagtagttcccaaggttttgtagcaagaaatgaaaaggattgtttagataggagtatgcttgtagggaaatcatcacttgcatcaccatcaagcaagccttctgcttgttggcctggtatcaagtcaagtgagcaatctggttttgcaactcctcaaagccgacgagagagctatgggcttcaaaattttccaaggactccttattctagaaccattctttcaaattctaagtcaaagttgatgcaattgcagaacgatagtagcaagcacctaagcaacctccagtctccctctcaaagtgtggagagaagatatggccagcttagcaagggaagggatggtggactttttggacccagtagaagaactcgtcagagcgccacgccgtccatggtgtctccttattcacgaccttcccgtggtgcatctcgttttgaaaattctgctatcatgaagagctctgaagcaggggaatcaagttacctatctaggtcccagataacaacttatggtaagcataaagaggcagaagttggtaccctgactgtgcctacacattctagtcagattgctaggacaatattggatcaccttgaacggacccaatcccaatccaccccaaaaaataaaactgccgagttaaagcttgccacttcctggagacatccacagtcttcgaaaaccgttgaaaaaagcagctcggacgtcaccaatgtgaaaaaggatggctcagctaaattgcatgaagatatccagaacattttctctcagaatcagccatcctctgttcttaaaccacctgcaactaccactggtgacattcaaaatggaatgaacaagaccgcttcagcgacaaatggaatattccgtggaacacaagcagcaagtagcggtggtaacgcactccaatatgagtttgggaagcctaagggttctctttccagaagcatgcatgatgagttgggtacttcttctcaggacgctgcaaaagctgttccctattcttttggaggggaaactgcaaatctccccaaaccaccatctcactcactgggaaataacaaaccggtacttccatcgatctcagtagccaagcccttccaaaaatgggcagtcccttcgggttcaaacgctggcttcacattcccggtctcttcatctgatggaacaacatcatcagagcccacaactccatccatcatgcccttcacaacaagcccaccagtagcaagtggtggtggtgttgccattacgaatcatcacgaagcgagaaaagattacgagattcctcaatttagtttcgacggcagcaacagaagaggagataagtcgcccctggtgttttcgtttccctctgtaagcgaagaggtggtcagtgaggatgatgatgcgaggtttggtatcaaatacacatttgggtcagaaaagccggagaggatatcattcagctcagcaggaagtgacggtgtctgctgttaaaagacaaggacaacggtctttgtttcttgtatgttttccaaaaaaatttccttttttgttttctcgaattgtttttgcttctttacttttgagagtagaattttgtgcctagatcatgagttttgatttctattcatttgaggattgatttctttatgaatccgattttt

SEQ ID NO: 82357 - protein, 762 aa, Arabidopsis thaliana
  peptide (1)..(762): Ceres Seq. ID no. 12665174
  misc_feature (10)..(431): Homolog of NCBI NO: 15228349 NR Description: hypothetical protein; protein id: At3g10650.1, by cDNA: gi_20260253 [Arabidopsis thaliana]
  misc_feature (10)..(369): Homolog of NCBI NO: 8567799 NR Description: hypothetical protein [Arabidopsis thaliana]
MATQGEATFSAAATTTSSYPTGGVGGKLKRQSARRHAATPYSRPTQNQVQRRPWISRIVDPAYRIISGGATRILPYFFSNAASAPALAAPPEDQNQHQGELQNNPQDNDPSVTPISNKPEPASIEVGGPSGTANVNEGNFSISAQRRGKAALNDDVAISELERLMEGKTFSQAEIDRLIEMISSRAIDLPDVKRDERNLEIPLREGAKKNMSLFDKAKEPIGGKDANSEIWATPTPLAKSIILDGDKIRDEVGLSPAELAKAYMGGQTSSSSSQGFVARNEKDCLDRSMLVGKSSLASPSSKPSACWPGIKSSEQSGFATPQSRRESYGLQNFPRTPYSRTILSNSKSKLMQLQNDSSKHLSNLQSPSQSVERRYGQLSKGRDGGLFGPSRRTRQSATPSMVSPYSRPSRGASRFENSAIMKSSEAGESSYLSRSQITTYGKHKEAEVGTLTVPTHSSQIARTILDHLERTQSQSTPKNKTAELKLATSWRHPQSSKTVEKSSSDVTNVKKDGSAKLHEDIQNIFSQNQPSSVLKPPATTTGDIQNGMNKTASATNGIFRGTQAASSGGNALQYEFGKPKGSLSRSMHDELGTSSQDAAKAVPYSFGGETANLPKPPSHSLGNNKPVLPSISVAKPFQKWAVPSGSNAGFTFPVSSSDGTTSSEPTTPSIMPFTTSPPVASGGGVAITNHHEARKDYEIPQFSFDGSNRRGDKSPLVFSFPSVSEEVVSEDDDARFGIKYTFGSEKPERISFSSAGSDGVCC

SEQ ID NO: 82358 - protein, 598 aa, Arabidopsis thaliana; identical to SEQ ID NO: 71466
  peptide (1)..(598): Ceres Seq. ID no. 12665175
  misc_feature (1)..(267): Homolog of NCBI NO: 15228349 NR Description: hypothetical protein; protein id: At3g10650.1, by cDNA: gi_20260253 [Arabidopsis thaliana]
  misc_feature (1)..(205): Homolog of NCBI NO: 8567799 NR Description: hypothetical protein [Arabidopsis thaliana]

SEQ ID NO: 82359 - protein, 582 aa, Arabidopsis thaliana; identical to SEQ ID NO: 71467
  peptide (1)..(582): Ceres Seq. ID no. 12665176
  misc_feature (1)..(251): Homolog of NCBI NO: 15228349 NR Description: hypothetical protein; protein id: At3g10650.1, by cDNA: gi_20260253 [Arabidopsis thaliana]
  misc_feature (1)..(189): Homolog of NCBI NO: 8567799 NR Description: hypothetical protein [Arabidopsis thaliana]

SEQ ID NO: 82360 - DNA, 1005 bp, Arabidopsis thaliana
  misc_feature (1)..(1005): Ceres Seq. ID no. 12665177
  misc_feature: MA Experiment ID: 20000171 Result: Up-regulated in Transcription
  misc_feature: MA Experiment 20000171 PARAMETER Experiment Name: At_42deg_Heat_P Parameter: Age (day) Value: 14
  misc_feature: MA Experiment 20000171 PARAMETER Experiment Name: At_42deg_Heat_P Parameter: Organism Value: A. thaliana
  misc_feature: MA Experiment 20000171 PARAMETER Experiment Name: At_42deg_Heat_P Parameter: Plant Line Value: WS
  misc_feature: MA Experiment 20000171 PARAMETER Experiment Name: At_42deg_Heat_P Parameter: Temperature (deg C) Value: 42 vs. 22
  misc_feature: MA Experiment 20000171 PARAMETER Experiment Name: At_42deg_Heat_P Parameter: Timepoint (hr) Value: 1
  misc_feature: MA Experiment 20000171 PARAMETER Experiment Name: At_42deg_Heat_P Parameter: Tissue Value: Aerial
atggagaagaaattcaaagtgtgggtgtacagagaaggagagacaccgttagttcacatgggtccaatgaacaacatatacagcattgaaggccaattcatggacgagatcgagacagggatgagcccgttcgcggctaacaaccccgaagaggctcatgcctttctcctccctgtcagcgtcgccaacatcgttcattacctataccggccgctcgtgacctactcgagggaacaacttcacaaagtttttcttgactacgtcgatgttgtggctcacaagtatccttattggaacagaagccttggagccgaccatttctacgtttcttgccatgattgggcaccagacgtctcaggatcgaacccggagctgatgaaaaacctgataagagttctctgcaacgccaacacatcagaaggtttcatgccccaacgagacgtctcaatcccggagatcaacatccccggaggccacctgggaccacctcggttatcgcgctcttcgggccatgaccgacccatccttgctttcttcgcagggggttcacacggttatatccgcagaattctattgcagcattggaaagacaaagatgaggaggtccaagtccacgagtacttagccaaaaacaaagactacttcaagctcatggctacggcaaggttctgtctctgtcctagtggctacgaagtggctagccctcgagtcgttgcagccattaacttaggttgcgtccctgtcatcatctctgatcactacgccttgcctttctcagacgttcttgattggactaagttcaccattcatgttccttctaagaagatccctgagatcaaaaccatactaaagagcatatcctggagacgctacagggtgttgcagagaagggttttgcaggtccagagacatttcgtgatcaacagaccgtcacaaccgtttgatatgcttagaatgcttcttcactctgtttggttgagaagactaaacctgaggttgccttag

SEQ ID NO: 82361 - protein, 334 aa, Arabidopsis thaliana
  peptide (1)..(334): Ceres Seq. ID no. 12665178
  misc_feature (7)..(298): Pfam Name: Exostosin family Pfam Description: Exostosin family
  misc_feature (1)..(334): Homolog of NCBI NO: 15241301 NR Description: Exostosin family; protein id: At5g20260.1
  misc_feature (1)..(334): Homolog of NCBI NO: 15238967 NR Description: Exostosin family; protein id: At5g11130.1 thaliana] >gi|8953375|emb|CAB96648.1| putative protein
  misc_feature (1)..(334): Homolog of NCBI NO: 30690502 NR Description: Exostosin family [Arabidopsis thaliana]
  misc_feature (3)..(334): Homolog of NCBI NO: 11358246 NR Description: hypothetical protein T27B3.50 - Arabidopsis >gi|6735291|emb|CAB68119.1| putative protein [Arabidopsis
  misc_feature (4)..(333): Homolog of NCBI NO: 15242798 NR Description: Exostosin family; protein id: At5g33290.1
  misc_feature (1)..(333): Homolog of NCBI NO: 15146187 NR Description: AT5g33290/F19N2_10 [Arabidopsis thaliana]
  misc_feature (1)..(333): Homolog of NCBI NO: 9758008 NR Description: contains similarity to limonene
  misc_feature (1)..(333): Homolog of NCBI NO: 15237526 NR Description: putative protein; protein id: At5g03800.1
  misc_feature (1)..(333): Homolog of NCBI NO: 34394611 NR Description: putative pectin-glucuronyltransferase [Oryza
  misc_feature (1)..(333): Homolog of NCBI NO: 38345576 NR Description: OSJNBa0027H06.12 [Oryza sativa (japonica
MEKKFKVWVYREGETPLVHMGPMNNIYSIEGQFMDEIETGMSPFAANNPEEAHAFLLPVSVANIVHYLYRPLVTYSREQLHKVFLDYVDVVAHKYPYWNRSLGADHFYVSCHDWAPDVSGSNPELMKNLIRVLCNANTSEGFMPQRDVSIPEINIPGGHLGPPRLSRSSGHDRPILAFFAGGSHGYIRRILLQHWKDKDEEVQVHEYLAKNKDYFKLMATARFCLCPSGYEVASPRVVAAINLGCVPVIISDHYALPFSDVLDWTKFTIHVPSKKIPEIKTILKSISWRRYRVLQRRVLQVQRHFVINRPSQPFDMLRMLLHSVWLRRLNLRLP

SEQ ID NO: 82362 - protein, 315 aa, Arabidopsis thaliana
  peptide (1)..(315): Ceres Seq. ID no. 12665179
  misc_feature (1)..(279): Pfam Name: Exostosin family Pfam Description: Exostosin family
  misc_feature (1)..(315): Homolog of NCBI NO: 15241301 NR Description: Exostosin family; protein id: At5g20260.1
  misc_feature (1)..(315): Homolog of NCBI NO: 15238967 NR Description: Exostosin family; protein id: At5g11130.1 thaliana] >gi|8953375|emb|CAB96648.1| putative protein
  misc_feature (1)..(315): Homolog of NCBI NO: 30690502 NR Description: Exostosin family [Arabidopsis thaliana]
  misc_feature (1)..(315): Homolog of NCBI NO: 11358246 NR Description: hypothetical protein T27B3.50 - Arabidopsis >gi|6735291|emb|CAB68119.1| putative protein [Arabidopsis
  misc_feature (1)..(314): Homolog of NCBI NO: 15242798 NR Description: Exostosin family; protein id: At5g33290.1
  misc_feature (1)..(314): Homolog of NCBI NO: 15146187 NR Description: AT5g33290/F19N2_10 [Arabidopsis thaliana]
  misc_feature (1)..(314): Homolog of NCBI NO: 9758008 NR Description: contains similarity to limonene
  misc_feature (1)..(314): Homolog of NCBI NO: 15237526 NR Description: putative protein; protein id: At5g03800.1
  misc_feature (1)..(314): Homolog of NCBI NO: 34394611 NR Description: putative pectin-glucuronyltransferase [Oryza
  misc_feature (1)..(314): Homolog of NCBI NO: 38345576 NR Description: OSJNBa0027H06.12 [Oryza sativa (japonica
MGPMNNIYSIEGQFMDEIETGMSPFAANNPEEAHAFLLPVSVANIVHYLYRPLVTYSREQLHKVFLDYVDVVAHKYPYWNRSLGADHFYVSCHDWAPDVSGSNPELMKNLIRVLCNANTSEGFMPQRDVSIPEINIPGGHLGPPRLSRSSGHDRPILAFFAGGSHGYIRRILLQHWKDKDEEVQVHEYLAKNKDYFKLMATARFCLCPSGYEVASPRVVAAINLGCVPVIISDHYALPFSDVLDWTKFTIHVPSKKIPEIKTILKSISWRRYRVLQRRVLQVQRHFVINRPSQPFDMLRMLLHSVWLRRLNLRLP

SEQ ID NO: 82363 - protein, 312 aa, Arabidopsis thaliana
  peptide (1)..(312): Ceres Seq. ID no. 12665180
  misc_feature (1)..(276): Pfam Name: Exostosin family Pfam Description: Exostosin family
  misc_feature (1)..(312): Homolog of NCBI NO: 15241301 NR Description: Exostosin family; protein id: At5g20260.1
  misc_feature (1)..(312): Homolog of NCBI NO: 15238967 NR Description: Exostosin family; protein id: At5g11130.1 thaliana] >gi|8953375|emb|CAB96648.1| putative protein
  misc_feature (1)..(312): Homolog of NCBI NO: 30690502 NR Description: Exostosin family [Arabidopsis thaliana]
  misc_feature (1)..(312): Homolog of NCBI NO: 11358246 NR Description: hypothetical protein T27B3.50 - Arabidopsis >gi|6735291|emb|CAB68119.1| putative protein [Arabidopsis
  misc_feature (1)..(311): Homolog of NCBI NO: 15242798 NR Description: Exostosin family; protein id: At5g33290.1
  misc_feature (1)..(311): Homolog of NCBI NO: 15146187 NR Description: AT5g33290/F19N2_10 [Arabidopsis thaliana]
  misc_feature (1)..(311): Homolog of NCBI NO: 9758008 NR Description: contains similarity to limonene
  misc_feature (1)..(311): Homolog of NCBI NO: 15237526 NR Description: putative protein; protein id: At5g03800.1
  misc_feature (1)..(311): Homolog of NCBI NO: 34394611 NR Description: putative pectin-glucuronyltransferase [Oryza
  misc_feature (1)..(311): Homolog of NCBI NO: 38345576 NR Description: OSJNBa0027H06.12 [Oryza sativa (japonica
MNNIYSIEGQFMDEIETGMSPFAANNPEEAHAFLLPVSVANIVHYLYRPLVTYSREQLHKVFLDYVDVVAHKYPYWNRSLGADHFYVSCHDWAPDVSGSNPELMKNLIRVLCNANTSEGFMPQRDVSIPEINIPGGHLGPPRLSRSSGHDRPILAFFAGGSHGYIRRILLQHWKDKDEEVQVHEYLAKNKDYFKLMATARFCLCPSGYEVASPRVVAAINLGCVPVIISDHYALPFSDVLDWTKFTIHVPSKKIPEIKTILKSISWRRYRVLQRRVLQVQRHFVINRPSQPFDMLRMLLHSVWLRRLNLRLP

SEQ ID NO: 82364 - DNA, 2358 bp, Arabidopsis thaliana
  misc_feature (1)..(2358): Ceres Seq. ID no. 12665214
  misc_feature: MA Experiment ID: 20000171 Result: Down-regulated in Transcription
  misc_feature: MA Experiment 20000171 PARAMETER Experiment Name: At_42deg_Heat_P Parameter: Age (day) Value: 14
  misc_feature: MA Experiment 20000171 PARAMETER Experiment Name: At_42deg_Heat_P Parameter: Organism Value: A. thaliana
  misc_feature: MA Experiment 20000171 PARAMETER Experiment Name: At_42deg_Heat_P Parameter: Plant Line Value: WS
  misc_feature: MA Experiment 20000171 PARAMETER Experiment Name: At_42deg_Heat_P Parameter: Temperature (deg C) Value: 42 vs. 22
  misc_feature: MA Experiment 20000171 PARAMETER Experiment Name: At_42deg_Heat_P Parameter: Timepoint (hr) Value: 1
  misc_feature: MA Experiment 20000171 PARAMETER Experiment Name: At_42deg_Heat_P Parameter: Tissue Value: Aerial
  misc_feature: MA Experiment ID: 20000185 Result: Up-regulated in Transcription
  misc_feature: MA Experiment 20000185 PARAMETER Experiment Name: At_Roots__P Parameter: Age (day) Value: 7 vs. 21
  misc_feature: MA Experiment 20000185 PARAMETER Experiment Name: At_Roots__P Parameter: Organism Value: A. thaliana
  misc_feature: MA Experiment 20000185 PARAMETER Experiment Name: At_Roots__P Parameter: Tissue Value: Roots vs. Whole Plant
  misc_feature: MA Experiment ID: 20000235 Result: Up-regulated in Transcription
  misc_feature: MA Experiment 20000235 PARAMETER Experiment Name: At_Siliques_P Parameter: Age (day) Value: 21
  misc_feature: MA Experiment 20000235 PARAMETER Experiment Name: At_Siliques_P Parameter: Organism Value: A. thaliana
  misc_feature: MA Experiment 20000235 PARAMETER Experiment Name: At_Siliques_P Parameter: Plant Line Value: WS
  misc_feature: MA Experiment 20000235 PARAMETER Experiment Name: At_Siliques_P Parameter: Tissue Value: 5-10mm Siliques vs. Whole Plant
  misc_feature: MA Experiment ID: 20000495 Result: Up-regulated in Transcription
  misc_feature: MA Experiment 20000495 PARAMETER Experiment Name: At_Guard_Cells_P Parameter: Harvest Date Value: 8/2/2002
  misc_feature: MA Experiment 20000495 PARAMETER Experiment Name: At_Guard_Cells_P Parameter: Organism Value: A. thaliana
  misc_feature: MA Experiment 20000495 PARAMETER Experiment Name: At_Guard_Cells_P Parameter: Tissue Value: Guard Cells vs. Leaves
  misc_feature: MA Experiment ID: 20000794 Result: Up-regulated in Transcription
  misc_feature: MA Experiment 20000794 PARAMETER Experiment Name: At_Petals_P Parameter: Age (day) Value: 23-25 days
  misc_feature: MA Experiment 20000794 PARAMETER Experiment Name: At_Petals_P Parameter: Plant Line Value: WS
  misc_feature: MA Experiment 20000794 PARAMETER Experiment Name: At_Petals_P Parameter: Tissue Value: Petals vs. Whole plant
  misc_feature: MA Experiment ID: 20001557 Result: Up-regulated in Transcription
  misc_feature: MA Experiment 20001557 PARAMETER Experiment Name: At_Drought_Soil_Dry_P Parameter: Age (day) Value: 27
  misc_feature: MA Experiment 20001557 PARAMETER Experiment Name: At_Drought_Soil_Dry_P Parameter: Organism Value: A. thaliana
  misc_feature: MA Experiment 20001557 PARAMETER Experiment Name: At_Drought_Soil_Dry_P Parameter: Plant Line Value: WS
  misc_feature: MA Experiment 20001557 PARAMETER Experiment Name: At_Drought_Soil_Dry_P Parameter: Post Timepoint (hr) Value: 3
  misc_feature: MA Experiment 20001557 PARAMETER Experiment Name: At_Drought_Soil_Dry_P Parameter: Post-Treatment Value: Re-Water vs. No Drought
  misc_feature: MA Experiment 20001557 PARAMETER Experiment Name: At_Drought_Soil_Dry_P Parameter: Timepoint (day) Value: 13
  misc_feature: MA Experiment 20001557 PARAMETER Experiment Name: At_Drought_Soil_Dry_P Parameter: Treatment Value: Drought vs. No Drought
ggtcatcatatcattcaaagccttgtttttttgttctctcccaaatttatttgaatttgacatttgatttgatttctcgaacgtagtgatttcctccgtacggcgtctccggtgaatcgaatttcatcatcgccgacatccctaaaagagtgtctatctattgattcactttcttcccaaattcttgttccctcgaattgattgacgaggaagagatttgtatttgatctgatatctcagattccaggatcagtgtttaggatttttttttggtcattaaaggtaagattgaaaggtcaccaataatcttatgtgattaggcaaggaatctactcctaaatgtgttgatcaactaattgttgtgaaaggatcacactgaacctcgagctagctggacatatgccttgatctagtatgaacgaaactttctctgcaacgccaagaagcatgaccatccatagatataggatgaaaagaggagcccttagacgaagggctagggatatctctgttatgcttgttgtacttgtttgtgcaactgtagtcatatggacatgggatagaactccaacctcggcctttcttccacctgaaagtcactatctaaagctgcaatcagaagaaaaggttgagaaattacctactgcgctgaatactgaaactaaagacagctactcatcagctattccatttgtaaacaaagaggaaagcaaagaggattcatccgataataaagatacagaagaagaagaggagaaacaagtggaagaagttactgtaagtaatacgaatcgagggaagataccaacgattgaagaaaaaaagggggaacatgaagttattgcaagtgagccaaaatatcggaagacgccaactagagaagattttaaattagaaaaggtgaaacatgaggttgctgttggtgagggcgaagctacggagacaacacatattaaagagactaattcagatccaaagagtaatattcttgcaacagacgaagagaggactgatggtacttcaacagctcgcatcacgaatcaagcttgcaattatgcgaaagggaaatgggttgtggacaatcaccgtcctttgtattcaggatctcaatgcaaacagtggcttgcttcaatgtgggcatgcaggttgatgcaacgtacagactttgcctttgaaagtttaagatggcaacctaaagattgctctatggaagaatttgagggttccaagttcttgagaaggatgaagaacaaaaccctagcctttgttggagactcgttgggaagacaacagtttcagtctatgatgtgtatgatctcgggaggcaaagagagactcgatgtccttgatgtgggaccagaatttgggttcataactcccgaaggtggagctcgtcctggtggttgggcttacagattcccagaaactaacacaacggtcctataccactggtcatctacactgtgcgacatagaaccgctcaacatcactgaccccgcaactgaacacgctatgcatcttgatcgcccaccagcgtttttacgccaataccttcaaaagatcgacgtattggtaatgaacacaggtcaccattggaaccgcgggaagctcaacgggaacaaatgggtgatgcatgttaatggcgttcccaacactaacaggaagttagctgctcttgggaacgccaagaatttcacaatccacagcacagttagttgggttaactcacaactccctctccatcccggtctcaaggcattctacagaagcctttcaccgagacatttcgtgggtggggaatggaacaccggagggagctgcaataacacaaccccaatgtctatcgggaaagaagttttgcaagaggagtcaagcgactacagcgcgggtcgtgcagtgaaaggtacaggggttaagcttttagacataacagccttatctcatattagagacgaaggtcacatatcacggttcagtatctcggcttcacggggagttcaggattgcctccattggtgcttgcccggtgttcctgatacgtggaatgaaatcctttttgcaatgatctaagttttcaagttacagctgttgcatcaatcaacagaaaagttcagagaaagggcttgagccaaatcaaagccagcctttgatagctttctacaacacacattgaagttttagcggcaggaggtgtaagttagtatttattttggtacaaaaccaaagctctgggtatcatagacgtattgtcgttatcgtaaccataccggggtttggtttcgaccatattttacagaacagattctaactcttggaatttgtctttgatcgattaaaagaaaattttagagttacttc

SEQ ID NO: 82365 - protein, 551 aa, Arabidopsis thaliana
  peptide (1)..(551): Ceres Seq. ID no. 12665215
  misc_feature (394)..(551): Pfam Name: Arabidopsis proteins of unknown function Pfam Description: Arabidopsis proteins of unknown function
  misc_feature (1)..(551): Homolog of NCBI NO: 18420285 NR Description: putative protein; protein id: At5g20680.1,
  misc_feature (1)..(551): Homolog of NCBI NO: 15810385 NR Description: unknown protein [Arabidopsis thaliana]
  misc_feature (196)..(551): Homolog of NCBI NO: 30697938 NR Description: expressed protein [Arabidopsis thaliana]
  misc_feature (191)..(551): Homolog of NCBI NO: 8777315 NR Description: gene_id:MBM17.12~pir||T02538~strong similarity to
  misc_feature (210)..(551): Homolog of NCBI NO: 15224349 NR Description: unknown protein; protein id: At2g37720.1
  misc_feature (202)..(551): Homolog of NCBI NO: 9759321 NR Description: gb|AAF00670.1~gene_id:MBL20.11~strong similarity
  misc_feature (202)..(551): Homolog of NCBI NO: 18415139 NR Description: putative protein; protein id: At5g06230.1, by cDNA: gi_13605530 [Arabidopsis thaliana] AT5g06230/MBL20_11 [Arabidopsis thaliana]
  misc_feature (208)..(551): Homolog of NCBI NO: 6862912 NR Description: unknown protein [Arabidopsis thaliana]
  misc_feature (206)..(551): Homolog of NCBI NO: 15229797 NR Description: hypothetical protein; protein id: At3g11570.1
  misc_feature (47)..(551): Homolog of NCBI NO: 9759298 NR Description: emb|CAB82953.1~gene_id:MPH15.5~strong similarity
MNETFSATPRSMTIHRYRMKRGALRRRARDISVMLVVLVCATVVIWTWDRTPTSAFLPPESHYLKLQSEEKVEKLPTALNTETKDSYSSAIPFVNKEESKEDSSDNKDTEEEEEKQVEEVTVSNTNRGKIPTIEEKKGEHEVIASEPKYRKTPTREDFKLEKVKHEVAVGEGEATETTHIKETNSDPKSNILATDEERTDGTSTARITNQACNYAKGKWVVDNHRPLYSGSQCKQWLASMWACRLMQRTDFAFESLRWQPKDCSMEEFEGSKFLRRMKNKTLAFVGDSLGRQQFQSMMCMISGGKERLDVLDVGPEFGFITPEGGARPGGWAYRFPETNTTVLYHWSSTLCDIEPLNITDPATEHAMHLDRPPAFLRQYLQKIDVLVMNTGHHWNRGKLNGNKWVMHVNGVPNTNRKLAALGNAKNFTIHSTVSWVNSQLPLHPGLKAFYRSLSPRHFVGGEWNTGGSCNNTTPMSIGKEVLQEESSDYSAGRAVKGTGVKLLDITALSHIRDEGHISRFSISASRGVQDCLHWCLPGVPDTWNEILFAMI

SEQ ID NO: 82366 - protein, 540 aa, Arabidopsis thaliana
  peptide (1)..(540): Ceres Seq. ID no. 12665216
  misc_feature (383)..(540): Pfam Name: Arabidopsis proteins of unknown function Pfam Description: Arabidopsis proteins of unknown function
  misc_feature (1)..(540): Homolog of NCBI NO: 18420285 NR Description: putative protein; protein id: At5g20680.1,
  misc_feature (1)..(540): Homolog of NCBI NO: 15810385 NR Description: unknown protein [Arabidopsis thaliana]
  misc_feature (185)..(540): Homolog of NCBI NO: 30697938 NR Description: expressed protein [Arabidopsis thaliana]
  misc_feature (180)..(540): Homolog of NCBI NO: 8777315 NR Description: gene_id:MBM17.12~pir||T02538~strong similarity to
  misc_feature (199)..(540): Homolog of NCBI NO: 15224349 NR Description: unknown protein; protein id: At2g37720.1
  misc_feature (191)..(540): Homolog of NCBI NO: 9759321 NR Description: gb|AAF00670.1~gene_id:MBL20.11~strong similarity
  misc_feature (191)..(540): Homolog of NCBI NO: 18415139 NR Description: putative protein; protein id: At5g06230.1, by cDNA: gi_13605530 [Arabidopsis thaliana] AT5g06230/MBL20_11 [Arabidopsis thaliana]
  misc_feature (197)..(540): Homolog of NCBI NO: 6862912 NR Description: unknown protein [Arabidopsis thaliana]
  misc_feature (195)..(540): Homolog of NCBI NO: 15229797 NR Description: hypothetical protein; protein id: At3g11570.1
  misc_feature (36)..(540): Homolog of NCBI NO: 9759298 NR Description: emb|CAB82953.1~gene_id:MPH15.5~strong similarity
MTIHRYRMKRGALRRRARDISVMLVVLVCATVVIWTWDRTPTSAFLPPESHYLKLQSEEKVEKLPTALNTETKDSYSSAIPFVNKEESKEDSSDNKDTEEEEEKQVEEVTVSNTNRGKIPTIEEKKGEHEVIASEPKYRKTPTREDFKLEKVKHEVAVGEGEATETTHIKETNSDPKSNILATDEERTDGTSTARITNQACNYAKGKWVVDNHRPLYSGSQCKQWLASMWACRLMQRTDFAFESLRWQPKDCSMEEFEGSKFLRRMKNKTLAFVGDSLGRQQFQSMMCMISGGKERLDVLDVGPEFGFITPEGGARPGGWAYRFPETNTTVLYHWSSTLCDIEPLNITDPATEHAMHLDRPPAFLRQYLQKIDVLVMNTGHHWNRGKLNGNKWVMHVNGVPNTNRKLAALGNAKNFTIHSTVSWVNSQLPLHPGLKAFYRSLSPRHFVGGEWNTGGSCNNTTPMSIGKEVLQEESSDYSAGRAVKGTGVKLLDITALSHIRDEGHISRFSISASRGVQDCLHWCLPGVPDTWNEILFAMI

SEQ ID NO: 82367 - protein, 533 aa, Arabidopsis thaliana
  peptide (1)..(533): Ceres Seq. ID no. 12665217
  misc_feature (376)..(533): Pfam Name: Arabidopsis proteins of unknown function Pfam Description: Arabidopsis proteins of unknown function
  misc_feature (1)..(533): Homolog of NCBI NO: 18420285 NR Description: putative protein; protein id: At5g20680.1,
  misc_feature (1)..(533): Homolog of NCBI NO: 15810385 NR Description: unknown protein [Arabidopsis thaliana]
  misc_feature (178)..(533): Homolog of NCBI NO: 30697938 NR Description: expressed protein [Arabidopsis thaliana]
  misc_feature (173)..(533): Homolog of NCBI NO: 8777315 NR Description: gene_id:MBM17.12~pir||T02538~strong similarity to
  misc_feature (192)..(533): Homolog of NCBI NO: 15224349 NR Description: unknown protein; protein id: At2g37720.1
  misc_feature (184)..(533): Homolog of NCBI NO: 9759321 NR Description: gb|AAF00670.1~gene_id:MBL20.11~strong similarity
  misc_feature (184)..(533): Homolog of NCBI NO: 18415139 NR Description: putative protein; protein id: At5g06230.1, by cDNA: gi_13605530 [Arabidopsis thaliana] AT5g06230/MBL20_11 [Arabidopsis thaliana]
  misc_feature (190)..(533): Homolog of NCBI NO: 6862912 NR Description: unknown protein [Arabidopsis thaliana]
  misc_feature (188)..(533): Homolog of NCBI NO: 15229797 NR Description: hypothetical protein; protein id: At3g11570.1
  misc_feature (29)..(533): Homolog of NCBI NO: 9759298 NR Description: emb|CAB82953.1~gene_id:MPH15.5~strong similarity
MKRGALRRRARDISVMLVVLVCATVVIWTWDRTPTSAFLPPESHYLKLQSEEKVEKLPTALNTETKDSYSSAIPFVNKEESKEDSSDNKDTEEEEEKQVEEVTVSNTNRGKIPTIEEKKGEHEVIASEPKYRKTPTREDFKLEKVKHEVAVGEGEATETTHIKETNSDPKSNILATDEERTDGTSTARITNQACNYAKGKWVVDNHRPLYSGSQCKQWLASMWACRLMQRTDFAFESLRWQPKDCSMEEFEGSKFLRRMKNKTLAFVGDSLGRQQFQSMMCMISGGKERLDVLDVGPEFGFITPEGGARPGGWAYRFPETNTTVLYHWSSTLCDIEPLNITDPATEHAMHLDRPPAFLRQYLQKIDVLVMNTGHHWNRGKLNGNKWVMHVNGVPNTNRKLAALGNAKNFTIHSTVSWVNSQLPLHPGLKAFYRSLSPRHFVGGEWNTGGSCNNTTPMSIGKEVLQEESSDYSAGRAVKGTGVKLLDITALSHIRDEGHISRFSISASRGVQDCLHWCLPGVPDTWNEILFAMI

SEQ ID NO: 82368 - DNA, 1068 bp, Arabidopsis thaliana
  misc_feature (1)..(1068): Ceres Seq. ID no. 12665258
  misc_feature: MA Experiment ID: 20001910 Result: Up-regulated in Transcription
  misc_feature: MA Experiment 20001910 PARAMETER Experiment Name: At_Drought_Reproduction_P Parameter: Age (day) Value: 37
  misc_feature: MA Experiment 20001910 PARAMETER Experiment Name: At_Drought_Reproduction_P Parameter: Organism Value: A. thaliana
  misc_feature: MA Experiment 20001910 PARAMETER Experiment Name: At_Drought_Reproduction_P Parameter: Plant Line Value: WS
  misc_feature: MA Experiment 20001910 PARAMETER Experiment Name: At_Drought_Reproduction_P Parameter: Timepoint (day) Value: 7
  misc_feature: MA Experiment 20001910 PARAMETER Experiment Name: At_Drought_Reproduction_P Parameter: Tissue Value: Flowers
  misc_feature: MA Experiment 20001910 PARAMETER Experiment Name: At_Drought_Reproduction_P Parameter: Treatment Value: Drought vs. No Drought
atgtctgattcttcctcaagccatgactcaccaccttctccggcgatcaccggagattcagaaaccacagtgaccaacaacgaatcagaatccaacacaaaatgtcaaacagcaatccaatccttatccacgatcgtcacaaacacaaacatcccttccacaataaccatcctcctcgacgatgaagccgtctccaccgcgatctcctctctcctcctacgtcccgattcaggcgccggagataacaacctctgccgttggctctacgacacattccaatccgcggaaccatcgcttcagcttctcgtcctccgattcgttcctttaatcgctggtctctacctctctcgtgtccctctccgtcaaccacaagccggattcgaagccgttttactcgctctctacgcgcacgaaacaacctcacgtgccggtcaagcaataaccgtcaacattccagatctctcatatccaagcatttaccatgaatccaaaggtctcacaaggaacaacaactcaacgtgcctcaacatcgctgtgatctcctccacgttagatccacacgggacggttagatccacgcgccgcgcgaggatcgtcggagtcgcgttggagctttactatagcaaaatctcgaaaatgccacgcgaatctaagcttaatttctgtgaatcgtgtgagaaatgggcggggcaaaacggagaaacggagcaatcttcacgggctgtgattccgactttgagcgatgattcgtggagagaggaagagaatgttgctattggaggaagatctgagagagatagtggaaggattccattgccatgggagcttctccaaccgattttgaggatcttagggcattgtctccttgggctcaaaatggaagatagggagttatctgaggcggcgaataaagcttgtcagagtttgtatctccgatctctgcatgatataaatccgaaggcgattttggctaccggaagtcttcttcggctccgtgagatggctcttgatcccaagaatcaaatcgatcacactgagctatcaaacgacaccgttctctccgtttga

SEQ ID NO: 82369 - protein, 355 aa, Arabidopsis thaliana
  peptide (1)..(355): Ceres Seq. ID no. 12665259
  misc_feature (1)..(355): Homolog of NCBI NO: 15242145 NR Description: putative protein; protein id: At5g21050.1
  misc_feature (58)..(237): Homolog of NCBI NO: 15237612 NR Description: unknown protein; protein id: At5g64090.1 thaliana] >gi|10176957|dbj|BAB10277.1| gene_id:MHJ24.7~unknown
  misc_feature (253)..(331): Homolog of NCBI NO: 15237612 NR Description: unknown protein; protein id: At5g64090.1 thaliana] >gi|10176957|dbj|BAB10277.1| gene_id:MHJ24.7~unknown
MSDSSSSHDSPPSPAITGDSETTVTNNESESNTKCQTAIQSLSTIVTNTNIPSTITILLDDEAVSTAISSLLLRPDSGAGDNNLCRWLYDTFQSAEPSLQLLVLRFVPLIAGLYLSRVPLRQPQAGFEAVLLALYAHETTSRAGQAITVNIPDLSYPSIYHESKGLTRNNNSTCLNIAVISSTLDPHGTVRSTRRARIVGVALELYYSKISKMPRESKLNFCESCEKWAGQNGETEQSSRAVIPTLSDDSWREEENVAIGGRSERDSGRIPLPWELLQPILRILGHCLLGLKMEDRELSEAANKACQSLYLRSLHDINPKAILATGSLLRLREMALDPKNQIDHTELSNDTVLSV

SEQ ID NO: 82370 - DNA, 633 bp, Arabidopsis thaliana
  misc_feature (1)..(633): Ceres Seq. ID no. 12665334
  misc_feature: MA Experiment ID: 20000439 Result: Down-regulated in Transcription
  misc_feature: MA Experiment 20000439 PARAMETER Experiment Name: At_Roots__P Parameter: Age (day) Value: 14 vs. 21
  misc_feature: MA Experiment 20000439 PARAMETER Experiment Name: At_Roots__P Parameter: Organism Value: A. thaliana
  misc_feature: MA Experiment 20000439 PARAMETER Experiment Name: At_Roots__P Parameter: Tissue Value: Roots vs. Whole Plant
atgacggggagatactgcgaccaacacaacggctatgaggagaggaggatgaggatgatgatgagacgcatagcatgggcatgtcttggcctaatcgtggcggttgcgttcgtggtgttcttggtgtgggctatacttcacccgcacggaccgcgttttgtcctccaagacgtaaccattaacgacttcaacgtttctcagccaaatttcctctcttcaaatctccaggtcactgtatcttctcgcaatccaaacgacaagatcggcattttttatgatcgtctcgacatctacgtcacataccggaaccaagaggtaacgttggcgaggctcttgccgtcaacgtatcaaggacatctggaagtaacggtgtggtcaccatttctgattggctccgccgtgccggtggctccttacctatcttcggcattgaacgaagacttattcgccgggttggtgcttctcaacatcaaaatagacggttgggttaggtggaaagtgggctcgtgggtctctggcagttatcgcctccacgttaactgtcctgcgttcattaccgtcaccggaaagttaaccggcaccggtccggcgatcaagtaccagcttgttcagcgatgtgctgttgacgtatga

SEQ ID NO: 82371 - protein, 210 aa, Arabidopsis thaliana
  peptide (1)..(210): Ceres Seq. ID no. 12665335
  misc_feature (1)..(210): Homolog of NCBI NO: 22326984 NR Description: similar to hairpin-induced protein, putative
  misc_feature (1)..(210): Homolog of NCBI NO: 15229906 NR Description: hairpin-induced protein, putative (HIN1); protein At3g44220.1 [Arabidopsis thaliana] >gi|11282595|pir||T49138
  misc_feature (6)..(210): Homolog of NCBI NO: 15231227 NR Description: hairpin-induced protein, putative (HIN1); protein At3g52470.1, supported by cDNA: 92178., supported by cDNA: supported by cDNA: gi_21281063 [Arabidopsis thaliana]
  misc_feature (6)..(210): Homolog of NCBI NO: 18399308 NR Description: VAMP protein SEC22; protein id: At3g11660.1, by cDNA: 8166., supported by cDNA: gi_9502171 [Arabidopsis
  misc_feature (6)..(210): Homolog of NCBI NO: 28392929 NR Description: putative VAMP protein SEC22 [Arabidopsis thaliana]
  misc_feature (1)..(210): Homolog of NCBI NO: 15227538 NR Description: hairpin-induced protein, putative (HIN1); protein
  misc_feature (1)..(210): Homolog of NCBI NO: 15240001 NR Description: hairpin-induced protein, putative (HIN1); protein
  misc_feature (1)..(209): Homolog of NCBI NO: 15233951 NR Description: hairpin-induced protein, putative (HIN1); protein At4g09590.1 [Arabidopsis thaliana] >gi|25354574|pir||A85098
  misc_feature (1)..(209): Homolog of NCBI NO: 15227540 NR Description: hairpin-induced protein, putative (HIN1); protein
  misc_feature (7)..(193): Homolog of NCBI NO: 38344036 NR Description: OJ991214_12.17 [Oryza sativa (japonica
MTGRYCDQHNGYEERRMRMMMRRIAWACLGLIVAVAFVVFLVWAILHPHGPRFVLQDVTINDFNVSQPNFLSSNLQVTVSSRNPNDKIGIFYDRLDIYVTYRNQEVTLARLLPSTYQGHLEVTVWSPFLIGSAVPVAPYLSSALNEDLFAGLVLLNIKIDGWVRWKVGSWVSGSYRLHVNCPAFITVTGKLTGTGPAIKYQLVQRCAVDV

SEQ ID NO: 82372 - protein, 194 aa, Arabidopsis thaliana
  peptide (1)..(194): Ceres Seq. ID no. 12665336
  misc_feature (1)..(194): Homolog of NCBI NO: 22326984 NR Description: similar to hairpin-induced protein, putative
  misc_feature (1)..(194): Homolog of NCBI NO: 15229906 NR Description: hairpin-induced protein, putative (HIN1); protein At3g44220.1 [Arabidopsis thaliana] >gi|11282595|pir||T49138
  misc_feature (1)..(194): Homolog of NCBI NO: 15231227 NR Description: hairpin-induced protein, putative (HIN1); protein At3g52470.1, supported by cDNA: 92178., supported by cDNA: supported by cDNA: gi_21281063 [Arabidopsis thaliana]
  misc_feature (1)..(194): Homolog of NCBI NO: 18399308 NR Description: VAMP protein SEC22; protein id: At3g11660.1, by cDNA: 8166., supported by cDNA: gi_9502171 [Arabidopsis
  misc_feature (1)..(194): Homolog of NCBI NO: 28392929 NR Description: putative VAMP protein SEC22 [Arabidopsis thaliana]
  misc_feature (1)..(194): Homolog of NCBI NO: 15227538 NR Description: hairpin-induced protein, putative (HIN1); protein
  misc_feature (1)..(194): Homolog of NCBI NO: 15240001 NR Description: hairpin-induced protein, putative (HIN1); protein
  misc_feature (1)..(193): Homolog of NCBI NO: 15233951 NR Description: hairpin-induced protein, putative (HIN1); protein At4g09590.1 [Arabidopsis thaliana] >gi|25354574|pir||A85098
  misc_feature (1)..(193): Homolog of NCBI NO: 15227540 NR Description: hairpin-induced protein, putative (HIN1); protein
  misc_feature (1)..(177): Homolog of NCBI NO: 38344036 NR Description: OJ991214_12.17 [Oryza sativa (japonica
MRMMMRRIAWACLGLIVAVAFVVFLVWAILHPHGPRFVLQDVTINDFNVSQPNFLSSNLQVTVSSRNPNDKIGIFYDRLDIYVTYRNQEVTLARLLPSTYQGHLEVTVWSPFLIGSAVPVAPYLSSALNEDLFAGLVLLNIKIDGWVRWKVGSWVSGSYRLHVNCPAFITVTGKLTGTGPAIKYQLVQRCAVDV

SEQ ID NO: 82373 - protein, 192 aa, Arabidopsis thaliana
  peptide (1)..(192): Ceres Seq. ID no. 12665337
  misc_feature (1)..(192): Homolog of NCBI NO: 22326984 NR Description: similar to hairpin-induced protein, putative
  misc_feature (1)..(192): Homolog of NCBI NO: 15229906 NR Description: hairpin-induced protein, putative (HIN1); protein At3g44220.1 [Arabidopsis thaliana] >gi|11282595|pir||T49138
  misc_feature (1)..(192): Homolog of NCBI NO: 15231227 NR Description: hairpin-induced protein, putative (HIN1); protein At3g52470.1, supported by cDNA: 92178., supported by cDNA: supported by cDNA: gi_21281063 [Arabidopsis thaliana]
  misc_feature (1)..(192): Homolog of NCBI NO: 18399308 NR Description: VAMP protein SEC22; protein id: At3g11660.1, by cDNA: 8166., supported by cDNA: gi_9502171 [Arabidopsis
  misc_feature (1)..(192): Homolog of NCBI NO: 28392929 NR Description: putative VAMP protein SEC22 [Arabidopsis thaliana]
  misc_feature (1)..(192): Homolog of NCBI NO: 15227538 NR Description: hairpin-induced protein, putative (HIN1); protein
  misc_feature (1)..(192): Homolog of NCBI NO: 15240001 NR Description: hairpin-induced protein, putative (HIN1); protein
  misc_feature (1)..(191): Homolog of NCBI NO: 15233951 NR Description: hairpin-induced protein, putative (HIN1); protein At4g09590.1 [Arabidopsis thaliana] >gi|25354574|pir||A85098
  misc_feature (1)..(191): Homolog of NCBI NO: 15227540 NR Description: hairpin-induced protein, putative (HIN1); protein
  misc_feature (1)..(175): Homolog of NCBI NO: 38344036 NR Description: OJ991214_12.17 [Oryza sativa (japonica
MMMRRIAWACLGLIVAVAFVVFLVWAILHPHGPRFVLQDVTINDFNVSQPNFLSSNLQVTVSSRNPNDKIGIFYDRLDIYVTYRNQEVTLARLLPSTYQGHLEVTVWSPFLIGSAVPVAPYLSSALNEDLFAGLVLLNIKIDGWVRWKVGSWVSGSYRLHVNCPAFITVTGKLTGTGPAIKYQLVQRCAVDV

SEQ ID NO: 82374 - DNA, 1023 bp, Arabidopsis thaliana
  misc_feature (1)..(1023): Ceres Seq. ID no. 12665349
  misc_feature: MA Experiment ID: 108461 Result: Down-regulated in Transcription
  misc_feature: MA Experiment 108461 PARAMETER Experiment Name: At_Germinating_Seeds_cDNA_P Parameter: Age (day) Value: 1 vs. 0
  misc_feature: MA Experiment 108461 PARAMETER Experiment Name: At_Germinating_Seeds_cDNA_P Parameter: Tissue Value: Germinating Seeds
  misc_feature: MA Experiment ID: 108462 Result: Down-regulated in Transcription
  misc_feature: MA Experiment 108462 PARAMETER Experiment Name: At_Germinating_Seeds_cDNA_P Parameter: Age (day) Value: 2 vs. 0
  misc_feature: MA Experiment 108462 PARAMETER Experiment Name: At_Germinating_Seeds_cDNA_P Parameter: Tissue Value: Germinating Seeds
  misc_feature: MA Experiment ID: 108463 Result: Down-regulated in Transcription
  misc_feature: MA Experiment 108463 PARAMETER Experiment Name: At_Germinating_Seeds_cDNA_P Parameter: Age (day) Value: 3 vs. 0
  misc_feature: MA Experiment 108463 PARAMETER Experiment Name: At_Germinating_Seeds_cDNA_P Parameter: Tissue Value: Germinating Seeds
  misc_feature: MA Experiment ID: 108473 Result: Up-regulated in Transcription
  misc_feature: MA Experiment 108473 PARAMETER Experiment Name: At_Drought_Flowers_cDNA_P Parameter: Timepoint (hr) Value: 7 d
  misc_feature: MA Experiment 108473 PARAMETER Experiment Name: At_Drought_Flowers_cDNA_P Parameter: Tissue Value: Flower
  misc_feature: MA Experiment 108473 PARAMETER Experiment Name: At_Drought_Flowers_cDNA_P Parameter: Treatment Value: Drought vs. No Drought
  misc_feature: MA Experiment ID: 108489 Result: Down-regulated in Transcription
  misc_feature: MA Experiment ID: 108561 Result: Up-regulated in Transcription
  misc_feature: MA Experiment 108561 PARAMETER Experiment Name: At_100uM_ABA_cDNA_P Parameter: Timepoint (hr) Value: 6
  misc_feature: MA Experiment 108561 PARAMETER Experiment Name: At_100uM_ABA_cDNA_P Parameter: Tissue Value: Aerial
  misc_feature: MA Experiment 108561 PARAMETER Experiment Name: At_100uM_ABA_cDNA_P Parameter: Treatment Value: 100uM ABA vs. No Treatment
  misc_feature: MA Experiment ID: 108607 Result: Up-regulated in Transcription
  misc_feature: MA Experiment 108607 PARAMETER Experiment Name: At_100uM_ABA_cDNA_P Parameter: Timepoint (hr) Value: 4
  misc_feature: MA Experiment 108607 PARAMETER Experiment Name: At_100uM_ABA_cDNA_P Parameter: Tissue Value: Aerial
  misc_feature: MA Experiment 108607 PARAMETER Experiment Name: At_100uM_ABA_cDNA_P Parameter: Treatment Value: 100uM ABA vs. No Treatment
  misc_feature: MA Experiment ID: 108608 Result: Up-regulated in Transcription
  misc_feature: MA Experiment 108608 PARAMETER Experiment Name: At_100uM_ABA_cDNA_P Parameter: Timepoint (hr) Value: 1
  misc_feature: MA Experiment 108608 PARAMETER Experiment Name: At_100uM_ABA_cDNA_P Parameter: Tissue Value: Aerial
  misc_feature: MA Experiment 108608 PARAMETER Experiment Name: At_100uM_ABA_cDNA_P Parameter: Treatment Value: 100uM ABA vs. No Treatment
  misc_feature: MA Experiment ID: 108668 Result: Up-regulated in Transcription
  misc_feature: MA Experiment 108668 PARAMETER Experiment Name: At_2mM_SA_cDNA_P Parameter: Plant Line Value: WS
  misc_feature: MA Experiment 108668 PARAMETER Experiment Name: At_2mM_SA_cDNA_P Parameter: Timepoint (hr) Value: 6
  misc_feature: MA Experiment 108668 PARAMETER Experiment Name: At_2mM_SA_cDNA_P Parameter: Treatment Value: 2mM SA vs. No Treatment
  misc_feature: MA Experiment ID: 20000069 Result: Up-regulated in Transcription
  misc_feature: MA Experiment 20000069 PARAMETER Experiment Name: At_100uM_ABA_Mutants_cDNA_P Parameter: Plant Line Value: CS23
  misc_feature: MA Experiment 20000069 PARAMETER Experiment Name: At_100uM_ABA_Mutants_cDNA_P Parameter: Timepoint (hr) Value: 6
  misc_feature: MA Experiment 20000069 PARAMETER Experiment Name: At_100uM_ABA_Mutants_cDNA_P Parameter: Tissue Value: Aerial
  misc_feature: MA Experiment 20000069 PARAMETER Experiment Name: At_100uM_ABA_Mutants_cDNA_P Parameter: Treatment Value: 100uM ABA vs. No Treatment
  misc_feature: MA Experiment ID: 20000070 Result: Up-regulated in Transcription
  misc_feature: MA Experiment 20000070 PARAMETER Experiment Name: At_100uM_ABA_Mutants_cDNA_P Parameter: Plant Line Value: CS24
  misc_feature: MA Experiment 20000070 PARAMETER Experiment Name: At_100uM_ABA_Mutants_cDNA_P Parameter: Timepoint (hr) Value: 6
  misc_feature: MA Experiment 20000070 PARAMETER Experiment Name: At_100uM_ABA_Mutants_cDNA_P Parameter: Tissue Value: Aerial
  misc_feature: MA Experiment 20000070 PARAMETER Experiment Name: At_100uM_ABA_Mutants_cDNA_P Parameter: Treatment Value: 100uM ABA vs. No Treatment
atggacacgaaggcggttggagtttctaaggatacggcggcgtcgatggaagcgtcgacggtgtttcctgggtttaaattctcgccgacggatgtggagttgatttcgtattacctgaagcggaagatggatggcttggagaggtccgttgaggttataccggaccttgagatttacaatttcgagccttgggatttacccgataagtcgattgtgaaatctgatagcgagtggttcttcttctgtgcgcgtgggaaaaagtatccacatggttcacagaacaggagagcaacgaagatgggatactggaaagcaactgggaaagagcgtgatgtgaagtctggttctgaggtcattggaacaaagaggacgcttgttttccatattggtcgtgcaccaaaaggcgaaagaactgactggattatgcacgagtactgcgtgaaaggagtatctctggatgatgctatggttgtttgccgggttaggaggaacaaagaatacaatagtggtacaagtcagaaggcaccaaagccaaattcatcagccgagaagcatgcgaaagtccaaaatggcgctacgagttcagggagcccgtctgattgggacaacttggttgatttttacctagcaggtgaatcaggggagaaactactcgctgagatggcagagtcatcagaaaatctacaggtggataatgacgaggatttctttgcggatatcctaagagacgaaatcatcaatctcgatgaagcggtgatgacagggaacacaccaaacgaagtgccaacactagaatcagcatcaatggagataagggtacttcctttaccaaacatgatagacaaacaaatgtcatcactgttagaggaaagaccatcacagaagaagaaaggaaaagacgccacggaatcattgtcgagctgcttcgtgggtttatactcgatcaaatcagtgaacaaggcacgatgggatgttattataggtgtagtggctctgatagcaatgttgttttatctagaataa

SEQ ID NO: 82375 - protein, 340 aa, Arabidopsis thaliana; identical to SEQ ID NO: 41503
  peptide (1)..(340): Ceres Seq. ID no. 12665350
  misc_feature (21)..(148): Pfam Name: No apical meristem (NAM) protein Pfam Description: No apical meristem (NAM) protein
  misc_feature (1)..(340): Homolog of NCBI NO: 18420448 NR Description: NAM (no apical meristem)-like protein; protein At5g22290.1, supported by cDNA: gi_14326464, supported by cDNA: [Arabidopsis thaliana] >gi|14326465|gb|AAK60278.1|AF385685_1
  misc_feature (16)..(340): Homolog of NCBI NO: 9757809 NR Description: NAM (no apical meristem)-like protein
  misc_feature (19)..(339): Homolog of NCBI NO: 15229931 NR Description: putative protein; protein id: At3g44290.1
  misc_feature (8)..(337): Homolog of NCBI NO: 15225866 NR Description: NAM (no apical meristem)-like protein; protein At2g27300.1 [Arabidopsis thaliana] >gi|25407881|pir||C84671 NAM
  misc_feature (23)..(275): Homolog of NCBI NO: 15218843 NR Description: jasmonic acid, putative; protein id: At1g65910.1
  misc_feature (16)..(289): Homolog of NCBI NO: 15237469 NR Description: NAM-like; protein id: At5g46590.1 [Arabidopsis
  misc_feature (20)..(221): Homolog of NCBI NO: 37537036 NR Description: putative NAM (no apical meristem) protein [Oryza
  misc_feature (16)..(164): Homolog of NCBI NO: 21105751 NR Description: nam-like protein 11 [Petunia x hybrida]
  misc_feature (23)..(241): Homolog of NCBI NO: 15237939 NR Description: NAM (no apical meristem)-like protein; protein At5g17260.1 [Arabidopsis thaliana] >gi|10177071|dbj|BAB10513.1|
  misc_feature (23)..(161): Homolog of NCBI NO: 34902214 NR Description: Hypothetical protein [Oryza sativa (japonica group)] >gi|27452910|gb|AAO15294.1| Hypothetical protein [Oryza

SEQ ID NO: 82376 - protein, 325 aa, Arabidopsis thaliana; identical to SEQ ID NO: 41504
  peptide (1)..(325): Ceres Seq. ID no. 12665351
  misc_feature (6)..(133): Pfam Name: No apical meristem (NAM) protein Pfam Description: No apical meristem (NAM) protein
  misc_feature (1)..(325): Homolog of NCBI NO: 18420448 NR Description: NAM (no apical meristem)-like protein; protein At5g22290.1, supported by cDNA: gi_14326464, supported by cDNA: [Arabidopsis thaliana] >gi|14326465|gb|AAK60278.1|AF385685_1
  misc_feature (1)..(325): Homolog of NCBI NO: 9757809 NR Description: NAM (no apical meristem)-like protein
  misc_feature (4)..(324): Homolog of NCBI NO: 15229931 NR Description: putative protein; protein id: At3g44290.1
  misc_feature (1)..(322): Homolog of NCBI NO: 15225866 NR Description: NAM (no apical meristem)-like protein; protein At2g27300.1 [Arabidopsis thaliana] >gi|25407881|pir||C84671 NAM
  misc_feature (8)..(260): Homolog of NCBI NO: 15218843 NR Description: jasmonic acid, putative; protein id: At1g65910.1
  misc_feature (1)..(274): Homolog of NCBI NO: 15237469 NR Description: NAM-like; protein id: At5g46590.1 [Arabidopsis
  misc_feature (5)..(206): Homolog of NCBI NO: 37537036 NR Description: putative NAM (no apical meristem) protein [Oryza
  misc_feature (1)..(149): Homolog of NCBI NO: 21105751 NR Description: nam-like protein 11 [Petunia x hybrida]
  misc_feature (8)..(226): Homolog of NCBI NO: 15237939 NR Description: NAM (no apical meristem)-like protein; protein At5g17260.1 [Arabidopsis thaliana] >gi|10177071|dbj|BAB10513.1|
  misc_feature (8)..(146): Homolog of NCBI NO: 34902214 NR Description: Hypothetical protein [Oryza sativa (japonica group)] >gi|27452910|gb|AAO15294.1| Hypothetical protein [Oryza

SEQ ID NO: 82377 - protein, 298 aa, Arabidopsis thaliana
  peptide (1)..(298): Ceres Seq. ID no. 12665352
  misc_feature (1)..(106): Pfam Name: No apical meristem (NAM) protein Pfam Description: No apical meristem (NAM) protein
  misc_feature (1)..(298): Homolog of NCBI NO: 18420448 NR Description: NAM (no apical meristem)-like protein; protein At5g22290.1, supported by cDNA: gi_14326464, supported by cDNA: [Arabidopsis thaliana] >gi|14326465|gb|AAK60278.1|AF385685_1
  misc_feature (1)..(298): Homolog of NCBI NO: 9757809 NR Description: NAM (no apical meristem)-like protein
  misc_feature (1)..(297): Homolog of NCBI NO: 15229931 NR Description: putative protein; protein id: At3g44290.1
  misc_feature (1)..(295): Homolog of NCBI NO: 15225866 NR Description: NAM (no apical meristem)-like protein; protein At2g27300.1 [Arabidopsis thaliana] >gi|25407881|pir||C84671 NAM
  misc_feature (1)..(233): Homolog of NCBI NO: 15218843 NR Description: jasmonic acid, putative; protein id: At1g65910.1
  misc_feature (1)..(247): Homolog of NCBI NO: 15237469 NR Description: NAM-like; protein id: At5g46590.1 [Arabidopsis
  misc_feature (1)..(179): Homolog of NCBI NO: 37537036 NR Description: putative NAM (no apical meristem) protein [Oryza
  misc_feature (1)..(122): Homolog of NCBI NO: 21105751 NR Description: nam-like protein 11 [Petunia x hybrida]
  misc_feature (1)..(199): Homolog of NCBI NO: 15237939 NR Description: NAM (no apical meristem)-like protein; protein At5g17260.1 [Arabidopsis thaliana] >gi|10177071|dbj|BAB10513.1|
  misc_feature (1)..(119): Homolog of NCBI NO: 34902214 NR Description: Hypothetical protein [Oryza sativa (japonica group)] >gi|27452910|gb|AAO15294.1| Hypothetical protein [Oryza
MDGLERSVEVIPDLEIYNFEPWDLPDKSIVKSDSEWFFFCARGKKYPHGSQNRRATKMGYWKATGKERDVKSGSEVIGTKRTLVFHIGRAPKGERTDWIMHEYCVKGVSLDDAMVVCRVRRNKEYNSGTSQKAPKPNSSAEKHAKVQNGATSSGSPSDWDNLVDFYLAGESGEKLLAEMAESSENLQVDNDEDFFADILRDEIINLDEAVMTGNTPNEVPTLESASMEIRVLPLPNMIDKQMSSLLEERPSQKKKGKDATESLSSCFVGLYSIKSVNKARWDVIIGVVALIAMLFYLE

SEQ ID NO: 82378 - DNA, 1449 bp, Arabidopsis thaliana
  misc_feature (1)..(1449): Ceres Seq. ID no. 12665375
  misc_feature: MA Experiment ID: 20001768 Result: Up-regulated in Transcription
  misc_feature: MA Experiment 20001768 PARAMETER Experiment Name: At_Far-red-enriched-adult_P Parameter: Age (day) Value: 28
  misc_feature: MA Experiment 20001768 PARAMETER Experiment Name: At_Far-red-enriched-adult_P Parameter: Light Value: Far-red enriched vs. White
  misc_feature: MA Experiment 20001768 PARAMETER Experiment Name: At_Far-red-enriched-adult_P Parameter: Organism Value: A. thaliana
  misc_feature: MA Experiment 20001768 PARAMETER Experiment Name: At_Far-red-enriched-adult_P Parameter: Plant Line Value: Columbia
  misc_feature: MA Experiment 20001768 PARAMETER Experiment Name: At_Far-red-enriched-adult_P Parameter: Timepoint (hr) Value: 1
  misc_feature: MA Experiment 20001768 PARAMETER Experiment Name: At_Far-red-enriched-adult_P Parameter: Tissue Value: Aerial
  misc_feature: MA Experiment ID: 20001773 Result: Up-regulated in Transcription
  misc_feature: MA Experiment 20001773 PARAMETER Experiment Name: At_Far-red-enriched-adult_P Parameter: Age (day) Value: 30
  misc_feature: MA Experiment 20001773 PARAMETER Experiment Name: At_Far-red-enriched-adult_P Parameter: Light Value: Far-red enriched vs. White
  misc_feature: MA Experiment 20001773 PARAMETER Experiment Name: At_Far-red-enriched-adult_P Parameter: Organism Value: A. thaliana
  misc_feature: MA Experiment 20001773 PARAMETER Experiment Name: At_Far-red-enriched-adult_P Parameter: Plant Line Value: Columbia
  misc_feature: MA Experiment 20001773 PARAMETER Experiment Name: At_Far-red-enriched-adult_P Parameter: Timepoint (hr) Value: 48
  misc_feature: MA Experiment 20001773 PARAMETER Experiment Name: At_Far-red-enriched-adult_P Parameter: Tissue Value: Aerial
atggagaagaagatgaaagaggaggaggaggagccactgagccctatggctcgggcatttcaggagccgagcatcgactgtggtattgtcataaagttcgggtgcaaaaccaagatcaaccctgacgtcattgttgattccttgaagcttaatgttttcaagcatcctcgtttctgcagccttttggacgatgatggtacaaaatggttaaggaccgatgttgtcaatgtagaggaacatgtatttgtaccagacatagatccaaaattgacagaggaagacgttgaatggttcgttgaggactacatatccagtataacgatgattcctctagacagaactaagcccttatgggaagttcatatcctaaacgctaaaacctctgacgccgaagctatatgtgtcataagatgtcaccatgcattaggagatggagtgtctatcttgtctctcatactagcatctacccgaaaaacatcggaacccgaggcattttctaccctccctgtcccaaagtgtcgtgaatcttacaaccatagacgcgggttctcattctttagattggttcttgtggtttgttccacagtgagattgatatggaataccctagtggattcctttttgtgcatggcaacaatatttttcttgaaggatacagatacacccctgaagggtaagcctggcgccataaagaaattttctcaccggattgtgtctttggatgacatcaaacttataaagaacgctatggaaatgactatcaacgacgttcttctgggggttacagaagccgctctcacacgctatctgcaccaatcatatgacaagaccaatgaggaagctggaacatcgcttacaccaaatcgacaagatttgcttgatagaattcgattacgttcacttatagtagtgaacctaaggcctactggaagccagtccatagccgatatgatggccaagggctctaaatgcagatggggtaactacatcagcgtcattctcttcccgtttaccatcgccttgcaatctgatccattagtgtatctctcaaatgttaaatccatgatagatcgaaagaaaaactctcttattacttatattatatacacattttcggagttcgtcatcaaagctttcgggatcaatgtcgcagtagcgtttcagcgtaaaatcatgttgaacacaacgatgtgcatttcaaaccttcccggtccgactgaggaagttagtttccatggccatccgatcgcttactttgctccaagcatctatggactaccacaagcattgacaatacattatctgagttatgcaaacaagatgataatttccgtcgctgttgatccaatgattattgacgctcacaagctatgtgatgaactagaggaatctctcaagaatatgaaacttgctatcttagagaaaggattaccaaatcatgtcaattaa

SEQ ID NO: 82379 - protein, 482 aa, Arabidopsis thaliana
  peptide (1)..(482): Ceres Seq. ID no. 12665376
  misc_feature (7)..(299): Pfam Name: Condensation domain Pfam Description: Condensation domain
  misc_feature (1)..(482): Homolog of NCBI NO: 15242259 NR Description: putative protein; protein id: At5g22490.1 thaliana] >gi|9758655|dbj|BAB09121.1|
  misc_feature (9)..(477): Homolog of NCBI NO: 18416859 NR Description: putative protein; protein id: At5g12420.1, by cDNA: gi_21280906 [Arabidopsis thaliana] putative protein [Arabidopsis thaliana]
  misc_feature (5)..(477): Homolog of NCBI NO: 15237329 NR Description: putative protein; protein id: At5g16350.1 thaliana] >gi|9759117|dbj|BAB09602.1| similarity to unknown protein [Arabidopsis thaliana]
  misc_feature (6)..(469): Homolog of NCBI NO: 15238730 NR Description: putative protein; protein id: At5g53380.1 thaliana] >gi|9759185|dbj|BAB09800.1|
  misc_feature (2)..(477): Homolog of NCBI NO: 9759186 NR Description: emb|CAB66399.1~gene_id:K19E1.19~strong similarity
  misc_feature (2)..(477): Homolog of NCBI NO: 30696326 NR Description: expressed protein [Arabidopsis thaliana]
  misc_feature (2)..(477): Homolog of NCBI NO: 26451548 NR Description: unknown protein [Arabidopsis thaliana]
  misc_feature (3)..(475): Homolog of NCBI NO: 15229103 NR Description: putative protein; protein id: At3g49200.1
  misc_feature (6)..(475): Homolog of NCBI NO: 15229102 NR Description: putative protein; protein id: At3g49190.1
  misc_feature (69)..(475): Homolog of NCBI NO: 15229104 NR Description: putative protein; protein id: At3g49210.1
MEKKMKEEEEEPLSPMARAFQEPSIDCGIVIKFGCKTKINPDVIVDSLKLNVFKHPRFCSLLDDDGTKWLRTDVVNVEEHVFVPDIDPKLTEEDVEWFVEDYISSITMIPLDRTKPLWEVHILNAKTSDAEAICVIRCHHALGDGVSILSLILASTRKTSEPEAFSTLPVPKCRESYNHRRGFSFFRLVLVVCSTVRLIWNTLVDSFLCMATIFFLKDTDTPLKGKPGAIKKFSHRIVSLDDIKLIKNAMEMTINDVLLGVTEAALTRYLHQSYDKTNEEAGTSLTPNRQDLLDRIRLRSLIVVNLRPTGSQSIADMMAKGSKCRWGNYISVILFPFTIALQSDPLVYLSNVKSMIDRKKNSLITYIIYTFSEFVIKAFGINVAVAFQRKIMLNTTMCISNLPGPTEEVSFHGHPIAYFAPSIYGLPQALTIHYLSYANKMIISVAVDPMIIDAHKLCDELEESLKNMKLAILEKGLPNHVN

SEQ ID NO: 82380 - protein, 478 aa, Arabidopsis thaliana
  peptide (1)..(478): Ceres Seq. ID no. 12665377
  misc_feature (3)..(295): Pfam Name: Condensation domain Pfam Description: Condensation domain
  misc_feature (1)..(478): Homolog of NCBI NO: 15242259 NR Description: putative protein; protein id: At5g22490.1 thaliana] >gi|9758655|dbj|BAB09121.1|
  misc_feature (5)..(473): Homolog of NCBI NO: 18416859 NR Description: putative protein; protein id: At5g12420.1, by cDNA: gi_21280906 [Arabidopsis thaliana] putative protein [Arabidopsis thaliana]
  misc_feature (1)..(473): Homolog of NCBI NO: 15237329 NR Description: putative protein; protein id: At5g16350.1 thaliana] >gi|9759117|dbj|BAB09602.1| similarity to unknown protein [Arabidopsis thaliana]
  misc_feature (2)..(465): Homolog of NCBI NO: 15238730 NR Description: putative protein; protein id: At5g53380.1 thaliana] >gi|9759185|dbj|BAB09800.1|
  misc_feature (1)..(473): Homolog of NCBI NO: 9759186 NR Description: emb|CAB66399.1~gene_id:K19E1.19~strong similarity
  misc_feature (1)..(473): Homolog of NCBI NO: 30696326 NR Description: expressed protein [Arabidopsis thaliana]
  misc_feature (1)..(473): Homolog of NCBI NO: 26451548 NR Description: unknown protein [Arabidopsis thaliana]
  misc_feature (1)..(471): Homolog of NCBI NO: 15229103 NR Description: putative protein; protein id: At3g49200.1
  misc_feature (2)..(471): Homolog of NCBI NO: 15229102 NR Description: putative protein; protein id: At3g49190.1
  misc_feature (65)..(471): Homolog of NCBI NO: 15229104 NR Description: putative protein; protein id: At3g49210.1
MKEEEEEPLSPMARAFQEPSIDCGIVIKFGCKTKINPDVIVDSLKLNVFKHPRFCSLLDDDGTKWLRTDVVNVEEHVFVPDIDPKLTEEDVEWFVEDYISSITMIPLDRTKPLWEVHILNAKTSDAEAICVIRCHHALGDGVSILSLILASTRKTSEPEAFSTLPVPKCRESYNHRRGFSFFRLVLVVCSTVRLIWNTLVDSFLCMATIFFLKDTDTPLKGKPGAIKKFSHRIVSLDDIKLIKNAMEMTINDVLLGVTEAALTRYLHQSYDKTNEEAGTSLTPNRQDLLDRIRLRSLIVVNLRPTGSQSIADMMAKGSKCRWGNYISVILFPFTIALQSDPLVYLSNVKSMIDRKKNSLITYIIYTFSEFVIKAFGINVAVAFQRKIMLNTTMCISNLPGPTEEVSFHGHPIAYFAPSIYGLPQALTIHYLSYANKMIISVAVDPMIIDAHKLCDELEESLKNMKLAILEKGLPNHVN

SEQ ID NO: 82381 - protein, 467 aa, Arabidopsis thaliana
  peptide (1)..(467): Ceres Seq. ID no. 12665378
  misc_feature (1)..(284): Pfam Name: Condensation domain Pfam Description: Condensation domain
  misc_feature (1)..(467): Homolog of NCBI NO: 15242259 NR Description: putative protein; protein id: At5g22490.1 thaliana] >gi|9758655|dbj|BAB09121.1|
  misc_feature (1)..(462): Homolog of NCBI NO: 18416859 NR Description: putative protein; protein id: At5g12420.1, by cDNA: gi_21280906 [Arabidopsis thaliana] putative protein [Arabidopsis thaliana]
  misc_feature (1)..(462): Homolog of NCBI NO: 15237329 NR Description: putative protein; protein id: At5g16350.1 thaliana] >gi|9759117|dbj|BAB09602.1| similarity to unknown protein [Arabidopsis thaliana]
  misc_feature (1)..(454): Homolog of NCBI NO: 15238730 NR Description: putative protein; protein id: At5g53380.1 thaliana] >gi|9759185|dbj|BAB09800.1|
  misc_feature (1)..(462): Homolog of NCBI NO: 9759186 NR Description: emb|CAB66399.1~gene_id:K19E1.19~strong similarity
  misc_feature (1)..(462): Homolog of NCBI NO: 30696326 NR Description: expressed protein [Arabidopsis thaliana]
  misc_feature (1)..(462): Homolog of NCBI NO: 26451548 NR Description: unknown protein [Arabidopsis thaliana]
  misc_feature (1)..(460): Homolog of NCBI NO: 15229103 NR Description: putative protein; protein id: At3g49200.1
  misc_feature (1)..(460): Homolog of NCBI NO: 15229102 NR Description: putative protein; protein id: At3g49190.1
  misc_feature (54)..(460): Homolog of NCBI NO: 15229104 NR Description: putative protein; protein id: At3g49210.1
MARAFQEPSIDCGIVIKFGCKTKINPDVIVDSLKLNVFKHPRFCSLLDDDGTKWLRTDVVNVEEHVFVPDIDPKLTEEDVEWFVEDYISSITMIPLDRTKPLWEVHILNAKTSDAEAICVIRCHHALGDGVSILSLILASTRKTSEPEAFSTLPVPKCRESYNHRRGFSFFRLVLVVCSTVRLIWNTLVDSFLCMATIFFLKDTDTPLKGKPGAIKKFSHRIVSLDDIKLIKNAMEMTINDVLLGVTEAALTRYLHQSYDKTNEEAGTSLTPNRQDLLDRIRLRSLIVVNLRPTGSQSIADMMAKGSKCRWGNYISVILFPFTIALQSDPLVYLSNVKSMIDRKKNSLITYIIYTFSEFVIKAFGINVAVAFQRKIMLNTTMCISNLPGPTEEVSFHGHPIAYFAPSIYGLPQALTIHYLSYANKMIISVAVDPMIIDAHKLCDELEESLKNMKLAILEKGLPNHVN

SEQ ID NO: 82382 - DNA, 1533 bp, Arabidopsis thaliana
  misc_feature (1)..(1533): Ceres Seq. ID no. 12665439
  misc_feature: MA Experiment ID: 20000315 Result: Down-regulated in Transcription
  misc_feature: MA Experiment 20000315 PARAMETER Experiment Name: At_14day_Shoots-Roots_Sub_P Parameter: Age (day) Value: 14
  misc_feature: MA Experiment 20000315 PARAMETER Experiment Name: At_14day_Shoots-Roots_Sub_P Parameter: Organism Value: A. thaliana
  misc_feature: MA Experiment 20000315 PARAMETER Experiment Name: At_14day_Shoots-Roots_Sub_P Parameter: Plant Line Value: WS
  misc_feature: MA Experiment 20000315 PARAMETER Experiment Name: At_14day_Shoots-Roots_Sub_P Parameter: Tissue Value: Shoots vs. Whole Plant
  misc_feature: MA Experiment ID: 20000355 Result: Up-regulated in Transcription
  misc_feature: MA Experiment 20000355 PARAMETER Experiment Name: At_Siliques_Sub_P Parameter: Age (day) Value: 21
  misc_feature: MA Experiment 20000355 PARAMETER Experiment Name: At_Siliques_Sub_P Parameter: Organism Value: A. thaliana
  misc_feature: MA Experiment 20000355 PARAMETER Experiment Name: At_Siliques_Sub_P Parameter: Plant Line Value: WS
  misc_feature: MA Experiment 20000355 PARAMETER Experiment Name: At_Siliques_Sub_P Parameter: Tissue Value: Less Than 5mm Siliques vs. Whole Plant
atggaaaatggtatgtataaaaagaaaggagtgtgcgactcttgtgtctcgtccaaaagcagatccaaccacagccccaaaagaagcatgatggagcctcagcctcaccatctcctcatggattggaacaaagctaatgatcttctcacacaagaacacgcagcttttctcaatgatcctcaccatctcatgttagatccacctcccgaaaccctaattcacttggacgaagacgaagagtacgatgaagacatggatgcgatgaaggagatgcagtacatgatcgccgtcatgcagcccgtagacatcgaccctgccacggtccctaagccgaaccgccgtaacgtaaggataagcgacgatcctcagacggtggttgctcgtcggcgtcgggaaaggatcagcgagaagatccgaattctcaagaggatcgtgcctggtggtgcgaagatggacacagcttccatgctcgacgaagccatacgttacaccaagttcttgaaacggcaggtgaggattcttcagcctcactctcagattggagctcctatggctaacccctcttacctttgttattaccacaactcccaaccctgatgaactacacagaagctcgctagctagacatttggtgtcatcctctcaacctttttcatgttgatatattatatatagatgcataaagattcgatccaagattgtatgggtgttttaatattattattctaagatatatgatgtacaattgtgtaccaagtttctttatcttgatatcatatgcataaataattggtgaataaaaagaagatattgattgtaaacaaaaaaaagaagatattgattgttaattagggtttgatcattctgtatgaaagctttggcctgcaaattaattttcgatatatatatatatatatggagaatatatatcaaatacttttttaatttgactataatttgtatcaattatctgaatctgatgagtgtaggttatatatggattagcaaaaaagaaaacaaccattattacgcacctacattaaaaatcatccaccaaagaagaaaccatcctcaagagggttcccatattggagaataatgaaaaatttaagaagaaaagggtcgagatttcgacggacaagcattctgattattacaaacatattttagagaaatttagaaagaaaattaaactaaaaattaaaaagaagcaaactgagataactctctgtctcaatggaacgccggccagaagtgatcatcgtgattttggttaccatcttgataaggtcaatcgaggagtgtatccgtttcaaacaccacacgtccactatatttcgccaagttaaattgaaaggaagatgaacaatcaagagatgtggtagttattttgaattaagcatatccaaaaagaccctaggcgaagctgagagatcgcaagttcgagtgacacttggaacgaaactaatattacatgatgtggtttcgggcctaaaggaattacgggcttcggcccagaacctcctgatattc

SEQ ID NO: 82383 - protein, 198 aa, Arabidopsis thaliana
  peptide (1)..(198): Ceres Seq. ID no. 12665440
  misc_feature (121)..(168): Pfam Name: Helix-loop-helix DNA-binding domain Pfam Description: Helix-loop-helix DNA-binding domain
  misc_feature (1)..(198): Homolog of NCBI NO: 15236714 NR Description: hypothetical protein; protein id: At4g00120.1
  misc_feature (76)..(183): Homolog of NCBI NO: 15242494 NR Description: putative protein; protein id: At5g09750.1
  misc_feature (33)..(180): Homolog of NCBI NO: 15229725 NR Description: putative protein; protein id: At3g50330.1
  misc_feature (84)..(180): Homolog of NCBI NO: 15240189 NR Description: putative protein; protein id: At5g67060.1, by cDNA: gi_20127096 [Arabidopsis thaliana] emb|CAB62312.1~gene_id:K21H1.2~similar to unknown protein
  misc_feature (75)..(175): Homolog of NCBI NO: 15232534 NR Description: hypothetical protein; protein id: At3g21330.1, by cDNA: gi_20127094 [Arabidopsis thaliana]
  misc_feature (75)..(175): Homolog of NCBI NO: 28393737 NR Description: unknown protein [Arabidopsis thaliana]
  misc_feature (81)..(175): Homolog of NCBI NO: 34910410 NR Description: P0692C11.28 [Oryza sativa (japonica
  misc_feature (75)..(175): Homolog of NCBI NO: 9294680 NR Description: emb|CAB62312.1~gene_id:MHC9.1~similar to unknown
  misc_feature (77)..(185): Homolog of NCBI NO: 15289790 NR Description: P0002B05.9 [Oryza sativa (japonica
  misc_feature (77)..(185): Homolog of NCBI NO: 34914234 NR Description: P0697C12.24 [Oryza sativa (japonica
MENGMYKKKGVCDSCVSSKSRSNHSPKRSMMEPQPHHLLMDWNKANDLLTQEHAAFLNDPHHLMLDPPPETLIHLDEDEEYDEDMDAMKEMQYMIAVMQPVDIDPATVPKPNRRNVRISDDPQTVVARRRRERISEKIRILKRIVPGGAKMDTASMLDEAIRYTKFLKRQVRILQPHSQIGAPMANPSYLCYYHNSQP

SEQ ID NO: 82384 - protein, 194 aa, Arabidopsis thaliana
  peptide (1)..(194): Ceres Seq. ID no. 12665441
  misc_feature (117)..(164): Pfam Name: Helix-loop-helix DNA-binding domain Pfam Description: Helix-loop-helix DNA-binding domain
  misc_feature (1)..(194): Homolog of NCBI NO: 15236714 NR Description: hypothetical protein; protein id: At4g00120.1
  misc_feature (72)..(179): Homolog of NCBI NO: 15242494 NR Description: putative protein; protein id: At5g09750.1
  misc_feature (29)..(176): Homolog of NCBI NO: 15229725 NR Description: putative protein; protein id: At3g50330.1
  misc_feature (80)..(176): Homolog of NCBI NO: 15240189 NR Description: putative protein; protein id: At5g67060.1, by cDNA: gi_20127096 [Arabidopsis thaliana] emb|CAB62312.1~gene_id:K21H1.2~similar to unknown protein
  misc_feature (71)..(171): Homolog of NCBI NO: 15232534 NR Description: hypothetical protein; protein id: At3g21330.1, by cDNA: gi_20127094 [Arabidopsis thaliana]
  misc_feature (71)..(171): Homolog of NCBI NO: 28393737 NR Description: unknown protein [Arabidopsis thaliana]
  misc_feature (77)..(171): Homolog of NCBI NO: 34910410 NR Description: P0692C11.28 [Oryza sativa (japonica
  misc_feature (71)..(171): Homolog of NCBI NO: 9294680 NR Description: emb|CAB62312.1~gene_id:MHC9.1~similar to unknown
  misc_feature (73)..(181): Homolog of NCBI NO: 15289790 NR Description: P0002B05.9 [Oryza sativa (japonica
  misc_feature (73)..(181): Homolog of NCBI NO: 34914234 NR Description: P0697C12.24 [Oryza sativa (japonica
MYKKKGVCDSCVSSKSRSNHSPKRSMMEPQPHHLLMDWNKANDLLTQEHAAFLNDPHHLMLDPPPETLIHLDEDEEYDEDMDAMKEMQYMIAVMQPVDIDPATVPKPNRRNVRISDDPQTVVARRRRERISEKIRILKRIVPGGAKMDTASMLDEAIRYTKFLKRQVRILQPHSQIGAPMANPSYLCYYHNSQP

SEQ ID NO: 82385 - protein, 169 aa, Arabidopsis thaliana
  peptide (1)..(169): Ceres Seq. ID no. 12665442
  misc_feature (92)..(139): Pfam Name: Helix-loop-helix DNA-binding domain Pfam Description: Helix-loop-helix DNA-binding domain
  misc_feature (1)..(169): Homolog of NCBI NO: 15236714 NR Description: hypothetical protein; protein id: At4g00120.1
  misc_feature (47)..(154): Homolog of NCBI NO: 15242494 NR Description: putative protein; protein id: At5g09750.1
  misc_feature (4)..(151): Homolog of NCBI NO: 15229725 NR Description: putative protein; protein id: At3g50330.1
  misc_feature (55)..(151): Homolog of NCBI NO: 15240189 NR Description: putative protein; protein id: At5g67060.1, by cDNA: gi_20127096 [Arabidopsis thaliana] emb|CAB62312.1~gene_id:K21H1.2~similar to unknown protein
  misc_feature (46)..(146): Homolog of NCBI NO: 15232534 NR Description: hypothetical protein; protein id: At3g21330.1, by cDNA: gi_20127094 [Arabidopsis thaliana]
  misc_feature (46)..(146): Homolog of NCBI NO: 28393737 NR Description: unknown protein [Arabidopsis thaliana]
  misc_feature (52)..(146): Homolog of NCBI NO: 34910410 NR Description: P0692C11.28 [Oryza sativa (japonica
  misc_feature (46)..(146): Homolog of NCBI NO: 9294680 NR Description: emb|CAB62312.1~gene_id:MHC9.1~similar to unknown
  misc_feature (48)..(156): Homolog of NCBI NO: 15289790 NR Description: P0002B05.9 [Oryza sativa (japonica
  misc_feature (48)..(156): Homolog of NCBI NO: 34914234 NR Description: P0697C12.24 [Oryza sativa (japonica
MMEPQPHHLLMDWNKANDLLTQEHAAFLNDPHHLMLDPPPETLIHLDEDEEYDEDMDAMKEMQYMIAVMQPVDIDPATVPKPNRRNVRISDDPQTVVARRRRERISEKIRILKRIVPGGAKMDTASMLDEAIRYTKFLKRQVRILQPHSQIGAPMANPSYLCYYHNSQP

SEQ ID NO: 82386 - DNA, 1058 bp, Arabidopsis thaliana
  misc_feature (1)..(1058): Ceres Seq. ID no. 12665443
  misc_feature: MA Experiment ID: 108577 Result: Down-regulated in Transcription
  misc_feature: MA Experiment 108577 PARAMETER Experiment Name: At_42deg_Heat_cDNA_P Parameter: Temperature (deg C) Value: 42 vs. 22
  misc_feature: MA Experiment 108577 PARAMETER Experiment Name: At_42deg_Heat_cDNA_P Parameter: Timepoint (hr) Value: 6
  misc_feature: MA Experiment 108577 PARAMETER Experiment Name: At_42deg_Heat_cDNA_P Parameter: Tissue Value: Aerial
  misc_feature: MA Experiment ID: 20000180 Result: Down-regulated in Transcription
  misc_feature: MA Experiment 20000180 PARAMETER Experiment Name: At_Germinating_Seeds_P Parameter: Age (hr) Value: 24 vs. 0
  misc_feature: MA Experiment 20000180 PARAMETER Experiment Name: At_Germinating_Seeds_P Parameter: Tissue Value: Germinating Seeds
  misc_feature: MA Experiment ID: 20000227 Result: Down-regulated in Transcription
  misc_feature: MA Experiment 20000227 PARAMETER Experiment Name: At_Root-Tips-vs-Tops_P Parameter: Tissue Value: Root Tips vs. Root Tops
  misc_feature: MA Experiment ID: 20000794 Result: Up-regulated in Transcription
  misc_feature: MA Experiment 20000794 PARAMETER Experiment Name: At_Petals_P Parameter: Age (day) Value: 23-25 days
  misc_feature: MA Experiment 20000794 PARAMETER Experiment Name: At_Petals_P Parameter: Plant Line Value: WS
  misc_feature: MA Experiment 20000794 PARAMETER Experiment Name: At_Petals_P Parameter: Tissue Value: Petals vs. Whole plant
  misc_feature: MA Experiment ID: 20001905 Result: Up-regulated in Transcription
  misc_feature: MA Experiment 20001905 PARAMETER Experiment Name: At_Drought_Reproduction_P Parameter: Age (day) Value: 40
  misc_feature: MA Experiment 20001905 PARAMETER Experiment Name: At_Drought_Reproduction_P Parameter: Organism Value: A. thaliana
  misc_feature: MA Experiment 20001905 PARAMETER Experiment Name: At_Drought_Reproduction_P Parameter: Plant Line Value: WS
  misc_feature: MA Experiment 20001905 PARAMETER Experiment Name: At_Drought_Reproduction_P Parameter: Timepoint (day) Value: 10
  misc_feature: MA Experiment 20001905 PARAMETER Experiment Name: At_Drought_Reproduction_P Parameter: Tissue Value: Rosettes
  misc_feature: MA Experiment 20001905 PARAMETER Experiment Name: At_Drought_Reproduction_P Parameter: Treatment Value: Drought vs. No Drought
aaaatttgttcgattctcattcttcttctcacagtcgtaaaccctaaaaaaaaaacagagaaatcaaatttcaatctcgaaggatctacaaagaagcatgacgaccggagatctcgttaatatccatcctactgagcttaaattcccctttgagttgaagaaacaaagttcgtgttcgatgcaattgaccaacaagacaactactcaatgtgtcgcttttaaggttaaaacaaccaatcctcgcaaatactgtgttcgtcctaacactggtgttgtcttgcccggtgattcctgcaatgttacagtgacgatgcaagcccagaaagaggcaccacttgatatgcaatgcaaagacaagttccttgttcagactgttgttgtctctgatggtactacttccaaagaagtcctcgctgaaatgttcaacaaggaggctggtagagtgattgaggatttcaaactgcgagttgtttacattcctgctaatcctccttcacctgtccctgaaggttctgaagaaggcaactctcctatggcttccctcaacgatattgcctctcaatctgcctcactctttgatgacgtgtcaagaacgtttgaagaaacaagtgagaaatcttcagaggcatggtctatgatttccaaattgacggaggagaagacttctgctactcaacaaagtcagaagctccgtctcgaactggaaatgctgaggaaagaaacaagcaagaagcagtcgggtggtcattccttgctcttgatgctgctggtgggtctgctcggttgcgtgattggctacttattgaaccggatataaacgccatggggttagcttcatcatccttttaatcatcaaatcttgcaaagttcttaagatttttgaccagattttcgtaaaatggaggtggtttttttttaaaagtttcatatttaagctgtaaaatcagtagctgtagcacaggaacaggtgtgattttgtggcaggtttcttgttattgatttaaacacactttcgagtctgtagtaagatctcaagagtcgttcttatgattggaatt

SEQ ID NO: 82387 - protein, 239 aa, Arabidopsis thaliana; identical to SEQ ID NO: 22411
  peptide (1)..(239): Ceres Seq. ID no. 12665444
  misc_feature (1)..(239): Homolog of NCBI NO: 18411240 NR Description: putative proline-rich protein; protein id: supported by cDNA: 33482., supported by cDNA: gi_15292934
  misc_feature (1)..(239): Homolog of NCBI NO: 21592874 NR Description: putative proline-rich protein [Arabidopsis
  misc_feature (1)..(226): Homolog of NCBI NO: 7486542 NR Description: hypothetical protein F6N15.21 - Arabidopsis >gi|3193330|gb|AAC19312.1| contains similarity to Medicago sativa
  misc_feature (4)..(238): Homolog of NCBI NO: 11288307 NR Description: 27k vesicle-associated membrane
  misc_feature (1)..(238): Homolog of NCBI NO: 18411661 NR Description: putative protein; protein id: At3g60600.1, by cDNA: 19714., supported by cDNA: gi_17473762 [Arabidopsis >gi|17473763|gb|AAL38320.1| putative protein [Arabidopsis
  misc_feature (1)..(238): Homolog of NCBI NO: 21554053 NR Description: putative VAMP-associated protein [Arabidopsis
  misc_feature (3)..(238): Homolog of NCBI NO: 15225415 NR Description: putative VAMP-associated protein; protein id: supported by cDNA: 6457., supported by cDNA: gi_20260229
  misc_feature (1)..(238): Homolog of NCBI NO: 11288305 NR Description: hypothetical protein T4C21.10 - Arabidopsis >gi|7329670|emb|CAB82664.1| putative protein [Arabidopsis
  misc_feature (5)..(145): Homolog of NCBI NO: 37535894 NR Description: putative vesicle-associated membrane protein
  misc_feature (138)..(238): Homolog of NCBI NO: 37535894 NR Description: putative vesicle-associated membrane protein

SEQ ID NO: 82388 - protein, 212 aa, Arabidopsis thaliana; identical to SEQ ID NO: 22412
  peptide (1)..(212): Ceres Seq. ID no. 12665445
  misc_feature (1)..(212): Homolog of NCBI NO: 18411240 NR Description: putative proline-rich protein; protein id: supported by cDNA: 33482., supported by cDNA: gi_15292934
  misc_feature (1)..(212): Homolog of NCBI NO: 21592874 NR Description: putative proline-rich protein [Arabidopsis
  misc_feature (1)..(199): Homolog of NCBI NO: 7486542 NR Description: hypothetical protein F6N15.21 - Arabidopsis >gi|3193330|gb|AAC19312.1| contains similarity to Medicago sativa
  misc_feature (1)..(211): Homolog of NCBI NO: 11288307 NR Description: 27k vesicle-associated membrane
  misc_feature (1)..(211): Homolog of NCBI NO: 18411661 NR Description: putative protein; protein id: At3g60600.1, by cDNA: 19714., supported by cDNA: gi_17473762 [Arabidopsis >gi|17473763|gb|AAL38320.1| putative protein [Arabidopsis
  misc_feature (1)..(211): Homolog of NCBI NO: 21554053 NR Description: putative VAMP-associated protein [Arabidopsis
  misc_feature (1)..(211): Homolog of NCBI NO: 15225415 NR Description: putative VAMP-associated protein; protein id: supported by cDNA: 6457., supported by cDNA: gi_20260229
  misc_feature (1)..(211): Homolog of NCBI NO: 11288305 NR Description: hypothetical protein T4C21.10 - Arabidopsis >gi|7329670|emb|CAB82664.1| putative protein [Arabidopsis
  misc_feature (1)..(118): Homolog of NCBI NO: 37535894 NR Description: putative vesicle-associated membrane protein
  misc_feature (111)..(211): Homolog of NCBI NO: 37535894 NR Description: putative vesicle-associated membrane protein

SEQ ID NO: 82389 - protein, 168 aa, Arabidopsis thaliana; identical to SEQ ID NO: 22413
  peptide (1)..(168): Ceres Seq. ID no. 12665446
  misc_feature (1)..(168): Homolog of NCBI NO: 18411240 NR Description: putative proline-rich protein; protein id: supported by cDNA: 33482., supported by cDNA: gi_15292934
  misc_feature (1)..(168): Homolog of NCBI NO: 21592874 NR Description: putative proline-rich protein [Arabidopsis
  misc_feature (1)..(155): Homolog of NCBI NO: 7486542 NR Description: hypothetical protein F6N15.21 - Arabidopsis >gi|3193330|gb|AAC19312.1| contains similarity to Medicago sativa
  misc_feature (1)..(167): Homolog of NCBI NO: 11288307 NR Description: 27k vesicle-associated membrane
  misc_feature (1)..(167): Homolog of NCBI NO: 18411661 NR Description: putative protein; protein id: At3g60600.1, by cDNA: 19714., supported by cDNA: gi_17473762 [Arabidopsis >gi|17473763|gb|AAL38320.1| putative protein [Arabidopsis
  misc_feature (1)..(167): Homolog of NCBI NO: 21554053 NR Description: putative VAMP-associated protein [Arabidopsis
  misc_feature (1)..(167): Homolog of NCBI NO: 15225415 NR Description: putative VAMP-associated protein; protein id: supported by cDNA: 6457., supported by cDNA: gi_20260229
  misc_feature (1)..(167): Homolog of NCBI NO: 11288305 NR Description: hypothetical protein T4C21.10 - Arabidopsis >gi|7329670|emb|CAB82664.1| putative protein [Arabidopsis
  misc_feature (1)..(74): Homolog of NCBI NO: 37535894 NR Description: putative vesicle-associated membrane protein
  misc_feature (67)..(167): Homolog of NCBI NO: 37535894 NR Description: putative vesicle-associated membrane protein

SEQ ID NO: 82390 - DNA, 1425 bp, Arabidopsis thaliana
  misc_feature (1)..(1425): Ceres Seq. ID no. 12665447
  misc_feature: MA Experiment ID: 20000184 Result: Up-regulated in Transcription
  misc_feature: MA Experiment 20000184 PARAMETER Experiment Name: At_Shoots__P Parameter: Age (day) Value: 7
  misc_feature: MA Experiment 20000184 PARAMETER Experiment Name: At_Shoots__P Parameter: Tissue Value: Shoots vs. Whole Plant
atggttttcggaaatgaaatgtgcgatgaaacgccgcatccgggtgaatgcaagactctactgattaaacacaaacccataagaagcactacacagttcctccaagtgtccgtggaacgaacactagatggggctgtcaaagccaagagtgacacgtattttcttgagccacaatttggttcaaagcaagcttgggaggaatgtatggatctgtacgagcagactattcacaggctcaacgagagcgtgttgtgtcccaagaacgtttgctctaggtcagacgtgcaagcatggctcagcaccgcactcaccaacctagacacatgtcaggaagagatgtcagaactcggtgtctcgtctcattccttggagagcattaccattgatgtcattaacaccttggccatcaacaagaggatggaacaaaacggtaaggagtttgggatatcgaaaataacaatgaaaacactatctataggtgaaaaagtggatgtagtggtggctcaagatggttccggggactacaaaactatccaagaggccgtgaatggtgctggagagaggctcaaaggaagcccaaggtatgtcatacatgtcaagcaaggcgtttacgaggaatatgtcaatgtaggaatcaagtctaataacatcatgatcactggcgatggtatcggcaaaaccataatcaccggtgacaaaagcaagggccgaggattttccacttacaaatctgccacttttgtggctgagggggacggtttcgtgggacgagacataacaatcaggaacacggcaggaccggaaaaccatcaggcggtggctctcagatcgaattcagacatgtcagtgttttacagatgtagcattgaaggctatcaagacacactctacgtgcactctggtcgtcagtttttcagggagtgcgacatatacggaaccgttgacttcattttcggaaacgccgcagctgttttacaaaactgtcggatatttgcacgtaacccaccgaatggagtcaacaccataacggcacagagccggttcaacccgaatcagacaacaggaatcgtaatccataactccgtggtgaaaggagctccgggggtacagttaggaggcgtgaaaacgtatttgggccgtccgtggaggtcgtacgcacggaccgtggtgatcgggacgtatcttgatacgttgatcgaacccaacggatggattgattgggataatgtaacggctctaagcacgttgtattatggggagtatcaaaactcgggaccgggttcggggacagagaaccgggttgattgggccgggtttcacgtgatatctgatatccaagaagctcgagagtttacgttacccaaattcatcgactctgcttcatggttaccgcctaccaaagtgcctttcaccatcaatctctaa

SEQ ID NO: 82391 - protein, 474 aa, Arabidopsis thaliana
  peptide (1)..(474): Ceres Seq. ID no. 12665448
  misc_feature (164)..(461): Pfam Name: Pectinesterase Pfam Description: Pectinesterase
  misc_feature (1)..(474): Homolog of NCBI NO: 15236734 NR Description: pectinesterase family; protein id: At4g00190.1
  misc_feature (8)..(474): Homolog of NCBI NO: 6174914 NR Description: Pectinesterase 2.1 precursor (Pectin
  misc_feature (8)..(474): Homolog of NCBI NO: 7447381 NR Description: pectinesterase (EC 3.1.1.11) PECS-c2 - sweet
  misc_feature (8)..(474): Homolog of NCBI NO: 18406733 NR Description: pectinesterase family; protein id: At2g45220.1, by cDNA: gi_13605695 [Arabidopsis thaliana] At2g45220/F4L23.27 [Arabidopsis thaliana]
  misc_feature (8)..(474): Homolog of NCBI NO: 25313433 NR Description: probable pectinesterase [imported] - Arabidopsis
  misc_feature (162)..(474): Homolog of NCBI NO: 15242110 NR Description: pectinesterase family; protein id: At5g51500.1 thaliana] >gi|9758192|dbj|BAB08666.1| pectinesterase [Arabidopsis
  misc_feature (8)..(145): Homolog of NCBI NO: 15242110 NR Description: pectinesterase family; protein id: At5g51500.1 thaliana] >gi|9758192|dbj|BAB08666.1| pectinesterase [Arabidopsis
  misc_feature (74)..(474): Homolog of NCBI NO: 15242109 NR Description: pectinesterase family; protein id: At5g51490.1 thaliana] >gi|9758191|dbj|BAB08665.1| pectinesterase [Arabidopsis
  misc_feature (162)..(469): Homolog of NCBI NO: 15220671 NR Description: pectinesterase family; protein id: At1g23200.1, by cDNA: gi_17529057, supported by cDNA: gi_20259096 [Arabidopsis
  misc_feature (8)..(138): Homolog of NCBI NO: 15220671 NR Description: pectinesterase family; protein id: At1g23200.1, by cDNA: gi_17529057, supported by cDNA: gi_20259096 [Arabidopsis
MVFGNEMCDETPHPGECKTLLIKHKPIRSTTQFLQVSVERTLDGAVKAKSDTYFLEPQFGSKQAWEECMDLYEQTIHRLNESVLCPKNVCSRSDVQAWLSTALTNLDTCQEEMSELGVSSHSLESITIDVINTLAINKRMEQNGKEFGISKITMKTLSIGEKVDVVVAQDGSGDYKTIQEAVNGAGERLKGSPRYVIHVKQGVYEEYVNVGIKSNNIMITGDGIGKTIITGDKSKGRGFSTYKSATFVAEGDGFVGRDITIRNTAGPENHQAVALRSNSDMSVFYRCSIEGYQDTLYVHSGRQFFRECDIYGTVDFIFGNAAAVLQNCRIFARNPPNGVNTITAQSRFNPNQTTGIVIHNSVVKGAPGVQLGGVKTYLGRPWRSYARTVVIGTYLDTLIEPNGWIDWDNVTALSTLYYGEYQNSGPGSGTENRVDWAGFHVISDIQEAREFTLPKFIDSASWLPPTKVPFTINL

SEQ ID NO: 82392 - protein, 468 aa, Arabidopsis thaliana
  peptide (1)..(468): Ceres Seq. ID no. 12665449
  misc_feature (158)..(455): Pfam Name: Pectinesterase Pfam Description: Pectinesterase
  misc_feature (1)..(468): Homolog of NCBI NO: 15236734 NR Description: pectinesterase family; protein id: At4g00190.1
  misc_feature (2)..(468): Homolog of NCBI NO: 6174914 NR Description: Pectinesterase 2.1 precursor (Pectin
  misc_feature (2)..(468): Homolog of NCBI NO: 7447381 NR Description: pectinesterase (EC 3.1.1.11) PECS-c2 - sweet
  misc_feature (2)..(468): Homolog of NCBI NO: 18406733 NR Description: pectinesterase family; protein id: At2g45220.1, by cDNA: gi_13605695 [Arabidopsis thaliana] At2g45220/F4L23.27 [Arabidopsis thaliana]
  misc_feature (2)..(468): Homolog of NCBI NO: 25313433 NR Description: probable pectinesterase [imported] - Arabidopsis
  misc_feature (156)..(468): Homolog of NCBI NO: 15242110 NR Description: pectinesterase family; protein id: At5g51500.1 thaliana] >gi|9758192|dbj|BAB08666.1| pectinesterase [Arabidopsis
  misc_feature (2)..(139): Homolog of NCBI NO: 15242110 NR Description: pectinesterase family; protein id: At5g51500.1 thaliana] >gi|9758192|dbj|BAB08666.1| pectinesterase [Arabidopsis
  misc_feature (68)..(468): Homolog of NCBI NO: 15242109 NR Description: pectinesterase family; protein id: At5g51490.1 thaliana] >gi|9758191|dbj|BAB08665.1| pectinesterase [Arabidopsis
  misc_feature (156)..(463): Homolog of NCBI NO: 15220671 NR Description: pectinesterase family; protein id: At1g23200.1, by cDNA: gi_17529057, supported by cDNA: gi_20259096 [Arabidopsis
  misc_feature (2)..(132): Homolog of NCBI NO: 15220671 NR Description: pectinesterase family; protein id: At1g23200.1, by cDNA: gi_17529057, supported by cDNA: gi_20259096 [Arabidopsis
MCDETPHPGECKTLLIKHKPIRSTTQFLQVSVERTLDGAVKAKSDTYFLEPQFGSKQAWEECMDLYEQTIHRLNESVLCPKNVCSRSDVQAWLSTALTNLDTCQEEMSELGVSSHSLESITIDVINTLAINKRMEQNGKEFGISKITMKTLSIGEKVDVVVAQDGSGDYKTIQEAVNGAGERLKGSPRYVIHVKQGVYEEYVNVGIKSNNIMITGDGIGKTIITGDKSKGRGFSTYKSATFVAEGDGFVGRDITIRNTAGPENHQAVALRSNSDMSVFYRCSIEGYQDTLYVHSGRQFFRECDIYGTVDFIFGNAAAVLQNCRIFARNPPNGVNTITAQSRFNPNQTTGIVIHNSVVKGAPGVQLGGVKTYLGRPWRSYARTVVIGTYLDTLIEPNGWIDWDNVTALSTLYYGEYQNSGPGSGTENRVDWAGFHVISDIQEAREFTLPKFIDSASWLPPTKVPFTINL

SEQ ID NO: 82393 - protein, 406 aa, Arabidopsis thaliana
  peptide (1)..(406): Ceres Seq. ID no. 12665450
  misc_feature (96)..(393): Pfam Name: Pectinesterase Pfam Description: Pectinesterase
  misc_feature (1)..(406): Homolog of NCBI NO: 15236734 NR Description: pectinesterase family; protein id: At4g00190.1
  misc_feature (1)..(406): Homolog of NCBI NO: 6174914 NR Description: Pectinesterase 2.1 precursor (Pectin
  misc_feature (1)..(406): Homolog of NCBI NO: 7447381 NR Description: pectinesterase (EC 3.1.1.11) PECS-c2 - sweet
  misc_feature (1)..(406): Homolog of NCBI NO: 18406733 NR Description: pectinesterase family; protein id: At2g45220.1, by cDNA: gi_13605695 [Arabidopsis thaliana] At2g45220/F4L23.27 [Arabidopsis thaliana]
  misc_feature (1)..(406): Homolog of NCBI NO: 25313433 NR Description: probable pectinesterase [imported] - Arabidopsis
  misc_feature (94)..(406): Homolog of NCBI NO: 15242110 NR Description: pectinesterase family; protein id: At5g51500.1 thaliana] >gi|9758192|dbj|BAB08666.1| pectinesterase [Arabidopsis
  misc_feature (1)..(77): Homolog of NCBI NO: 15242110 NR Description: pectinesterase family; protein id: At5g51500.1 thaliana] >gi|9758192|dbj|BAB08666.1| pectinesterase [Arabidopsis
  misc_feature (6)..(406): Homolog of NCBI NO: 15242109 NR Description: pectinesterase family; protein id: At5g51490.1 thaliana] >gi|9758191|dbj|BAB08665.1| pectinesterase [Arabidopsis
  misc_feature (94)..(401): Homolog of NCBI NO: 15220671 NR Description: pectinesterase family; protein id: At1g23200.1, by cDNA: gi_17529057, supported by cDNA: gi_20259096 [Arabidopsis
  misc_feature (1)..(70): Homolog of NCBI NO: 15220671 NR Description: pectinesterase family; protein id: At1g23200.1, by cDNA: gi_17529057, supported by cDNA: gi_20259096 [Arabidopsis
MDLYEQTIHRLNESVLCPKNVCSRSDVQAWLSTALTNLDTCQEEMSELGVSSHSLESITIDVINTLAINKRMEQNGKEFGISKITMKTLSIGEKVDVVVAQDGSGDYKTIQEAVNGAGERLKGSPRYVIHVKQGVYEEYVNVGIKSNNIMITGDGIGKTIITGDKSKGRGFSTYKSATFVAEGDGFVGRDITIRNTAGPENHQAVALRSNSDMSVFYRCSIEGYQDTLYVHSGRQFFRECDIYGTVDFIFGNAAAVLQNCRIFARNPPNGVNTITAQSRFNPNQTTGIVIHNSVVKGAPGVQLGGVKTYLGRPWRSYARTVVIGTYLDTLIEPNGWIDWDNVTALSTLYYGEYQNSGPGSGTENRVDWAGFHVISDIQEAREFTLPKFIDSASWLPPTKVPFTINL

SEQ ID NO: 82394 - DNA, 2784 bp, Arabidopsis thaliana
  misc_feature (1)..(2784): Ceres Seq. ID no. 12665464
  misc_feature: MA Experiment ID: 20000180 Result: Up-regulated in Transcription
  misc_feature: MA Experiment 20000180 PARAMETER Experiment Name: At_Germinating_Seeds_P Parameter: Age (hr) Value: 24 vs. 0
  misc_feature: MA Experiment 20000180 PARAMETER Experiment Name: At_Germinating_Seeds_P Parameter: Tissue Value: Germinating Seeds
  misc_feature: MA Experiment ID: 20000182 Result: Up-regulated in Transcription
  misc_feature: MA Experiment 20000182 PARAMETER Experiment Name: At_2mM_SA_P Parameter: Age (day) Value: 14
  misc_feature: MA Experiment 20000182 PARAMETER Experiment Name: At_2mM_SA_P Parameter: Organism Value: A. thaliana
  misc_feature: MA Experiment 20000182 PARAMETER Experiment Name: At_2mM_SA_P Parameter: Plant Line Value: WS
  misc_feature: MA Experiment 20000182 PARAMETER Experiment Name: At_2mM_SA_P Parameter: Timepoint (hr) Value: 6
  misc_feature: MA Experiment 20000182 PARAMETER Experiment Name: At_2mM_SA_P Parameter: Tissue Value: Aerial
  misc_feature: MA Experiment 20000182 PARAMETER Experiment Name: At_2mM_SA_P Parameter: Treatment Value: 2mM SA vs. No Treatment
  misc_feature: MA Experiment ID: 20000185 Result: Up-regulated in Transcription
  misc_feature: MA Experiment 20000185 PARAMETER Experiment Name: At_Roots__P Parameter: Age (day) Value: 7 vs. 21
  misc_feature: MA Experiment 20000185 PARAMETER Experiment Name: At_Roots__P Parameter: Organism Value: A. thaliana
  misc_feature: MA Experiment 20000185 PARAMETER Experiment Name: At_Roots__P Parameter: Tissue Value: Roots vs. Whole Plant
  misc_feature: MA Experiment ID: 20000227 Result: Up-regulated in Transcription
  misc_feature: MA Experiment 20000227 PARAMETER Experiment Name: At_Root-Tips-vs-Tops_P Parameter: Tissue Value: Root Tips vs. Root Tops
  misc_feature: MA Experiment ID: 20000439 Result: Up-regulated in Transcription
  misc_feature: MA Experiment 20000439 PARAMETER Experiment Name: At_Roots__P Parameter: Age (day) Value: 14 vs. 21
  misc_feature: MA Experiment 20000439 PARAMETER Experiment Name: At_Roots__P Parameter: Organism Value: A. thaliana
  misc_feature: MA Experiment 20000439 PARAMETER Experiment Name: At_Roots__P Parameter: Tissue Value: Roots vs. Whole Plant
  misc_feature: MA Experiment ID: 20000496 Result: Up-regulated in Transcription
  misc_feature: MA Experiment 20000496 PARAMETER Experiment Name: At_Guard_Cells_P Parameter: Harvest Date Value: 7/19/2002
  misc_feature: MA Experiment 20000496 PARAMETER Experiment Name: At_Guard_Cells_P Parameter: Organism Value: Canola
  misc_feature: MA Experiment 20000496 PARAMETER Experiment Name: At_Guard_Cells_P Parameter: Tissue Value: Guard Cells vs. Leaves
  misc_feature: MA Experiment ID: 20000794 Result: Up-regulated in Transcription
  misc_feature: MA Experiment 20000794 PARAMETER Experiment Name: At_Petals_P Parameter: Age (day) Value: 23-25 days
  misc_feature: MA Experiment 20000794 PARAMETER Experiment Name: At_Petals_P Parameter: Plant Line Value: WS
  misc_feature: MA Experiment 20000794 PARAMETER Experiment Name: At_Petals_P Parameter: Tissue Value: Petals vs. Whole plant
atggagaattatggttggaattacccttattacccttacaggcctccgcggcctaatcctccttacccagcaccgcctcatcaccatggatcaatgtctcattcgggtccattagaccaccaccaccctccaatgagttactatgcttcttttgattaccaacaccaacctcctcctccttaccctccagtgagttactatgcttcgttttcaagtcattcagatttatcatactcaggcaggctagattcgtctggtcatggttttacatctaccgcatcgccgcatagtcccggtatgcacattgtgccctttggtaaagcctccttgaaggtcctcttgttgcatggtaatttggatatttgggtttcttgtgctaataatctaccaaacttagatttgtttcataagacattgggtgttgtgtttggtggcatgaccaatatgatcgaaggccagttgagcaagaagatcactagtgatccttacgtgtccatatcagtcgctggtgctgtcataggaagaacatatgtcattagcaacagcgaaaatcctgtctggcagcagcatttttatgtccctgtagctcatcacgctgccgaggtccattttgttgttaaggacagtgatgccgtcggttcacagcttataggaattgttacaatccctgttgaacaaatttactcaggtgcaagaattgaagggacttactccattcgagacagcaatggaaagccttgtaaaccaggggcaactctatcattgtcgattcagtatacttcaatgaataaactcagtgtttatcacagcggagttggtgcaggtccctattaccagggggtgcctggaacatattttcctcttagggaaggtggaagtgtcacattgtaccaagatgcacatgtacctgaagggatgctcccgggaataaaactcggaaatggaatgtgttacgaacatggaaagtgttggcatgatatgtttcatgccatttgtcaagctagacgtttgatttatattacaggctggtcagtgtggcataatgtcaggcttgttcgggataaagaagatccttcttcagaatgtagactaggtgagctcctaagatcaaagtcccaagaaggtgtgagagtcctgcttttggtttgggacgacccaacttcacaaaacatcttgggatacatgaccgatggggttatgggaacccatgacgaggagacacgccgttttttcaaggactcctcagtgcaagtcttgctatgccctcgaaatgctggaaagcgacatagttgggtcaaacagagggaagttggaaccatctatacacaccaccaaaaaaacttaatagtagatgccgatgctgggggtaacagaaggaaaatcgtagcttttgtgggcgggcttgatctatgtgatggccgatatgatactcctcaacatccgttgtttaggacactgcaaacagatcataatggtgactatcacaaccccactttcacgggtaacgtgtccggttgtccaagagaaccttggcatgacttgcacagtaagattgatggcccagctgcgtatgatgtgctgacaaattttgaggagaggtggctgaaggctgctaagcctcacagaatcaataaattgaagacgtcatatgatgatgcactactaaggatcgacaggattccagatatattaagagttttggatgctcctactgttagtgcaaacgaccccgaggcttggcatgttcagattttccggtcaatcgattcaaactctgtgaaaggttttccaaaggatccaaaatatgctacaagcaagaatttggtgtgcggtaagaatgtgctcattgacatgagcatacacaccgcatatgtaaaggccattcgtgcagctcaacacttcatctacatcgagaaccagtatttcattggatcctcctacgactggaatgctcacaaggacataggtgccaacaacctgattcctatggaaattgcgttgaagattgctgataagatcagagcaaaggaacggtttgctgcatatattgtcattccaatgtggccagaaggagttcctaccggcgccgctacacaaagaattctatattggcagcacaagacgatgcaaatgatgtatggaactatctacaatgcgttagtggaggccgggcttgaagatgaatactccccacaagactatttgaatttcttctgtcttggaaaccgagaaatggtgaacggaaataatgaatcgggtacaggaagtgcaagcaacgagaacactcctcagggattatgtcgaaagagcagaagatttatgatatatgttcattcaaaagggatggttgttgatgatgagtatgtggtaattggatctgcaaacataaaccaaagatcaatggaggggacaagagatacagagattgcaatgggagcttaccagcctcaacatacatgggcacgacgacagtcaggtcctcggggtcagatctacggatatagaatgtcgctttgggcagaacacatggcactgctagatgattgctttgtggagccagagagtctagggtgtgtaaggaaagtgagaacagtggcggaggagaactgggaacagtttaggagtgaggaagtgtcggagatgagaggacatctgatgaaatatccggtggaagttgatcggaaaggcaaagtccgaccacttccaggaagtgaggagttccctgatgtcggaggaaacgttgttggatcctttctagccatacaggagaatctcactatctaa

SEQ ID NO: 82395 - protein, 927 aa, Arabidopsis thaliana
  peptide (1)..(927): Ceres Seq. ID no. 12665465
  misc_feature (119)..(221): Pfam Name: C2 domain Pfam Description: C2 domain
  misc_feature (102)..(927): Homolog of NCBI NO: 7488148 NR Description: probable phospholipase D (EC 3.1.4.4) gamma
  misc_feature (156)..(926): Homolog of NCBI NO: 30690488 NR Description: phospholipase D -related [Arabidopsis thaliana] phospholipase D delta [Arabidopsis thaliana]
  misc_feature (107)..(143): Homolog of NCBI NO: 30690488 NR Description: phospholipase D -related [Arabidopsis thaliana] phospholipase D delta [Arabidopsis thaliana]
  misc_feature (156)..(926): Homolog of NCBI NO: 15983515 NR Description: AT4g35790/F4B14_60 [Arabidopsis thaliana]
  misc_feature (156)..(917): Homolog of NCBI NO: 22795064 NR Description: phospholipase D delta isoform 1a [Gossypium
  misc_feature (156)..(580): Homolog of NCBI NO: 30690492 NR Description: phospholipase D -related [Arabidopsis thaliana]
  misc_feature (551)..(756): Homolog of NCBI NO: 30690492 NR Description: phospholipase D -related [Arabidopsis thaliana]
  misc_feature (107)..(143): Homolog of NCBI NO: 30690492 NR Description: phospholipase D -related [Arabidopsis thaliana]
  misc_feature (437)..(926): Homolog of NCBI NO: 7486399 NR Description: hypothetical protein F4B14.60 - Arabidopsis >gi|3805845|emb|CAA21465.1| putative protein [Arabidopsis >gi|7270531|emb|CAB81488.1| putative protein [Arabidopsis
  misc_feature (107)..(143): Homolog of NCBI NO: 7486399 NR Description: hypothetical protein F4B14.60 - Arabidopsis >gi|3805845|emb|CAA21465.1| putative protein [Arabidopsis >gi|7270531|emb|CAB81488.1| putative protein [Arabidopsis
MENYGWNYPYYPYRPPRPNPPYPAPPHHHGSMSHSGPLDHHHPPMSYYASFDYQHQPPPPYPPVSYYASFSSHSDLSYSGRLDSSGHGFTSTASPHSPGMHIVPFGKASLKVLLLHGNLDIWVSCANNLPNLDLFHKTLGVVFGGMTNMIEGQLSKKITSDPYVSISVAGAVIGRTYVISNSENPVWQQHFYVPVAHHAAEVHFVVKDSDAVGSQLIGIVTIPVEQIYSGARIEGTYSIRDSNGKPCKPGATLSLSIQYTSMNKLSVYHSGVGAGPYYQGVPGTYFPLREGGSVTLYQDAHVPEGMLPGIKLGNGMCYEHGKCWHDMFHAICQARRLIYITGWSVWHNVRLVRDKEDPSSECRLGELLRSKSQEGVRVLLLVWDDPTSQNILGYMTDGVMGTHDEETRRFFKDSSVQVLLCPRNAGKRHSWVKQREVGTIYTHHQKNLIVDADAGGNRRKIVAFVGGLDLCDGRYDTPQHPLFRTLQTDHNGDYHNPTFTGNVSGCPREPWHDLHSKIDGPAAYDVLTNFEERWLKAAKPHRINKLKTSYDDALLRIDRIPDILRVLDAPTVSANDPEAWHVQIFRSIDSNSVKGFPKDPKYATSKNLVCGKNVLIDMSIHTAYVKAIRAAQHFIYIENQYFIGSSYDWNAHKDIGANNLIPMEIALKIADKIRAKERFAAYIVIPMWPEGVPTGAATQRILYWQHKTMQMMYGTIYNALVEAGLEDEYSPQDYLNFFCLGNREMVNGNNESGTGSASNENTPQGLCRKSRRFMIYVHSKGMVVDDEYVVIGSANINQRSMEGTRDTEIAMGAYQPQHTWARRQSGPRGQIYGYRMSLWAEHMALLDDCFVEPESLGCVRKVRTVAEENWEQFRSEEVSEMRGHLMKYPVEVDRKGKVRPLPGSEEFPDVGGNVVGSFLAIQENLTI

SEQ ID NO: 82396 - protein, 896 aa, Arabidopsis thaliana
  peptide (1)..(896): Ceres Seq. ID no. 12665466
  misc_feature (88)..(190): Pfam Name: C2 domain Pfam Description: C2 domain
  misc_feature (71)..(896): Homolog of NCBI NO: 7488148 NR Description: probable phospholipase D (EC 3.1.4.4) gamma
  misc_feature (125)..(895): Homolog of NCBI NO: 30690488 NR Description: phospholipase D -related [Arabidopsis thaliana] phospholipase D delta [Arabidopsis thaliana]
  misc_feature (76)..(112): Homolog of NCBI NO: 30690488 NR Description: phospholipase D -related [Arabidopsis thaliana] phospholipase D delta [Arabidopsis thaliana]
  misc_feature (125)..(895): Homolog of NCBI NO: 15983515 NR Description: AT4g35790/F4B14_60 [Arabidopsis thaliana]
  misc_feature (125)..(886): Homolog of NCBI NO: 22795064 NR Description: phospholipase D delta isoform 1a [Gossypium
  misc_feature (125)..(549): Homolog of NCBI NO: 30690492 NR Description: phospholipase D -related [Arabidopsis thaliana]
  misc_feature (520)..(725): Homolog of NCBI NO: 30690492 NR Description: phospholipase D -related [Arabidopsis thaliana]
  misc_feature (76)..(112): Homolog of NCBI NO: 30690492 NR Description: phospholipase D -related [Arabidopsis thaliana]
  misc_feature (406)..(895): Homolog of NCBI NO: 7486399 NR Description: hypothetical protein F4B14.60 - Arabidopsis >gi|3805845|emb|CAA21465.1| putative protein [Arabidopsis >gi|7270531|emb|CAB81488.1| putative protein [Arabidopsis
  misc_feature (76)..(112): Homolog of NCBI NO: 7486399 NR Description: hypothetical protein F4B14.60 - Arabidopsis >gi|3805845|emb|CAA21465.1| putative protein [Arabidopsis >gi|7270531|emb|CAB81488.1| putative protein [Arabidopsis
MSHSGPLDHHHPPMSYYASFDYQHQPPPPYPPVSYYASFSSHSDLSYSGRLDSSGHGFTSTASPHSPGMHIVPFGKASLKVLLLHGNLDIWVSCANNLPNLDLFHKTLGVVFGGMTNMIEGQLSKKITSDPYVSISVAGAVIGRTYVISNSENPVWQQHFYVPVAHHAAEVHFVVKDSDAVGSQLIGIVTIPVEQIYSGARIEGTYSIRDSNGKPCKPGATLSLSIQYTSMNKLSVYHSGVGAGPYYQGVPGTYFPLREGGSVTLYQDAHVPEGMLPGIKLGNGMCYEHGKCWHDMFHAICQARRLIYITGWSVWHNVRLVRDKEDPSSECRLGELLRSKSQEGVRVLLLVWDDPTSQNILGYMTDGVMGTHDEETRRFFKDSSVQVLLCPRNAGKRHSWVKQREVGTIYTHHQKNLIVDADAGGNRRKIVAFVGGLDLCDGRYDTPQHPLFRTLQTDHNGDYHNPTFTGNVSGCPREPWHDLHSKIDGPAAYDVLTNFEERWLKAAKPHRINKLKTSYDDALLRIDRIPDILRVLDAPTVSANDPEAWHVQIFRSIDSNSVKGFPKDPKYATSKNLVCGKNVLIDMSIHTAYVKAIRAAQHFIYIENQYFIGSSYDWNAHKDIGANNLIPMEIALKIADKIRAKERFAAYIVIPMWPEGVPTGAATQRILYWQHKTMQMMYGTIYNALVEAGLEDEYSPQDYLNFFCLGNREMVNGNNESGTGSASNENTPQGLCRKSRRFMIYVHSKGMVVDDEYVVIGSANINQRSMEGTRDTEIAMGAYQPQHTWARRQSGPRGQIYGYRMSLWAEHMALLDDCFVEPESLGCVRKVRTVAEENWEQFRSEEVSEMRGHLMKYPVEVDRKGKVRPLPGSEEFPDVGGNVVGSFLAIQENLTI

SEQ ID NO: 82397 - protein, 883 aa, Arabidopsis thaliana
  peptide (1)..(883): Ceres Seq. ID no. 12665467
  misc_feature (75)..(177): Pfam Name: C2 domain Pfam Description: C2 domain
  misc_feature (58)..(883): Homolog of NCBI NO: 7488148 NR Description: probable phospholipase D (EC 3.1.4.4) gamma
  misc_feature (112)..(882): Homolog of NCBI NO: 30690488 NR Description: phospholipase D -related [Arabidopsis thaliana] phospholipase D delta [Arabidopsis thaliana]
  misc_feature (63)..(99): Homolog of NCBI NO: 30690488 NR Description: phospholipase D -related [Arabidopsis thaliana] phospholipase D delta [Arabidopsis thaliana]
  misc_feature (112)..(882): Homolog of NCBI NO: 15983515 NR Description: AT4g35790/F4B14_60 [Arabidopsis thaliana]
  misc_feature (112)..(873): Homolog of NCBI NO: 22795064 NR Description: phospholipase D delta isoform 1a [Gossypium
  misc_feature (112)..(536): Homolog of NCBI NO: 30690492 NR Description: phospholipase D -related [Arabidopsis thaliana]
  misc_feature (507)..(712): Homolog of NCBI NO: 30690492 NR Description: phospholipase D -related [Arabidopsis thaliana]
  misc_feature (63)..(99): Homolog of NCBI NO: 30690492 NR Description: phospholipase D -related [Arabidopsis thaliana]
  misc_feature (393)..(882): Homolog of NCBI NO: 7486399 NR Description: hypothetical protein F4B14.60 - Arabidopsis >gi|3805845|emb|CAA21465.1| putative protein [Arabidopsis >gi|7270531|emb|CAB81488.1| putative protein [Arabidopsis
  misc_feature (63)..(99): Homolog of NCBI NO: 7486399 NR Description: hypothetical protein F4B14.60 - Arabidopsis >gi|3805845|emb|CAA21465.1| putative protein [Arabidopsis >gi|7270531|emb|CAB81488.1| putative protein [Arabidopsis
MSYYASFDYQHQPPPPYPPVSYYASFSSHSDLSYSGRLDSSGHGFTSTASPHSPGMHIVPFGKASLKVLLLHGNLDIWVSCANNLPNLDLFHKTLGVVFGGMTNMIEGQLSKKITSDPYVSISVAGAVIGRTYVISNSENPVWQQHFYVPVAHHAAEVHFVVKDSDAVGSQLIGIVTIPVEQIYSGARIEGTYSIRDSNGKPCKPGATLSLSIQYTSMNKLSVYHSGVGAGPYYQGVPGTYFPLREGGSVTLYQDAHVPEGMLPGIKLGNGMCYEHGKCWHDMFHAICQARRLIYITGWSVWHNVRLVRDKEDPSSECRLGELLRSKSQEGVRVLLLVWDDPTSQNILGYMTDGVMGTHDEETRRFFKDSSVQVLLCPRNAGKRHSWVKQREVGTIYTHHQKNLIVDADAGGNRRKIVAFVGGLDLCDGRYDTPQHPLFRTLQTDHNGDYHNPTFTGNVSGCPREPWHDLHSKIDGPAAYDVLTNFEERWLKAAKPHRINKLKTSYDDALLRIDRIPDILRVLDAPTVSANDPEAWHVQIFRSIDSNSVKGFPKDPKYATSKNLVCGKNVLIDMSIHTAYVKAIRAAQHFIYIENQYFIGSSYDWNAHKDIGANNLIPMEIALKIADKIRAKERFAAYIVIPMWPEGVPTGAATQRILYWQHKTMQMMYGTIYNALVEAGLEDEYSPQDYLNFFCLGNREMVNGNNESGTGSASNENTPQGLCRKSRRFMIYVHSKGMVVDDEYVVIGSANINQRSMEGTRDTEIAMGAYQPQHTWARRQSGPRGQIYGYRMSLWAEHMALLDDCFVEPESLGCVRKVRTVAEENWEQFRSEEVSEMRGHLMKYPVEVDRKGKVRPLPGSEEFPDVGGNVVGSFLAIQENLTI

SEQ ID NO: 82398 - DNA, 1481 bp, Arabidopsis thaliana
  misc_feature (1)..(1481): Ceres Seq. ID no. 12665475
  misc_feature: MA Experiment ID: 20000173 Result: Down-regulated in Transcription
  misc_feature: MA Experiment 20000173 PARAMETER Experiment Name: At_42deg_Heat_P Parameter: Age (day) Value: 14
  misc_feature: MA Experiment 20000173 PARAMETER Experiment Name: At_42deg_Heat_P Parameter: Organism Value: A. thaliana
  misc_feature: MA Experiment 20000173 PARAMETER Experiment Name: At_42deg_Heat_P Parameter: Plant Line Value: WS
  misc_feature: MA Experiment 20000173 PARAMETER Experiment Name: At_42deg_Heat_P Parameter: Temperature (deg C) Value: 42 vs. 22
  misc_feature: MA Experiment 20000173 PARAMETER Experiment Name: At_42deg_Heat_P Parameter: Timepoint (hr) Value: 6
  misc_feature: MA Experiment 20000173 PARAMETER Experiment Name: At_42deg_Heat_P Parameter: Tissue Value: Aerial
  misc_feature: MA Experiment ID: 20000182 Result: Up-regulated in Transcription
  misc_feature: MA Experiment 20000182 PARAMETER Experiment Name: At_2mM_SA_P Parameter: Age (day) Value: 14
  misc_feature: MA Experiment 20000182 PARAMETER Experiment Name: At_2mM_SA_P Parameter: Organism Value: A. thaliana
  misc_feature: MA Experiment 20000182 PARAMETER Experiment Name: At_2mM_SA_P Parameter: Plant Line Value: WS
  misc_feature: MA Experiment 20000182 PARAMETER Experiment Name: At_2mM_SA_P Parameter: Timepoint (hr) Value: 6
  misc_feature: MA Experiment 20000182 PARAMETER Experiment Name: At_2mM_SA_P Parameter: Tissue Value: Aerial
  misc_feature: MA Experiment 20000182 PARAMETER Experiment Name: At_2mM_SA_P Parameter: Treatment Value: 2mM SA vs. No Treatment
  misc_feature: MA Experiment ID: 20000184 Result: Down-regulated in Transcription
  misc_feature: MA Experiment 20000184 PARAMETER Experiment Name: At_Shoots__P Parameter: Age (day) Value: 7
  misc_feature: MA Experiment 20000184 PARAMETER Experiment Name: At_Shoots__P Parameter: Tissue Value: Shoots vs. Whole Plant
  misc_feature: MA Experiment ID: 20000185 Result: Down-regulated in Transcription
  misc_feature: MA Experiment 20000185 PARAMETER Experiment Name: At_Roots__P Parameter: Age (day) Value: 7 vs. 21
  misc_feature: MA Experiment 20000185 PARAMETER Experiment Name: At_Roots__P Parameter: Organism Value: A. thaliana
  misc_feature: MA Experiment 20000185 PARAMETER Experiment Name: At_Roots__P Parameter: Tissue Value: Roots vs. Whole Plant
  misc_feature: MA Experiment ID: 20000234 Result: Down-regulated in Transcription
  misc_feature: MA Experiment 20000234 PARAMETER Experiment Name: At_Siliques_P Parameter: Age (day) Value: 21
  misc_feature: MA Experiment 20000234 PARAMETER Experiment Name: At_Siliques_P Parameter: Organism Value: A. thaliana
  misc_feature: MA Experiment 20000234 PARAMETER Experiment Name: At_Siliques_P Parameter: Plant Line Value: WS
  misc_feature: MA Experiment 20000234 PARAMETER Experiment Name: At_Siliques_P Parameter: Tissue Value: Less Than 5mm Siliques vs. Whole Plant
  misc_feature: MA Experiment ID: 20000265 Result: Down-regulated in Transcription
  misc_feature: MA Experiment 20000265 PARAMETER Experiment Name: At_Open_Flower_P Parameter: Age (day) Value: 21
  misc_feature: MA Experiment 20000265 PARAMETER Experiment Name: At_Open_Flower_P Parameter: Plant Line Value: WS
  misc_feature: MA Experiment 20000265 PARAMETER Experiment Name: At_Open_Flower_P Parameter: Tissue Value: Closed Flower vs. Whole Plant
  misc_feature: MA Experiment ID: 20000286 Result: Down-regulated in Transcription
  misc_feature: MA Experiment 20000286 PARAMETER Experiment Name: At_Open_Flower_P Parameter: Age (day) Value: 21
  misc_feature: MA Experiment 20000286 PARAMETER Experiment Name: At_Open_Flower_P Parameter: Plant Line Value: WS
  misc_feature: MA Experiment 20000286 PARAMETER Experiment Name: At_Open_Flower_P Parameter: Tissue Value: Half Open vs. Whole Plant
  misc_feature: MA Experiment ID: 20000438 Result: Down-regulated in Transcription
  misc_feature: MA Experiment 20000438 PARAMETER Experiment Name: At_Shoots__P Parameter: Age (day) Value: 14
  misc_feature: MA Experiment 20000438 PARAMETER Experiment Name: At_Shoots__P Parameter: Tissue Value: Shoots vs. Whole Plant
  misc_feature: MA Experiment ID: 20000439 Result: Down-regulated in Transcription
  misc_feature: MA Experiment 20000439 PARAMETER Experiment Name: At_Roots__P Parameter: Age (day) Value: 14 vs. 21
  misc_feature: MA Experiment 20000439 PARAMETER Experiment Name: At_Roots__P Parameter: Organism Value: A. thaliana
  misc_feature: MA Experiment 20000439 PARAMETER Experiment Name: At_Roots__P Parameter: Tissue Value: Roots vs. Whole Plant
  misc_feature: MA Experiment ID: 20001451 Result: Down-regulated in Transcription
  misc_feature: MA Experiment 20001451 PARAMETER Experiment Name: At_Far-red-induction_P Parameter: Age (day) Value: 7
  misc_feature: MA Experiment 20001451 PARAMETER Experiment Name: At_Far-red-induction_P Parameter: Light Value: Far-red vs. White
  misc_feature: MA Experiment 20001451 PARAMETER Experiment Name: At_Far-red-induction_P Parameter: Organism Value: A. thaliana
  misc_feature: MA Experiment 20001451 PARAMETER Experiment Name: At_Far-red-induction_P Parameter: Plant Line Value: Columbia
  misc_feature: MA Experiment 20001451 PARAMETER Experiment Name: At_Far-red-induction_P Parameter: Timepoint (hr) Value: 24
  misc_feature: MA Experiment 20001451 PARAMETER Experiment Name: At_Far-red-induction_P Parameter: Tissue Value: Whole Plant
ggagaagaaaaagttgaaaaaattgtaaagtcagtctctccgactcttccttccttccgtgttcaccattgctacacgttctccacgaactttccgatgcccagtcgtcggagacatagctacaccgtcggatctcctgcaaccacatcttccaattacagtaacactactttcaccgatcgttccttcccgacaacccctgcccgtacatccaccgacacaaccacctccatcgctcgtcgcatctccggtatcttcatcaactgcttcactcctcccgattccgtttcctccaactacatcgacaattcaaagtcctcttccgacaataatatccgtagtagacgtagctcaacaggaagtagtagtgtacagaggagttatggaaatgcaaacgaaacagagcatacaagattcaccttcgatgaaatctacgacgcgaccaagaacttctctccgtcctttaggatcggacaaggcggttttggcactgtttacaaggtcaaactcagagatggcaaaacctttgctgtgaaacgtgccaaaaagagtatgcatgacgaccgtcaaggtgcagatgcagagtttatgagtgagattcagacattagctcaagttactcatttgagtttggttaaatactatggatttgttgttcataacgacgagaagattctcgttgtggagtatgtagccaatggaactcttagagatcacttggattgtaaggaaggaaagactctcgacatggcgactcggttagatatcgcaaccgatgtagctcatgccataacctatcttcacatgtatacacagccacctatcatccacagagatatcaaatcttcaaacattctcctcactgagaattacagagccaaggttgctgatttcgggtttgcaagattagctccagatactgattcaggagccacgcatgtgtcaacacaagtcaaaggaaccgctggttacttagacccagagtacttaacaacgtatcaactcacagagaaaagtgacgtctactcttttggtgtactgctcgtcgagcttctcacaggtcggcgtcccatcgagcttagcagaggacaaaaagaacgcatcaccattagatgggcgatcaagaagttcacgagtggagatacgatatcggtattggacccgaagctagaacagaattcagcgaacaacttagcattagagaaggtattggagatggcgtttcaatgtctagctcctcatagacgttcgagaccaagcatgaaaaaatgcagtgagattttgtggggaattcgtaaagattacagagagttgctcaacacaagtctttgatgatattattctctacgcttatataatatggttttgaatacacaattatatattatttgtttgaatattaatttgtcatacacgatgcattcttgtacgagaattgttgatttgtaattgattttgaaatttgtagtattatattaacg

SEQ ID NO: 82399 - protein, 443 aa, Arabidopsis thaliana
  peptide (1)..(443): Ceres Seq. ID no. 12665476
  misc_feature (151)..(357): Pfam Name: Protein kinase domain Pfam Description: Protein kinase domain
  misc_feature (33)..(443): Homolog of NCBI NO: 22328175 NR Description: coded for by A. thaliana cDNA R30513; protein id: supported by cDNA: gi_17381215 [Arabidopsis thaliana]
  misc_feature (126)..(443): Homolog of NCBI NO: 7434312 NR Description: receptor-like protein kinase 5 homolog - Arabidopsis thaliana >gi|2252830|gb|AAB62829.1| weak similarity receptor protein kinase [Arabidopsis thaliana]
  misc_feature (90)..(438): Homolog of NCBI NO: 27261468 NR Description: Hypothetical protein [Oryza sativa (japonica
  misc_feature (143)..(436): Homolog of NCBI NO: 34908354 NR Description: P0529H11.30 [Oryza sativa (japonica
  misc_feature (139)..(439): Homolog of NCBI NO: 9759225 NR Description: contains similarity to protein
  misc_feature (143)..(439): Homolog of NCBI NO: 15237782 NR Description: receptor-like protein kinase precursor - like;
  misc_feature (132)..(435): Homolog of NCBI NO: 38345153 NR Description: OSJNBa0014K14.7 [Oryza sativa (japonica
  misc_feature (140)..(435): Homolog of NCBI NO: 18397027 NR Description: putative protein kinase; protein id: At2g11520.1, by cDNA: gi_13605880, supported by cDNA: gi_20334779 [Arabidopsis >gi|13605881|gb|AAK32926.1|AF367339_1 At2g11520/F14P14.15
  misc_feature (140)..(435): Homolog of NCBI NO: 25287604 NR Description: probable protein kinase [imported] - Arabidopsis
  misc_feature (71)..(435): Homolog of NCBI NO: 34897358 NR Description: putative receptor kinase [Oryza sativa]
GEEKVEKIVKSVSPTLPSFRVHHCYTFSTNFPMPSRRRHSYTVGSPATTSSNYSNTTFTDRSFPTTPARTSTDTTTSIARRISGIFINCFTPPDSVSSNYIDNSKSSSDNNIRSRRSSTGSSSVQRSYGNANETEHTRFTFDEIYDATKNFSPSFRIGQGGFGTVYKVKLRDGKTFAVKRAKKSMHDDRQGADAEFMSEIQTLAQVTHLSLVKYYGFVVHNDEKILVVEYVANGTLRDHLDCKEGKTLDMATRLDIATDVAHAITYLHMYTQPPIIHRDIKSSNILLTENYRAKVADFGFARLAPDTDSGATHVSTQVKGTAGYLDPEYLTTYQLTEKSDVYSFGVLLVELLTGRRPIELSRGQKERITIRWAIKKFTSGDTISVLDPKLEQNSANNLALEKVLEMAFQCLAPHRRSRPSMKKCSEILWGIRKDYRELLNTSL

SEQ ID NO: 82400 - protein, 411 aa, Arabidopsis thaliana
  peptide (1)..(411): Ceres Seq. ID no. 12665477
  misc_feature (119)..(325): Pfam Name: Protein kinase domain Pfam Description: Protein kinase domain
  misc_feature (1)..(411): Homolog of NCBI NO: 22328175 NR Description: coded for by A. thaliana cDNA R30513; protein id: supported by cDNA: gi_17381215 [Arabidopsis thaliana]
  misc_feature (94)..(411): Homolog of NCBI NO: 7434312 NR Description: receptor-like protein kinase 5 homolog - Arabidopsis thaliana >gi|2252830|gb|AAB62829.1| weak similarity receptor protein kinase [Arabidopsis thaliana]
  misc_feature (58)..(406): Homolog of NCBI NO: 27261468 NR Description: Hypothetical protein [Oryza sativa (japonica
  misc_feature (111)..(404): Homolog of NCBI NO: 34908354 NR Description: P0529H11.30 [Oryza sativa (japonica
  misc_feature (107)..(407): Homolog of NCBI NO: 9759225 NR Description: contains similarity to protein
  misc_feature (111)..(407): Homolog of NCBI NO: 15237782 NR Description: receptor-like protein kinase precursor - like;
  misc_feature (100)..(403): Homolog of NCBI NO: 38345153 NR Description: OSJNBa0014K14.7 [Oryza sativa (japonica
  misc_feature (108)..(403): Homolog of NCBI NO: 18397027 NR Description: putative protein kinase; protein id: At2g11520.1, by cDNA: gi_13605880, supported by cDNA: gi_20334779 [Arabidopsis >gi|13605881|gb|AAK32926.1|AF367339_1 At2g11520/F14P14.15
  misc_feature (108)..(403): Homolog of NCBI NO: 25287604 NR Description: probable protein kinase [imported] - Arabidopsis
  misc_feature (39)..(403): Homolog of NCBI NO: 34897358 NR Description: putative receptor kinase [Oryza sativa]
MPSRRRHSYTVGSPATTSSNYSNTTFTDRSFPTTPARTSTDTTTSIARRISGIFINCFTPPDSVSSNYIDNSKSSSDNNIRSRRSSTGSSSVQRSYGNANETEHTRFTFDEIYDATKNFSPSFRIGQGGFGTVYKVKLRDGKTFAVKRAKKSMHDDRQGADAEFMSEIQTLAQVTHLSLVKYYGFVVHNDEKILVVEYVANGTLRDHLDCKEGKTLDMATRLDIATDVAHAITYLHMYTQPPIIHRDIKSSNILLTENYRAKVADFGFARLAPDTDSGATHVSTQVKGTAGYLDPEYLTTYQLTEKSDVYSFGVLLVELLTGRRPIELSRGQKERITIRWAIKKFTSGDTISVLDPKLEQNSANNLALEKVLEMAFQCLAPHRRSRPSMKKCSEILWGIRKDYRELLNTSL

SEQ ID NO: 82401 - protein, 259 aa, Arabidopsis thaliana
  peptide (1)..(259): Ceres Seq. ID no. 12665478
  misc_feature (1)..(173): Pfam Name: Protein kinase domain Pfam Description: Protein kinase domain
  misc_feature (1)..(259): Homolog of NCBI NO: 22328175 NR Description: coded for by A. thaliana cDNA R30513; protein id: supported by cDNA: gi_17381215 [Arabidopsis thaliana]
  misc_feature (1)..(259): Homolog of NCBI NO: 7434312 NR Description: receptor-like protein kinase 5 homolog - Arabidopsis thaliana >gi|2252830|gb|AAB62829.1| weak similarity receptor protein kinase [Arabidopsis thaliana]
  misc_feature (1)..(254): Homolog of NCBI NO: 27261468 NR Description: Hypothetical protein [Oryza sativa (japonica
  misc_feature (1)..(252): Homolog of NCBI NO: 34908354 NR Description: P0529H11.30 [Oryza sativa (japonica
  misc_feature (1)..(255): Homolog of NCBI NO: 9759225 NR Description: contains similarity to protein
  misc_feature (1)..(255): Homolog of NCBI NO: 15237782 NR Description: receptor-like protein kinase precursor - like;
  misc_feature (1)..(251): Homolog of NCBI NO: 38345153 NR Description: OSJNBa0014K14.7 [Oryza sativa (japonica
  misc_feature (1)..(251): Homolog of NCBI NO: 18397027 NR Description: putative protein kinase; protein id: At2g11520.1, by cDNA: gi_13605880, supported by cDNA: gi_20334779 [Arabidopsis >gi|13605881|gb|AAK32926.1|AF367339_1 At2g11520/F14P14.15
  misc_feature (1)..(251): Homolog of NCBI NO: 25287604 NR Description: probable protein kinase [imported] - Arabidopsis
  misc_feature (1)..(251): Homolog of NCBI NO: 34897358 NR Description: putative receptor kinase [Oryza sativa]
MHDDRQGADAEFMSEIQTLAQVTHLSLVKYYGFVVHNDEKILVVEYVANGTLRDHLDCKEGKTLDMATRLDIATDVAHAITYLHMYTQPPIIHRDIKSSNILLTENYRAKVADFGFARLAPDTDSGATHVSTQVKGTAGYLDPEYLTTYQLTEKSDVYSFGVLLVELLTGRRPIELSRGQKERITIRWAIKKFTSGDTISVLDPKLEQNSANNLALEKVLEMAFQCLAPHRRSRPSMKKCSEILWGIRKDYRELLNTSL

SEQ ID NO: 82402 - DNA, 1422 bp, Arabidopsis thaliana
  misc_feature (1)..(1422): Ceres Seq. ID no. 12665495
  misc_feature: MA Experiment ID: 20000328 Result: Down-regulated in Transcription
  misc_feature: MA Experiment 20000328 PARAMETER Experiment Name: At_42deg_Heat_Sub_P Parameter: Age (day) Value: 14
  misc_feature: MA Experiment 20000328 PARAMETER Experiment Name: At_42deg_Heat_Sub_P Parameter: Organism Value: A. thaliana
  misc_feature: MA Experiment 20000328 PARAMETER Experiment Name: At_42deg_Heat_Sub_P Parameter: Plant Line Value: WS
  misc_feature: MA Experiment 20000328 PARAMETER Experiment Name: At_42deg_Heat_Sub_P Parameter: Temperature (deg C) Value: 42 vs. 22
  misc_feature: MA Experiment 20000328 PARAMETER Experiment Name: At_42deg_Heat_Sub_P Parameter: Timepoint (hr) Value: 6
  misc_feature: MA Experiment 20000328 PARAMETER Experiment Name: At_42deg_Heat_Sub_P Parameter: Tissue Value: Aerial
  misc_feature: MA Experiment ID: 20000355 Result: Up-regulated in Transcription
  misc_feature: MA Experiment 20000355 PARAMETER Experiment Name: At_Siliques_Sub_P Parameter: Age (day) Value: 21
  misc_feature: MA Experiment 20000355 PARAMETER Experiment Name: At_Siliques_Sub_P Parameter: Organism Value: A. thaliana
  misc_feature: MA Experiment 20000355 PARAMETER Experiment Name: At_Siliques_Sub_P Parameter: Plant Line Value: WS
  misc_feature: MA Experiment 20000355 PARAMETER Experiment Name: At_Siliques_Sub_P Parameter: Tissue Value: Less Than 5mm Siliques vs. Whole Plant
  misc_feature: MA Experiment ID: 20000440 Result: Up-regulated in Transcription
  misc_feature: MA Experiment 20000440 PARAMETER Experiment Name: At_Closed-Flower__Sub_P Parameter: Tissue Value: Closed Flower vs. Whole Plant
atggagaatttatcgaatccagatgaaaacgacgatcatcaatcacctagatccattgaccaaaatgatcaatcagcagtagaaactccggtttactcgacgatgagcatagattcctttgtttaccctcgaacttgttcagagaccacttcagggttttcagaccagatagatgaaaccaacagcttctgtagtgaagcttctccttgtaactggcctgtccttactgaatctaagagctccaaatgtctctctggtttagagatgcaatcaaatgaatgtcttgtagtccaagaaatttctgaaccagaacttgagacaatgaaggaaagattcgctaagcttctacttggagaagatatgtcagggagtggtaaaggagtttgcactgcagtgactatctcaaacgcaattaccaatctttatgctacagtgtttggacagaatctgaggttagagccgttagaaacagagaagagagcattgtggaagagagaaatgaattgtcttttatctgtatgcgattacattgtcgaattcatccctagatgtcagaatctaagcaatggagctactgttgaggtgatggagagtagaccaagagcagatatctatatcaacttgcctgcattgagaaagctagattcaatgcttatggaagcattggatagttttcagaacacagagttttggtatgcagaagaaggaagtttatcgatgaaatcagctcgttcttcgactggatcattcaggaaagttatagtacaaaggaaagaagagaaatggtggttaccagttcctctagtaccatcagaaggtttgtcagataaagccagaaaacaactcaagaacaagagagaaagtaccaatcagattcataaagctgcaatggctatcaacagtagcattctcagtgaaatggagattccagactcttacatgacaactcttccaaagtgtggtaaaagcagtgttggagattcaatttaccgttacatgagtggttctggtcggtttttcccagagcaactcttagattgtctgaacatatcttccgaacatgaagctgttcagttagcagatagagtagaagcttcgatgtacacatggagacgcaaatcttgtcttagtaactccaagaactcatggaacatggtgaaagatcttatgtcaactacagagagaacagacaagaactatgttatggctgagagagctgagactctcctcttctgtttgaaacagcgttatccagaattgtctcagacatcattagatatatgcaagattcagtacaataaggatgttggaaaagctgtgttggagagctactcaagagtacttgaaggtttagcttttaacatagttgcttggattgatgatgttctctatgtagacaaaaccatgagaggtagtgaataa

SEQ ID NO: 82403 - protein, 473 aa, Arabidopsis thaliana
  peptide (1)..(473): Ceres Seq. ID no. 12665496
  misc_feature (13)..(219): Pfam Name: Domain of unknown function (DUF315) Pfam Description: Domain of unknown function (DUF315)
  misc_feature (1)..(473): Homolog of NCBI NO: 15236138 NR Description: putative protein; protein id: At4g00460.1
  misc_feature (1)..(473): Homolog of NCBI NO: 15223455 NR Description: hypothetical protein; protein id: At1g01700.1
  misc_feature (206)..(473): Homolog of NCBI NO: 25349309 NR Description: hypothetical protein T1N6.8 - Arabidopsis >gi|8671837|gb|AAF78400.1|AC009273_6 Contains strong similarity an unknown protein CAB81591 gi|7263554 from Arabidopsis thaliana
  misc_feature (1)..(219): Homolog of NCBI NO: 25349309 NR Description: hypothetical protein T1N6.8 - Arabidopsis >gi|8671837|gb|AAF78400.1|AC009273_6 Contains strong similarity an unknown protein CAB81591 gi|7263554 from Arabidopsis thaliana
  misc_feature (14)..(473): Homolog of NCBI NO: 30690159 NR Description: expressed protein [Arabidopsis thaliana]
  misc_feature (143)..(473): Homolog of NCBI NO: 7486457 NR Description: hypothetical protein At2g45890 [imported] - thaliana >gi|3386605|gb|AAC28535.1| hypothetical protein
  misc_feature (14)..(142): Homolog of NCBI NO: 7486457 NR Description: hypothetical protein At2g45890 [imported] - thaliana >gi|3386605|gb|AAC28535.1| hypothetical protein
  misc_feature (217)..(473): Homolog of NCBI NO: 7485257 NR Description: hypothetical protein A_IG005I10.1 - Arabidopsis >gi|2252824|gb|AAB62823.1| A_IG005I10.1 gene product [Arabidopsis >gi|6049866|gb|AAF02781.1|AF195115_1 F5I10.1 gene product
  misc_feature (33)..(470): Homolog of NCBI NO: 37536670 NR Description: hypothetical protein [Oryza sativa (japonica group)] >gi|10140653|gb|AAG13489.1| hypothetical protein [Oryza
  misc_feature (47)..(473): Homolog of NCBI NO: 34908302 NR Description: P0005H10.23 [Oryza sativa (japonica
MENLSNPDENDDHQSPRSIDQNDQSAVETPVYSTMSIDSFVYPRTCSETTSGFSDQIDETNSFCSEASPCNWPVLTESKSSKCLSGLEMQSNECLVVQEISEPELETMKERFAKLLLGEDMSGSGKGVCTAVTISNAITNLYATVFGQNLRLEPLETEKRALWKREMNCLLSVCDYIVEFIPRCQNLSNGATVEVMESRPRADIYINLPALRKLDSMLMEALDSFQNTEFWYAEEGSLSMKSARSSTGSFRKVIVQRKEEKWWLPVPLVPSEGLSDKARKQLKNKRESTNQIHKAAMAINSSILSEMEIPDSYMTTLPKCGKSSVGDSIYRYMSGSGRFFPEQLLDCLNISSEHEAVQLADRVEASMYTWRRKSCLSNSKNSWNMVKDLMSTTERTDKNYVMAERAETLLFCLKQRYPELSQTSLDICKIQYNKDVGKAVLESYSRVLEGLAFNIVAWIDDVLYVDKTMRGSE

SEQ ID NO: 82404 - protein, 439 aa, Arabidopsis thaliana
  peptide (1)..(439): Ceres Seq. ID no. 12665497
  misc_feature (1)..(185): Pfam Name: Domain of unknown function (DUF315) Pfam Description: Domain of unknown function (DUF315)
  misc_feature (1)..(439): Homolog of NCBI NO: 15236138 NR Description: putative protein; protein id: At4g00460.1
  misc_feature (1)..(439): Homolog of NCBI NO: 15223455 NR Description: hypothetical protein; protein id: At1g01700.1
  misc_feature (172)..(439): Homolog of NCBI NO: 25349309 NR Description: hypothetical protein T1N6.8 - Arabidopsis >gi|8671837|gb|AAF78400.1|AC009273_6 Contains strong similarity an unknown protein CAB81591 gi|7263554 from Arabidopsis thaliana
  misc_feature (1)..(185): Homolog of NCBI NO: 25349309 NR Description: hypothetical protein T1N6.8 - Arabidopsis >gi|8671837|gb|AAF78400.1|AC009273_6 Contains strong similarity an unknown protein CAB81591 gi|7263554 from Arabidopsis thaliana
  misc_feature (1)..(439): Homolog of NCBI NO: 30690159 NR Description: expressed protein [Arabidopsis thaliana]
  misc_feature (109)..(439): Homolog of NCBI NO: 7486457 NR Description: hypothetical protein At2g45890 [imported] - thaliana >gi|3386605|gb|AAC28535.1| hypothetical protein
  misc_feature (1)..(108): Homolog of NCBI NO: 7486457 NR Description: hypothetical protein At2g45890 [imported] - thaliana >gi|3386605|gb|AAC28535.1| hypothetical protein
  misc_feature (183)..(439): Homolog of NCBI NO: 7485257 NR Description: hypothetical protein A_IG005I10.1 - Arabidopsis >gi|2252824|gb|AAB62823.1| A_IG005I10.1 gene product [Arabidopsis >gi|6049866|gb|AAF02781.1|AF195115_1 F5I10.1 gene product
  misc_feature (1)..(436): Homolog of NCBI NO: 37536670 NR Description: hypothetical protein [Oryza sativa (japonica group)] >gi|10140653|gb|AAG13489.1| hypothetical protein [Oryza
  misc_feature (13)..(439): Homolog of NCBI NO: 34908302 NR Description: P0005H10.23 [Oryza sativa (japonica
MSIDSFVYPRTCSETTSGFSDQIDETNSFCSEASPCNWPVLTESKSSKCLSGLEMQSNECLVVQEISEPELETMKERFAKLLLGEDMSGSGKGVCTAVTISNAITNLYATVFGQNLRLEPLETEKRALWKREMNCLLSVCDYIVEFIPRCQNLSNGATVEVMESRPRADIYINLPALRKLDSMLMEALDSFQNTEFWYAEEGSLSMKSARSSTGSFRKVIVQRKEEKWWLPVPLVPSEGLSDKARKQLKNKRESTNQIHKAAMAINSSILSEMEIPDSYMTTLPKCGKSSVGDSIYRYMSGSGRFFPEQLLDCLNISSEHEAVQLADRVEASMYTWRRKSCLSNSKNSWNMVKDLMSTTERTDKNYVMAERAETLLFCLKQRYPELSQTSLDICKIQYNKDVGKAVLESYSRVLEGLAFNIVAWIDDVLYVDKTMRGSE

SEQ ID NO: 82405 - protein, 385 aa, Arabidopsis thaliana
  peptide (1)..(385): Ceres Seq. ID no. 12665498
  misc_feature (1)..(131): Pfam Name: Domain of unknown function (DUF315) Pfam Description: Domain of unknown function (DUF315)
  misc_feature (1)..(385): Homolog of NCBI NO: 15236138 NR Description: putative protein; protein id: At4g00460.1
  misc_feature (1)..(385): Homolog of NCBI NO: 15223455 NR Description: hypothetical protein; protein id: At1g01700.1
  misc_feature (118)..(385): Homolog of NCBI NO: 25349309 NR Description: hypothetical protein T1N6.8 - Arabidopsis >gi|8671837|gb|AAF78400.1|AC009273_6 Contains strong similarity an unknown protein CAB81591 gi|7263554 from Arabidopsis thaliana
  misc_feature (1)..(131): Homolog of NCBI NO: 25349309 NR Description: hypothetical protein T1N6.8 - Arabidopsis >gi|8671837|gb|AAF78400.1|AC009273_6 Contains strong similarity an unknown protein CAB81591 gi|7263554 from Arabidopsis thaliana
  misc_feature (1)..(385): Homolog of NCBI NO: 30690159 NR Description: expressed protein [Arabidopsis thaliana]
  misc_feature (55)..(385): Homolog of NCBI NO: 7486457 NR Description: hypothetical protein At2g45890 [imported] - thaliana >gi|3386605|gb|AAC28535.1| hypothetical protein
  misc_feature (1)..(54): Homolog of NCBI NO: 7486457 NR Description: hypothetical protein At2g45890 [imported] - thaliana >gi|3386605|gb|AAC28535.1| hypothetical protein
  misc_feature (129)..(385): Homolog of NCBI NO: 7485257 NR Description: hypothetical protein A_IG005I10.1 - Arabidopsis >gi|2252824|gb|AAB62823.1| A_IG005I10.1 gene product [Arabidopsis >gi|6049866|gb|AAF02781.1|AF195115_1 F5I10.1 gene product
  misc_feature (1)..(382): Homolog of NCBI NO: 37536670 NR Description: hypothetical protein [Oryza sativa (japonica group)] >gi|10140653|gb|AAG13489.1| hypothetical protein [Oryza
  misc_feature (1)..(385): Homolog of NCBI NO: 34908302 NR Description: P0005H10.23 [Oryza sativa (japonica
MQSNECLVVQEISEPELETMKERFAKLLLGEDMSGSGKGVCTAVTISNAITNLYATVFGQNLRLEPLETEKRALWKREMNCLLSVCDYIVEFIPRCQNLSNGATVEVMESRPRADIYINLPALRKLDSMLMEALDSFQNTEFWYAEEGSLSMKSARSSTGSFRKVIVQRKEEKWWLPVPLVPSEGLSDKARKQLKNKRESTNQIHKAAMAINSSILSEMEIPDSYMTTLPKCGKSSVGDSIYRYMSGSGRFFPEQLLDCLNISSEHEAVQLADRVEASMYTWRRKSCLSNSKNSWNMVKDLMSTTERTDKNYVMAERAETLLFCLKQRYPELSQTSLDICKIQYNKDVGKAVLESYSRVLEGLAFNIVAWIDDVLYVDKTMRGSE

SEQ ID NO: 82406 - DNA, 702 bp, Arabidopsis thaliana
  misc_feature (1)..(702): Ceres Seq. ID no. 12665522
  misc_feature: MA Experiment ID: 20000307 Result: Down-regulated in Transcription
  misc_feature: MA Experiment 20000307 PARAMETER Experiment Name: At_Germinating_Seeds_Sub_P Parameter: Age (hr) Value: 24 vs. 0
  misc_feature: MA Experiment 20000307 PARAMETER Experiment Name: At_Germinating_Seeds_Sub_P Parameter: Organism Value: A. thaliana
  misc_feature: MA Experiment 20000307 PARAMETER Experiment Name: At_Germinating_Seeds_Sub_P Parameter: Plant Line Value: WS
  misc_feature: MA Experiment 20000307 PARAMETER Experiment Name: At_Germinating_Seeds_Sub_P Parameter: Tissue Value: Germinating Seeds
  misc_feature: MA Experiment ID: 20000355 Result: Up-regulated in Transcription
  misc_feature: MA Experiment 20000355 PARAMETER Experiment Name: At_Siliques_Sub_P Parameter: Age (day) Value: 21
  misc_feature: MA Experiment 20000355 PARAMETER Experiment Name: At_Siliques_Sub_P Parameter: Organism Value: A. thaliana
  misc_feature: MA Experiment 20000355 PARAMETER Experiment Name: At_Siliques_Sub_P Parameter: Plant Line Value: WS
  misc_feature: MA Experiment 20000355 PARAMETER Experiment Name: At_Siliques_Sub_P Parameter: Tissue Value: Less Than 5mm Siliques vs. Whole Plant
  misc_feature: MA Experiment ID: 20000440 Result: Up-regulated in Transcription
  misc_feature: MA Experiment 20000440 PARAMETER Experiment Name: At_Closed-Flower__Sub_P Parameter: Tissue Value: Closed Flower vs. Whole Plant
atgtttgtggatgcaatgcaagatttagctctagtcaatagtgccttgtctaagagaaacagaaagaagattttggtttcgcataaaaactccaatattgacatctctggagaaactttacaatgcctaaggccgaatcaatggcttaacgatgatgtcactaatctctatctggagttgctgaaagagagacaaactagagatccgcaaaagtacttcaagtgtcatttcttcaataccttcttttacgttaagctcgtaagcggctccggttacaattacaaagctgtcagtagatggactaccaagagaaagcttggatatgatcttattgactgtgacataatatttgttccaatccacatagatatacattggaccctgggagtgattaacaatagggaacgcaagttcgtgtatcttgattcattatttactggagcaaagtacttggtggatgaagtaaaacaaaagagtcaaaagaatattgacgttagttcatggggaatggaatacgttgaagaacgtcctcagcaacagaacgggtacgactgtgggatgtttatgcttaaatacattgatttttacagtagaggattgagtctacaatttagccaggtaataagagatgtcatcaagaaagacatgccgtacttcaggttaagaacagctaaggagatactgagactgcgagctgactaa

SEQ ID NO: 82407 - protein, 233 aa, Arabidopsis thaliana
  peptide (1)..(233): Ceres Seq. ID no. 12665523
  misc_feature (1)..(233): Homolog of NCBI NO: 15236895 NR Description: hypothetical protein; protein id: At4g00690.1
  misc_feature (2)..(233): Homolog of NCBI NO: 18414542 NR Description: Expressed protein; protein id: At4g15880.1, by cDNA: gi_14423393, supported by cDNA: gi_20148438 [Arabidopsis >gi|14423394|gb|AAK62379.1|AF386934_1 Unknown protein
  misc_feature (2)..(233): Homolog of NCBI NO: 34787206 NR Description: SUMO protease [Arabidopsis thaliana]
  misc_feature (12)..(233): Homolog of NCBI NO: 6728998 NR Description: hypothetical protein [Arabidopsis thaliana]
  misc_feature (12)..(233): Homolog of NCBI NO: 30680058 NR Description: Ulp1 protease family [Arabidopsis thaliana]
  misc_feature (2)..(233): Homolog of NCBI NO: 34915036 NR Description: P0458A05.23 [Oryza sativa (japonica
  misc_feature (12)..(233): Homolog of NCBI NO: 26450144 NR Description: unknown protein [Arabidopsis thaliana]
  misc_feature (2)..(202): Homolog of NCBI NO: 25371728 NR Description: hypothetical protein AT4g15880 [imported] - thaliana >gi|5281021|emb|CAB45994.1| hypothetical protein thaliana] >gi|7268336|emb|CAB78630.1| hypothetical protein
  misc_feature (2)..(178): Homolog of NCBI NO: 2326343 NR Description: G14587-5 [Arabidopsis thaliana]
  misc_feature (2)..(178): Homolog of NCBI NO: 7485126 NR Description: hypothetical protein - Arabidopsis thaliana
MFVDAMQDLALVNSALSKRNRKKILVSHKNSNIDISGETLQCLRPNQWLNDDVTNLYLELLKERQTRDPQKYFKCHFFNTFFYVKLVSGSGYNYKAVSRWTTKRKLGYDLIDCDIIFVPIHIDIHWTLGVINNRERKFVYLDSLFTGAKYLVDEVKQKSQKNIDVSSWGMEYVEERPQQQNGYDCGMFMLKYIDFYSRGLSLQFSQVIRDVIKKDMPYFRLRTAKEILRLRAD

SEQ ID NO: 82408 - protein, 228 aa, Arabidopsis thaliana
  peptide (1)..(228): Ceres Seq. ID no. 12665524
  misc_feature (1)..(228): Homolog of NCBI NO: 15236895 NR Description: hypothetical protein; protein id: At4g00690.1
  misc_feature (1)..(228): Homolog of NCBI NO: 18414542 NR Description: Expressed protein; protein id: At4g15880.1, by cDNA: gi_14423393, supported by cDNA: gi_20148438 [Arabidopsis >gi|14423394|gb|AAK62379.1|AF386934_1 Unknown protein
  misc_feature (1)..(228): Homolog of NCBI NO: 34787206 NR Description: SUMO protease [Arabidopsis thaliana]
  misc_feature (7)..(228): Homolog of NCBI NO: 6728998 NR Description: hypothetical protein [Arabidopsis thaliana]
  misc_feature (7)..(228): Homolog of NCBI NO: 30680058 NR Description: Ulp1 protease family [Arabidopsis thaliana]
  misc_feature (1)..(228): Homolog of NCBI NO: 34915036 NR Description: P0458A05.23 [Oryza sativa (japonica
  misc_feature (7)..(228): Homolog of NCBI NO: 26450144 NR Description: unknown protein [Arabidopsis thaliana]
  misc_feature (1)..(197): Homolog of NCBI NO: 25371728 NR Description: hypothetical protein AT4g15880 [imported] - thaliana >gi|5281021|emb|CAB45994.1| hypothetical protein thaliana] >gi|7268336|emb|CAB78630.1| hypothetical protein
  misc_feature (1)..(173): Homolog of NCBI NO: 2326343 NR Description: G14587-5 [Arabidopsis thaliana]
  misc_feature (1)..(173): Homolog of NCBI NO: 7485126 NR Description: hypothetical protein - Arabidopsis thaliana
MQDLALVNSALSKRNRKKILVSHKNSNIDISGETLQCLRPNQWLNDDVTNLYLELLKERQTRDPQKYFKCHFFNTFFYVKLVSGSGYNYKAVSRWTTKRKLGYDLIDCDIIFVPIHIDIHWTLGVINNRERKFVYLDSLFTGAKYLVDEVKQKSQKNIDVSSWGMEYVEERPQQQNGYDCGMFMLKYIDFYSRGLSLQFSQVIRDVIKKDMPYFRLRTAKEILRLRAD

SEQ ID NO: 82409 - DNA, 792 bp, Arabidopsis thaliana
  misc_feature (1)..(792): Ceres Seq. ID no. 12665561
  misc_feature: MA Experiment ID: 20000355 Result: Up-regulated in Transcription
  misc_feature: MA Experiment 20000355 PARAMETER Experiment Name: At_Siliques_Sub_P Parameter: Age (day) Value: 21
  misc_feature: MA Experiment 20000355 PARAMETER Experiment Name: At_Siliques_Sub_P Parameter: Organism Value: A. thaliana
  misc_feature: MA Experiment 20000355 PARAMETER Experiment Name: At_Siliques_Sub_P Parameter: Plant Line Value: WS
  misc_feature: MA Experiment 20000355 PARAMETER Experiment Name: At_Siliques_Sub_P Parameter: Tissue Value: Less Than 5mm Siliques vs. Whole Plant
atgggtgtactcacgaacaaagtcgagagagacgagcttaaacctggtgatcacatctacacttatcgagccgtcttcgcttattctcaccacggcgtatttgttggtggttgcaaagtggttcatttcaaacctgagcacagcttgatatctcctacactcgcttcttcttcttcttcttcgtcttcttcagtttcagaggttaatgattcttcagaagctccttgtcctacatatcctgactgtggatataaacgaccaaagagtggagtagtactttcttgcctagactgctttctcaagaaaggttctctctaccgttttgattatggagtcagctcatcgattttcctcaccagattccgcggtggcacgtgcacaactgctccatctgacccgcttcaaacagtcatccatagagcaatgcaccttctccaaaacggatttggtaactacaatgtcttccagaataactgcgaagattttgctctctactgcaagacaggattgctcattctggataagaacggggttgggagaagtggtcaagccagttctatcataggtgctcctctagctgcactactctcgtcacctctcacattgttgattccaaatcctgttggtgtagcaactgtcactgctgggatgtattgtatgagtaggtatgctactgatatcggtgttagaaacgatgtgatcaaggttcctgttgaggatttagctctgaaccttggccttaaacctctcaagagaaaaaggaaagcttgtgacaccagcatttccaggtga

SEQ ID NO: 82410 - protein, 263 aa, Arabidopsis thaliana
  peptide (1)..(263): Ceres Seq. ID no. 12665562
  misc_feature (106)..(187): Pfam Name: NC domain Pfam Description: NC domain
  misc_feature (1)..(263): Homolog of NCBI NO: 22328196 NR Description: unknown protein; protein id: At4g00905.1
  misc_feature (1)..(252): Homolog of NCBI NO: 18378812 NR Description: Expressed protein; protein id: At1g01225.1,
  misc_feature (1)..(252): Homolog of NCBI NO: 21592684 NR Description: unknown [Arabidopsis thaliana]
  misc_feature (1)..(245): Homolog of NCBI NO: 18415178 NR Description: putative protein; protein id: At5g06370.1, by cDNA: 117588., supported by cDNA: gi_14190474, supported by gi_15809733 [Arabidopsis thaliana]
  misc_feature (1)..(245): Homolog of NCBI NO: 18396282 NR Description: expressed protein; protein id: At3g02700.1, by cDNA: 6694. [Arabidopsis thaliana] >gi|6957733|gb|AAF32477.1| protein [Arabidopsis thaliana] >gi|26449424|dbj|BAC41839.1|
  misc_feature (1)..(245): Homolog of NCBI NO: 21594170 NR Description: unknown [Arabidopsis thaliana]
  misc_feature (1)..(190): Homolog of NCBI NO: 15237330 NR Description: putative protein; protein id: At5g16360.1 thaliana] >gi|9759118|dbj|BAB09603.1| to unknown protein [Arabidopsis thaliana]
  misc_feature (170)..(248): Homolog of NCBI NO: 15237330 NR Description: putative protein; protein id: At5g16360.1 thaliana] >gi|9759118|dbj|BAB09603.1| to unknown protein [Arabidopsis thaliana]
  misc_feature (32)..(245): Homolog of NCBI NO: 9758417 NR Description: gb|AAF32477.1~gene_id:MHF15.11~similar to unknown
  misc_feature (1)..(241): Homolog of NCBI NO: 15237327 NR Description: putative protein; protein id: At5g16330.1 thaliana] >gi|9759115|dbj|BAB09600.1|
MGVLTNKVERDELKPGDHIYTYRAVFAYSHHGVFVGGCKVVHFKPEHSLISPTLASSSSSSSSSVSEVNDSSEAPCPTYPDCGYKRPKSGVVLSCLDCFLKKGSLYRFDYGVSSSIFLTRFRGGTCTTAPSDPLQTVIHRAMHLLQNGFGNYNVFQNNCEDFALYCKTGLLILDKNGVGRSGQASSIIGAPLAALLSSPLTLLIPNPVGVATVTAGMYCMSRYATDIGVRNDVIKVPVEDLALNLGLKPLKRKRKACDTSISR

SEQ ID NO: 82411 - DNA, 2091 bp, Arabidopsis thaliana
  misc_feature (1)..(2091): Ceres Seq. ID no. 12665579
  misc_feature: MA Experiment ID: 20000314 Result: Down-regulated in Transcription
  misc_feature: MA Experiment 20000314 PARAMETER Experiment Name: At_14day_Shoots-Roots_Sub_P Parameter: Age (day) Value: 14
  misc_feature: MA Experiment 20000314 PARAMETER Experiment Name: At_14day_Shoots-Roots_Sub_P Parameter: Organism Value: A. thaliana
  misc_feature: MA Experiment 20000314 PARAMETER Experiment Name: At_14day_Shoots-Roots_Sub_P Parameter: Plant Line Value: WS
  misc_feature: MA Experiment 20000314 PARAMETER Experiment Name: At_14day_Shoots-Roots_Sub_P Parameter: Tissue Value: Roots vs. Whole Plant
  misc_feature: MA Experiment ID: 20000315 Result: Down-regulated in Transcription
  misc_feature: MA Experiment 20000315 PARAMETER Experiment Name: At_14day_Shoots-Roots_Sub_P Parameter: Age (day) Value: 14
  misc_feature: MA Experiment 20000315 PARAMETER Experiment Name: At_14day_Shoots-Roots_Sub_P Parameter: Organism Value: A. thaliana
  misc_feature: MA Experiment 20000315 PARAMETER Experiment Name: At_14day_Shoots-Roots_Sub_P Parameter: Plant Line Value: WS
  misc_feature: MA Experiment 20000315 PARAMETER Experiment Name: At_14day_Shoots-Roots_Sub_P Parameter: Tissue Value: Shoots vs. Whole Plant
  misc_feature: MA Experiment ID: 20000347 Result: Up-regulated in Transcription
  misc_feature: MA Experiment 20000347 PARAMETER Experiment Name: At_2mM_SA_Sub_P Parameter: Age (day) Value: 14
  misc_feature: MA Experiment 20000347 PARAMETER Experiment Name: At_2mM_SA_Sub_P Parameter: Organism Value: A. thaliana
  misc_feature: MA Experiment 20000347 PARAMETER Experiment Name: At_2mM_SA_Sub_P Parameter: Plant Line Value: WS
  misc_feature: MA Experiment 20000347 PARAMETER Experiment Name: At_2mM_SA_Sub_P Parameter: Timepoint (hr) Value: 6
  misc_feature: MA Experiment 20000347 PARAMETER Experiment Name: At_2mM_SA_Sub_P Parameter: Tissue Value: Aerial
  misc_feature: MA Experiment 20000347 PARAMETER Experiment Name: At_2mM_SA_Sub_P Parameter: Treatment Value: 2mM SA vs. No Treatment
  misc_feature: MA Experiment ID: 20000355 Result: Down-regulated in Transcription
  misc_feature: MA Experiment 20000355 PARAMETER Experiment Name: At_Siliques_Sub_P Parameter: Age (day) Value: 21
  misc_feature: MA Experiment 20000355 PARAMETER Experiment Name: At_Siliques_Sub_P Parameter: Organism Value: A. thaliana
  misc_feature: MA Experiment 20000355 PARAMETER Experiment Name: At_Siliques_Sub_P Parameter: Plant Line Value: WS
  misc_feature: MA Experiment 20000355 PARAMETER Experiment Name: At_Siliques_Sub_P Parameter: Tissue Value: Less Than 5mm Siliques vs. Whole Plant
  misc_feature: MA Experiment ID: 20000440 Result: Down-regulated in Transcription
  misc_feature: MA Experiment 20000440 PARAMETER Experiment Name: At_Closed-Flower__Sub_P Parameter: Tissue Value: Closed Flower vs. Whole Plant
atggcttttggccgcaacaatcgtgtaaggttcagagattggatttcagagggaacagagtatggttacggaagaaataaagctagaccatctctaaacacagttttgaagaatgttcgtagaggacttaagaaacctttaagttttggttcacataataagaagagagattctaattctagtaccactacacagaagaatattataaacccacaaggatcttttttacagaactggaacaaaatctttctttttgcttcagtgattgctttggctattgatccattgtttttctatattcctattgttgatggagaaagacactgtcttaatttgcatcgtaacttggagatagcagctagtgtgcttcgcacgtttatagatgctttctacatcattcacattgtgtttcagtttagaactgcttatatctctccttcttctcgtgttttcggaagaggcgagttggttgatgatcctaaagctatagccatcaagtacctctcctcctacttcatcatcgatcttctttctatccttccactcccacagcttgtagtcttagctgtcatccccaatgtcaacaagccggtctctttgatcactaaggactatttgataactgtcatatttactcaatacattccaaggattcttcgtatctatccactttacactgaagttacaagaacatctggcatagttactgaaaccgcttgggctggagctgcttggaacctatctctctatatgttagccagtcatgtgtttggagccttatggtacttaatatcagtagaacgagaagacagatgctggcgtgaagcttgtgagaagataccagaagtgtgtaactttagatttctctactgcgatggaaacagtagtgttagaaacgatttcctgactacctcgtgcccgtttatcaaccctgatgatataacaaattcaactgtcttcaactttggtatctttactgatgctttaaagagtgggattgttgaatcagatgatttctggaagaagttcttctactgcttctggtggggtttgcgtaatttaagtgcattgggacaaaatctcaatacaagcaaattcgttggggaaatcatatttgctgtatcaatttgtatatctggactagtcttattcgcactacttatcggcaatatgcagaaatacttggaatcaactacagtgagggaagaggagatgagagtgagaaaaagagatgcagagcaatggatgtctcatcgaatgttacccgatgacttgaggaaacgtatcagaaggtatgagcagtacaaatggcaggaaactagaggagtagaagaagaaaaccttctgcgtaatctccctaaagacctcaggagagacatcaaacgccatttctgcctcgatcttctcaagaaagtacctctgttcgagataatggatgagcaattgctagatgccgtgtgtgacaagctaaaaccagtgctctacaccgagaacagctatgcaattcgagaaggagatccagtggaagagatgttgtttgtcatgagaggaaaactgatgagcgccaccacaaacggtggccggaccggcttctttaacgccgtatacctaaaacctagtgacttttgcggcgaagatcttctcacatgggcattagatcctcaatcttcgtctcattttccgatatcgactagaacagttcaagctttaaccgaagtagaagcctttgctcttgcagcagatgatctcaagcttgttgcttcacagttcagacgactacatagcaaacagcttcaacatactttcaggttttattcggttcaatggagaacttggggtgcgtctttcatacaagcggcgtggcggagacattgccggaggaaactagctagatcattaaccgaagaagaagatcgattccgaaacgcgatcacaaaacgcgaacgcaatgcggcgtcttcgtctagcctggttgcaacgttatacgcgtcgcggtttgcttcaaacgcgcttcgcaatctgcgtacaaacaacctacctttgctacctcctaaaccctccgagcctgatttcagtctccgaaacccttaa

SEQ ID NO: 82412 - protein, 696 aa, Arabidopsis thaliana
  peptide (1)..(696): Ceres Seq. ID no. 12665580
  misc_feature (119)..(391): Pfam Name: Ion transport protein Pfam Description: Ion transport protein
  misc_feature (10)..(692): Homolog of NCBI NO: 18378827 NR Description: cyclic nucleotide-regulated ion channel; protein
  misc_feature (5)..(693): Homolog of NCBI NO: 18407073 NR Description: cyclic nucleotide-regulated ion channel (CNGC3); id: At2g46430.1, supported by cDNA: gi_16648780, supported by
  misc_feature (18)..(693): Homolog of NCBI NO: 25408996 NR Description: hypothetical protein At2g46430 [imported] -
  misc_feature (5)..(693): Homolog of NCBI NO: 4378659 NR Description: cyclic nucleotide gated channel [Arabidopsis
  misc_feature (1)..(692): Homolog of NCBI NO: 15238657 NR Description: cyclic nucleotide-regulated ion channel (CNGC1); id: At5g53130.1, supported by cDNA: gi_13877752 [Arabidopsis
  misc_feature (9)..(692): Homolog of NCBI NO: 6969231 NR Description: cyclic nucleotide-gated calmodulin-binding ion
  misc_feature (23)..(692): Homolog of NCBI NO: 30696976 NR Description: cyclic nucleotide-regulated ion channel (CNGC5)
  misc_feature (64)..(692): Homolog of NCBI NO: 18400426 NR Description: cyclic nucleotide-regulated ion channel (CNGC6); id: At2g23980.1, supported by cDNA: gi_14532659 [Arabidopsis
  misc_feature (64)..(672): Homolog of NCBI NO: 15223667 NR Description: cyclic nucleotide-regulated ion channel,
  misc_feature (64)..(672): Homolog of NCBI NO: 25513728 NR Description: probable cyclic nucleotide and
MAFGRNNRVRFRDWISEGTEYGYGRNKARPSLNTVLKNVRRGLKKPLSFGSHNKKRDSNSSTTTQKNIINPQGSFLQNWNKIFLFASVIALAIDPLFFYIPIVDGERHCLNLHRNLEIAASVLRTFIDAFYIIHIVFQFRTAYISPSSRVFGRGELVDDPKAIAIKYLSSYFIIDLLSILPLPQLVVLAVIPNVNKPVSLITKDYLITVIFTQYIPRILRIYPLYTEVTRTSGIVTETAWAGAAWNLSLYMLASHVFGALWYLISVEREDRCWREACEKIPEVCNFRFLYCDGNSSVRNDFLTTSCPFINPDDITNSTVFNFGIFTDALKSGIVESDDFWKKFFYCFWWGLRNLSALGQNLNTSKFVGEIIFAVSICISGLVLFALLIGNMQKYLESTTVREEEMRVRKRDAEQWMSHRMLPDDLRKRIRRYEQYKWQETRGVEEENLLRNLPKDLRRDIKRHFCLDLLKKVPLFEIMDEQLLDAVCDKLKPVLYTENSYAIREGDPVEEMLFVMRGKLMSATTNGGRTGFFNAVYLKPSDFCGEDLLTWALDPQSSSHFPISTRTVQALTEVEAFALAADDLKLVASQFRRLHSKQLQHTFRFYSVQWRTWGASFIQAAWRRHCRRKLARSLTEEEDRFRNAITKRERNAASSSSLVATLYASRFASNALRNLRTNNLPLLPPKPSEPDFSLRNP

SEQ ID NO: 82413 - protein, 446 aa, Arabidopsis thaliana
  peptide (1)..(446): Ceres Seq. ID no. 12665581
  misc_feature (1)..(141): Pfam Name: Ion transport protein Pfam Description: Ion transport protein
  misc_feature (1)..(442): Homolog of NCBI NO: 18378827 NR Description: cyclic nucleotide-regulated ion channel; protein
  misc_feature (1)..(443): Homolog of NCBI NO: 18407073 NR Description: cyclic nucleotide-regulated ion channel (CNGC3); id: At2g46430.1, supported by cDNA: gi_16648780, supported by
  misc_feature (1)..(443): Homolog of NCBI NO: 25408996 NR Description: hypothetical protein At2g46430 [imported] -
  misc_feature (1)..(443): Homolog of NCBI NO: 4378659 NR Description: cyclic nucleotide gated channel [Arabidopsis
  misc_feature (1)..(442): Homolog of NCBI NO: 15238657 NR Description: cyclic nucleotide-regulated ion channel (CNGC1); id: At5g53130.1, supported by cDNA: gi_13877752 [Arabidopsis
  misc_feature (1)..(442): Homolog of NCBI NO: 6969231 NR Description: cyclic nucleotide-gated calmodulin-binding ion
  misc_feature (1)..(442): Homolog of NCBI NO: 30696976 NR Description: cyclic nucleotide-regulated ion channel (CNGC5)
  misc_feature (1)..(442): Homolog of NCBI NO: 18400426 NR Description: cyclic nucleotide-regulated ion channel (CNGC6); id: At2g23980.1, supported by cDNA: gi_14532659 [Arabidopsis
  misc_feature (1)..(422): Homolog of NCBI NO: 15223667 NR Description: cyclic nucleotide-regulated ion channel,
  misc_feature (1)..(422): Homolog of NCBI NO: 25513728 NR Description: probable cyclic nucleotide and
MLASHVFGALWYLISVEREDRCWREACEKIPEVCNFRFLYCDGNSSVRNDFLTTSCPFINPDDITNSTVFNFGIFTDALKSGIVESDDFWKKFFYCFWWGLRNLSALGQNLNTSKFVGEIIFAVSICISGLVLFALLIGNMQKYLESTTVREEEMRVRKRDAEQWMSHRMLPDDLRKRIRRYEQYKWQETRGVEEENLLRNLPKDLRRDIKRHFCLDLLKKVPLFEIMDEQLLDAVCDKLKPVLYTENSYAIREGDPVEEMLFVMRGKLMSATTNGGRTGFFNAVYLKPSDFCGEDLLTWALDPQSSSHFPISTRTVQALTEVEAFALAADDLKLVASQFRRLHSKQLQHTFRFYSVQWRTWGASFIQAAWRRHCRRKLARSLTEEEDRFRNAITKRERNAASSSSLVATLYASRFASNALRNLRTNNLPLLPPKPSEPDFSLRNP

SEQ ID NO: 82414 - DNA, 729 bp, Arabidopsis thaliana
  misc_feature (1)..(729): Ceres Seq. ID no. 12665603
  misc_feature: MA Experiment ID: 20000265 Result: Up-regulated in Transcription
  misc_feature: MA Experiment 20000265 PARAMETER Experiment Name: At_Open_Flower_P Parameter: Age (day) Value: 21
  misc_feature: MA Experiment 20000265 PARAMETER Experiment Name: At_Open_Flower_P Parameter: Plant Line Value: WS
  misc_feature: MA Experiment 20000265 PARAMETER Experiment Name: At_Open_Flower_P Parameter: Tissue Value: Closed Flower vs. Whole Plant
atggaggaggagaagctagaaatcgtcgggcctttggaggagccgttgatgggaaacatcgtaccagaggagatcaatggcttggattcgcttacgtcgtcggattctgatagcgagaaaccagattcccccgttcccataaatgctccgatctaccggatgtttggaagagaacgaccaattcacatggttctcggcggagctgctgatgtgttgctatggagagacaagaaggtcacgttaggattactcagtgcagtgactgtgatttggcttttgtttggatttggtggtcgtcgtcttctcacatctctttgtcgtggatccattctctttctgcttctatcattcctctggtccaatgccctcaacaaatctccagagaacatgatggatatttacatacctgagaagccattactccaagctgcttctgcgatgacatttgagcttaattgtgcttttgcaaccttaaggagcattgctttagaaagagacatcaagaactttgtaatggcagtcataggactttggctagtatcggtcatcggaaactggttcagcttcttgtcattgctctacatttgttttgtactaattcacacggtgccaatgctttatgagaagtatgaagatgagattgatccaattgcagagaaggctgtgattgagatgaagaaacattaccaagtttttgaagctaagtttttaagtaagatccctcattag

SEQ ID NO: 82415 - protein, 242 aa, Arabidopsis thaliana
  peptide (1)..(242): Ceres Seq. ID no. 12665604
  misc_feature (1)..(242): Homolog of NCBI NO: 15234108 NR Description: hypothetical protein; protein id: At4g01230.1
  misc_feature (4)..(241): Homolog of NCBI NO: 18406991 NR Description: expressed protein; protein id: At2g46170.1, by cDNA: gi_15450758, supported by cDNA: gi_18491130 [Arabidopsis >gi|25408969|pir||E84899 hypothetical protein At2g46170
  misc_feature (3)..(241): Homolog of NCBI NO: 15236556 NR Description: putative protein; protein id: At4g23630.1, by cDNA: 39185., supported by cDNA: gi_15215585 [Arabidopsis
  misc_feature (13)..(241): Homolog of NCBI NO: 34909318 NR Description: OSJNBb0021A09.5 [Oryza sativa (japonica
  misc_feature (30)..(241): Homolog of NCBI NO: 15237093 NR Description: putative protein; protein id: At4g11220.1, by cDNA: 23536., supported by cDNA: gi_14334419, supported by gi_15081760, supported by cDNA: gi_16209686 [Arabidopsis
  misc_feature (49)..(241): Homolog of NCBI NO: 34904202 NR Description: P0492F05.25 [Oryza sativa (japonica
  misc_feature (13)..(240): Homolog of NCBI NO: 15222616 NR Description: hypothetical protein; protein id: At1g64090.1, by cDNA: gi_17381217 [Arabidopsis thaliana] F22C12.15 [Arabidopsis thaliana] >gi|17381218|gb|AAL36421.1|
  misc_feature (13)..(240): Homolog of NCBI NO: 15238125 NR Description: putative protein; protein id: At5g41600.1, by cDNA: gi_14334529, supported by cDNA: gi_16323068 [Arabidopsis >gi|10178014|dbj|BAB11466.1| contains similarity to 24 kDa seed
  misc_feature (4)..(241): Homolog of NCBI NO: 15233147 NR Description: putative protein; protein id: At3g61560.1
  misc_feature (14)..(241): Homolog of NCBI NO: 18398810 NR Description: expressed protein; protein id: At3g10260.1, by cDNA: 15153., supported by cDNA: gi_20259182 [Arabidopsis >gi|6056199|gb|AAF02816.1|AC009400_12 unknown protein
MEEEKLEIVGPLEEPLMGNIVPEEINGLDSLTSSDSDSEKPDSPVPINAPIYRMFGRERPIHMVLGGAADVLLWRDKKVTLGLLSAVTVIWLLFGFGGRRLLTSLCRGSILFLLLSFLWSNALNKSPENMMDIYIPEKPLLQAASAMTFELNCAFATLRSIALERDIKNFVMAVIGLWLVSVIGNWFSFLSLLYICFVLIHTVPMLYEKYEDEIDPIAEKAVIEMKKHYQVFEAKFLSKIPH

SEQ ID NO: 82416 - protein, 226 aa, Arabidopsis thaliana
  peptide (1)..(226): Ceres Seq. ID no. 12665605
  misc_feature (1)..(226): Homolog of NCBI NO: 15234108 NR Description: hypothetical protein; protein id: At4g01230.1
  misc_feature (1)..(225): Homolog of NCBI NO: 18406991 NR Description: expressed protein; protein id: At2g46170.1, by cDNA: gi_15450758, supported by cDNA: gi_18491130 [Arabidopsis >gi|25408969|pir||E84899 hypothetical protein At2g46170
  misc_feature (1)..(225): Homolog of NCBI NO: 15236556 NR Description: putative protein; protein id: At4g23630.1, by cDNA: 39185., supported by cDNA: gi_15215585 [Arabidopsis
  misc_feature (1)..(225): Homolog of NCBI NO: 34909318 NR Description: OSJNBb0021A09.5 [Oryza sativa (japonica
  misc_feature (14)..(225): Homolog of NCBI NO: 15237093 NR Description: putative protein; protein id: At4g11220.1, by cDNA: 23536., supported by cDNA: gi_14334419, supported by gi_15081760, supported by cDNA: gi_16209686 [Arabidopsis
  misc_feature (33)..(225): Homolog of NCBI NO: 34904202 NR Description: P0492F05.25 [Oryza sativa (japonica
  misc_feature (1)..(224): Homolog of NCBI NO: 15222616 NR Description: hypothetical protein; protein id: At1g64090.1, by cDNA: gi_17381217 [Arabidopsis thaliana] F22C12.15 [Arabidopsis thaliana] >gi|17381218|gb|AAL36421.1|
  misc_feature (1)..(224): Homolog of NCBI NO: 15238125 NR Description: putative protein; protein id: At5g41600.1, by cDNA: gi_14334529, supported by cDNA: gi_16323068 [Arabidopsis >gi|10178014|dbj|BAB11466.1| contains similarity to 24 kDa seed
  misc_feature (1)..(225): Homolog of NCBI NO: 15233147 NR Description: putative protein; protein id: At3g61560.1
  misc_feature (1)..(225): Homolog of NCBI NO: 18398810 NR Description: expressed protein; protein id: At3g10260.1, by cDNA: 15153., supported by cDNA: gi_20259182 [Arabidopsis >gi|6056199|gb|AAF02816.1|AC009400_12 unknown protein
MGNIVPEEINGLDSLTSSDSDSEKPDSPVPINAPIYRMFGRERPIHMVLGGAADVLLWRDKKVTLGLLSAVTVIWLLFGFGGRRLLTSLCRGSILFLLLSFLWSNALNKSPENMMDIYIPEKPLLQAASAMTFELNCAFATLRSIALERDIKNFVMAVIGLWLVSVIGNWFSFLSLLYICFVLIHTVPMLYEKYEDEIDPIAEKAVIEMKKHYQVFEAKFLSKIPH

SEQ ID NO: 82417 - protein, 189 aa, Arabidopsis thaliana
  peptide (1)..(189): Ceres Seq. ID no. 12665606
  misc_feature (1)..(189): Homolog of NCBI NO: 15234108 NR Description: hypothetical protein; protein id: At4g01230.1
  misc_feature (1)..(188): Homolog of NCBI NO: 18406991 NR Description: expressed protein; protein id: At2g46170.1, by cDNA: gi_15450758, supported by cDNA: gi_18491130 [Arabidopsis >gi|25408969|pir||E84899 hypothetical protein At2g46170
  misc_feature (1)..(188): Homolog of NCBI NO: 15236556 NR Description: putative protein; protein id: At4g23630.1, by cDNA: 39185., supported by cDNA: gi_15215585 [Arabidopsis
  misc_feature (1)..(188): Homolog of NCBI NO: 34909318 NR Description: OSJNBb0021A09.5 [Oryza sativa (japonica
  misc_feature (1)..(188): Homolog of NCBI NO: 15237093 NR Description: putative protein; protein id: At4g11220.1, by cDNA: 23536., supported by cDNA: gi_14334419, supported by gi_15081760, supported by cDNA: gi_16209686 [Arabidopsis
  misc_feature (1)..(188): Homolog of NCBI NO: 34904202 NR Description: P0492F05.25 [Oryza sativa (japonica
  misc_feature (1)..(187): Homolog of NCBI NO: 15222616 NR Description: hypothetical protein; protein id: At1g64090.1, by cDNA: gi_17381217 [Arabidopsis thaliana] F22C12.15 [Arabidopsis thaliana] >gi|17381218|gb|AAL36421.1|
  misc_feature (1)..(187): Homolog of NCBI NO: 15238125 NR Description: putative protein; protein id: At5g41600.1, by cDNA: gi_14334529, supported by cDNA: gi_16323068 [Arabidopsis >gi|10178014|dbj|BAB11466.1| contains similarity to 24 kDa seed
  misc_feature (1)..(188): Homolog of NCBI NO: 15233147 NR Description: putative protein; protein id: At3g61560.1
  misc_feature (1)..(188): Homolog of NCBI NO: 18398810 NR Description: expressed protein; protein id: At3g10260.1, by cDNA: 15153., supported by cDNA: gi_20259182 [Arabidopsis >gi|6056199|gb|AAF02816.1|AC009400_12 unknown protein
MFGRERPIHMVLGGAADVLLWRDKKVTLGLLSAVTVIWLLFGFGGRRLLTSLCRGSILFLLLSFLWSNALNKSPENMMDIYIPEKPLLQAASAMTFELNCAFATLRSIALERDIKNFVMAVIGLWLVSVIGNWFSFLSLLYICFVLIHTVPMLYEKYEDEIDPIAEKAVIEMKKHYQVFEAKFLSKIPH

SEQ ID NO: 82418 - DNA, 1116 bp, Arabidopsis thaliana
  misc_feature (1)..(1116): Ceres Seq. ID no. 12665618
  misc_feature: MA Experiment ID: 20000180 Result: Up-regulated in Transcription
  misc_feature: MA Experiment 20000180 PARAMETER Experiment Name: At_Germinating_Seeds_P Parameter: Age (hr) Value: 24 vs. 0
  misc_feature: MA Experiment 20000180 PARAMETER Experiment Name: At_Germinating_Seeds_P Parameter: Tissue Value: Germinating Seeds
  misc_feature: MA Experiment ID: 20000182 Result: Up-regulated in Transcription
  misc_feature: MA Experiment 20000182 PARAMETER Experiment Name: At_2mM_SA_P Parameter: Age (day) Value: 14
  misc_feature: MA Experiment 20000182 PARAMETER Experiment Name: At_2mM_SA_P Parameter: Organism Value: A. thaliana
  misc_feature: MA Experiment 20000182 PARAMETER Experiment Name: At_2mM_SA_P Parameter: Plant Line Value: WS
  misc_feature: MA Experiment 20000182 PARAMETER Experiment Name: At_2mM_SA_P Parameter: Timepoint (hr) Value: 6
  misc_feature: MA Experiment 20000182 PARAMETER Experiment Name: At_2mM_SA_P Parameter: Tissue Value: Aerial
  misc_feature: MA Experiment 20000182 PARAMETER Experiment Name: At_2mM_SA_P Parameter: Treatment Value: 2mM SA vs. No Treatment
  misc_feature: MA Experiment ID: 20000184 Result: Down-regulated in Transcription
  misc_feature: MA Experiment 20000184 PARAMETER Experiment Name: At_Shoots__P Parameter: Age (day) Value: 7
  misc_feature: MA Experiment 20000184 PARAMETER Experiment Name: At_Shoots__P Parameter: Tissue Value: Shoots vs. Whole Plant
  misc_feature: MA Experiment ID: 20000185 Result: Down-regulated in Transcription
  misc_feature: MA Experiment 20000185 PARAMETER Experiment Name: At_Roots__P Parameter: Age (day) Value: 7 vs. 21
  misc_feature: MA Experiment 20000185 PARAMETER Experiment Name: At_Roots__P Parameter: Organism Value: A. thaliana
  misc_feature: MA Experiment 20000185 PARAMETER Experiment Name: At_Roots__P Parameter: Tissue Value: Roots vs. Whole Plant
  misc_feature: MA Experiment ID: 20000234 Result: Down-regulated in Transcription
  misc_feature: MA Experiment 20000234 PARAMETER Experiment Name: At_Siliques_P Parameter: Age (day) Value: 21
  misc_feature: MA Experiment 20000234 PARAMETER Experiment Name: At_Siliques_P Parameter: Organism Value: A. thaliana
  misc_feature: MA Experiment 20000234 PARAMETER Experiment Name: At_Siliques_P Parameter: Plant Line Value: WS
  misc_feature: MA Experiment 20000234 PARAMETER Experiment Name: At_Siliques_P Parameter: Tissue Value: Less Than 5mm Siliques vs. Whole Plant
  misc_feature: MA Experiment ID: 20000235 Result: Down-regulated in Transcription
  misc_feature: MA Experiment 20000235 PARAMETER Experiment Name: At_Siliques_P Parameter: Age (day) Value: 21
  misc_feature: MA Experiment 20000235 PARAMETER Experiment Name: At_Siliques_P Parameter: Organism Value: A. thaliana
  misc_feature: MA Experiment 20000235 PARAMETER Experiment Name: At_Siliques_P Parameter: Plant Line Value: WS
  misc_feature: MA Experiment 20000235 PARAMETER Experiment Name: At_Siliques_P Parameter: Tissue Value: 5-10mm Siliques vs. Whole Plant
  misc_feature: MA Experiment ID: 20000264 Result: Down-regulated in Transcription
  misc_feature: MA Experiment 20000264 PARAMETER Experiment Name: At_Open_Flower_P Parameter: Age (day) Value: 21
  misc_feature: MA Experiment 20000264 PARAMETER Experiment Name: At_Open_Flower_P Parameter: Plant Line Value: WS
  misc_feature: MA Experiment 20000264 PARAMETER Experiment Name: At_Open_Flower_P Parameter: Tissue Value: Open Flower vs. Whole Plant
  misc_feature: MA Experiment ID: 20000265 Result: Down-regulated in Transcription
  misc_feature: MA Experiment 20000265 PARAMETER Experiment Name: At_Open_Flower_P Parameter: Age (day) Value: 21
  misc_feature: MA Experiment 20000265 PARAMETER Experiment Name: At_Open_Flower_P Parameter: Plant Line Value: WS
  misc_feature: MA Experiment 20000265 PARAMETER Experiment Name: At_Open_Flower_P Parameter: Tissue Value: Closed Flower vs. Whole Plant
  misc_feature: MA Experiment ID: 20000267 Result: Up-regulated in Transcription
  misc_feature: MA Experiment 20000267 PARAMETER Experiment Name: At_Drought_P Parameter: Age (day) Value: 7
  misc_feature: MA Experiment 20000267 PARAMETER Experiment Name: At_Drought_P Parameter: Organism Value: A. thaliana
  misc_feature: MA Experiment 20000267 PARAMETER Experiment Name: At_Drought_P Parameter: Plant Line Value: WS
  misc_feature: MA Experiment 20000267 PARAMETER Experiment Name: At_Drought_P Parameter: Timepoint (hr) Value: 6
  misc_feature: MA Experiment 20000267 PARAMETER Experiment Name: At_Drought_P Parameter: Tissue Value: Whole Plant
  misc_feature: MA Experiment 20000267 PARAMETER Experiment Name: At_Drought_P Parameter: Treatment Value: Drought vs. No Drought
  misc_feature: MA Experiment ID: 20000286 Result: Down-regulated in Transcription
  misc_feature: MA Experiment 20000286 PARAMETER Experiment Name: At_Open_Flower_P Parameter: Age (day) Value: 21
  misc_feature: MA Experiment 20000286 PARAMETER Experiment Name: At_Open_Flower_P Parameter: Plant Line Value: WS
  misc_feature: MA Experiment 20000286 PARAMETER Experiment Name: At_Open_Flower_P Parameter: Tissue Value: Half Open vs. Whole Plant
  misc_feature: MA Experiment ID: 20000436 Result: Up-regulated in Transcription
  misc_feature: MA Experiment 20000436 PARAMETER Experiment Name: At_Drought_P Parameter: Age (day) Value: 7
  misc_feature: MA Experiment 20000436 PARAMETER Experiment Name: At_Drought_P Parameter: Organism Value: A. thaliana
  misc_feature: MA Experiment 20000436 PARAMETER Experiment Name: At_Drought_P Parameter: Plant Line Value: WS
  misc_feature: MA Experiment 20000436 PARAMETER Experiment Name: At_Drought_P Parameter: Timepoint (hr) Value: 12
  misc_feature: MA Experiment 20000436 PARAMETER Experiment Name: At_Drought_P Parameter: Tissue Value: Whole Plant
  misc_feature: MA Experiment 20000436 PARAMETER Experiment Name: At_Drought_P Parameter: Treatment Value: Drought vs. No Drought
  misc_feature: MA Experiment ID: 20000437 Result: Up-regulated in Transcription
  misc_feature: MA Experiment 20000437 PARAMETER Experiment Name: At_Drought_P Parameter: Age (day) Value: 8
  misc_feature: MA Experiment 20000437 PARAMETER Experiment Name: At_Drought_P Parameter: Organism Value: A. thaliana
  misc_feature: MA Experiment 20000437 PARAMETER Experiment Name: At_Drought_P Parameter: Plant Line Value: WS
  misc_feature: MA Experiment 20000437 PARAMETER Experiment Name: At_Drought_P Parameter: Timepoint (hr) Value: 24
  misc_feature: MA Experiment 20000437 PARAMETER Experiment Name: At_Drought_P Parameter: Tissue Value: Whole Plant
  misc_feature: MA Experiment 20000437 PARAMETER Experiment Name: At_Drought_P Parameter: Treatment Value: Drought vs. No Drought
  misc_feature: MA Experiment ID: 20000438 Result: Down-regulated in Transcription
  misc_feature: MA Experiment 20000438 PARAMETER Experiment Name: At_Shoots__P Parameter: Age (day) Value: 14
  misc_feature: MA Experiment 20000438 PARAMETER Experiment Name: At_Shoots__P Parameter: Tissue Value: Shoots vs. Whole Plant
  misc_feature: MA Experiment ID: 20000439 Result: Down-regulated in Transcription
  misc_feature: MA Experiment 20000439 PARAMETER Experiment Name: At_Roots__P Parameter: Age (day) Value: 14 vs. 21
  misc_feature: MA Experiment 20000439 PARAMETER Experiment Name: At_Roots__P Parameter: Organism Value: A. thaliana
  misc_feature: MA Experiment 20000439 PARAMETER Experiment Name: At_Roots__P Parameter: Tissue Value: Roots vs. Whole Plant
  misc_feature: MA Experiment ID: 20000453 Result: Up-regulated in Transcription
  misc_feature: MA Experiment 20000453 PARAMETER Experiment Name: At_100uM_ABA_P Parameter: Age (day) Value: 15
  misc_feature: MA Experiment 20000453 PARAMETER Experiment Name: At_100uM_ABA_P Parameter: Organism Value: A. thaliana
  misc_feature: MA Experiment 20000453 PARAMETER Experiment Name: At_100uM_ABA_P Parameter: Plant Line Value: WS
  misc_feature: MA Experiment 20000453 PARAMETER Experiment Name: At_100uM_ABA_P Parameter: Timepoint (hr) Value: 24
  misc_feature: MA Experiment 20000453 PARAMETER Experiment Name: At_100uM_ABA_P Parameter: Tissue Value: Aerial
  misc_feature: MA Experiment 20000453 PARAMETER Experiment Name: At_100uM_ABA_P Parameter: Treatment Value: 100uM ABA vs. No Treatment
  misc_feature: MA Experiment ID: 20000460 Result: Up-regulated in Transcription
  misc_feature: MA Experiment 20000460 PARAMETER Experiment Name: At_10percent_PEG_P Parameter: Age (day) Value: 12
  misc_feature: MA Experiment 20000460 PARAMETER Experiment Name: At_10percent_PEG_P Parameter: Organism Value: A. thaliana
  misc_feature: MA Experiment 20000460 PARAMETER Experiment Name: At_10percent_PEG_P Parameter: Plant Line Value: WS
  misc_feature: MA Experiment 20000460 PARAMETER Experiment Name: At_10percent_PEG_P Parameter: Timepoint (day) Value: 12
  misc_feature: MA Experiment 20000460 PARAMETER Experiment Name: At_10percent_PEG_P Parameter: Tissue Value: Whole Plant
  misc_feature: MA Experiment 20000460 PARAMETER Experiment Name: At_10percent_PEG_P Parameter: Treatment Value: 10percent PEG vs. No Treatment
  misc_feature: MA Experiment ID: 20000495 Result: Down-regulated in Transcription
  misc_feature: MA Experiment 20000495 PARAMETER Experiment Name: At_Guard_Cells_P Parameter: Harvest Date Value: 8/2/2002
  misc_feature: MA Experiment 20000495 PARAMETER Experiment Name: At_Guard_Cells_P Parameter: Organism Value: A. thaliana
  misc_feature: MA Experiment 20000495 PARAMETER Experiment Name: At_Guard_Cells_P Parameter: Tissue Value: Guard Cells vs. Leaves
  misc_feature: MA Experiment ID: 20000527 Result: Up-regulated in Transcription
  misc_feature: MA Experiment 20000527 PARAMETER Experiment Name: At_10percent_PEG_P Parameter: Age (day) Value: 20
  misc_feature: MA Experiment 20000527 PARAMETER Experiment Name: At_10percent_PEG_P Parameter: Organism Value: A. thaliana
  misc_feature: MA Experiment 20000527 PARAMETER Experiment Name: At_10percent_PEG_P Parameter: Plant Line Value: WS
  misc_feature: MA Experiment 20000527 PARAMETER Experiment Name: At_10percent_PEG_P Parameter: Timepoint (day) Value: 20
  misc_feature: MA Experiment 20000527 PARAMETER Experiment Name: At_10percent_PEG_P Parameter: Tissue Value: Whole Plant
  misc_feature: MA Experiment 20000527 PARAMETER Experiment Name: At_10percent_PEG_P Parameter: Treatment Value: 10percent PEG vs. No Treatment
  misc_feature: MA Experiment ID: 20000709 Result: Up-regulated in Transcription
  misc_feature: MA Experiment 20000709 PARAMETER Experiment Name: At_15mM_NH4NO3_L-to-H_P Parameter: Age (hr) Value: 14
  misc_feature: MA Experiment 20000709 PARAMETER Experiment Name: At_15mM_NH4NO3_L-to-H_P Parameter: Organism Value: A. thaliana
  misc_feature: MA Experiment 20000709 PARAMETER Experiment Name: At_15mM_NH4NO3_L-to-H_P Parameter: Plant Line Value: WS
  misc_feature: MA Experiment 20000709 PARAMETER Experiment Name: At_15mM_NH4NO3_L-to-H_P Parameter: Timepoint (hr) Value: 4
  misc_feature: MA Experiment 20000709 PARAMETER Experiment Name: At_15mM_NH4NO3_L-to-H_P Parameter: Tissue Value: Aerial
  misc_feature: MA Experiment 20000709 PARAMETER Experiment Name: At_15mM_NH4NO3_L-to-H_P Parameter: Treatment Value: 15mM NH4NO3 vs. 30mM Mannitol
  misc_feature: MA Experiment ID: 20000794 Result: Down-regulated in Transcription
  misc_feature: MA Experiment 20000794 PARAMETER Experiment Name: At_Petals_P Parameter: Age (day) Value: 23-25 days
  misc_feature: MA Experiment 20000794 PARAMETER Experiment Name: At_Petals_P Parameter: Plant Line Value: WS
  misc_feature: MA Experiment 20000794 PARAMETER Experiment Name: At_Petals_P Parameter: Tissue Value: Petals vs. Whole plant
  misc_feature: MA Experiment ID: 20001557 Result: Up-regulated in Transcription
  misc_feature: MA Experiment 20001557 PARAMETER Experiment Name: At_Drought_Soil_Dry_P Parameter: Age (day) Value: 27
  misc_feature: MA Experiment 20001557 PARAMETER Experiment Name: At_Drought_Soil_Dry_P Parameter: Organism Value: A. thaliana
  misc_feature: MA Experiment 20001557 PARAMETER Experiment Name: At_Drought_Soil_Dry_P Parameter: Plant Line Value: WS
  misc_feature: MA Experiment 20001557 PARAMETER Experiment Name: At_Drought_Soil_Dry_P Parameter: Post Timepoint (hr) Value: 3
  misc_feature: MA Experiment 20001557 PARAMETER Experiment Name: At_Drought_Soil_Dry_P Parameter: Post-Treatment Value: Re-Water vs. No Drought
  misc_feature: MA Experiment 20001557 PARAMETER Experiment Name: At_Drought_Soil_Dry_P Parameter: Timepoint (day) Value: 13
  misc_feature: MA Experiment 20001557 PARAMETER Experiment Name: At_Drought_Soil_Dry_P Parameter: Treatment Value: Drought vs. No Drought
  misc_feature: MA Experiment ID: 20001558 Result: Up-regulated in Transcription
  misc_feature: MA Experiment 20001558 PARAMETER Experiment Name: At_Drought_Soil_Dry_P Parameter: Age (day) Value: 27
  misc_feature: MA Experiment 20001558 PARAMETER Experiment Name: At_Drought_Soil_Dry_P Parameter: Organism Value: A. thaliana
  misc_feature: MA Experiment 20001558 PARAMETER Experiment Name: At_Drought_Soil_Dry_P Parameter: Plant Line Value: WS
  misc_feature: MA Experiment 20001558 PARAMETER Experiment Name: At_Drought_Soil_Dry_P Parameter: Post Timepoint (hr) Value: 6
  misc_feature: MA Experiment 20001558 PARAMETER Experiment Name: At_Drought_Soil_Dry_P Parameter: Post-Treatment Value: Re-Water vs. No Drought
  misc_feature: MA Experiment 20001558 PARAMETER Experiment Name: At_Drought_Soil_Dry_P Parameter: Timepoint (day) Value: 13
  misc_feature: MA Experiment 20001558 PARAMETER Experiment Name: At_Drought_Soil_Dry_P Parameter: Treatment Value: Drought vs. No Drought
  misc_feature: MA Experiment ID: 20001759 Result: Down-regulated in Transcription
  misc_feature: MA Experiment 20001759 PARAMETER Experiment Name: At_50mM_NH4NO3_L-to-H_P Parameter: Timepoint (hr) Value: 1
  misc_feature: MA Experiment 20001759 PARAMETER Experiment Name: At_50mM_NH4NO3_L-to-H_P Parameter: Tissue Value: Siliques
  misc_feature: MA Experiment 20001759 PARAMETER Experiment Name: At_50mM_NH4NO3_L-to-H_P Parameter: Treatment Value: 50mM NH4NO3 vs 100mM Mannitol
  misc_feature: MA Experiment ID: 20001761 Result: Down-regulated in Transcription
  misc_feature: MA Experiment 20001761 PARAMETER Experiment Name: At_50mM_NH4NO3_L-to-H_P Parameter: Timepoint (hr) Value: 4
  misc_feature: MA Experiment 20001761 PARAMETER Experiment Name: At_50mM_NH4NO3_L-to-H_P Parameter: Tissue Value: Siliques
  misc_feature: MA Experiment 20001761 PARAMETER Experiment Name: At_50mM_NH4NO3_L-to-H_P Parameter: Treatment Value: 50mM NH4NO3 vs 100mM Mannitol
  misc_feature: MA Experiment ID: 20001904 Result: Up-regulated in Transcription
  misc_feature: MA Experiment 20001904 PARAMETER Experiment Name: At_Drought_Reproduction_P Parameter: Age (day) Value: 37
  misc_feature: MA Experiment 20001904 PARAMETER Experiment Name: At_Drought_Reproduction_P Parameter: Organism Value: A. thaliana
  misc_feature: MA Experiment 20001904 PARAMETER Experiment Name: At_Drought_Reproduction_P Parameter: Plant Line Value: WS
  misc_feature: MA Experiment 20001904 PARAMETER Experiment Name: At_Drought_Reproduction_P Parameter: Timepoint (day) Value: 7
  misc_feature: MA Experiment 20001904 PARAMETER Experiment Name: At_Drought_Reproduction_P Parameter: Tissue Value: Rosettes
  misc_feature: MA Experiment 20001904 PARAMETER Experiment Name: At_Drought_Reproduction_P Parameter: Treatment Value: Drought vs. No Drought
  misc_feature: MA Experiment ID: 20001905 Result: Up-regulated in Transcription
  misc_feature: MA Experiment 20001905 PARAMETER Experiment Name: At_Drought_Reproduction_P Parameter: Age (day) Value: 40
  misc_feature: MA Experiment 20001905 PARAMETER Experiment Name: At_Drought_Reproduction_P Parameter: Organism Value: A. thaliana
  misc_feature: MA Experiment 20001905 PARAMETER Experiment Name: At_Drought_Reproduction_P Parameter: Plant Line Value: WS
  misc_feature: MA Experiment 20001905 PARAMETER Experiment Name: At_Drought_Reproduction_P Parameter: Timepoint (day) Value: 10
  misc_feature: MA Experiment 20001905 PARAMETER Experiment Name: At_Drought_Reproduction_P Parameter: Tissue Value: Rosettes
  misc_feature: MA Experiment 20001905 PARAMETER Experiment Name: At_Drought_Reproduction_P Parameter: Treatment Value: Drought vs. No Drought
  misc_feature: MA Experiment ID: 20001906 Result: Up-regulated in Transcription
  misc_feature: MA Experiment 20001906 PARAMETER Experiment Name: At_Drought_Reproduction_P Parameter: Age (day) Value: 35
  misc_feature: MA Experiment 20001906 PARAMETER Experiment Name: At_Drought_Reproduction_P Parameter: Organism Value: A. thaliana
  misc_feature: MA Experiment 20001906 PARAMETER Experiment Name: At_Drought_Reproduction_P Parameter: Plant Line Value: WS
  misc_feature: MA Experiment 20001906 PARAMETER Experiment Name: At_Drought_Reproduction_P Parameter: Timepoint (day) Value: 5
  misc_feature: MA Experiment 20001906 PARAMETER Experiment Name: At_Drought_Reproduction_P Parameter: Tissue Value: Siliques
  misc_feature: MA Experiment 20001906 PARAMETER Experiment Name: At_Drought_Reproduction_P Parameter: Treatment Value: Drought vs. No Drought
  misc_feature: MA Experiment ID: 20001910 Result: Up-regulated in Transcription
  misc_feature: MA Experiment 20001910 PARAMETER Experiment Name: At_Drought_Reproduction_P Parameter: Age (day) Value: 37
  misc_feature: MA Experiment 20001910 PARAMETER Experiment Name: At_Drought_Reproduction_P Parameter: Organism Value: A. thaliana
  misc_feature: MA Experiment 20001910 PARAMETER Experiment Name: At_Drought_Reproduction_P Parameter: Plant Line Value: WS
  misc_feature: MA Experiment 20001910 PARAMETER Experiment Name: At_Drought_Reproduction_P Parameter: Timepoint (day) Value: 7
  misc_feature: MA Experiment 20001910 PARAMETER Experiment Name: At_Drought_Reproduction_P Parameter: Tissue Value: Flowers
  misc_feature: MA Experiment 20001910 PARAMETER Experiment Name: At_Drought_Reproduction_P Parameter: Treatment Value: Drought vs. No Drought
  misc_feature: MA Experiment ID: 20001911 Result: Up-regulated in Transcription
  misc_feature: MA Experiment 20001911 PARAMETER Experiment Name: At_Drought_Reproduction_P Parameter: Age (day) Value: 40
  misc_feature: MA Experiment 20001911 PARAMETER Experiment Name: At_Drought_Reproduction_P Parameter: Organism Value: A. thaliana
  misc_feature: MA Experiment 20001911 PARAMETER Experiment Name: At_Drought_Reproduction_P Parameter: Plant Line Value: WS
  misc_feature: MA Experiment 20001911 PARAMETER Experiment Name: At_Drought_Reproduction_P Parameter: Timepoint (day) Value: 10
  misc_feature: MA Experiment 20001911 PARAMETER Experiment Name: At_Drought_Reproduction_P Parameter: Tissue Value: Flowers
  misc_feature: MA Experiment 20001911 PARAMETER Experiment Name: At_Drought_Reproduction_P Parameter: Treatment Value: Drought vs. No Drought
atgttattggtttgctcattgtttcagattactaactttgtttcttctttctgtgtgttttcagttgatatgagccaacaacgtacacgctctcggaacccgttcaagattctgtttacgaagaagaacaatgctcgattatcgccaaagcttctctcactgttgaacaatttcgagactaacttgacggtatcgattagagaacttgtaccaaaggataagaatgatatcgttagtgtttcttggatgatacaagccatgcagtctctttgtgagacacacaagagtatcaggacgctcgtgaaggatttagaggttccagtatcggatttggaggagaatttcatttatatcttctctgactttagcttgaagcgggaactctgcaacgcctttacctcagagatatatcatttggaacatggcaatctattactaaagtttgcttttagtaagctggagacaaacagtggcaatattcttcagcgttggaatcagcacatggtttccaagaacccgagtatcgaaaactggggcgcggttttgagtaggctggttgaatcgatggatcatcatcatcatatctccaagaaggggaagaagaaatactctgcggaaggaaaagttctcttacgagttttatacggtgtaaaggtcaagactttatacatattcagcgtgtttgatgcatcgttctcgggttcttccaagaatctcttctatctaaccattccaaaggagatggaggagcttccatgggttcaagctttcatggaactgcagaacactattaacccggagatcaaaaacacatttttatcagacggattcacggttataaaagatctcgaggctgttgaaaccggtgtgaagaagctttacacagcggtacaagaagggtcggttcctattttgttagtggaaccattggagaagtcagtgatagaactttcggaaaggtttgagctagtctccaaggaaacacgttgcttgtcgaagatggtgatctctgcccgagacgcattgttggagagcctgtggacgaaatgcgcagaagagctaggagtgacattgccaacgatggttaaaagtgttaatatagaggaaaagagctaa

SEQ ID NO: 82419 - protein, 371 aa, Arabidopsis thaliana
  peptide (1)..(371): Ceres Seq. ID no. 12665619
  misc_feature (1)..(371): Homolog of NCBI NO: 7485228 NR Description: hypothetical protein A_IG002N01.26 - Arabidopsis >gi|2191147|gb|AAB61034.1| A_IG002N01.26 gene product thaliana] >gi|7267633|emb|CAB80945.1| hypothetical protein
  misc_feature (24)..(371): Homolog of NCBI NO: 30678866 NR Description: expressed protein [Arabidopsis thaliana]
  misc_feature (24)..(371): Homolog of NCBI NO: 28392962 NR Description: unknown protein [Arabidopsis thaliana]
  misc_feature (33)..(366): Homolog of NCBI NO: 18378853 NR Description: expressed protein; protein id: At1g01550.1, by cDNA: gi_13194833, supported by cDNA: gi_16648870, supported cDNA: gi_17380899, supported by cDNA: gi_20259586 [Arabidopsis
  misc_feature (33)..(346): Homolog of NCBI NO: 18406969 NR Description: expressed protein; protein id: At2g46080.1, by cDNA: gi_16604341, supported by cDNA: gi_18252158 [Arabidopsis >gi|25341889|pir||E84898 hypothetical protein At2g46080
  misc_feature (33)..(346): Homolog of NCBI NO: 16604342 NR Description: At2g46080/T3F17.27 [Arabidopsis thaliana]
  misc_feature (33)..(294): Homolog of NCBI NO: 37536014 NR Description: unknown protein [Oryza sativa (japonica
  misc_feature (87)..(354): Homolog of NCBI NO: 15233126 NR Description: putative protein; protein id: At3g61500.1
MLLVCSLFQITNFVSSFCVFSVDMSQQRTRSRNPFKILFTKKNNARLSPKLLSLLNNFETNLTVSIRELVPKDKNDIVSVSWMIQAMQSLCETHKSIRTLVKDLEVPVSDLEENFIYIFSDFSLKRELCNAFTSEIYHLEHGNLLLKFAFSKLETNSGNILQRWNQHMVSKNPSIENWGAVLSRLVESMDHHHHISKKGKKKYSAEGKVLLRVLYGVKVKTLYIFSVFDASFSGSSKNLFYLTIPKEMEELPWVQAFMELQNTINPEIKNTFLSDGFTVIKDLEAVETGVKKLYTAVQEGSVPILLVEPLEKSVIELSERFELVSKETRCLSKMVISARDALLESLWTKCAEELGVTLPTMVKSVNIEEKS

SEQ ID NO: 82420 - protein, 348 aa, Arabidopsis thaliana
  peptide (1)..(348): Ceres Seq. ID no. 12665620
  misc_feature (1)..(348): Homolog of NCBI NO: 7485228 NR Description: hypothetical protein A_IG002N01.26 - Arabidopsis >gi|2191147|gb|AAB61034.1| A_IG002N01.26 gene product thaliana] >gi|7267633|emb|CAB80945.1| hypothetical protein
  misc_feature (1)..(348): Homolog of NCBI NO: 30678866 NR Description: expressed protein [Arabidopsis thaliana]
  misc_feature (1)..(348): Homolog of NCBI NO: 28392962 NR Description: unknown protein [Arabidopsis thaliana]
  misc_feature (10)..(343): Homolog of NCBI NO: 18378853 NR Description: expressed protein; protein id: At1g01550.1, by cDNA: gi_13194833, supported by cDNA: gi_16648870, supported cDNA: gi_17380899, supported by cDNA: gi_20259586 [Arabidopsis
  misc_feature (10)..(323): Homolog of NCBI NO: 18406969 NR Description: expressed protein; protein id: At2g46080.1, by cDNA: gi_16604341, supported by cDNA: gi_18252158 [Arabidopsis >gi|25341889|pir||E84898 hypothetical protein At2g46080
  misc_feature (10)..(323): Homolog of NCBI NO: 16604342 NR Description: At2g46080/T3F17.27 [Arabidopsis thaliana]
  misc_feature (10)..(271): Homolog of NCBI NO: 37536014 NR Description: unknown protein [Oryza sativa (japonica
  misc_feature (64)..(331): Homolog of NCBI NO: 15233126 NR Description: putative protein; protein id: At3g61500.1
MSQQRTRSRNPFKILFTKKNNARLSPKLLSLLNNFETNLTVSIRELVPKDKNDIVSVSWMIQAMQSLCETHKSIRTLVKDLEVPVSDLEENFIYIFSDFSLKRELCNAFTSEIYHLEHGNLLLKFAFSKLETNSGNILQRWNQHMVSKNPSIENWGAVLSRLVESMDHHHHISKKGKKKYSAEGKVLLRVLYGVKVKTLYIFSVFDASFSGSSKNLFYLTIPKEMEELPWVQAFMELQNTINPEIKNTFLSDGFTVIKDLEAVETGVKKLYTAVQEGSVPILLVEPLEKSVIELSERFELVSKETRCLSKMVISARDALLESLWTKCAEELGVTLPTMVKSVNIEEKS

SEQ ID NO: 82421 - protein, 289 aa, Arabidopsis thaliana
  peptide (1)..(289): Ceres Seq. ID no. 12665621
  misc_feature (1)..(289): Homolog of NCBI NO: 7485228 NR Description: hypothetical protein A_IG002N01.26 - Arabidopsis >gi|2191147|gb|AAB61034.1| A_IG002N01.26 gene product thaliana] >gi|7267633|emb|CAB80945.1| hypothetical protein
  misc_feature (1)..(289): Homolog of NCBI NO: 30678866 NR Description: expressed protein [Arabidopsis thaliana]
  misc_feature (1)..(289): Homolog of NCBI NO: 28392962 NR Description: unknown protein [Arabidopsis thaliana]
  misc_feature (1)..(284): Homolog of NCBI NO: 18378853 NR Description: expressed protein; protein id: At1g01550.1, by cDNA: gi_13194833, supported by cDNA: gi_16648870, supported cDNA: gi_17380899, supported by cDNA: gi_20259586 [Arabidopsis
  misc_feature (1)..(264): Homolog of NCBI NO: 18406969 NR Description: expressed protein; protein id: At2g46080.1, by cDNA: gi_16604341, supported by cDNA: gi_18252158 [Arabidopsis >gi|25341889|pir||E84898 hypothetical protein At2g46080
  misc_feature (1)..(264): Homolog of NCBI NO: 16604342 NR Description: At2g46080/T3F17.27 [Arabidopsis thaliana]
  misc_feature (1)..(212): Homolog of NCBI NO: 37536014 NR Description: unknown protein [Oryza sativa (japonica
  misc_feature (5)..(272): Homolog of NCBI NO: 15233126 NR Description: putative protein; protein id: At3g61500.1
MIQAMQSLCETHKSIRTLVKDLEVPVSDLEENFIYIFSDFSLKRELCNAFTSEIYHLEHGNLLLKFAFSKLETNSGNILQRWNQHMVSKNPSIENWGAVLSRLVESMDHHHHISKKGKKKYSAEGKVLLRVLYGVKVKTLYIFSVFDASFSGSSKNLFYLTIPKEMEELPWVQAFMELQNTINPEIKNTFLSDGFTVIKDLEAVETGVKKLYTAVQEGSVPILLVEPLEKSVIELSERFELVSKETRCLSKMVISARDALLESLWTKCAEELGVTLPTMVKSVNIEEKS

SEQ ID NO: 82422 - DNA, 1086 bp, Arabidopsis thaliana
  misc_feature (1)..(1086): Ceres Seq. ID no. 12665631
  misc_feature: MA Experiment ID: 20000173 Result: Down-regulated in Transcription
  misc_feature: MA Experiment 20000173 PARAMETER Experiment Name: At_42deg_Heat_P Parameter: Age (day) Value: 14
  misc_feature: MA Experiment 20000173 PARAMETER Experiment Name: At_42deg_Heat_P Parameter: Organism Value: A. thaliana
  misc_feature: MA Experiment 20000173 PARAMETER Experiment Name: At_42deg_Heat_P Parameter: Plant Line Value: WS
  misc_feature: MA Experiment 20000173 PARAMETER Experiment Name: At_42deg_Heat_P Parameter: Temperature (deg C) Value: 42 vs. 22
  misc_feature: MA Experiment 20000173 PARAMETER Experiment Name: At_42deg_Heat_P Parameter: Timepoint (hr) Value: 6
  misc_feature: MA Experiment 20000173 PARAMETER Experiment Name: At_42deg_Heat_P Parameter: Tissue Value: Aerial
  misc_feature: MA Experiment ID: 20000179 Result: Up-regulated in Transcription
  misc_feature: MA Experiment 20000179 PARAMETER Experiment Name: At_Germinating_Seeds_P Parameter: Age (hr) Value: 6 vs. 0
  misc_feature: MA Experiment 20000179 PARAMETER Experiment Name: At_Germinating_Seeds_P Parameter: Tissue Value: Germinating Seeds
  misc_feature: MA Experiment ID: 20000180 Result: Down-regulated in Transcription
  misc_feature: MA Experiment 20000180 PARAMETER Experiment Name: At_Germinating_Seeds_P Parameter: Age (hr) Value: 24 vs. 0
  misc_feature: MA Experiment 20000180 PARAMETER Experiment Name: At_Germinating_Seeds_P Parameter: Tissue Value: Germinating Seeds
  misc_feature: MA Experiment ID: 20000184 Result: Down-regulated in Transcription
  misc_feature: MA Experiment 20000184 PARAMETER Experiment Name: At_Shoots__P Parameter: Age (day) Value: 7
  misc_feature: MA Experiment 20000184 PARAMETER Experiment Name: At_Shoots__P Parameter: Tissue Value: Shoots vs. Whole Plant
  misc_feature: MA Experiment ID: 20000185 Result: Up-regulated in Transcription
  misc_feature: MA Experiment 20000185 PARAMETER Experiment Name: At_Roots__P Parameter: Age (day) Value: 7 vs. 21
  misc_feature: MA Experiment 20000185 PARAMETER Experiment Name: At_Roots__P Parameter: Organism Value: A. thaliana
  misc_feature: MA Experiment 20000185 PARAMETER Experiment Name: At_Roots__P Parameter: Tissue Value: Roots vs. Whole Plant
  misc_feature: MA Experiment ID: 20000227 Result: Down-regulated in Transcription
  misc_feature: MA Experiment 20000227 PARAMETER Experiment Name: At_Root-Tips-vs-Tops_P Parameter: Tissue Value: Root Tips vs. Root Tops
  misc_feature: MA Experiment ID: 20000235 Result: Down-regulated in Transcription
  misc_feature: MA Experiment 20000235 PARAMETER Experiment Name: At_Siliques_P Parameter: Age (day) Value: 21
  misc_feature: MA Experiment 20000235 PARAMETER Experiment Name: At_Siliques_P Parameter: Organism Value: A. thaliana
  misc_feature: MA Experiment 20000235 PARAMETER Experiment Name: At_Siliques_P Parameter: Plant Line Value: WS
  misc_feature: MA Experiment 20000235 PARAMETER Experiment Name: At_Siliques_P Parameter: Tissue Value: 5-10mm Siliques vs. Whole Plant
  misc_feature: MA Experiment ID: 20000264 Result: Down-regulated in Transcription
  misc_feature: MA Experiment 20000264 PARAMETER Experiment Name: At_Open_Flower_P Parameter: Age (day) Value: 21
  misc_feature: MA Experiment 20000264 PARAMETER Experiment Name: At_Open_Flower_P Parameter: Plant Line Value: WS
  misc_feature: MA Experiment 20000264 PARAMETER Experiment Name: At_Open_Flower_P Parameter: Tissue Value: Open Flower vs. Whole Plant
  misc_feature: MA Experiment ID: 20000439 Result: Up-regulated in Transcription
  misc_feature: MA Experiment 20000439 PARAMETER Experiment Name: At_Roots__P Parameter: Age (day) Value: 14 vs. 21
  misc_feature: MA Experiment 20000439 PARAMETER Experiment Name: At_Roots__P Parameter: Organism Value: A. thaliana
  misc_feature: MA Experiment 20000439 PARAMETER Experiment Name: At_Roots__P Parameter: Tissue Value: Roots vs. Whole Plant
  misc_feature: MA Experiment ID: 20000451 Result: Down-regulated in Transcription
  misc_feature: MA Experiment 20000451 PARAMETER Experiment Name: At_CS6879_Shoots-Roots_P Parameter: Age (day) Value: 14
  misc_feature: MA Experiment 20000451 PARAMETER Experiment Name: At_CS6879_Shoots-Roots_P Parameter: Organism Value: A. thaliana
  misc_feature: MA Experiment 20000451 PARAMETER Experiment Name: At_CS6879_Shoots-Roots_P Parameter: Plant Line Value: CS6879 vs. WS
  misc_feature: MA Experiment 20000451 PARAMETER Experiment Name: At_CS6879_Shoots-Roots_P Parameter: Tissue Value: Roots
  misc_feature: MA Experiment ID: 20000495 Result: Up-regulated in Transcription
  misc_feature: MA Experiment 20000495 PARAMETER Experiment Name: At_Guard_Cells_P Parameter: Harvest Date Value: 8/2/2002
  misc_feature: MA Experiment 20000495 PARAMETER Experiment Name: At_Guard_Cells_P Parameter: Organism Value: A. thaliana
  misc_feature: MA Experiment 20000495 PARAMETER Experiment Name: At_Guard_Cells_P Parameter: Tissue Value: Guard Cells vs. Leaves
  misc_feature: MA Experiment ID: 20001906 Result: Up-regulated in Transcription
  misc_feature: MA Experiment 20001906 PARAMETER Experiment Name: At_Drought_Reproduction_P Parameter: Age (day) Value: 35
  misc_feature: MA Experiment 20001906 PARAMETER Experiment Name: At_Drought_Reproduction_P Parameter: Organism Value: A. thaliana
  misc_feature: MA Experiment 20001906 PARAMETER Experiment Name: At_Drought_Reproduction_P Parameter: Plant Line Value: WS
  misc_feature: MA Experiment 20001906 PARAMETER Experiment Name: At_Drought_Reproduction_P Parameter: Timepoint (day) Value: 5
  misc_feature: MA Experiment 20001906 PARAMETER Experiment Name: At_Drought_Reproduction_P Parameter: Tissue Value: Siliques
  misc_feature: MA Experiment 20001906 PARAMETER Experiment Name: At_Drought_Reproduction_P Parameter: Treatment Value: Drought vs. No Drought
atgggttttatcgatggaaagtgggcaccaatgatagtcttaattgtttctaacatgattgcgggaatggttaatgctttagttaagaaagttcttgatggaggcatcaatcatatggttattgctacttatcgtttgggtatatctactcttttccttcttccagtcgcttatttttgggaacggaaaacaagaccaaagctaactctaagcatctcatgtcagcttttcgtcagtgccctttttggggcgagcttgatgcaatatttctacttgcttggactgtcctacacgtctgcaacgctgggatctgctttctgggccataatgccttccctcactttcgttatggctttaatatttgggttcgaaaagctaagtttgaaaacaaaaataggatacggtgtcgttcttggaactttgataagcttagtaggaggtttacttcttactatgtatcaagggattccattaacaaactctccagaacaagcagcaaattcaaataaccacacaggacatgagaattggatcaaaggttgtttctttttattgaccggagttgttcttttcagttcttggatgcttatacaagccaagatcaacgtgaaatacccttgtccatactcgagtaccgttattttgtcggtctttggtacgcttcaatgcgcccttcttagtttaattaagactagacatttggaagattggatccttagagatgagcttaccatcatcaccgtcgttatagcgggagtggttgcacaaggtatgtgtacggtgggcatgtcgtggtgtatcaaacaacaaggacctgtcgtttcctcatcatttagtcctgtcgtgcttatgtctgcaaccgtgttcgatttcttgattcttcatcgtgagatttatttgggaagcgttattggatctgtggtggttgtgatcggtttatatatatttctatggagtaggagtaagcaaatagtagagtgtaagatcatgaagttgcctaccaatacggtggaagaagaaaaggaagaggaaggccgtacaaatgttaacaacggtcaacttttggttattccgatgactccttga

SEQ ID NO: 82423 - protein, 361 aa, Arabidopsis thaliana
  peptide (1)..(361): Ceres Seq. ID no. 12665632
  misc_feature (190)..(318): Pfam Name: Integral membrane protein DUF6 Pfam Description: Integral membrane protein DUF6
  misc_feature (1)..(361): Homolog of NCBI NO: 15234185 NR Description: unknown protein; protein id: At4g01450.1
  misc_feature (1)..(301): Homolog of NCBI NO: 30678880 NR Description: nodulin MtN21 family protein [Arabidopsis >gi|26449909|dbj|BAC42076.1| unknown protein [Arabidopsis >gi|28973211|gb|AAO63930.1| unknown protein [Arabidopsis
  misc_feature (315)..(361): Homolog of NCBI NO: 30678880 NR Description: nodulin MtN21 family protein [Arabidopsis >gi|26449909|dbj|BAC42076.1| unknown protein [Arabidopsis >gi|28973211|gb|AAO63930.1| unknown protein [Arabidopsis
  misc_feature (84)..(361): Homolog of NCBI NO: 7485384 NR Description: hypothetical protein F11O4.14 - Arabidopsis >gi|3695385|gb|AAC62788.1| similar to Medicago truncatula MtN21
  misc_feature (1)..(85): Homolog of NCBI NO: 7485384 NR Description: hypothetical protein F11O4.14 - Arabidopsis >gi|3695385|gb|AAC62788.1| similar to Medicago truncatula MtN21
  misc_feature (1)..(361): Homolog of NCBI NO: 15234182 NR Description: hypothetical protein; protein id: At4g01440.1, by cDNA: 40560. [Arabidopsis thaliana] >gi|25407108|pir||G85018
  misc_feature (7)..(351): Homolog of NCBI NO: 15234179 NR Description: unknown protein; protein id: At4g01430.1, by cDNA: gi_20260641 [Arabidopsis thaliana]
  misc_feature (7)..(323): Homolog of NCBI NO: 18378792 NR Description: expressed protein; protein id: At1g01070.1,
  misc_feature (4)..(324): Homolog of NCBI NO: 15220389 NR Description: hypothetical protein; protein id: At1g11460.1
  misc_feature (7)..(351): Homolog of NCBI NO: 7486354 NR Description: hypothetical protein F3D13.4 - Arabidopsis >gi|3193309|gb|AAC19292.1| F3D13.4 gene product [Arabidopsis
MGFIDGKWAPMIVLIVSNMIAGMVNALVKKVLDGGINHMVIATYRLGISTLFLLPVAYFWERKTRPKLTLSISCQLFVSALFGASLMQYFYLLGLSYTSATLGSAFWAIMPSLTFVMALIFGFEKLSLKTKIGYGVVLGTLISLVGGLLLTMYQGIPLTNSPEQAANSNNHTGHENWIKGCFFLLTGVVLFSSWMLIQAKINVKYPCPYSSTVILSVFGTLQCALLSLIKTRHLEDWILRDELTIITVVIAGVVAQGMCTVGMSWCIKQQGPVVSSSFSPVVLMSATVFDFLILHREIYLGSVIGSVVVVIGLYIFLWSRSKQIVECKIMKLPTNTVEEEKEEEGRTNVNNGQLLVIPMTP

SEQ ID NO: 82424 - protein, 351 aa, Arabidopsis thaliana
  peptide (1)..(351): Ceres Seq. ID no. 12665633
  misc_feature (180)..(308): Pfam Name: Integral membrane protein DUF6 Pfam Description: Integral membrane protein DUF6
  misc_feature (1)..(351): Homolog of NCBI NO: 15234185 NR Description: unknown protein; protein id: At4g01450.1
  misc_feature (1)..(291): Homolog of NCBI NO: 30678880 NR Description: nodulin MtN21 family protein [Arabidopsis >gi|26449909|dbj|BAC42076.1| unknown protein [Arabidopsis >gi|28973211|gb|AAO63930.1| unknown protein [Arabidopsis
  misc_feature (305)..(351): Homolog of NCBI NO: 30678880 NR Description: nodulin MtN21 family protein [Arabidopsis >gi|26449909|dbj|BAC42076.1| unknown protein [Arabidopsis >gi|28973211|gb|AAO63930.1| unknown protein [Arabidopsis
  misc_feature (74)..(351): Homolog of NCBI NO: 7485384 NR Description: hypothetical protein F11O4.14 - Arabidopsis >gi|3695385|gb|AAC62788.1| similar to Medicago truncatula MtN21
  misc_feature (1)..(75): Homolog of NCBI NO: 7485384 NR Description: hypothetical protein F11O4.14 - Arabidopsis >gi|3695385|gb|AAC62788.1| similar to Medicago truncatula MtN21
  misc_feature (1)..(351): Homolog of NCBI NO: 15234182 NR Description: hypothetical protein; protein id: At4g01440.1, by cDNA: 40560. [Arabidopsis thaliana] >gi|25407108|pir||G85018
  misc_feature (1)..(341): Homolog of NCBI NO: 15234179 NR Description: unknown protein; protein id: At4g01430.1, by cDNA: gi_20260641 [Arabidopsis thaliana]
  misc_feature (1)..(313): Homolog of NCBI NO: 18378792 NR Description: expressed protein; protein id: At1g01070.1,
  misc_feature (1)..(314): Homolog of NCBI NO: 15220389 NR Description: hypothetical protein; protein id: At1g11460.1
  misc_feature (1)..(341): Homolog of NCBI NO: 7486354 NR Description: hypothetical protein F3D13.4 - Arabidopsis >gi|3193309|gb|AAC19292.1| F3D13.4 gene product [Arabidopsis
MIVLIVSNMIAGMVNALVKKVLDGGINHMVIATYRLGISTLFLLPVAYFWERKTRPKLTLSISCQLFVSALFGASLMQYFYLLGLSYTSATLGSAFWAIMPSLTFVMALIFGFEKLSLKTKIGYGVVLGTLISLVGGLLLTMYQGIPLTNSPEQAANSNNHTGHENWIKGCFFLLTGVVLFSSWMLIQAKINVKYPCPYSSTVILSVFGTLQCALLSLIKTRHLEDWILRDELTIITVVIAGVVAQGMCTVGMSWCIKQQGPVVSSSFSPVVLMSATVFDFLILHREIYLGSVIGSVVVVIGLYIFLWSRSKQIVECKIMKLPTNTVEEEKEEEGRTNVNNGQLLVIPMTP

SEQ ID NO: 82425 - protein, 343 aa, Arabidopsis thaliana
  peptide (1)..(343): Ceres Seq. ID no. 12665634
  misc_feature (172)..(300): Pfam Name: Integral membrane protein DUF6 Pfam Description: Integral membrane protein DUF6
  misc_feature (1)..(343): Homolog of NCBI NO: 15234185 NR Description: unknown protein; protein id: At4g01450.1
  misc_feature (1)..(283): Homolog of NCBI NO: 30678880 NR Description: nodulin MtN21 family protein [Arabidopsis >gi|26449909|dbj|BAC42076.1| unknown protein [Arabidopsis >gi|28973211|gb|AAO63930.1| unknown protein [Arabidopsis
  misc_feature (297)..(343): Homolog of NCBI NO: 30678880 NR Description: nodulin MtN21 family protein [Arabidopsis >gi|26449909|dbj|BAC42076.1| unknown protein [Arabidopsis >gi|28973211|gb|AAO63930.1| unknown protein [Arabidopsis
  misc_feature (66)..(343): Homolog of NCBI NO: 7485384 NR Description: hypothetical protein F11O4.14 - Arabidopsis >gi|3695385|gb|AAC62788.1| similar to Medicago truncatula MtN21
  misc_feature (1)..(67): Homolog of NCBI NO: 7485384 NR Description: hypothetical protein F11O4.14 - Arabidopsis >gi|3695385|gb|AAC62788.1| similar to Medicago truncatula MtN21
  misc_feature (1)..(343): Homolog of NCBI NO: 15234182 NR Description: hypothetical protein; protein id: At4g01440.1, by cDNA: 40560. [Arabidopsis thaliana] >gi|25407108|pir||G85018
  misc_feature (1)..(333): Homolog of NCBI NO: 15234179 NR Description: unknown protein; protein id: At4g01430.1, by cDNA: gi_20260641 [Arabidopsis thaliana]
  misc_feature (1)..(305): Homolog of NCBI NO: 18378792 NR Description: expressed protein; protein id: At1g01070.1,
  misc_feature (1)..(306): Homolog of NCBI NO: 15220389 NR Description: hypothetical protein; protein id: At1g11460.1
  misc_feature (1)..(333): Homolog of NCBI NO: 7486354 NR Description: hypothetical protein F3D13.4 - Arabidopsis >gi|3193309|gb|AAC19292.1| F3D13.4 gene product [Arabidopsis
MIAGMVNALVKKVLDGGINHMVIATYRLGISTLFLLPVAYFWERKTRPKLTLSISCQLFVSALFGASLMQYFYLLGLSYTSATLGSAFWAIMPSLTFVMALIFGFEKLSLKTKIGYGVVLGTLISLVGGLLLTMYQGIPLTNSPEQAANSNNHTGHENWIKGCFFLLTGVVLFSSWMLIQAKINVKYPCPYSSTVILSVFGTLQCALLSLIKTRHLEDWILRDELTIITVVIAGVVAQGMCTVGMSWCIKQQGPVVSSSFSPVVLMSATVFDFLILHREIYLGSVIGSVVVVIGLYIFLWSRSKQIVECKIMKLPTNTVEEEKEEEGRTNVNNGQLLVIPMTP

SEQ ID NO: 82426 - DNA, 759 bp, Arabidopsis thaliana
  misc_feature (1)..(759): Ceres Seq. ID no. 12665639
  misc_feature: MA Experiment ID: 20000265 Result: Up-regulated in Transcription
  misc_feature: MA Experiment 20000265 PARAMETER Experiment Name: At_Open_Flower_P Parameter: Age (day) Value: 21
  misc_feature: MA Experiment 20000265 PARAMETER Experiment Name: At_Open_Flower_P Parameter: Plant Line Value: WS
  misc_feature: MA Experiment 20000265 PARAMETER Experiment Name: At_Open_Flower_P Parameter: Tissue Value: Closed Flower vs. Whole Plant
  misc_feature: MA Experiment ID: 20000286 Result: Up-regulated in Transcription
  misc_feature: MA Experiment 20000286 PARAMETER Experiment Name: At_Open_Flower_P Parameter: Age (day) Value: 21
  misc_feature: MA Experiment 20000286 PARAMETER Experiment Name: At_Open_Flower_P Parameter: Plant Line Value: WS
  misc_feature: MA Experiment 20000286 PARAMETER Experiment Name: At_Open_Flower_P Parameter: Tissue Value: Half Open vs. Whole Plant
atgcctatcaacagaattgcgattggaacgccgggggaagctagtcgtcccgatgcgattagagcagctttcgcggagtttttctcgatggttatattcgttttcgcgggtcaaggctctggaatggcttatggaaaactaactggagatggtccagccacacctgccggtcttgtggccgcgtctttgtctcatgcgtttgcgttgttcgttgcggtttccgttggagctaacgtttcaggtggtcatgtgaacccggcggttacatttggggcttttattggtggaaacataacgttgttgagagctattctttattggatcgctcaattactcggagcagtcgtagcttgcttgttgctcaaggtaagcactggcgggatggaaacggctgcgttttcgctatcatatggagtgacgccctggaacgcagtcgttttcgagattgtgatgacgtttgggttagtttacacggtttacgctactgccgtggatcccaagaaaggtgatattggaatcattgcgcctttggcgattgggttaatcgttggagctaacattctggttggtggtgctttcgacggtgcatcgatgaaccccgcggtttcatttggtccggccgtggttagctggatttggacgaatcattgggtctattgggttggtccttttatcggtgcagccattgcagctattgtttatgatactatctttatcggtagtaatggacatgaaccacttccttctaatgatttctaa

SEQ ID NO: 82427 - protein, 252 aa, Arabidopsis thaliana
  peptide (1)..(252): Ceres Seq. ID no. 12665640
  misc_feature (13)..(234): Pfam Name: Major intrinsic protein Pfam Description: Major intrinsic protein
  misc_feature (1)..(252): Homolog of NCBI NO: 15234189 NR Description: putative water channel protein; protein id: [Arabidopsis thaliana] >gi|7441257|pir||T01947 probable membrane
  misc_feature (1)..(252): Homolog of NCBI NO: 8699604 NR Description: putative aquaporin TIP3 [Vitis berlandieri x
  misc_feature (1)..(251): Homolog of NCBI NO: 541951 NR Description: SPCP2 protein - soybean >gi|310578|gb|AAA02947.1|
  misc_feature (1)..(252): Homolog of NCBI NO: 34906078 NR Description: putative tonoplast membrane integral protein
  misc_feature (1)..(249): Homolog of NCBI NO: 4884866 NR Description: water channel protein MipI [Mesembryanthemum
  misc_feature (1)..(249): Homolog of NCBI NO: 13447819 NR Description: tonoplast membrane integral protein ZmTIP1-2 [Zea
  misc_feature (1)..(252): Homolog of NCBI NO: 9988412 NR Description: gamma tonoplast intrinsic protein [Pyrus communis]
  misc_feature (1)..(252): Homolog of NCBI NO: 21284370 NR Description: tonoplast intrinsic protein bobTIP26-1 [Brassica
  misc_feature (1)..(252): Homolog of NCBI NO: 3004950 NR Description: tonoplast intrinsic protein; ZmTIP1 [Zea mays]
  misc_feature (1)..(252): Homolog of NCBI NO: 21593151 NR Description: putative aquaporin (tonoplast intrinsic protein
MPINRIAIGTPGEASRPDAIRAAFAEFFSMVIFVFAGQGSGMAYGKLTGDGPATPAGLVAASLSHAFALFVAVSVGANVSGGHVNPAVTFGAFIGGNITLLRAILYWIAQLLGAVVACLLLKVSTGGMETAAFSLSYGVTPWNAVVFEIVMTFGLVYTVYATAVDPKKGDIGIIAPLAIGLIVGANILVGGAFDGASMNPAVSFGPAVVSWIWTNHWVYWVGPFIGAAIAAIVYDTIFIGSNGHEPLPSNDF

SEQ ID NO: 82428 - protein, 223 aa, Arabidopsis thaliana
  peptide (1)..(223): Ceres Seq. ID no. 12665641
  misc_feature (1)..(205): Pfam Name: Major intrinsic protein Pfam Description: Major intrinsic protein
  misc_feature (1)..(223): Homolog of NCBI NO: 15234189 NR Description: putative water channel protein; protein id: [Arabidopsis thaliana] >gi|7441257|pir||T01947 probable membrane
  misc_feature (1)..(223): Homolog of NCBI NO: 8699604 NR Description: putative aquaporin TIP3 [Vitis berlandieri x
  misc_feature (1)..(222): Homolog of NCBI NO: 541951 NR Description: SPCP2 protein - soybean >gi|310578|gb|AAA02947.1|
  misc_feature (1)..(223): Homolog of NCBI NO: 34906078 NR Description: putative tonoplast membrane integral protein
  misc_feature (1)..(220): Homolog of NCBI NO: 4884866 NR Description: water channel protein MipI [Mesembryanthemum
  misc_feature (1)..(220): Homolog of NCBI NO: 13447819 NR Description: tonoplast membrane integral protein ZmTIP1-2 [Zea
  misc_feature (1)..(223): Homolog of NCBI NO: 9988412 NR Description: gamma tonoplast intrinsic protein [Pyrus communis]
  misc_feature (1)..(223): Homolog of NCBI NO: 21284370 NR Description: tonoplast intrinsic protein bobTIP26-1 [Brassica
  misc_feature (1)..(223): Homolog of NCBI NO: 3004950 NR Description: tonoplast intrinsic protein; ZmTIP1 [Zea mays]
  misc_feature (1)..(223): Homolog of NCBI NO: 21593151 NR Description: putative aquaporin (tonoplast intrinsic protein
MVIFVFAGQGSGMAYGKLTGDGPATPAGLVAASLSHAFALFVAVSVGANVSGGHVNPAVTFGAFIGGNITLLRAILYWIAQLLGAVVACLLLKVSTGGMETAAFSLSYGVTPWNAVVFEIVMTFGLVYTVYATAVDPKKGDIGIIAPLAIGLIVGANILVGGAFDGASMNPAVSFGPAVVSWIWTNHWVYWVGPFIGAAIAAIVYDTIFIGSNGHEPLPSNDF

SEQ ID NO: 82429 - protein, 211 aa, Arabidopsis thaliana
  peptide (1)..(211): Ceres Seq. ID no. 12665642
  misc_feature (1)..(193): Pfam Name: Major intrinsic protein Pfam Description: Major intrinsic protein
  misc_feature (1)..(211): Homolog of NCBI NO: 15234189 NR Description: putative water channel protein; protein id: [Arabidopsis thaliana] >gi|7441257|pir||T01947 probable membrane
  misc_feature (1)..(211): Homolog of NCBI NO: 8699604 NR Description: putative aquaporin TIP3 [Vitis berlandieri x
  misc_feature (1)..(210): Homolog of NCBI NO: 541951 NR Description: SPCP2 protein - soybean >gi|310578|gb|AAA02947.1|
  misc_feature (1)..(211): Homolog of NCBI NO: 34906078 NR Description: putative tonoplast membrane integral protein
  misc_feature (1)..(208): Homolog of NCBI NO: 4884866 NR Description: water channel protein MipI [Mesembryanthemum
  misc_feature (1)..(208): Homolog of NCBI NO: 13447819 NR Description: tonoplast membrane integral protein ZmTIP1-2 [Zea
  misc_feature (1)..(211): Homolog of NCBI NO: 9988412 NR Description: gamma tonoplast intrinsic protein [Pyrus communis]
  misc_feature (1)..(211): Homolog of NCBI NO: 21284370 NR Description: tonoplast intrinsic protein bobTIP26-1 [Brassica
  misc_feature (1)..(211): Homolog of NCBI NO: 3004950 NR Description: tonoplast intrinsic protein; ZmTIP1 [Zea mays]
  misc_feature (1)..(211): Homolog of NCBI NO: 21593151 NR Description: putative aquaporin (tonoplast intrinsic protein
MAYGKLTGDGPATPAGLVAASLSHAFALFVAVSVGANVSGGHVNPAVTFGAFIGGNITLLRAILYWIAQLLGAVVACLLLKVSTGGMETAAFSLSYGVTPWNAVVFEIVMTFGLVYTVYATAVDPKKGDIGIIAPLAIGLIVGANILVGGAFDGASMNPAVSFGPAVVSWIWTNHWVYWVGPFIGAAIAAIVYDTIFIGSNGHEPLPSNDF

SEQ ID NO: 82430 - DNA, 768 bp, Arabidopsis thaliana
  misc_feature (1)..(768): Ceres Seq. ID no. 12665664
  misc_feature: MA Experiment ID: 20000314 Result: Up-regulated in Transcription
  misc_feature: MA Experiment 20000314 PARAMETER Experiment Name: At_14day_Shoots-Roots_Sub_P Parameter: Age (day) Value: 14
  misc_feature: MA Experiment 20000314 PARAMETER Experiment Name: At_14day_Shoots-Roots_Sub_P Parameter: Organism Value: A. thaliana
  misc_feature: MA Experiment 20000314 PARAMETER Experiment Name: At_14day_Shoots-Roots_Sub_P Parameter: Plant Line Value: WS
  misc_feature: MA Experiment 20000314 PARAMETER Experiment Name: At_14day_Shoots-Roots_Sub_P Parameter: Tissue Value: Roots vs. Whole Plant
  misc_feature: MA Experiment ID: 20000634 Result: Up-regulated in Transcription
  misc_feature: MA Experiment 20000634 PARAMETER Experiment Name: At_10percent_PEG_Sub_P Parameter: Age (day) Value: 12
  misc_feature: MA Experiment 20000634 PARAMETER Experiment Name: At_10percent_PEG_Sub_P Parameter: Organism Value: A. thaliana
  misc_feature: MA Experiment 20000634 PARAMETER Experiment Name: At_10percent_PEG_Sub_P Parameter: Plant Line Value: WS
  misc_feature: MA Experiment 20000634 PARAMETER Experiment Name: At_10percent_PEG_Sub_P Parameter: Timepoint (day) Value: 12
  misc_feature: MA Experiment 20000634 PARAMETER Experiment Name: At_10percent_PEG_Sub_P Parameter: Tissue Value: Whole Plant
  misc_feature: MA Experiment 20000634 PARAMETER Experiment Name: At_10percent_PEG_Sub_P Parameter: Treatment Value: 10% PEG vs. No Treatment
atgacgaagattttctctctattggtcgcaatgatcttctccacaatgttcttcatgaagatcagctcagtttctgctggttggttgcaagctcatgcgaccttttatggcggaagtgatgcctctggtacaatgggtggagcttgtggttatggaaacctatacacagacggctacaagacaaacaccgcggcgttaagcacggccctgttcaacgacggcaagtcatgcggtggatgttaccaaatcttgtgtgatgcaaccaaagtaccacaatggtgtcttaaaggcaaatcaatcactatcacagctacaaacttctgtccaccgaactttgctcaggcaagcgacaatggaggttggtgcaacccaccgagacctcatttcgacatggctcagcctgcgtttctcaccatcgctaagtacaaagctggaatcgtccccattctttacaaaaaagttggatgtagaagaagcggagggatgagatttacaataaacggtagaaactatttcgagcttgttctcatctcaaacgtagcaggagggggtgagatctctaaagtttggatcaaaggatctaagagcaacaaatgggagacaatgtcaagaaattggggagctaattatcagagtaatacttaccttaatggtcaatctctatctttcaaagttcaacttagtgatggaagtatcaaagcagctctcaacgttgttccttcgaattggcggtttggtcagagcttcaagagcaacgttaacttctaa

SEQ ID NO: 82431 - protein, 255 aa, Arabidopsis thaliana
  peptide (1)..(255): Ceres Seq. ID no. 12665665
  misc_feature (162)..(240): Pfam Name: Pollen allergen Pfam Description: Pollen allergen
  misc_feature (1)..(255): Homolog of NCBI NO: 15234257 NR Description: expansin, putative; protein id: At4g01630.1
  misc_feature (4)..(255): Homolog of NCBI NO: 4027891 NR Description: alpha-expansin precursor [Nicotiana tabacum]
  misc_feature (4)..(255): Homolog of NCBI NO: 30519752 NR Description: expansin11 [Lycopersicon esculentum]
  misc_feature (1)..(255): Homolog of NCBI NO: 7484747 NR Description: expansin S2 precursor - cucumber
  misc_feature (1)..(255): Homolog of NCBI NO: 4027893 NR Description: alpha-expansin precursor [Nicotiana tabacum]
  misc_feature (1)..(255): Homolog of NCBI NO: 20149056 NR Description: putative expansin [Capsicum annuum]
  misc_feature (1)..(255): Homolog of NCBI NO: 4027895 NR Description: alpha-expansin precursor [Nicotiana tabacum]
  misc_feature (17)..(255): Homolog of NCBI NO: 11191999 NR Description: expansin [Lycopersicon esculentum]
  misc_feature (7)..(255): Homolog of NCBI NO: 9887379 NR Description: alpha-expansin 3 [Striga asiatica]
MTKIFSLLVAMIFSTMFFMKISSVSAGWLQAHATFYGGSDASGTMGGACGYGNLYTDGYKTNTAALSTALFNDGKSCGGCYQILCDATKVPQWCLKGKSITITATNFCPPNFAQASDNGGWCNPPRPHFDMAQPAFLTIAKYKAGIVPILYKKVGCRRSGGMRFTINGRNYFELVLISNVAGGGEISKVWIKGSKSNKWETMSRNWGANYQSNTYLNGQSLSFKVQLSDGSIKAALNVVPSNWRFGQSFKSNVNF

SEQ ID NO: 82432 - protein, 245 aa, Arabidopsis thaliana
  peptide (1)..(245): Ceres Seq. ID no. 12665666
  misc_feature (152)..(230): Pfam Name: Pollen allergen Pfam Description: Pollen allergen
  misc_feature (1)..(245): Homolog of NCBI NO: 15234257 NR Description: expansin, putative; protein id: At4g01630.1
  misc_feature (1)..(245): Homolog of NCBI NO: 4027891 NR Description: alpha-expansin precursor [Nicotiana tabacum]
  misc_feature (1)..(245): Homolog of NCBI NO: 30519752 NR Description: expansin11 [Lycopersicon esculentum]
  misc_feature (1)..(245): Homolog of NCBI NO: 7484747 NR Description: expansin S2 precursor - cucumber
  misc_feature (1)..(245): Homolog of NCBI NO: 4027893 NR Description: alpha-expansin precursor [Nicotiana tabacum]
  misc_feature (1)..(245): Homolog of NCBI NO: 20149056 NR Description: putative expansin [Capsicum annuum]
  misc_feature (1)..(245): Homolog of NCBI NO: 4027895 NR Description: alpha-expansin precursor [Nicotiana tabacum]
  misc_feature (7)..(245): Homolog of NCBI NO: 11191999 NR Description: expansin [Lycopersicon esculentum]
  misc_feature (1)..(245): Homolog of NCBI NO: 9887379 NR Description: alpha-expansin 3 [Striga asiatica]
MIFSTMFFMKISSVSAGWLQAHATFYGGSDASGTMGGACGYGNLYTDGYKTNTAALSTALFNDGKSCGGCYQILCDATKVPQWCLKGKSITITATNFCPPNFAQASDNGGWCNPPRPHFDMAQPAFLTIAKYKAGIVPILYKKVGCRRSGGMRFTINGRNYFELVLISNVAGGGEISKVWIKGSKSNKWETMSRNWGANYQSNTYLNGQSLSFKVQLSDGSIKAALNVVPSNWRFGQSFKSNVNF

SEQ ID NO: 82433 - protein, 240 aa, Arabidopsis thaliana
  peptide (1)..(240): Ceres Seq. ID no. 12665667
  misc_feature (147)..(225): Pfam Name: Pollen allergen Pfam Description: Pollen allergen
  misc_feature (1)..(240): Homolog of NCBI NO: 15234257 NR Description: expansin, putative; protein id: At4g01630.1
  misc_feature (1)..(240): Homolog of NCBI NO: 4027891 NR Description: alpha-expansin precursor [Nicotiana tabacum]
  misc_feature (1)..(240): Homolog of NCBI NO: 30519752 NR Description: expansin11 [Lycopersicon esculentum]
  misc_feature (1)..(240): Homolog of NCBI NO: 7484747 NR Description: expansin S2 precursor - cucumber
  misc_feature (1)..(240): Homolog of NCBI NO: 4027893 NR Description: alpha-expansin precursor [Nicotiana tabacum]
  misc_feature (1)..(240): Homolog of NCBI NO: 20149056 NR Description: putative expansin [Capsicum annuum]
  misc_feature (1)..(240): Homolog of NCBI NO: 4027895 NR Description: alpha-expansin precursor [Nicotiana tabacum]
  misc_feature (2)..(240): Homolog of NCBI NO: 11191999 NR Description: expansin [Lycopersicon esculentum]
  misc_feature (1)..(240): Homolog of NCBI NO: 9887379 NR Description: alpha-expansin 3 [Striga asiatica]
MFFMKISSVSAGWLQAHATFYGGSDASGTMGGACGYGNLYTDGYKTNTAALSTALFNDGKSCGGCYQILCDATKVPQWCLKGKSITITATNFCPPNFAQASDNGGWCNPPRPHFDMAQPAFLTIAKYKAGIVPILYKKVGCRRSGGMRFTINGRNYFELVLISNVAGGGEISKVWIKGSKSNKWETMSRNWGANYQSNTYLNGQSLSFKVQLSDGSIKAALNVVPSNWRFGQSFKSNVNF

SEQ ID NO: 82434 - DNA, 1385 bp, Arabidopsis thaliana
  misc_feature (1)..(1385): Ceres Seq. ID no. 12665677
  misc_feature: MA Experiment ID: 20000227 Result: Down-regulated in Transcription
  misc_feature: MA Experiment 20000227 PARAMETER Experiment Name: At_Root-Tips-vs-Tops_P Parameter: Tissue Value: Root Tips vs. Root Tops
  misc_feature: MA Experiment ID: 20000235 Result: Up-regulated in Transcription
  misc_feature: MA Experiment 20000235 PARAMETER Experiment Name: At_Siliques_P Parameter: Age (day) Value: 21
  misc_feature: MA Experiment 20000235 PARAMETER Experiment Name: At_Siliques_P Parameter: Organism Value: A. thaliana
  misc_feature: MA Experiment 20000235 PARAMETER Experiment Name: At_Siliques_P Parameter: Plant Line Value: WS
  misc_feature: MA Experiment 20000235 PARAMETER Experiment Name: At_Siliques_P Parameter: Tissue Value: 5-10mm Siliques vs. Whole Plant
  misc_feature: MA Experiment ID: 20000265 Result: Down-regulated in Transcription
  misc_feature: MA Experiment 20000265 PARAMETER Experiment Name: At_Open_Flower_P Parameter: Age (day) Value: 21
  misc_feature: MA Experiment 20000265 PARAMETER Experiment Name: At_Open_Flower_P Parameter: Plant Line Value: WS
  misc_feature: MA Experiment 20000265 PARAMETER Experiment Name: At_Open_Flower_P Parameter: Tissue Value: Closed Flower vs. Whole Plant
  misc_feature: MA Experiment ID: 20000286 Result: Down-regulated in Transcription
  misc_feature: MA Experiment 20000286 PARAMETER Experiment Name: At_Open_Flower_P Parameter: Age (day) Value: 21
  misc_feature: MA Experiment 20000286 PARAMETER Experiment Name: At_Open_Flower_P Parameter: Plant Line Value: WS
  misc_feature: MA Experiment 20000286 PARAMETER Experiment Name: At_Open_Flower_P Parameter: Tissue Value: Half Open vs. Whole Plant
  misc_feature: MA Experiment ID: 20000437 Result: Down-regulated in Transcription
  misc_feature: MA Experiment 20000437 PARAMETER Experiment Name: At_Drought_P Parameter: Age (day) Value: 8
  misc_feature: MA Experiment 20000437 PARAMETER Experiment Name: At_Drought_P Parameter: Organism Value: A. thaliana
  misc_feature: MA Experiment 20000437 PARAMETER Experiment Name: At_Drought_P Parameter: Plant Line Value: WS
  misc_feature: MA Experiment 20000437 PARAMETER Experiment Name: At_Drought_P Parameter: Timepoint (hr) Value: 24
  misc_feature: MA Experiment 20000437 PARAMETER Experiment Name: At_Drought_P Parameter: Tissue Value: Whole Plant
  misc_feature: MA Experiment 20000437 PARAMETER Experiment Name: At_Drought_P Parameter: Treatment Value: Drought vs. No Drought
  misc_feature: MA Experiment ID: 20000438 Result: Up-regulated in Transcription
  misc_feature: MA Experiment 20000438 PARAMETER Experiment Name: At_Shoots__P Parameter: Age (day) Value: 14
  misc_feature: MA Experiment 20000438 PARAMETER Experiment Name: At_Shoots__P Parameter: Tissue Value: Shoots vs. Whole Plant
acttcaaactctctctatctttctctctcacctcatattatgaactaaagatttctctgaaagctgacttcataaactttttctgaagaagaaacacacaaaaacgatcgatcttgaattgattctttgtagtattttatttacatatatatatagatgggaagacattcatgttgttacaaacagaaactgaggaaaggactttggtctcctgaagaagatgagaagcttcttcgttacatcactaagtatggtcatggttgctggagctctgtccctaaacaagctggtttacagagatgtggaaaaagttgtagattaagatggataaattatttaagaccagatttgaagagaggagcattttctcaagatgaagaaaatctcattattgaacttcatgccgttcttggcaatagatggtctcagatagctgcacagcttcctggaagaaccgacaatgaaatcaagaatctttggaattcttgtttgaagaagaaattgaggctgagaggaattgacccggttacacacaagctcttaaccgaaatcgaaaccggtacagatgacaaaacaaaaccggttgagaagagtcaacagacctacctcgttgagactgatggctcctctagtaccactacttgtagtactaaccaaaacaacaacactgatcatctttataccggaaatttcggttttcaacggttaagtctagaaaacggttcaagaatcgcagccggttctgacctcggtatctggattccccaaaccggaagaaaccatcatcatcatgtcgatgaaaccatccctagtgcagtggtactacccggttcaatgttctcatccggtttaaccggttatagatcctccaatctcggtttaattgaattggaaaactcattctcaaccgggccaatgatgacagagcatcagcaaattcaagagagtaactacaacaattcaacattctttggaaatgggaatctgaattggggattaacaatggaggaaaatcaaaatccattcacaatatcgaatcattcaaattcgtccttatacagtgatataaaatcagagaccaatttttttggcacagaggctacaaatgttggtatgtggccatgtaaccagctccagcctcagcaacatgcatatggccatatataaatcttcttgtatattataaggtgtgtgaatcttcttttttttttttctcaaatatggttttttttttttttaatgggttgtgtatatagtttgtgttatatatcatttaatttaacagtattggtttttacatttttttgttttcatattcgatgtaccttgtgaaccacagatttatggactcggggattttgtttctctattgttaatggcttacg

SEQ ID NO: 82435 - protein, 336 aa, Arabidopsis thaliana
  peptide (1)..(336): Ceres Seq. ID no. 12665678
  misc_feature (14)..(61): Pfam Name: Myb-like DNA-binding domain Pfam Description: Myb-like DNA-binding domain
  misc_feature (1)..(336): Homolog of NCBI NO: 15234262 NR Description: myb family transcription factor; protein id: supported by cDNA: gi_15375280, supported by cDNA: gi_15450989
  misc_feature (1)..(336): Homolog of NCBI NO: 7438352 NR Description: transcription factor MYB4 homolog T15B16.7 -
  misc_feature (1)..(313): Homolog of NCBI NO: 22329445 NR Description: myb family transcription factor; protein id: supported by cDNA: gi_20465974 [Arabidopsis thaliana] putative transcription factor [Arabidopsis thaliana]
  misc_feature (1)..(313): Homolog of NCBI NO: 25294104 NR Description: hypothetical protein [imported] - Arabidopsis >gi|3482929|gb|AAC33214.1| Putative transcription factor
  misc_feature (1)..(330): Homolog of NCBI NO: 28628949 NR Description: MYB2 [Dendrobium sp. XMW-2002-2]
  misc_feature (1)..(149): Homolog of NCBI NO: 15223612 NR Description: myb family transcription factor; protein id: supported by cDNA: 250386. [Arabidopsis thaliana]
  misc_feature (1)..(149): Homolog of NCBI NO: 34902542 NR Description: putative transcription factor (myb) [Oryza sativa
  misc_feature (1)..(134): Homolog of NCBI NO: 2280530 NR Description: ATMYB4 [Arabidopsis thaliana]
  misc_feature (1)..(134): Homolog of NCBI NO: 30690317 NR Description: myb transcription factor (ATMYB4) [Arabidopsis >gi|20466622|gb|AAM20628.1| transcription factor ATMYB4 thaliana] >gi|30984580|gb|AAP42753.1| At5g26655 [Arabidopsis
  misc_feature (43)..(134): Homolog of NCBI NO: 7446174 NR Description: transcription factor MYB4 - Arabidopsis thaliana
MGRHSCCYKQKLRKGLWSPEEDEKLLRYITKYGHGCWSSVPKQAGLQRCGKSCRLRWINYLRPDLKRGAFSQDEENLIIELHAVLGNRWSQIAAQLPGRTDNEIKNLWNSCLKKKLRLRGIDPVTHKLLTEIETGTDDKTKPVEKSQQTYLVETDGSSSTTTCSTNQNNNTDHLYTGNFGFQRLSLENGSRIAAGSDLGIWIPQTGRNHHHHVDETIPSAVVLPGSMFSSGLTGYRSSNLGLIELENSFSTGPMMTEHQQIQESNYNNSTFFGNGNLNWGLTMEENQNPFTISNHSNSSLYSDIKSETNFFGTEATNVGMWPCNQLQPQQHAYGHI

SEQ ID NO: 82436 - DNA, 823 bp, Arabidopsis thaliana
  misc_feature (1)..(823): Ceres Seq. ID no. 12665699
  misc_feature: MA Experiment ID: 20000179 Result: Up-regulated in Transcription
  misc_feature: MA Experiment 20000179 PARAMETER Experiment Name: At_Germinating_Seeds_P Parameter: Age (hr) Value: 6 vs. 0
  misc_feature: MA Experiment 20000179 PARAMETER Experiment Name: At_Germinating_Seeds_P Parameter: Tissue Value: Germinating Seeds
  misc_feature: MA Experiment ID: 20000180 Result: Up-regulated in Transcription
  misc_feature: MA Experiment 20000180 PARAMETER Experiment Name: At_Germinating_Seeds_P Parameter: Age (hr) Value: 24 vs. 0
  misc_feature: MA Experiment 20000180 PARAMETER Experiment Name: At_Germinating_Seeds_P Parameter: Tissue Value: Germinating Seeds
  misc_feature: MA Experiment ID: 20000227 Result: Up-regulated in Transcription
  misc_feature: MA Experiment 20000227 PARAMETER Experiment Name: At_Root-Tips-vs-Tops_P Parameter: Tissue Value: Root Tips vs. Root Tops
  misc_feature: MA Experiment ID: 20000265 Result: Up-regulated in Transcription
  misc_feature: MA Experiment 20000265 PARAMETER Experiment Name: At_Open_Flower_P Parameter: Age (day) Value: 21
  misc_feature: MA Experiment 20000265 PARAMETER Experiment Name: At_Open_Flower_P Parameter: Plant Line Value: WS
  misc_feature: MA Experiment 20000265 PARAMETER Experiment Name: At_Open_Flower_P Parameter: Tissue Value: Closed Flower vs. Whole Plant
  misc_feature: MA Experiment ID: 20001247 Result: Down-regulated in Transcription
  misc_feature: MA Experiment 20001247 PARAMETER Experiment Name: At_Far-red-induction_P Parameter: Age (day) Value: 7
  misc_feature: MA Experiment 20001247 PARAMETER Experiment Name: At_Far-red-induction_P Parameter: Light Value: Far-red vs. White
  misc_feature: MA Experiment 20001247 PARAMETER Experiment Name: At_Far-red-induction_P Parameter: Organism Value: A. thaliana
  misc_feature: MA Experiment 20001247 PARAMETER Experiment Name: At_Far-red-induction_P Parameter: Plant Line Value: Columbia
  misc_feature: MA Experiment 20001247 PARAMETER Experiment Name: At_Far-red-induction_P Parameter: Timepoint (hr) Value: 1
  misc_feature: MA Experiment 20001247 PARAMETER Experiment Name: At_Far-red-induction_P Parameter: Tissue Value: Whole Plant
  misc_feature: MA Experiment ID: 20001560 Result: Up-regulated in Transcription
  misc_feature: MA Experiment 20001560 PARAMETER Experiment Name: At_Drought_Soil_Dry_P Parameter: Age (day) Value: 28
  misc_feature: MA Experiment 20001560 PARAMETER Experiment Name: At_Drought_Soil_Dry_P Parameter: Organism Value: A. thaliana
  misc_feature: MA Experiment 20001560 PARAMETER Experiment Name: At_Drought_Soil_Dry_P Parameter: Plant Line Value: WS
  misc_feature: MA Experiment 20001560 PARAMETER Experiment Name: At_Drought_Soil_Dry_P Parameter: Post Timepoint (hr) Value: None
  misc_feature: MA Experiment 20001560 PARAMETER Experiment Name: At_Drought_Soil_Dry_P Parameter: Post-Treatment Value: None
  misc_feature: MA Experiment 20001560 PARAMETER Experiment Name: At_Drought_Soil_Dry_P Parameter: Timepoint (day) Value: 14
  misc_feature: MA Experiment 20001560 PARAMETER Experiment Name: At_Drought_Soil_Dry_P Parameter: Treatment Value: Drought vs. No Drought
  misc_feature: MA Experiment ID: 20001905 Result: Down-regulated in Transcription
  misc_feature: MA Experiment 20001905 PARAMETER Experiment Name: At_Drought_Reproduction_P Parameter: Age (day) Value: 40
  misc_feature: MA Experiment 20001905 PARAMETER Experiment Name: At_Drought_Reproduction_P Parameter: Organism Value: A. thaliana
  misc_feature: MA Experiment 20001905 PARAMETER Experiment Name: At_Drought_Reproduction_P Parameter: Plant Line Value: WS
  misc_feature: MA Experiment 20001905 PARAMETER Experiment Name: At_Drought_Reproduction_P Parameter: Timepoint (day) Value: 10
  misc_feature: MA Experiment 20001905 PARAMETER Experiment Name: At_Drought_Reproduction_P Parameter: Tissue Value: Rosettes
  misc_feature: MA Experiment 20001905 PARAMETER Experiment Name: At_Drought_Reproduction_P Parameter: Treatment Value: Drought vs. No Drought
  misc_feature: MA Experiment ID: 20001911 Result: Down-regulated in Transcription
  misc_feature: MA Experiment 20001911 PARAMETER Experiment Name: At_Drought_Reproduction_P Parameter: Age (day) Value: 40
  misc_feature: MA Experiment 20001911 PARAMETER Experiment Name: At_Drought_Reproduction_P Parameter: Organism Value: A. thaliana
  misc_feature: MA Experiment 20001911 PARAMETER Experiment Name: At_Drought_Reproduction_P Parameter: Plant Line Value: WS
  misc_feature: MA Experiment 20001911 PARAMETER Experiment Name: At_Drought_Reproduction_P Parameter: Timepoint (day) Value: 10
  misc_feature: MA Experiment 20001911 PARAMETER Experiment Name: At_Drought_Reproduction_P Parameter: Tissue Value: Flowers
  misc_feature: MA Experiment 20001911 PARAMETER Experiment Name: At_Drought_Reproduction_P Parameter: Treatment Value: Drought vs. No Drought
gaaagttgtgttaaaaaaaaaactagaatcatggcggcgtcaatgacgaaacccatctcaataacttctctcggtttctattctgatcgaaagaacattgctttctctgattgcatttcgatttgttctggattcagacattcccgaccatcttgcctcgatttggtcacaaagtcaccgagtaataacagtcgtgttttacctgtcgttagtgcccaaatatcttctgattatattccagactcgaaattttacaaggtggaagcaattgtcagaccatggagaatccagcaagtttcatcggctttactgaaaatcgggattcgaggtgttactgtttctgatgtgagagggtttggtgcacaaggaggttctaccgagagacacggtggctctgagttctcggaagacaaatttgttgctaaagttaagatggaaatcgttgttaagaaagaccaagtggaatctgtaatcaacacaataattgaaggagcaaggacaggagagattggtgatggcaagatttttgttttgcctgtgtcagatgtcataagagttaggacaggtgagcgtggggagaaagcagagaagatgactggtgatatgctttcaccgtcttaggaacaaacagagctcaagaatggtttttttttttttcatttcggtctctagattctgcgaataataatgaatggagtctgtgtttggtttcatgttgaatcgatcaagatgtgtttttaactgtacatgaattatgcagaaacatctgtcctggttctcagacatcgaaactctgttcctaataaaagccgaagtccctgtt

SEQ ID NO: 82437 - protein, 206 aa, Arabidopsis thaliana
  peptide (1)..(206): Ceres Seq. ID no. 12665700
  misc_feature (11)..(206): Homolog of NCBI NO: 15234360 NR Description: P II nitrogen sensing protein GLB I; protein id:
  misc_feature (21)..(200): Homolog of NCBI NO: 3885941 NR Description: PII protein [Ricinus communis]
  misc_feature (15)..(202): Homolog of NCBI NO: 13277515 NR Description: PII protein [Medicago sativa]
  misc_feature (63)..(200): Homolog of NCBI NO: 38231570 NR Description: PII-like protein [Lycopersicon esculentum]
  misc_feature (77)..(200): Homolog of NCBI NO: 37653227 NR Description: PII-like protein [Pinus pinaster]
  misc_feature (86)..(195): Homolog of NCBI NO: 15605696 NR Description: nitrogen regulatory PII protein [Aquifex aeolicus]
  misc_feature (86)..(195): Homolog of NCBI NO: 33863748 NR Description: Nitrogen regulatory protein P-II [Prochlorococcus
  misc_feature (86)..(195): Homolog of NCBI NO: 39996935 NR Description: nitrogen regulatory protein P-II [Geobacter
  misc_feature (86)..(190): Homolog of NCBI NO: 23041178 NR Description: hypothetical protein [Trichodesmium erythraeum
  misc_feature (86)..(195): Homolog of NCBI NO: 17229811 NR Description: nitrogen regulatory protein P-II [Nostoc sp. PCC
ESCVKKKTRIMAASMTKPISITSLGFYSDRKNIAFSDCISICSGFRHSRPSCLDLVTKSPSNNSRVLPVVSAQISSDYIPDSKFYKVEAIVRPWRIQQVSSALLKIGIRGVTVSDVRGFGAQGGSTERHGGSEFSEDKFVAKVKMEIVVKKDQVESVINTIIEGARTGEIGDGKIFVLPVSDVIRVRTGERGEKAEKMTGDMLSPS

SEQ ID NO: 82438 - protein, 196 aa, Arabidopsis thaliana
  peptide (1)..(196): Ceres Seq. ID no. 12665701
  misc_feature (1)..(196): Homolog of NCBI NO: 15234360 NR Description: P II nitrogen sensing protein GLB I; protein id:
  misc_feature (11)..(190): Homolog of NCBI NO: 3885941 NR Description: PII protein [Ricinus communis]
  misc_feature (5)..(192): Homolog of NCBI NO: 13277515 NR Description: PII protein [Medicago sativa]
  misc_feature (53)..(190): Homolog of NCBI NO: 38231570 NR Description: PII-like protein [Lycopersicon esculentum]
  misc_feature (67)..(190): Homolog of NCBI NO: 37653227 NR Description: PII-like protein [Pinus pinaster]
  misc_feature (76)..(185): Homolog of NCBI NO: 15605696 NR Description: nitrogen regulatory PII protein [Aquifex aeolicus]
  misc_feature (76)..(185): Homolog of NCBI NO: 33863748 NR Description: Nitrogen regulatory protein P-II [Prochlorococcus
  misc_feature (76)..(185): Homolog of NCBI NO: 39996935 NR Description: nitrogen regulatory protein P-II [Geobacter
  misc_feature (76)..(180): Homolog of NCBI NO: 23041178 NR Description: hypothetical protein [Trichodesmium erythraeum
  misc_feature (76)..(185): Homolog of NCBI NO: 17229811 NR Description: nitrogen regulatory protein P-II [Nostoc sp. PCC
MAASMTKPISITSLGFYSDRKNIAFSDCISICSGFRHSRPSCLDLVTKSPSNNSRVLPVVSAQISSDYIPDSKFYKVEAIVRPWRIQQVSSALLKIGIRGVTVSDVRGFGAQGGSTERHGGSEFSEDKFVAKVKMEIVVKKDQVESVINTIIEGARTGEIGDGKIFVLPVSDVIRVRTGERGEKAEKMTGDMLSPS

SEQ ID NO: 82439 - protein, 192 aa, Arabidopsis thaliana
  peptide (1)..(192): Ceres Seq. ID no. 12665702
  misc_feature (1)..(192): Homolog of NCBI NO: 15234360 NR Description: P II nitrogen sensing protein GLB I; protein id:
  misc_feature (7)..(186): Homolog of NCBI NO: 3885941 NR Description: PII protein [Ricinus communis]
  misc_feature (1)..(188): Homolog of NCBI NO: 13277515 NR Description: PII protein [Medicago sativa]
  misc_feature (49)..(186): Homolog of NCBI NO: 38231570 NR Description: PII-like protein [Lycopersicon esculentum]
  misc_feature (63)..(186): Homolog of NCBI NO: 37653227 NR Description: PII-like protein [Pinus pinaster]
  misc_feature (72)..(181): Homolog of NCBI NO: 15605696 NR Description: nitrogen regulatory PII protein [Aquifex aeolicus]
  misc_feature (72)..(181): Homolog of NCBI NO: 33863748 NR Description: Nitrogen regulatory protein P-II [Prochlorococcus
  misc_feature (72)..(181): Homolog of NCBI NO: 39996935 NR Description: nitrogen regulatory protein P-II [Geobacter
  misc_feature (72)..(176): Homolog of NCBI NO: 23041178 NR Description: hypothetical protein [Trichodesmium erythraeum
  misc_feature (72)..(181): Homolog of NCBI NO: 17229811 NR Description: nitrogen regulatory protein P-II [Nostoc sp. PCC
MTKPISITSLGFYSDRKNIAFSDCISICSGFRHSRPSCLDLVTKSPSNNSRVLPVVSAQISSDYIPDSKFYKVEAIVRPWRIQQVSSALLKIGIRGVTVSDVRGFGAQGGSTERHGGSEFSEDKFVAKVKMEIVVKKDQVESVINTIIEGARTGEIGDGKIFVLPVSDVIRVRTGERGEKAEKMTGDMLSPS

SEQ ID NO: 82440 - DNA, 1660 bp, Arabidopsis thaliana
  misc_feature (1)..(1660): Ceres Seq. ID no. 12665712
  misc_feature: MA Experiment ID: 20000184 Result: Down-regulated in Transcription
  misc_feature: MA Experiment 20000184 PARAMETER Experiment Name: At_Shoots__P Parameter: Age (day) Value: 7
  misc_feature: MA Experiment 20000184 PARAMETER Experiment Name: At_Shoots__P Parameter: Tissue Value: Shoots vs. Whole Plant
agaaaaaaattcaaaatccgtaaatctgatgatgcattccgtttcacggctcgcgaggaggttctgtgcaacgctcgctactgctacggcggagattagcggcgaggctgctgcttctgttccgacgaaggcgaaaaagcatcggtcaatatacaagaaactctcaagccttggcacgaggggaggagggaaaatggaggaaacgctaaatcagttcgtcatggaaggcgtacctgtcaaaaaacacgacctcattcgctacgcaaaggatcttcgcaagtttcgtcaacctcaacgcgctctcgagatctttgagtggatggaaagaaaggaaatagcgtttactggcagcgatcacgcgattcgtttgaatctaattgcaaagagtaaaggcttagaggcggctgagacctacttcaacagtttagacgattctattaagaatcagtccacttatggttccttattgaactgttactgtgtggaaaaggaggaagttaaagcaaaggctcattttgaaaatatggttgatctcaatcatgtgagtaattctttgccgtttaataacctgatggctatgtatatggggctaggtcaaccagagaaggtgcctgcattggttgttgcgatgaaagagaagagtattactccttgtgatattacttactccatgtggatacaaagctgtggaagtttaaaggatttagatggagtagagaaggttcttgatgaaatgaaagcagaaggtgaaggtattttctcttggaatacatttgctaatcttgcagcaatttatattaaagtcggtctctacggtaaagcagaagaggcgttgaaatctctggagaacaatatgaatcctgacgtacgtgattgttatcattttctcattaacttgtatactggaattgcaaatgcttctgaggtttatcgagtttgggatttgcttaagaaaagataccctaatgtcaacaattcaagctatcttacaatgcttcgagcactgagtaaactcgatgacattgatggagtcaagaaagtctttgcagaatgggaatcgacatgctggacttacgatatgcggatggcgaatgtagcgattagcagctacttaaagcagaacatgtacgaagaagctgaggctgttttcaacggcgccatgaaaaagtgtaaaggtcaattctcaaaggcaaggcagcttttgatgatgcacctgttgaagaacgatcaggcagatttggctctgaagcattttgaagcggcggttttggatcaagacaagaactggacttggagctcagagctgatcagttcgttctttcttcactttgaggaagccaaagacgttgatggagcagaagaattctgcaaaaccttgacgaaatggagtcccctcagttctgaaacttacactcttcttatgaagacttacctcgctgcagggaaagcttgtccggatatgaaaaagagattggaagaacaagggatcctggtagacgaagagcaagaatgtttgcttagcaagatttgcccttgattcatcctaaagcttagtaatgataagtgaatgttctgtaaaactaagcatttgaagcattttgttcggactcatgttctcgttatagtttgccttagatctatatgcataaaacgtgtgtac

SEQ ID NO: 82441 - protein, 511 aa, Arabidopsis thaliana
  peptide (1)..(511): Ceres Seq. ID no. 12665713
  misc_feature (291)..(325): Pfam Name: PPR repeat Pfam Description: PPR repeat
  misc_feature (10)..(511): Homolog of NCBI NO: 18411800 NR Description: expressed protein; protein id: At4g01990.1, by cDNA: gi_14517493, supported by cDNA: gi_16323353 [Arabidopsis >gi|14517494|gb|AAK62637.1| AT4g01990/T7B11_26 [Arabidopsis
  misc_feature (11)..(511): Homolog of NCBI NO: 25407143 NR Description: hypothetical protein AT4g01990 [imported] - thaliana >gi|4558568|gb|AAD22661.1|AC007138_25 hypothetical [Arabidopsis thaliana] >gi|7268583|emb|CAB80692.1| hypothetical
  misc_feature (23)..(511): Homolog of NCBI NO: 15217734 NR Description: hypothetical protein; protein id: At1g02370.1, by cDNA: gi_17529323 [Arabidopsis thaliana]
  misc_feature (23)..(511): Homolog of NCBI NO: 17529324 NR Description: unknown protein [Arabidopsis thaliana]
  misc_feature (42)..(509): Homolog of NCBI NO: 15219808 NR Description: hypothetical protein; protein id: At1g60770.1
  misc_feature (49)..(492): Homolog of NCBI NO: 34905490 NR Description: P0682B08.20 [Oryza sativa (japonica
  misc_feature (13)..(474): Homolog of NCBI NO: 22329290 NR Description: hypothetical protein; protein id: At1g02150.1, by cDNA: gi_20453084 [Arabidopsis thaliana]
  misc_feature (13)..(474): Homolog of NCBI NO: 20453085 NR Description: At1g02150/T7I23.8 [Arabidopsis thaliana]
  misc_feature (23)..(486): Homolog of NCBI NO: 34393591 NR Description: putative DNA-binding protein [Oryza sativa
  misc_feature (42)..(511): Homolog of NCBI NO: 22328859 NR Description: unknown protein; protein id: At4g21705.1 thaliana] >gi|28393142|gb|AAO42004.1| unknown protein thaliana] >gi|28827500|gb|AAO50594.1| unknown protein
EKNSKSVNLMMHSVSRLARRFCATLATATAEISGEAAASVPTKAKKHRSIYKKLSSLGTRGGGKMEETLNQFVMEGVPVKKHDLIRYAKDLRKFRQPQRALEIFEWMERKEIAFTGSDHAIRLNLIAKSKGLEAAETYFNSLDDSIKNQSTYGSLLNCYCVEKEEVKAKAHFENMVDLNHVSNSLPFNNLMAMYMGLGQPEKVPALVVAMKEKSITPCDITYSMWIQSCGSLKDLDGVEKVLDEMKAEGEGIFSWNTFANLAAIYIKVGLYGKAEEALKSLENNMNPDVRDCYHFLINLYTGIANASEVYRVWDLLKKRYPNVNNSSYLTMLRALSKLDDIDGVKKVFAEWESTCWTYDMRMANVAISSYLKQNMYEEAEAVFNGAMKKCKGQFSKARQLLMMHLLKNDQADLALKHFEAAVLDQDKNWTWSSELISSFFLHFEEAKDVDGAEEFCKTLTKWSPLSSETYTLLMKTYLAAGKACPDMKKRLEEQGILVDEEQECLLSKICP

SEQ ID NO: 82442 - protein, 502 aa, Arabidopsis thaliana
  peptide (1)..(502): Ceres Seq. ID no. 12665714
  misc_feature (282)..(316): Pfam Name: PPR repeat Pfam Description: PPR repeat
  misc_feature (1)..(502): Homolog of NCBI NO: 18411800 NR Description: expressed protein; protein id: At4g01990.1, by cDNA: gi_14517493, supported by cDNA: gi_16323353 [Arabidopsis >gi|14517494|gb|AAK62637.1| AT4g01990/T7B11_26 [Arabidopsis
  misc_feature (2)..(502): Homolog of NCBI NO: 25407143 NR Description: hypothetical protein AT4g01990 [imported] - thaliana >gi|4558568|gb|AAD22661.1|AC007138_25 hypothetical [Arabidopsis thaliana] >gi|7268583|emb|CAB80692.1| hypothetical
  misc_feature (14)..(502): Homolog of NCBI NO: 15217734 NR Description: hypothetical protein; protein id: At1g02370.1, by cDNA: gi_17529323 [Arabidopsis thaliana]
  misc_feature (14)..(502): Homolog of NCBI NO: 17529324 NR Description: unknown protein [Arabidopsis thaliana]
  misc_feature (33)..(500): Homolog of NCBI NO: 15219808 NR Description: hypothetical protein; protein id: At1g60770.1
  misc_feature (40)..(483): Homolog of NCBI NO: 34905490 NR Description: P0682B08.20 [Oryza sativa (japonica
  misc_feature (4)..(465): Homolog of NCBI NO: 22329290 NR Description: hypothetical protein; protein id: At1g02150.1, by cDNA: gi_20453084 [Arabidopsis thaliana]
  misc_feature (4)..(465): Homolog of NCBI NO: 20453085 NR Description: At1g02150/T7I23.8 [Arabidopsis thaliana]
  misc_feature (14)..(477): Homolog of NCBI NO: 34393591 NR Description: putative DNA-binding protein [Oryza sativa
  misc_feature (33)..(502): Homolog of NCBI NO: 22328859 NR Description: unknown protein; protein id: At4g21705.1 thaliana] >gi|28393142|gb|AAO42004.1| unknown protein thaliana] >gi|28827500|gb|AAO50594.1| unknown protein
MMHSVSRLARRFCATLATATAEISGEAAASVPTKAKKHRSIYKKLSSLGTRGGGKMEETLNQFVMEGVPVKKHDLIRYAKDLRKFRQPQRALEIFEWMERKEIAFTGSDHAIRLNLIAKSKGLEAAETYFNSLDDSIKNQSTYGSLLNCYCVEKEEVKAKAHFENMVDLNHVSNSLPFNNLMAMYMGLGQPEKVPALVVAMKEKSITPCDITYSMWIQSCGSLKDLDGVEKVLDEMKAEGEGIFSWNTFANLAAIYIKVGLYGKAEEALKSLENNMNPDVRDCYHFLINLYTGIANASEVYRVWDLLKKRYPNVNNSSYLTMLRALSKLDDIDGVKKVFAEWESTCWTYDMRMANVAISSYLKQNMYEEAEAVFNGAMKKCKGQFSKARQLLMMHLLKNDQADLALKHFEAAVLDQDKNWTWSSELISSFFLHFEEAKDVDGAEEFCKTLTKWSPLSSETYTLLMKTYLAAGKACPDMKKRLEEQGILVDEEQECLLSKICP

SEQ ID NO: 82443 - protein, 501 aa, Arabidopsis thaliana
  peptide (1)..(501): Ceres Seq. ID no. 12665715
  misc_feature (281)..(315): Pfam Name: PPR repeat Pfam Description: PPR repeat
  misc_feature (1)..(501): Homolog of NCBI NO: 18411800 NR Description: expressed protein; protein id: At4g01990.1, by cDNA: gi_14517493, supported by cDNA: gi_16323353 [Arabidopsis >gi|14517494|gb|AAK62637.1| AT4g01990/T7B11_26 [Arabidopsis
  misc_feature (1)..(501): Homolog of NCBI NO: 25407143 NR Description: hypothetical protein AT4g01990 [imported] - thaliana >gi|4558568|gb|AAD22661.1|AC007138_25 hypothetical [Arabidopsis thaliana] >gi|7268583|emb|CAB80692.1| hypothetical
  misc_feature (13)..(501): Homolog of NCBI NO: 15217734 NR Description: hypothetical protein; protein id: At1g02370.1, by cDNA: gi_17529323 [Arabidopsis thaliana]
  misc_feature (13)..(501): Homolog of NCBI NO: 17529324 NR Description: unknown protein [Arabidopsis thaliana]
  misc_feature (32)..(499): Homolog of NCBI NO: 15219808 NR Description: hypothetical protein; protein id: At1g60770.1
  misc_feature (39)..(482): Homolog of NCBI NO: 34905490 NR Description: P0682B08.20 [Oryza sativa (japonica
  misc_feature (3)..(464): Homolog of NCBI NO: 22329290 NR Description: hypothetical protein; protein id: At1g02150.1, by cDNA: gi_20453084 [Arabidopsis thaliana]
  misc_feature (3)..(464): Homolog of NCBI NO: 20453085 NR Description: At1g02150/T7I23.8 [Arabidopsis thaliana]
  misc_feature (13)..(476): Homolog of NCBI NO: 34393591 NR Description: putative DNA-binding protein [Oryza sativa
  misc_feature (32)..(501): Homolog of NCBI NO: 22328859 NR Description: unknown protein; protein id: At4g21705.1 thaliana] >gi|28393142|gb|AAO42004.1| unknown protein thaliana] >gi|28827500|gb|AAO50594.1| unknown protein
MHSVSRLARRFCATLATATAEISGEAAASVPTKAKKHRSIYKKLSSLGTRGGGKMEETLNQFVMEGVPVKKHDLIRYAKDLRKFRQPQRALEIFEWMERKEIAFTGSDHAIRLNLIAKSKGLEAAETYFNSLDDSIKNQSTYGSLLNCYCVEKEEVKAKAHFENMVDLNHVSNSLPFNNLMAMYMGLGQPEKVPALVVAMKEKSITPCDITYSMWIQSCGSLKDLDGVEKVLDEMKAEGEGIFSWNTFANLAAIYIKVGLYGKAEEALKSLENNMNPDVRDCYHFLINLYTGIANASEVYRVWDLLKKRYPNVNNSSYLTMLRALSKLDDIDGVKKVFAEWESTCWTYDMRMANVAISSYLKQNMYEEAEAVFNGAMKKCKGQFSKARQLLMMHLLKNDQADLALKHFEAAVLDQDKNWTWSSELISSFFLHFEEAKDVDGAEEFCKTLTKWSPLSSETYTLLMKTYLAAGKACPDMKKRLEEQGILVDEEQECLLSKICP

SEQ ID NO: 82444 - DNA, 1835 bp, Arabidopsis thaliana
  misc_feature (1)..(1835): Ceres Seq. ID no. 12665756
  misc_feature: MA Experiment ID: 20000171 Result: Up-regulated in Transcription
  misc_feature: MA Experiment 20000171 PARAMETER Experiment Name: At_42deg_Heat_P Parameter: Age (day) Value: 14
  misc_feature: MA Experiment 20000171 PARAMETER Experiment Name: At_42deg_Heat_P Parameter: Organism Value: A. thaliana
  misc_feature: MA Experiment 20000171 PARAMETER Experiment Name: At_42deg_Heat_P Parameter: Plant Line Value: WS
  misc_feature: MA Experiment 20000171 PARAMETER Experiment Name: At_42deg_Heat_P Parameter: Temperature (deg C) Value: 42 vs. 22
  misc_feature: MA Experiment 20000171 PARAMETER Experiment Name: At_42deg_Heat_P Parameter: Timepoint (hr) Value: 1
  misc_feature: MA Experiment 20000171 PARAMETER Experiment Name: At_42deg_Heat_P Parameter: Tissue Value: Aerial
  misc_feature: MA Experiment ID: 20000173 Result: Up-regulated in Transcription
  misc_feature: MA Experiment 20000173 PARAMETER Experiment Name: At_42deg_Heat_P Parameter: Age (day) Value: 14
  misc_feature: MA Experiment 20000173 PARAMETER Experiment Name: At_42deg_Heat_P Parameter: Organism Value: A. thaliana
  misc_feature: MA Experiment 20000173 PARAMETER Experiment Name: At_42deg_Heat_P Parameter: Plant Line Value: WS
  misc_feature: MA Experiment 20000173 PARAMETER Experiment Name: At_42deg_Heat_P Parameter: Temperature (deg C) Value: 42 vs. 22
  misc_feature: MA Experiment 20000173 PARAMETER Experiment Name: At_42deg_Heat_P Parameter: Timepoint (hr) Value: 6
  misc_feature: MA Experiment 20000173 PARAMETER Experiment Name: At_42deg_Heat_P Parameter: Tissue Value: Aerial
atcaaaatttgagagagaaatcaaatggaagtagaaatgcatggtgatgtctccaaatgggaaggctacgctgactggagaaacaaagccgccttgagaggccgtcacggcggaatgctcgccgcctccttcgtcttggcggtggagatattggagaatctagcgtttttagcgaacgcaagcaacttggtgttgtatctcaagaacttcatgcacatgtctctagccagatcgtcgagtgaagtgaccactttcatggccacagccttccttctcgctctcctcggtggcttccttgctgacgccttcttctccacattcgtcattttcctcatctccgcctccatcgagtttctgggacttatcctgctcacaatccaagcccggcgtccgtccttaatgccgccgccatgcaagagctctgccgcattgcgatgcgaggtcgttggtggttcgaaggcggcgtttctgtttgtgggactatatctagtgtctctaggaatcggagggataaaagggtcattaccgtcacacggagcagagcaattcgacgagggcacgcccaaaggtcgaaaacaaagatccacattcttcaactactatgtgttctgtctctcatgtggagcacttgtggccgtgacgttcgttgtctggatcgaggacaacaaaggctgggagtggggatttggagtctccaccatctctatatttctctccattcttgtctttctattaggttcgaggttttataaaaacaaaatccctcgtggtagtcctcttaccacaatctttaaggttcttctcgcagcttccatagttagttgctcgagtaaaacttcgagtaatcactttacttccagagaagttcaatcagaacatgaagaaaagacgccttctcagtcacttaccaatagcttgacatgtctaaacaaagcaatagaggggaaaacacaccatatttggctcgaatgcacggtccaacaagtagaagacgtgaagattgtgctaaaaatgcttccaatatttggttgcaccataatgctcaattgctgcttagctcagctttctacttactctgtccaccaagctgcaacgatgaacagaaagatcgttaacttcaatgttccttcagcttctttaccggtttttccggttgttttcatgctgattcttgctccaacctatgaccatctgattatcccattcgcaagaaaagtaaccaaatccgaaattggtatcactcatttgcaaagaatcggtgtaggcttagtcctttcgatagtagcaatggcagtggctgctttagtcgagttaaagcggaagcaagtggctagagaagctggattacttgactctgaagaaactttaccaatcacttttctgtggattgctcttcagtatctgtttctaggatcagctgatctgttcacactagctggattgctagagtttttcttcacagaagcaccttcttctatgagatcattggctacatcgctctcatgggcttctttggcattagggtattatctaagctcggtgatggtgccgatagtgaacagagtaactaagagtgctggacaaagcccatggcttggagaaaaacttaaccgtaacagactagacttgttttattggctcatgtgtgtcctaagtgttgttaacttcttgcactatctcttctgggcaaagcgttacaagtatatctcaactggttcaataagttgatatgatatacataacctctttaatagatagaataaacaatcaatagagaaagaagattagtgatgtcgactttggagaaagaacgccaataataccatgaaaagttc

SEQ ID NO: 82445 - protein, 567 aa, Arabidopsis thaliana
  peptide (1)..(567): Ceres Seq. ID no. 12665757
  misc_feature (99)..(497): Pfam Name: POT family Pfam Description: POT family
  misc_feature (1)..(567): Homolog of NCBI NO: 22329803 NR Description: nitrate transporter, putative; protein id: supported by cDNA: gi_18175947, supported by cDNA: gi_20465362 thaliana] >gi|18175948|gb|AAL59956.1| putative nitrate
  misc_feature (5)..(567): Homolog of NCBI NO: 25403281 NR Description: protein T7N9.10 [imported] - Arabidopsis thaliana
  misc_feature (261)..(567): Homolog of NCBI NO: 18409382 NR Description: nitrate transporter (NTL1); protein id: supported by cDNA: gi_17064753, supported by cDNA: gi_3377516 thaliana] >gi|23397158|gb|AAN31862.1| putative nitrate
  misc_feature (1)..(285): Homolog of NCBI NO: 18409382 NR Description: nitrate transporter (NTL1); protein id: supported by cDNA: gi_17064753, supported by cDNA: gi_3377516 thaliana] >gi|23397158|gb|AAN31862.1| putative nitrate
  misc_feature (261)..(567): Homolog of NCBI NO: 25404844 NR Description: nitrate transporter (NTL1), 53025-56402 - Arabidopsis thaliana >gi|12325224|gb|AAG52554.1|AC010675_2
  misc_feature (4)..(285): Homolog of NCBI NO: 25404844 NR Description: nitrate transporter (NTL1), 53025-56402 - Arabidopsis thaliana >gi|12325224|gb|AAG52554.1|AC010675_2
  misc_feature (261)..(567): Homolog of NCBI NO: 17064754 NR Description: nitrate transporter (NTL1) [Arabidopsis thaliana]
  misc_feature (1)..(285): Homolog of NCBI NO: 17064754 NR Description: nitrate transporter (NTL1) [Arabidopsis thaliana]
  misc_feature (261)..(567): Homolog of NCBI NO: 11358579 NR Description: nitrate transporter NTL1 [validated] - thaliana >gi|3377517|gb|AAC28086.1| nitrate transporter NTL1
  misc_feature (1)..(285): Homolog of NCBI NO: 11358579 NR Description: nitrate transporter NTL1 [validated] - thaliana >gi|3377517|gb|AAC28086.1| nitrate transporter NTL1
MEVEMHGDVSKWEGYADWRNKAALRGRHGGMLAASFVLAVEILENLAFLANASNLVLYLKNFMHMSLARSSSEVTTFMATAFLLALLGGFLADAFFSTFVIFLISASIEFLGLILLTIQARRPSLMPPPCKSSAALRCEVVGGSKAAFLFVGLYLVSLGIGGIKGSLPSHGAEQFDEGTPKGRKQRSTFFNYYVFCLSCGALVAVTFVVWIEDNKGWEWGFGVSTISIFLSILVFLLGSRFYKNKIPRGSPLTTIFKVLLAASIVSCSSKTSSNHFTSREVQSEHEEKTPSQSLTNSLTCLNKAIEGKTHHIWLECTVQQVEDVKIVLKMLPIFGCTIMLNCCLAQLSTYSVHQAATMNRKIVNFNVPSASLPVFPVVFMLILAPTYDHLIIPFARKVTKSEIGITHLQRIGVGLVLSIVAMAVAALVELKRKQVAREAGLLDSEETLPITFLWIALQYLFLGSADLFTLAGLLEFFFTEAPSSMRSLATSLSWASLALGYYLSSVMVPIVNRVTKSAGQSPWLGEKLNRNRLDLFYWLMCVLSVVNFLHYLFWAKRYKYISTGSIS

SEQ ID NO: 82446 - protein, 563 aa, Arabidopsis thaliana
  peptide (1)..(563): Ceres Seq. ID no. 12665758
  misc_feature (95)..(493): Pfam Name: POT family Pfam Description: POT family
  misc_feature (1)..(563): Homolog of NCBI NO: 22329803 NR Description: nitrate transporter, putative; protein id: supported by cDNA: gi_18175947, supported by cDNA: gi_20465362 thaliana] >gi|18175948|gb|AAL59956.1| putative nitrate
  misc_feature (1)..(563): Homolog of NCBI NO: 25403281 NR Description: protein T7N9.10 [imported] - Arabidopsis thaliana
  misc_feature (257)..(563): Homolog of NCBI NO: 18409382 NR Description: nitrate transporter (NTL1); protein id: supported by cDNA: gi_17064753, supported by cDNA: gi_3377516 thaliana] >gi|23397158|gb|AAN31862.1| putative nitrate
  misc_feature (1)..(281): Homolog of NCBI NO: 18409382 NR Description: nitrate transporter (NTL1); protein id: supported by cDNA: gi_17064753, supported by cDNA: gi_3377516 thaliana] >gi|23397158|gb|AAN31862.1| putative nitrate
  misc_feature (257)..(563): Homolog of NCBI NO: 25404844 NR Description: nitrate transporter (NTL1), 53025-56402 - Arabidopsis thaliana >gi|12325224|gb|AAG52554.1|AC010675_2
  misc_feature (1)..(281): Homolog of NCBI NO: 25404844 NR Description: nitrate transporter (NTL1), 53025-56402 - Arabidopsis thaliana >gi|12325224|gb|AAG52554.1|AC010675_2
  misc_feature (257)..(563): Homolog of NCBI NO: 17064754 NR Description: nitrate transporter (NTL1) [Arabidopsis thaliana]
  misc_feature (1)..(281): Homolog of NCBI NO: 17064754 NR Description: nitrate transporter (NTL1) [Arabidopsis thaliana]
  misc_feature (257)..(563): Homolog of NCBI NO: 11358579 NR Description: nitrate transporter NTL1 [validated] - thaliana >gi|3377517|gb|AAC28086.1| nitrate transporter NTL1
  misc_feature (1)..(281): Homolog of NCBI NO: 11358579 NR Description: nitrate transporter NTL1 [validated] - thaliana >gi|3377517|gb|AAC28086.1| nitrate transporter NTL1
MHGDVSKWEGYADWRNKAALRGRHGGMLAASFVLAVEILENLAFLANASNLVLYLKNFMHMSLARSSSEVTTFMATAFLLALLGGFLADAFFSTFVIFLISASIEFLGLILLTIQARRPSLMPPPCKSSAALRCEVVGGSKAAFLFVGLYLVSLGIGGIKGSLPSHGAEQFDEGTPKGRKQRSTFFNYYVFCLSCGALVAVTFVVWIEDNKGWEWGFGVSTISIFLSILVFLLGSRFYKNKIPRGSPLTTIFKVLLAASIVSCSSKTSSNHFTSREVQSEHEEKTPSQSLTNSLTCLNKAIEGKTHHIWLECTVQQVEDVKIVLKMLPIFGCTIMLNCCLAQLSTYSVHQAATMNRKIVNFNVPSASLPVFPVVFMLILAPTYDHLIIPFARKVTKSEIGITHLQRIGVGLVLSIVAMAVAALVELKRKQVAREAGLLDSEETLPITFLWIALQYLFLGSADLFTLAGLLEFFFTEAPSSMRSLATSLSWASLALGYYLSSVMVPIVNRVTKSAGQSPWLGEKLNRNRLDLFYWLMCVLSVVNFLHYLFWAKRYKYISTGSIS

SEQ ID NO: 82447 - protein, 537 aa, Arabidopsis thaliana
  peptide (1)..(537): Ceres Seq. ID no. 12665759
  misc_feature (69)..(467): Pfam Name: POT family Pfam Description: POT family
  misc_feature (1)..(537): Homolog of NCBI NO: 22329803 NR Description: nitrate transporter, putative; protein id: supported by cDNA: gi_18175947, supported by cDNA: gi_20465362 thaliana] >gi|18175948|gb|AAL59956.1| putative nitrate
  misc_feature (1)..(537): Homolog of NCBI NO: 25403281 NR Description: protein T7N9.10 [imported] - Arabidopsis thaliana
  misc_feature (231)..(537): Homolog of NCBI NO: 18409382 NR Description: nitrate transporter (NTL1); protein id: supported by cDNA: gi_17064753, supported by cDNA: gi_3377516 thaliana] >gi|23397158|gb|AAN31862.1| putative nitrate
  misc_feature (1)..(255): Homolog of NCBI NO: 18409382 NR Description: nitrate transporter (NTL1); protein id: supported by cDNA: gi_17064753, supported by cDNA: gi_3377516 thaliana] >gi|23397158|gb|AAN31862.1| putative nitrate
  misc_feature (231)..(537): Homolog of NCBI NO: 25404844 NR Description: nitrate transporter (NTL1), 53025-56402 - Arabidopsis thaliana >gi|12325224|gb|AAG52554.1|AC010675_2
  misc_feature (1)..(255): Homolog of NCBI NO: 25404844 NR Description: nitrate transporter (NTL1), 53025-56402 - Arabidopsis thaliana >gi|12325224|gb|AAG52554.1|AC010675_2
  misc_feature (231)..(537): Homolog of NCBI NO: 17064754 NR Description: nitrate transporter (NTL1) [Arabidopsis thaliana]
  misc_feature (1)..(255): Homolog of NCBI NO: 17064754 NR Description: nitrate transporter (NTL1) [Arabidopsis thaliana]
  misc_feature (231)..(537): Homolog of NCBI NO: 11358579 NR Description: nitrate transporter NTL1 [validated] - thaliana >gi|3377517|gb|AAC28086.1| nitrate transporter NTL1
  misc_feature (1)..(255): Homolog of NCBI NO: 11358579 NR Description: nitrate transporter NTL1 [validated] - thaliana >gi|3377517|gb|AAC28086.1| nitrate transporter NTL1
MLAASFVLAVEILENLAFLANASNLVLYLKNFMHMSLARSSSEVTTFMATAFLLALLGGFLADAFFSTFVIFLISASIEFLGLILLTIQARRPSLMPPPCKSSAALRCEVVGGSKAAFLFVGLYLVSLGIGGIKGSLPSHGAEQFDEGTPKGRKQRSTFFNYYVFCLSCGALVAVTFVVWIEDNKGWEWGFGVSTISIFLSILVFLLGSRFYKNKIPRGSPLTTIFKVLLAASIVSCSSKTSSNHFTSREVQSEHEEKTPSQSLTNSLTCLNKAIEGKTHHIWLECTVQQVEDVKIVLKMLPIFGCTIMLNCCLAQLSTYSVHQAATMNRKIVNFNVPSASLPVFPVVFMLILAPTYDHLIIPFARKVTKSEIGITHLQRIGVGLVLSIVAMAVAALVELKRKQVAREAGLLDSEETLPITFLWIALQYLFLGSADLFTLAGLLEFFFTEAPSSMRSLATSLSWASLALGYYLSSVMVPIVNRVTKSAGQSPWLGEKLNRNRLDLFYWLMCVLSVVNFLHYLFWAKRYKYISTGSIS

SEQ ID NO: 82448 - DNA, 732 bp, Arabidopsis thaliana
  misc_feature (1)..(732): Ceres Seq. ID no. 12665768
  misc_feature: MA Experiment ID: 20000173 Result: Up-regulated in Transcription
  misc_feature: MA Experiment 20000173 PARAMETER Experiment Name: At_42deg_Heat_P Parameter: Age (day) Value: 14
  misc_feature: MA Experiment 20000173 PARAMETER Experiment Name: At_42deg_Heat_P Parameter: Organism Value: A. thaliana
  misc_feature: MA Experiment 20000173 PARAMETER Experiment Name: At_42deg_Heat_P Parameter: Plant Line Value: WS
  misc_feature: MA Experiment 20000173 PARAMETER Experiment Name: At_42deg_Heat_P Parameter: Temperature (deg C) Value: 42 vs. 22
  misc_feature: MA Experiment 20000173 PARAMETER Experiment Name: At_42deg_Heat_P Parameter: Timepoint (hr) Value: 6
  misc_feature: MA Experiment 20000173 PARAMETER Experiment Name: At_42deg_Heat_P Parameter: Tissue Value: Aerial
  misc_feature: MA Experiment ID: 20000179 Result: Up-regulated in Transcription
  misc_feature: MA Experiment 20000179 PARAMETER Experiment Name: At_Germinating_Seeds_P Parameter: Age (hr) Value: 6 vs. 0
  misc_feature: MA Experiment 20000179 PARAMETER Experiment Name: At_Germinating_Seeds_P Parameter: Tissue Value: Germinating Seeds
  misc_feature: MA Experiment ID: 20000180 Result: Up-regulated in Transcription
  misc_feature: MA Experiment 20000180 PARAMETER Experiment Name: At_Germinating_Seeds_P Parameter: Age (hr) Value: 24 vs. 0
  misc_feature: MA Experiment 20000180 PARAMETER Experiment Name: At_Germinating_Seeds_P Parameter: Tissue Value: Germinating Seeds
  misc_feature: MA Experiment ID: 20000227 Result: Up-regulated in Transcription
  misc_feature: MA Experiment 20000227 PARAMETER Experiment Name: At_Root-Tips-vs-Tops_P Parameter: Tissue Value: Root Tips vs. Root Tops
  misc_feature: MA Experiment ID: 20000439 Result: Up-regulated in Transcription
  misc_feature: MA Experiment 20000439 PARAMETER Experiment Name: At_Roots__P Parameter: Age (day) Value: 14 vs. 21
  misc_feature: MA Experiment 20000439 PARAMETER Experiment Name: At_Roots__P Parameter: Organism Value: A. thaliana
  misc_feature: MA Experiment 20000439 PARAMETER Experiment Name: At_Roots__P Parameter: Tissue Value: Roots vs. Whole Plant
  misc_feature: MA Experiment ID: 20000527 Result: Down-regulated in Transcription
  misc_feature: MA Experiment 20000527 PARAMETER Experiment Name: At_10percent_PEG_P Parameter: Age (day) Value: 20
  misc_feature: MA Experiment 20000527 PARAMETER Experiment Name: At_10percent_PEG_P Parameter: Organism Value: A. thaliana
  misc_feature: MA Experiment 20000527 PARAMETER Experiment Name: At_10percent_PEG_P Parameter: Plant Line Value: WS
  misc_feature: MA Experiment 20000527 PARAMETER Experiment Name: At_10percent_PEG_P Parameter: Timepoint (day) Value: 20
  misc_feature: MA Experiment 20000527 PARAMETER Experiment Name: At_10percent_PEG_P Parameter: Tissue Value: Whole Plant
  misc_feature: MA Experiment 20000527 PARAMETER Experiment Name: At_10percent_PEG_P Parameter: Treatment Value: 10percent PEG vs. No Treatment
atggctcagaacgatacagtgaagctgataggttgttcggatgaccctttttccattaggccacgagtggctctacacttgaaatctatcaagtacgagtacttagaagaacctgatgatgatcttggggaaaagagccaactccttctcaaatctaaccctatccacaagaaaacccctgtcctcattcatggtgaccttgcaatctgtgagtccctcaacatcgttcaatacctcgacgaggcttggccttctgatccatccatccttccttctaatgcctatgatcgtgcgtctgctcggttctgggctcagtacatcgacgacaagtgcttcgaggcggcgaatgcgctgaccggagcaaacaacgacgaagagagaatagcggcgacgggaaagctgacggagtgtttggcgatactagaagagacgtttcagaagagcagcaaagggttagggtttttcggaggagaaaccatcggctaccttgacattgcatgtgcggctcttttgggtccgatctctgtgatcgagatgttttccgccgacaagtttgtccgggaagagacaacacctgggttgatccaatgggccgtgaggtttagggcccatgaagctgttaggccttacatgccaaccgtcgaagaggtcactgaattagtaaagcaaaggattgaggagggttttaagcgaaacttcaaaagcaatgtttcgacttcggaatatgaatag

SEQ ID NO: 82449 - protein, 243 aa, Arabidopsis thaliana
  peptide (1)..(243): Ceres Seq. ID no. 12665769
  misc_feature (1)..(243): Homolog of NCBI NO: 15223440 NR Description: glutathione transferase, putative; protein id:
  misc_feature (1)..(224): Homolog of NCBI NO: 15223432 NR Description: glutathione transferase, putative; protein id: supported by cDNA: 2985., supported by cDNA: gi_11096019, by cDNA: gi_14994260, supported by cDNA: gi_15215629, supported
  misc_feature (1)..(224): Homolog of NCBI NO: 25403291 NR Description: protein T7N9.20 [imported] - Arabidopsis thaliana
  misc_feature (1)..(224): Homolog of NCBI NO: 21592561 NR Description: glutathione transferase, putative [Arabidopsis
  misc_feature (1)..(224): Homolog of NCBI NO: 15222497 NR Description: glutathione transferase, putative; protein id: [Arabidopsis thaliana] >gi|25313218|pir||F96721 probable
  misc_feature (1)..(224): Homolog of NCBI NO: 38454100 NR Description: At1g69920 [Arabidopsis thaliana]
  misc_feature (77)..(243): Homolog of NCBI NO: 25403291 NR Description: protein T7N9.20 [imported] - Arabidopsis thaliana
  misc_feature (2)..(230): Homolog of NCBI NO: 15222499 NR Description: glutathione transferase, putative; protein id: [Arabidopsis thaliana] >gi|25313220|pir||G96721 probable
  misc_feature (1)..(223): Homolog of NCBI NO: 15218517 NR Description: glutathione transferase, putative; protein id:
  misc_feature (1)..(222): Homolog of NCBI NO: 6856103 NR Description: glutathione S-transferase [Gossypium hirsutum]
MAQNDTVKLIGCSDDPFSIRPRVALHLKSIKYEYLEEPDDDLGEKSQLLLKSNPIHKKTPVLIHGDLAICESLNIVQYLDEAWPSDPSILPSNAYDRASARFWAQYIDDKCFEAANALTGANNDEERIAATGKLTECLAILEETFQKSSKGLGFFGGETIGYLDIACAALLGPISVIEMFSADKFVREETTPGLIQWAVRFRAHEAVRPYMPTVEEVTELVKQRIEEGFKRNFKSNVSTSEYE

SEQ ID NO: 82450 - DNA, 4635 bp, Arabidopsis thaliana
  misc_feature (1)..(4635): Ceres Seq. ID no. 12665770
  misc_feature: MA Experiment ID: 20000315 Result: Down-regulated in Transcription
  misc_feature: MA Experiment 20000315 PARAMETER Experiment Name: At_14day_Shoots-Roots_Sub_P Parameter: Age (day) Value: 14
  misc_feature: MA Experiment 20000315 PARAMETER Experiment Name: At_14day_Shoots-Roots_Sub_P Parameter: Organism Value: A. thaliana
  misc_feature: MA Experiment 20000315 PARAMETER Experiment Name: At_14day_Shoots-Roots_Sub_P Parameter: Plant Line Value: WS
  misc_feature: MA Experiment 20000315 PARAMETER Experiment Name: At_14day_Shoots-Roots_Sub_P Parameter: Tissue Value: Shoots vs. Whole Plant
atggtgaagaccggcgatgtttccgatcagcgttcgaggctcgagtgggatgtattcctcagtttccaaagagacgcgcgccacaaatttacagagcgtctctatgaagtgctcgtcaaggaacaggtccgggtttggaacaatgatgatgtggaacgtgggaatcatgagctcggtgcaagtctcgtggaggctatggaggactcggtcgctctagtcgtcgttttatctcctaactatgctaaatctcactggtgccttgaagaattagccatgctctgtgatctaaagtcgtctctaggtcgtctggtgttaccgatcttttacgaggttgaaccgtgtatgttacgtaaacagaacggtccttacgagatggattttgaagaacattcgaaaagatttagcgaagagaagatacagagatggaggagagctttgaatataatcggaaatatccctggatttgtttacagatcggagatggaatctggcgttgtttcgaagccgcataggctcaagtatgacgtattcctcagtttccgtggcgcagacacgcgcgataacttcggagaccatctctataaagcgctcaaggataaagttcgggtcttccgcgacaacgaaggtatggaacgcggagatgagatcagttcaagtcttaaggcaggcatggaggactctgcggcctctgtcatcgtcatatcgcgtaactactctggctctcgctggtgccttgatgaattagctatgctctgcaagatgaaatcatctctagatcgtcgaatcttacccattttttatcatgtcgatccctcgcatgttcgcaaacagagcgatcatatcaagaaggattttgaagaacaccaagtaagatttagcgaggagaaagagaaggtacaagaatggagagaagctttgacattagttgggaatcttgctggatatgtttgcgacaaggactcgaaggatgatgatatgatagagcttgtggtgaaaagggttttagctgaattgagcaatacaccagagaaagtgggagaattcattgttggtctggaatcacctttaaaggatttgacgggcctgatcgacactgaatccagttctggcgtccaagtcttgggactttatggtatgggtggtattgggaagactacccttgcaaaagccttttataacaagattgtcggaaacttcgagcaacgagctttcatctcagacattagagaaagatcatcagccgaaaatgggttagtcactcttcaaaaaactctcatcaaggaacttttccgtttggtacctgaaatagaggatgttagcataggcctggaaaagataaaagcaaatgttcacgagaagaagattattgtggttttagatgatgttgatcacatagaccaggttcatgccctggttggtgaaacaagatggtatggtcaaggaacacttatagtaatcactactagagattctgagattctgagtaagctctcagtgaaccaacagtatgaggtcaagtgcttgactgagccgcaggcattgaagctctttagttatcattcactacgaaaagaagaaccaacaaagaatctgttggcgttatccaagaagattgtccagatatcaggactattgccgcttgcagttgaagtttttggatctcttttgtatgacaagaaggaggaaaaggattggcaaactcaactggataagctgaaaaagactcaaccaggcaatcttcaggatgttctggaactgagtttcaaatctttagacgatgaagaaaagaaagtattcctcgacattgcatgtctctttcttaaaatggagataaaaaaagacgaagttgtcattgtactgaaaggatgtgggttaaacgctgaggctgctctcagtgtccttagacagaaatctcttgttaagatcttggcaaacgatactctttggatgcatgatcagattagagacatgggtaggcagatggtccttaaagaaagccgtgaggatccgggattgcgaagtagactctgggatcgtggtgaaattatgaccgtactgaacaatatgaagggaacatcatccattcgaggaatcgtacttgactttaaaaaaaagtttgctagggaccctactgcagatgaaattgtctcgaggaatctacgcaacaatccgggtatctactctgtattcaattacctgaagaataagttagtaagatttccagcagaggaaaagccaaaaagttctgaaatcaccattcccgtagaatcttttgcaccaatgacgaagttgagacttcttcagattaataacgtggaactggaaggaaatcttaaacttctcccatctgaactcaagtggatacagtggaaaggttgccccttagaaaatctccctccggattttcttgctaggcaactttctgttcttgatctttcagagagtggaataagacaagtccagactttgcgcaacaaaatggtggatgagaatttgaaggttgtaattttgcgtggttgccacagcttagaagccattcctgatttatcaaaccatgaagccctagagaagcttgttttcgagcaatgcacccttctggtgaaggttcctaaatcagttggtaatctgagaaaattgattcacctggacttcagaaggtgttcaaagctttctgaatttcttgtggatgtttctggacttaagcttcttgaaaaactattcctctctggctgttcagatctgagtgtgttaccagaaaacattggtgccatgacaagcttgaaagagcttcttcttgatggaactgcgataaagaacttaccagaatctataaatcgcctccaaaatcttgaaatccttagtctaagaggttgcaaaattcaagagctacctttgtgcataggaacattgaaatcgctggagaagctatatcttgatgatactgcgttgaaaaatcttccgagttctattggagatctaaaaaatctccaggacctccatttggtacgctgcacatccctttctaagattcctgacagtatcaatgagctcaaatctttgaagaaactattcatcaacggaagcgcggtggaggaattacctctaaaaccgagttcactgccaagcttgtatgacttctcagcaggagattgcaaatttctgaaacaggttccgagttcaattggtagattaaattctcttctccaacttcagttgagtagcaccccaattgaagctctaccagaagagattggtgccttgcattttatacgcgaacttgagttgagaaactgcaaatttctgaagtttctgcctaagtcaattggagatatggacacactctatagcttaaaccttgaaggctctaacattgaggaactgccggaagaatttggcaagctggaaaagctagttgaactgcgaatgagcaactgtaaaatgctcaagaggcttcctgaatcgtttggagacttgaaatctcttcaccgtctgtacatgaaggaaactttggtctcagagttgccagaaagtttcggaaacctctcaaatttaatggtactggaaatgctgaagaagcctctttttagaatttctgagagtaatgttccaggtacaagcgaagaacctcgttttgtagaagtaccaaactctttctcaaagctcttgaagcttgaggaactagatgcttgcagctggagaatatcgggtaaaatccctgatgatcttgagaagctttcgtgtttgatgaaactgaatctggggaataattattttcatagtcttccgtctagcctcgtaaagttatcaaatctccaagaactttcattacgtgactgccgagagctcaagcgtcttccccctcttccatgtaaactggagcagctaaacctagcaaactgtttctcattggagagtgtatccgacctttcagagttaacgatcttgacggatctcaatctcacaaactgtgcgaaagtggttgatattccaggcctagagcacttgacggctctgaaaagattatacatgaccggatgtaactccaactactcccttgcagtaaagaaaagactttccaaggcttctttgaagatgatgcggaatctgagcttgcctggaaacagggtcccggactggttctcgcaaggccctgtcacattctcagctcaaccgaacagagagctcagaggtgtaatcattgctgttgttgtggctcttaatgatgaaaccgaagatgacgactatcagctgcctgatgtgatggaggttcaagcccaaattcataaacttgatcatcacaaatgcaccaacacattgcatctctccggagtgcctagaacaaataacgatcagcttcacatctgccgatactcagcttttcacccactggttacgatgttgaaagacgggtacaccatacaggtgatcaaacgaaacccaccaatcaaacaaggcgttgagctaaagatgcatggcattcatctcgtttacgagggggatgatgatttggaaggcagagaaaatactttacccgagactcaacaaaccgtttctcagaaacttgccaattttttcagctctttcgaagaagaagaaggtgaaaccatctcagaaagtgaatctacagttatatga

SEQ ID NO: 82451 - protein, 1544 aa, Arabidopsis thaliana
  peptide (1)..(1544): Ceres Seq. ID no. 12665771
  misc_feature (330)..(630): Pfam Name: NB-ARC domain Pfam Description: NB-ARC domain
  misc_feature (174)..(1315): Homolog of NCBI NO: 12597786 NR Description: disease resistance protein, putative [Arabidopsis
  misc_feature (162)..(1163): Homolog of NCBI NO: 28558777 NR Description: MRGH5 [Cucumis melo]
  misc_feature (173)..(1175): Homolog of NCBI NO: 15238008 NR Description: disease resistance protein (TIR-NBS-LRR class),
  misc_feature (173)..(1175): Homolog of NCBI NO: 9759045 NR Description: disease resistance protein-like [Arabidopsis
  misc_feature (160)..(1034): Homolog of NCBI NO: 37574597 NR Description: TIR-NBS-LRR type R protein 7 [Malus baccata]
  misc_feature (167)..(1067): Homolog of NCBI NO: 1086263 NR Description: TMV resistance protein N - tobacco (Nicotiana
  misc_feature (167)..(1075): Homolog of NCBI NO: 40644189 NR Description: TIR/NBS/LRR protein [Populus deltoides]
  misc_feature (159)..(1116): Homolog of NCBI NO: 38489219 NR Description: bacterial spot disease resistance protein 4
  misc_feature (173)..(703): Homolog of NCBI NO: 13509207 NR Description: Ngc-D protein [Linum usitatissimum]
  misc_feature (900)..(1346): Homolog of NCBI NO: 13509207 NR Description: Ngc-D protein [Linum usitatissimum]
MVKTGDVSDQRSRLEWDVFLSFQRDARHKFTERLYEVLVKEQVRVWNNDDVERGNHELGASLVEAMEDSVALVVVLSPNYAKSHWCLEELAMLCDLKSSLGRLVLPIFYEVEPCMLRKQNGPYEMDFEEHSKRFSEEKIQRWRRALNIIGNIPGFVYRSEMESGVVSKPHRLKYDVFLSFRGADTRDNFGDHLYKALKDKVRVFRDNEGMERGDEISSSLKAGMEDSAASVIVISRNYSGSRWCLDELAMLCKMKSSLDRRILPIFYHVDPSHVRKQSDHIKKDFEEHQVRFSEEKEKVQEWREALTLVGNLAGYVCDKDSKDDDMIELVVKRVLAELSNTPEKVGEFIVGLESPLKDLTGLIDTESSSGVQVLGLYGMGGIGKTTLAKAFYNKIVGNFEQRAFISDIRERSSAENGLVTLQKTLIKELFRLVPEIEDVSIGLEKIKANVHEKKIIVVLDDVDHIDQVHALVGETRWYGQGTLIVITTRDSEILSKLSVNQQYEVKCLTEPQALKLFSYHSLRKEEPTKNLLALSKKIVQISGLLPLAVEVFGSLLYDKKEEKDWQTQLDKLKKTQPGNLQDVLELSFKSLDDEEKKVFLDIACLFLKMEIKKDEVVIVLKGCGLNAEAALSVLRQKSLVKILANDTLWMHDQIRDMGRQMVLKESREDPGLRSRLWDRGEIMTVLNNMKGTSSIRGIVLDFKKKFARDPTADEIVSRNLRNNPGIYSVFNYLKNKLVRFPAEEKPKSSEITIPVESFAPMTKLRLLQINNVELEGNLKLLPSELKWIQWKGCPLENLPPDFLARQLSVLDLSESGIRQVQTLRNKMVDENLKVVILRGCHSLEAIPDLSNHEALEKLVFEQCTLLVKVPKSVGNLRKLIHLDFRRCSKLSEFLVDVSGLKLLEKLFLSGCSDLSVLPENIGAMTSLKELLLDGTAIKNLPESINRLQNLEILSLRGCKIQELPLCIGTLKSLEKLYLDDTALKNLPSSIGDLKNLQDLHLVRCTSLSKIPDSINELKSLKKLFINGSAVEELPLKPSSLPSLYDFSAGDCKFLKQVPSSIGRLNSLLQLQLSSTPIEALPEEIGALHFIRELELRNCKFLKFLPKSIGDMDTLYSLNLEGSNIEELPEEFGKLEKLVELRMSNCKMLKRLPESFGDLKSLHRLYMKETLVSELPESFGNLSNLMVLEMLKKPLFRISESNVPGTSEEPRFVEVPNSFSKLLKLEELDACSWRISGKIPDDLEKLSCLMKLNLGNNYFHSLPSSLVKLSNLQELSLRDCRELKRLPPLPCKLEQLNLANCFSLESVSDLSELTILTDLNLTNCAKVVDIPGLEHLTALKRLYMTGCNSNYSLAVKKRLSKASLKMMRNLSLPGNRVPDWFSQGPVTFSAQPNRELRGVIIAVVVALNDETEDDDYQLPDVMEVQAQIHKLDHHKCTNTLHLSGVPRTNNDQLHICRYSAFHPLVTMLKDGYTIQVIKRNPPIKQGVELKMHGIHLVYEGDDDLEGRENTLPETQQTVSQKLANFFSSFEEEEGETISESESTVI

SEQ ID NO: 82452 - protein, 1479 aa, Arabidopsis thaliana
  peptide (1)..(1479): Ceres Seq. ID no. 12665772
  misc_feature (265)..(565): Pfam Name: NB-ARC domain Pfam Description: NB-ARC domain
  misc_feature (109)..(1250): Homolog of NCBI NO: 12597786 NR Description: disease resistance protein, putative [Arabidopsis
  misc_feature (97)..(1098): Homolog of NCBI NO: 28558777 NR Description: MRGH5 [Cucumis melo]
  misc_feature (108)..(1110): Homolog of NCBI NO: 15238008 NR Description: disease resistance protein (TIR-NBS-LRR class),
  misc_feature (108)..(1110): Homolog of NCBI NO: 9759045 NR Description: disease resistance protein-like [Arabidopsis
  misc_feature (95)..(969): Homolog of NCBI NO: 37574597 NR Description: TIR-NBS-LRR type R protein 7 [Malus baccata]
  misc_feature (102)..(1002): Homolog of NCBI NO: 1086263 NR Description: TMV resistance protein N - tobacco (Nicotiana
  misc_feature (102)..(1010): Homolog of NCBI NO: 40644189 NR Description: TIR/NBS/LRR protein [Populus deltoides]
  misc_feature (94)..(1051): Homolog of NCBI NO: 38489219 NR Description: bacterial spot disease resistance protein 4
  misc_feature (108)..(638): Homolog of NCBI NO: 13509207 NR Description: Ngc-D protein [Linum usitatissimum]
  misc_feature (835)..(1281): Homolog of NCBI NO: 13509207 NR Description: Ngc-D protein [Linum usitatissimum]
MEDSVALVVVLSPNYAKSHWCLEELAMLCDLKSSLGRLVLPIFYEVEPCMLRKQNGPYEMDFEEHSKRFSEEKIQRWRRALNIIGNIPGFVYRSEMESGVVSKPHRLKYDVFLSFRGADTRDNFGDHLYKALKDKVRVFRDNEGMERGDEISSSLKAGMEDSAASVIVISRNYSGSRWCLDELAMLCKMKSSLDRRILPIFYHVDPSHVRKQSDHIKKDFEEHQVRFSEEKEKVQEWREALTLVGNLAGYVCDKDSKDDDMIELVVKRVLAELSNTPEKVGEFIVGLESPLKDLTGLIDTESSSGVQVLGLYGMGGIGKTTLAKAFYNKIVGNFEQRAFISDIRERSSAENGLVTLQKTLIKELFRLVPEIEDVSIGLEKIKANVHEKKIIVVLDDVDHIDQVHALVGETRWYGQGTLIVITTRDSEILSKLSVNQQYEVKCLTEPQALKLFSYHSLRKEEPTKNLLALSKKIVQISGLLPLAVEVFGSLLYDKKEEKDWQTQLDKLKKTQPGNLQDVLELSFKSLDDEEKKVFLDIACLFLKMEIKKDEVVIVLKGCGLNAEAALSVLRQKSLVKILANDTLWMHDQIRDMGRQMVLKESREDPGLRSRLWDRGEIMTVLNNMKGTSSIRGIVLDFKKKFARDPTADEIVSRNLRNNPGIYSVFNYLKNKLVRFPAEEKPKSSEITIPVESFAPMTKLRLLQINNVELEGNLKLLPSELKWIQWKGCPLENLPPDFLARQLSVLDLSESGIRQVQTLRNKMVDENLKVVILRGCHSLEAIPDLSNHEALEKLVFEQCTLLVKVPKSVGNLRKLIHLDFRRCSKLSEFLVDVSGLKLLEKLFLSGCSDLSVLPENIGAMTSLKELLLDGTAIKNLPESINRLQNLEILSLRGCKIQELPLCIGTLKSLEKLYLDDTALKNLPSSIGDLKNLQDLHLVRCTSLSKIPDSINELKSLKKLFINGSAVEELPLKPSSLPSLYDFSAGDCKFLKQVPSSIGRLNSLLQLQLSSTPIEALPEEIGALHFIRELELRNCKFLKFLPKSIGDMDTLYSLNLEGSNIEELPEEFGKLEKLVELRMSNCKMLKRLPESFGDLKSLHRLYMKETLVSELPESFGNLSNLMVLEMLKKPLFRISESNVPGTSEEPRFVEVPNSFSKLLKLEELDACSWRISGKIPDDLEKLSCLMKLNLGNNYFHSLPSSLVKLSNLQELSLRDCRELKRLPPLPCKLEQLNLANCFSLESVSDLSELTILTDLNLTNCAKVVDIPGLEHLTALKRLYMTGCNSNYSLAVKKRLSKASLKMMRNLSLPGNRVPDWFSQGPVTFSAQPNRELRGVIIAVVVALNDETEDDDYQLPDVMEVQAQIHKLDHHKCTNTLHLSGVPRTNNDQLHICRYSAFHPLVTMLKDGYTIQVIKRNPPIKQGVELKMHGIHLVYEGDDDLEGRENTLPETQQTVSQKLANFFSSFEEEEGETISESESTVI

SEQ ID NO: 82453 - protein, 1453 aa, Arabidopsis thaliana
  peptide (1)..(1453): Ceres Seq. ID no. 12665773
  misc_feature (239)..(539): Pfam Name: NB-ARC domain Pfam Description: NB-ARC domain
  misc_feature (83)..(1224): Homolog of NCBI NO: 12597786 NR Description: disease resistance protein, putative [Arabidopsis
  misc_feature (71)..(1072): Homolog of NCBI NO: 28558777 NR Description: MRGH5 [Cucumis melo]
  misc_feature (82)..(1084): Homolog of NCBI NO: 15238008 NR Description: disease resistance protein (TIR-NBS-LRR class),
  misc_feature (82)..(1084): Homolog of NCBI NO: 9759045 NR Description: disease resistance protein-like [Arabidopsis
  misc_feature (69)..(943): Homolog of NCBI NO: 37574597 NR Description: TIR-NBS-LRR type R protein 7 [Malus baccata]
  misc_feature (76)..(976): Homolog of NCBI NO: 1086263 NR Description: TMV resistance protein N - tobacco (Nicotiana
  misc_feature (76)..(984): Homolog of NCBI NO: 40644189 NR Description: TIR/NBS/LRR protein [Populus deltoides]
  misc_feature (68)..(1025): Homolog of NCBI NO: 38489219 NR Description: bacterial spot disease resistance protein 4
  misc_feature (82)..(612): Homolog of NCBI NO: 13509207 NR Description: Ngc-D protein [Linum usitatissimum]
  misc_feature (809)..(1255): Homolog of NCBI NO: 13509207 NR Description: Ngc-D protein [Linum usitatissimum]
MLCDLKSSLGRLVLPIFYEVEPCMLRKQNGPYEMDFEEHSKRFSEEKIQRWRRALNIIGNIPGFVYRSEMESGVVSKPHRLKYDVFLSFRGADTRDNFGDHLYKALKDKVRVFRDNEGMERGDEISSSLKAGMEDSAASVIVISRNYSGSRWCLDELAMLCKMKSSLDRRILPIFYHVDPSHVRKQSDHIKKDFEEHQVRFSEEKEKVQEWREALTLVGNLAGYVCDKDSKDDDMIELVVKRVLAELSNTPEKVGEFIVGLESPLKDLTGLIDTESSSGVQVLGLYGMGGIGKTTLAKAFYNKIVGNFEQRAFISDIRERSSAENGLVTLQKTLIKELFRLVPEIEDVSIGLEKIKANVHEKKIIVVLDDVDHIDQVHALVGETRWYGQGTLIVITTRDSEILSKLSVNQQYEVKCLTEPQALKLFSYHSLRKEEPTKNLLALSKKIVQISGLLPLAVEVFGSLLYDKKEEKDWQTQLDKLKKTQPGNLQDVLELSFKSLDDEEKKVFLDIACLFLKMEIKKDEVVIVLKGCGLNAEAALSVLRQKSLVKILANDTLWMHDQIRDMGRQMVLKESREDPGLRSRLWDRGEIMTVLNNMKGTSSIRGIVLDFKKKFARDPTADEIVSRNLRNNPGIYSVFNYLKNKLVRFPAEEKPKSSEITIPVESFAPMTKLRLLQINNVELEGNLKLLPSELKWIQWKGCPLENLPPDFLARQLSVLDLSESGIRQVQTLRNKMVDENLKVVILRGCHSLEAIPDLSNHEALEKLVFEQCTLLVKVPKSVGNLRKLIHLDFRRCSKLSEFLVDVSGLKLLEKLFLSGCSDLSVLPENIGAMTSLKELLLDGTAIKNLPESINRLQNLEILSLRGCKIQELPLCIGTLKSLEKLYLDDTALKNLPSSIGDLKNLQDLHLVRCTSLSKIPDSINELKSLKKLFINGSAVEELPLKPSSLPSLYDFSAGDCKFLKQVPSSIGRLNSLLQLQLSSTPIEALPEEIGALHFIRELELRNCKFLKFLPKSIGDMDTLYSLNLEGSNIEELPEEFGKLEKLVELRMSNCKMLKRLPESFGDLKSLHRLYMKETLVSELPESFGNLSNLMVLEMLKKPLFRISESNVPGTSEEPRFVEVPNSFSKLLKLEELDACSWRISGKIPDDLEKLSCLMKLNLGNNYFHSLPSSLVKLSNLQELSLRDCRELKRLPPLPCKLEQLNLANCFSLESVSDLSELTILTDLNLTNCAKVVDIPGLEHLTALKRLYMTGCNSNYSLAVKKRLSKASLKMMRNLSLPGNRVPDWFSQGPVTFSAQPNRELRGVIIAVVVALNDETEDDDYQLPDVMEVQAQIHKLDHHKCTNTLHLSGVPRTNNDQLHICRYSAFHPLVTMLKDGYTIQVIKRNPPIKQGVELKMHGIHLVYEGDDDLEGRENTLPETQQTVSQKLANFFSSFEEEEGETISESESTVI

SEQ ID NO: 82454 - DNA, 1329 bp, Arabidopsis thaliana
  misc_feature (1)..(1329): Ceres Seq. ID no. 12665835
  misc_feature: MA Experiment ID: 20000185 Result: Up-regulated in Transcription
  misc_feature: MA Experiment 20000185 PARAMETER Experiment Name: At_Roots__P Parameter: Age (day) Value: 7 vs. 21
  misc_feature: MA Experiment 20000185 PARAMETER Experiment Name: At_Roots__P Parameter: Organism Value: A. thaliana
  misc_feature: MA Experiment 20000185 PARAMETER Experiment Name: At_Roots__P Parameter: Tissue Value: Roots vs. Whole Plant
atgcaagaactgccggattgtttgtacgaggaaaaccaaccaaccttaataactcctttatctcccacaccaaatcactctctctacctttcaaacctcgacgaccatcattttctcagattctctatcaagtacctttaccttttccaaaaatctatatcccctctcaccctgaaagattcgctctctagggttctagttgattactaccctttcgcgggtcggataagagtctccgatgaagggagcaagctcgaggtagactgtaatggagaaggcgcagttttcgcagaagctttcatggatataacttgtcaagattttgttcaactttctcccaaaccaaacaagtcttggaggaagctcttgttcaaggttcaagctcagagtttcttggatattcctcctcttgtcatacaggtgacgtatctccgttgtgggggtatgatcctctgcaccgcgatcaatcattgcctctgcgacggcattggcacatcgcagttcctacatgcatgggcccatgcgaccactagccaagctcatcttccgacccgaccattccactcccgtcacgtattagatccgcgaaaccctccacgtgtcacacactcacatcccggtttcacccgaaccaccaccgtagacaaaagctccaccttcgacatttccaagtatttacagtcccaaccattggctcctgccaccttaaccttcaaccaatctcatctcctacgcttaaagaaaacctgcgctccttcgctaaaatgcaccacgttcgaggcactagcggctaacacttggcgctcgtgggctcaatctctagatttaccaatgaccatgctggtcaaactcttattctcagtcaatatgagaaaacgactaactccagaacttccccaagggtattacggtaatggattcgtactagcttgcgccgagagcaaggtacaagacctagtcaatggtaatatttaccacgctgtaaaatcgatacaagaggcaaaatcaagaattaccgacgaatatgtaagatcaacgatagatttactggaggataaaacggtgaaaacggacgtctcgtgcagtttggtcatttcacaatgggcgaaattgggattagaggagttggacttgggaggaggaaagccaatgtatatgggtcctttgacgagtgatatctactgtttatttttacccgtggcgagcgataatgatgccatcagagttcaaatgtccctgccggaggaagttgtgaagagactagagtattgcatggttaagtttttagacggaaaagataacgaagatgagaattctcgtgcatgctaa

SEQ ID NO: 82455 - protein, 442 aa, Arabidopsis thaliana
  peptide (1)..(442): Ceres Seq. ID no. 12665836
  misc_feature (10)..(428): Pfam Name: Transferase family Pfam Description: Transferase family
  misc_feature (1)..(442): Homolog of NCBI NO: 15217644 NR Description: putative hypersensitivity-related protein; id: At1g27620.1 [Arabidopsis thaliana]
  misc_feature (1)..(435): Homolog of NCBI NO: 34894074 NR Description: putative benzoyltransferase [Oryza sativa
  misc_feature (1)..(438): Homolog of NCBI NO: 34914932 NR Description: B1096D03.33 [Oryza sativa (japonica >gi|18461275|dbj|BAB84471.1| putative benzoyltransferase [Oryza
  misc_feature (8)..(422): Homolog of NCBI NO: 15225663 NR Description: putative anthranilate protein id: At2g40230.1, supported by cDNA: 105546. [Arabidopsis
  misc_feature (12)..(418): Homolog of NCBI NO: 15218793 NR Description: hypothetical protein; protein id: At1g03390.1
  misc_feature (11)..(414): Homolog of NCBI NO: 30693723 NR Description: transferase family [Arabidopsis thaliana]
  misc_feature (11)..(414): Homolog of NCBI NO: 30693725 NR Description: transferase family [Arabidopsis thaliana]
  misc_feature (6)..(419): Homolog of NCBI NO: 21553692 NR Description: acyltransferase-like protein [Arabidopsis
  misc_feature (6)..(419): Homolog of NCBI NO: 15242820 NR Description: acyltransferase-like protein; protein id: supported by cDNA: 157547., supported by cDNA: gi_14334863
  misc_feature (14)..(425): Homolog of NCBI NO: 15229017 NR Description: putative protein; protein id: At3g48720.1
MQELPDCLYEENQPTLITPLSPTPNHSLYLSNLDDHHFLRFSIKYLYLFQKSISPLTLKDSLSRVLVDYYPFAGRIRVSDEGSKLEVDCNGEGAVFAEAFMDITCQDFVQLSPKPNKSWRKLLFKVQAQSFLDIPPLVIQVTYLRCGGMILCTAINHCLCDGIGTSQFLHAWAHATTSQAHLPTRPFHSRHVLDPRNPPRVTHSHPGFTRTTTVDKSSTFDISKYLQSQPLAPATLTFNQSHLLRLKKTCAPSLKCTTFEALAANTWRSWAQSLDLPMTMLVKLLFSVNMRKRLTPELPQGYYGNGFVLACAESKVQDLVNGNIYHAVKSIQEAKSRITDEYVRSTIDLLEDKTVKTDVSCSLVISQWAKLGLEELDLGGGKPMYMGPLTSDIYCLFLPVASDNDAIRVQMSLPEEVVKRLEYCMVKFLDGKDNEDENSRAC

SEQ ID NO: 82456 - protein, 342 aa, Arabidopsis thaliana
  peptide (1)..(342): Ceres Seq. ID no. 12665837
  misc_feature (1)..(328): Pfam Name: Transferase family Pfam Description: Transferase family
  misc_feature (1)..(342): Homolog of NCBI NO: 15217644 NR Description: putative hypersensitivity-related protein; id: At1g27620.1 [Arabidopsis thaliana]
  misc_feature (1)..(335): Homolog of NCBI NO: 34894074 NR Description: putative benzoyltransferase [Oryza sativa
  misc_feature (1)..(338): Homolog of NCBI NO: 34914932 NR Description: B1096D03.33 [Oryza sativa (japonica >gi|18461275|dbj|BAB84471.1| putative benzoyltransferase [Oryza
  misc_feature (1)..(322): Homolog of NCBI NO: 15225663 NR Description: putative anthranilate protein id: At2g40230.1, supported by cDNA: 105546. [Arabidopsis
  misc_feature (1)..(318): Homolog of NCBI NO: 15218793 NR Description: hypothetical protein; protein id: At1g03390.1
  misc_feature (1)..(314): Homolog of NCBI NO: 30693723 NR Description: transferase family [Arabidopsis thaliana]
  misc_feature (1)..(314): Homolog of NCBI NO: 30693725 NR Description: transferase family [Arabidopsis thaliana]
  misc_feature (1)..(319): Homolog of NCBI NO: 21553692 NR Description: acyltransferase-like protein [Arabidopsis
  misc_feature (1)..(319): Homolog of NCBI NO: 15242820 NR Description: acyltransferase-like protein; protein id: supported by cDNA: 157547., supported by cDNA: gi_14334863
  misc_feature (1)..(325): Homolog of NCBI NO: 15229017 NR Description: putative protein; protein id: At3g48720.1
MDITCQDFVQLSPKPNKSWRKLLFKVQAQSFLDIPPLVIQVTYLRCGGMILCTAINHCLCDGIGTSQFLHAWAHATTSQAHLPTRPFHSRHVLDPRNPPRVTHSHPGFTRTTTVDKSSTFDISKYLQSQPLAPATLTFNQSHLLRLKKTCAPSLKCTTFEALAANTWRSWAQSLDLPMTMLVKLLFSVNMRKRLTPELPQGYYGNGFVLACAESKVQDLVNGNIYHAVKSIQEAKSRITDEYVRSTIDLLEDKTVKTDVSCSLVISQWAKLGLEELDLGGGKPMYMGPLTSDIYCLFLPVASDNDAIRVQMSLPEEVVKRLEYCMVKFLDGKDNEDENSRAC

SEQ ID NO: 82457 - protein, 294 aa, Arabidopsis thaliana
  peptide (1)..(294): Ceres Seq. ID no. 12665838
  misc_feature (1)..(280): Pfam Name: Transferase family Pfam Description: Transferase family
  misc_feature (1)..(294): Homolog of NCBI NO: 15217644 NR Description: putative hypersensitivity-related protein; id: At1g27620.1 [Arabidopsis thaliana]
  misc_feature (1)..(287): Homolog of NCBI NO: 34894074 NR Description: putative benzoyltransferase [Oryza sativa
  misc_feature (1)..(290): Homolog of NCBI NO: 34914932 NR Description: B1096D03.33 [Oryza sativa (japonica >gi|18461275|dbj|BAB84471.1| putative benzoyltransferase [Oryza
  misc_feature (1)..(274): Homolog of NCBI NO: 15225663 NR Description: putative anthranilate protein id: At2g40230.1, supported by cDNA: 105546. [Arabidopsis
  misc_feature (1)..(270): Homolog of NCBI NO: 15218793 NR Description: hypothetical protein; protein id: At1g03390.1
  misc_feature (1)..(266): Homolog of NCBI NO: 30693723 NR Description: transferase family [Arabidopsis thaliana]
  misc_feature (1)..(266): Homolog of NCBI NO: 30693725 NR Description: transferase family [Arabidopsis thaliana]
  misc_feature (1)..(271): Homolog of NCBI NO: 21553692 NR Description: acyltransferase-like protein [Arabidopsis
  misc_feature (1)..(271): Homolog of NCBI NO: 15242820 NR Description: acyltransferase-like protein; protein id: supported by cDNA: 157547., supported by cDNA: gi_14334863
  misc_feature (1)..(277): Homolog of NCBI NO: 15229017 NR Description: putative protein; protein id: At3g48720.1
MILCTAINHCLCDGIGTSQFLHAWAHATTSQAHLPTRPFHSRHVLDPRNPPRVTHSHPGFTRTTTVDKSSTFDISKYLQSQPLAPATLTFNQSHLLRLKKTCAPSLKCTTFEALAANTWRSWAQSLDLPMTMLVKLLFSVNMRKRLTPELPQGYYGNGFVLACAESKVQDLVNGNIYHAVKSIQEAKSRITDEYVRSTIDLLEDKTVKTDVSCSLVISQWAKLGLEELDLGGGKPMYMGPLTSDIYCLFLPVASDNDAIRVQMSLPEEVVKRLEYCMVKFLDGKDNEDENSRAC

SEQ ID NO: 82458 - DNA, 1933 bp, Arabidopsis thaliana
  misc_feature (1)..(1933): Ceres Seq. ID no. 12665843
  misc_feature: MA Experiment ID: 20000173 Result: Down-regulated in Transcription
  misc_feature: MA Experiment 20000173 PARAMETER Experiment Name: At_42deg_Heat_P Parameter: Age (day) Value: 14
  misc_feature: MA Experiment 20000173 PARAMETER Experiment Name: At_42deg_Heat_P Parameter: Organism Value: A. thaliana
  misc_feature: MA Experiment 20000173 PARAMETER Experiment Name: At_42deg_Heat_P Parameter: Plant Line Value: WS
  misc_feature: MA Experiment 20000173 PARAMETER Experiment Name: At_42deg_Heat_P Parameter: Temperature (deg C) Value: 42 vs. 22
  misc_feature: MA Experiment 20000173 PARAMETER Experiment Name: At_42deg_Heat_P Parameter: Timepoint (hr) Value: 6
  misc_feature: MA Experiment 20000173 PARAMETER Experiment Name: At_42deg_Heat_P Parameter: Tissue Value: Aerial
  misc_feature: MA Experiment ID: 20000265 Result: Up-regulated in Transcription
  misc_feature: MA Experiment 20000265 PARAMETER Experiment Name: At_Open_Flower_P Parameter: Age (day) Value: 21
  misc_feature: MA Experiment 20000265 PARAMETER Experiment Name: At_Open_Flower_P Parameter: Plant Line Value: WS
  misc_feature: MA Experiment 20000265 PARAMETER Experiment Name: At_Open_Flower_P Parameter: Tissue Value: Closed Flower vs. Whole Plant
  misc_feature: MA Experiment ID: 20000286 Result: Up-regulated in Transcription
  misc_feature: MA Experiment 20000286 PARAMETER Experiment Name: At_Open_Flower_P Parameter: Age (day) Value: 21
  misc_feature: MA Experiment 20000286 PARAMETER Experiment Name: At_Open_Flower_P Parameter: Plant Line Value: WS
  misc_feature: MA Experiment 20000286 PARAMETER Experiment Name: At_Open_Flower_P Parameter: Tissue Value: Half Open vs. Whole Plant
  misc_feature: MA Experiment ID: 20000495 Result: Up-regulated in Transcription
  misc_feature: MA Experiment 20000495 PARAMETER Experiment Name: At_Guard_Cells_P Parameter: Harvest Date Value: 8/2/2002
  misc_feature: MA Experiment 20000495 PARAMETER Experiment Name: At_Guard_Cells_P Parameter: Organism Value: A. thaliana
  misc_feature: MA Experiment 20000495 PARAMETER Experiment Name: At_Guard_Cells_P Parameter: Tissue Value: Guard Cells vs. Leaves
  misc_feature: MA Experiment ID: 20000496 Result: Up-regulated in Transcription
  misc_feature: MA Experiment 20000496 PARAMETER Experiment Name: At_Guard_Cells_P Parameter: Harvest Date Value: 7/19/2002
  misc_feature: MA Experiment 20000496 PARAMETER Experiment Name: At_Guard_Cells_P Parameter: Organism Value: Canola
  misc_feature: MA Experiment 20000496 PARAMETER Experiment Name: At_Guard_Cells_P Parameter: Tissue Value: Guard Cells vs. Leaves
ccgtttctctttccactgccaaaagttaaagctctctctctcactcaatcacacactcatttctcactatttcacaacttccttgtggacaaaattagtcgacttctctgttctctccaacactgtttcgttttcactacccaaaattcgaatctgggttattgaaaaagttccaatttttttatctgggtttttcgaaagctgatatctttttagaatctgatctatctcttctacttcatttcccttgcatttttttaataagttgtagaatctgtcttgttctggaaaaatatggagtcttgctttcctgccatgaagctgaatcagtgtacctttggtctcaacaacgaaattgtctctgagagagttagtgcgttctggggaacccaagttgtcaagcccaatcatttgaggacaacgaaacttaggagtgcacctcagaagaagattcagacaaacctcattcgctccgttcttactccatttgttgatcaagagtctcatgaacctctgttgagaactcaaaatgcagaccctaagaatgtagcgtctatcatactaggtggtggtgctgggactcgcttgttccctcttacaagcaagagagctaaacctgcggtgccaattggagggtgttacaggctgatagatataccgatgagcaattgcatcaacagtggtattagaaagatcttcatcttaactcagttcaactcattttctctcaatcgccacttgtctcgtacttacaactttggcaatggagtcaattttggtgatgggtttgttgaggtccttgctgcaacccaaacttccggagatgcaggaaagaaatggtttcagggaactgctgatgctgttaggcagtttatatgggtctttgaggatgccaagacaaagaatgtggaacatgtcttgatcttgtctggggatcatctctatcggatggattacatgaactttgtgcagaagcacattgagtccaatgctgatatcacagtttcttgtcttcccatggatgagagccgtgcttcggactttgggctgcttaaaattgaccagtctggtaaaatcattcaattctcggaaaaaccaaagggagatgacttaaaggcaatgcaagttgacacttccattcttggtttaccaccgaaagaagctgcggagtccccatacattgcatcgatgggtgtttacgtatttagaaaagaggttttgctaaagcttctaaggtcaagttatcctacatccaatgactttggttctgaaattatcccgttggccgtaggggagcataatgttcaggcatttttgttcaatgactattgggaggatattggaaccataggatcattctttgatgccaatttagccctcacggaacagcctcctaaattccaattctacgatcaaaaaacacccttcttcacttctccaagattcttgccacctaccaaagttgataaatgcaggatacttgattccatagtttcacatggatgcttcttgagagaatgcagtgtgcagcactcaatcgttggcatacgatcacgtctcgagtctggagtagagcttcaggatacaatgatgatgggagctgatttctaccaaacggaagctgagatcgcgtctcttttggcggaagggaaagttccggtaggggttggccagaacacaaaaatcaagaactgtatcattgacaagaacgccaagatcgggaagaacgtggtcatagcgaatgcagatggcgtggaagaaggcgatagaccagaggaagggtttcacataagatcaggcatcaccgttgtgctgaagaacgccaccattagagatggtctgcatatttaagcttttaaacctctctttaggagcagtgtatgtggcttcttgtgattttgtaacgagactagttacgttcgattaataattt

SEQ ID NO: 82459 - protein, 518 aa, Arabidopsis thaliana
  peptide (1)..(518): Ceres Seq. ID no. 12665844
  misc_feature (86)..(365): Pfam Name: Nucleotidyl transferase Pfam Description: Nucleotidyl transferase
  misc_feature (1)..(518): Homolog of NCBI NO: 15217670 NR Description: ADP-glucose pyrophosphorylase, putative; protein At1g27680.1, supported by cDNA: gi_17380941, supported by cDNA:
  misc_feature (17)..(515): Homolog of NCBI NO: 13487785 NR Description: ADP-glucose pyrophosphorylase large subunit
  misc_feature (1)..(518): Homolog of NCBI NO: 1707922 NR Description: Glucose-1-phosphate adenylyltransferase large
  misc_feature (51)..(515): Homolog of NCBI NO: 7434870 NR Description: glucose-1-phosphate adenylyltransferase (EC
  misc_feature (13)..(515): Homolog of NCBI NO: 1778436 NR Description: ADP-glucose pyrophosphorylase large subunit
  misc_feature (13)..(515): Homolog of NCBI NO: 1840114 NR Description: ADP-glucose pyrophosphorylase large subunit
  misc_feature (22)..(515): Homolog of NCBI NO: 1707929 NR Description: Glucose-1-phosphate adenylyltransferase large
  misc_feature (73)..(515): Homolog of NCBI NO: 7434873 NR Description: glucose-1-phosphate adenylyltransferase (EC
  misc_feature (14)..(515): Homolog of NCBI NO: 5923897 NR Description: ADP-glucose pyrophosphorylase large subunit
  misc_feature (1)..(515): Homolog of NCBI NO: 7434884 NR Description: glucose-1-phosphate adenylyltransferase (EC
MESCFPAMKLNQCTFGLNNEIVSERVSAFWGTQVVKPNHLRTTKLRSAPQKKIQTNLIRSVLTPFVDQESHEPLLRTQNADPKNVASIILGGGAGTRLFPLTSKRAKPAVPIGGCYRLIDIPMSNCINSGIRKIFILTQFNSFSLNRHLSRTYNFGNGVNFGDGFVEVLAATQTSGDAGKKWFQGTADAVRQFIWVFEDAKTKNVEHVLILSGDHLYRMDYMNFVQKHIESNADITVSCLPMDESRASDFGLLKIDQSGKIIQFSEKPKGDDLKAMQVDTSILGLPPKEAAESPYIASMGVYVFRKEVLLKLLRSSYPTSNDFGSEIIPLAVGEHNVQAFLFNDYWEDIGTIGSFFDANLALTEQPPKFQFYDQKTPFFTSPRFLPPTKVDKCRILDSIVSHGCFLRECSVQHSIVGIRSRLESGVELQDTMMMGADFYQTEAEIASLLAEGKVPVGVGQNTKIKNCIIDKNAKIGKNVVIANADGVEEGDRPEEGFHIRSGITVVLKNATIRDGLHI

SEQ ID NO: 82460 - protein, 511 aa, Arabidopsis thaliana
  peptide (1)..(511): Ceres Seq. ID no. 12665845
  misc_feature (79)..(358): Pfam Name: Nucleotidyl transferase Pfam Description: Nucleotidyl transferase
  misc_feature (1)..(511): Homolog of NCBI NO: 15217670 NR Description: ADP-glucose pyrophosphorylase, putative; protein At1g27680.1, supported by cDNA: gi_17380941, supported by cDNA:
  misc_feature (10)..(508): Homolog of NCBI NO: 13487785 NR Description: ADP-glucose pyrophosphorylase large subunit
  misc_feature (1)..(511): Homolog of NCBI NO: 1707922 NR Description: Glucose-1-phosphate adenylyltransferase large
  misc_feature (44)..(508): Homolog of NCBI NO: 7434870 NR Description: glucose-1-phosphate adenylyltransferase (EC
  misc_feature (6)..(508): Homolog of NCBI NO: 1778436 NR Description: ADP-glucose pyrophosphorylase large subunit
  misc_feature (6)..(508): Homolog of NCBI NO: 1840114 NR Description: ADP-glucose pyrophosphorylase large subunit
  misc_feature (15)..(508): Homolog of NCBI NO: 1707929 NR Description: Glucose-1-phosphate adenylyltransferase large
  misc_feature (66)..(508): Homolog of NCBI NO: 7434873 NR Description: glucose-1-phosphate adenylyltransferase (EC
  misc_feature (7)..(508): Homolog of NCBI NO: 5923897 NR Description: ADP-glucose pyrophosphorylase large subunit
  misc_feature (1)..(508): Homolog of NCBI NO: 7434884 NR Description: glucose-1-phosphate adenylyltransferase (EC
MKLNQCTFGLNNEIVSERVSAFWGTQVVKPNHLRTTKLRSAPQKKIQTNLIRSVLTPFVDQESHEPLLRTQNADPKNVASIILGGGAGTRLFPLTSKRAKPAVPIGGCYRLIDIPMSNCINSGIRKIFILTQFNSFSLNRHLSRTYNFGNGVNFGDGFVEVLAATQTSGDAGKKWFQGTADAVRQFIWVFEDAKTKNVEHVLILSGDHLYRMDYMNFVQKHIESNADITVSCLPMDESRASDFGLLKIDQSGKIIQFSEKPKGDDLKAMQVDTSILGLPPKEAAESPYIASMGVYVFRKEVLLKLLRSSYPTSNDFGSEIIPLAVGEHNVQAFLFNDYWEDIGTIGSFFDANLALTEQPPKFQFYDQKTPFFTSPRFLPPTKVDKCRILDSIVSHGCFLRECSVQHSIVGIRSRLESGVELQDTMMMGADFYQTEAEIASLLAEGKVPVGVGQNTKIKNCIIDKNAKIGKNVVIANADGVEEGDRPEEGFHIRSGITVVLKNATIRDGLHI

SEQ ID NO: 82461 - protein, 396 aa, Arabidopsis thaliana
  peptide (1)..(396): Ceres Seq. ID no. 12665846
  misc_feature (1)..(243): Pfam Name: Nucleotidyl transferase Pfam Description: Nucleotidyl transferase
  misc_feature (1)..(396): Homolog of NCBI NO: 15217670 NR Description: ADP-glucose pyrophosphorylase, putative; protein At1g27680.1, supported by cDNA: gi_17380941, supported by cDNA:
  misc_feature (1)..(393): Homolog of NCBI NO: 13487785 NR Description: ADP-glucose pyrophosphorylase large subunit
  misc_feature (1)..(396): Homolog of NCBI NO: 1707922 NR Description: Glucose-1-phosphate adenylyltransferase large
  misc_feature (1)..(393): Homolog of NCBI NO: 7434870 NR Description: glucose-1-phosphate adenylyltransferase (EC
  misc_feature (1)..(393): Homolog of NCBI NO: 1778436 NR Description: ADP-glucose pyrophosphorylase large subunit
  misc_feature (1)..(393): Homolog of NCBI NO: 1840114 NR Description: ADP-glucose pyrophosphorylase large subunit
  misc_feature (1)..(393): Homolog of NCBI NO: 1707929 NR Description: Glucose-1-phosphate adenylyltransferase large
  misc_feature (1)..(393): Homolog of NCBI NO: 7434873 NR Description: glucose-1-phosphate adenylyltransferase (EC
  misc_feature (1)..(393): Homolog of NCBI NO: 5923897 NR Description: ADP-glucose pyrophosphorylase large subunit
  misc_feature (1)..(393): Homolog of NCBI NO: 7434884 NR Description: glucose-1-phosphate adenylyltransferase (EC
MSNCINSGIRKIFILTQFNSFSLNRHLSRTYNFGNGVNFGDGFVEVLAATQTSGDAGKKWFQGTADAVRQFIWVFEDAKTKNVEHVLILSGDHLYRMDYMNFVQKHIESNADITVSCLPMDESRASDFGLLKIDQSGKIIQFSEKPKGDDLKAMQVDTSILGLPPKEAAESPYIASMGVYVFRKEVLLKLLRSSYPTSNDFGSEIIPLAVGEHNVQAFLFNDYWEDIGTIGSFFDANLALTEQPPKFQFYDQKTPFFTSPRFLPPTKVDKCRILDSIVSHGCFLRECSVQHSIVGIRSRLESGVELQDTMMMGADFYQTEAEIASLLAEGKVPVGVGQNTKIKNCIIDKNAKIGKNVVIANADGVEEGDRPEEGFHIRSGITVVLKNATIRDGLHI

SEQ ID NO: 82462 - DNA, 928 bp, Arabidopsis thaliana
  misc_feature (1)..(928): Ceres Seq. ID no. 12665855
  misc_feature: MA Experiment ID: 20000171 Result: Up-regulated in Transcription
  misc_feature: MA Experiment 20000171 PARAMETER Experiment Name: At_42deg_Heat_P Parameter: Age (day) Value: 14
  misc_feature: MA Experiment 20000171 PARAMETER Experiment Name: At_42deg_Heat_P Parameter: Organism Value: A. thaliana
  misc_feature: MA Experiment 20000171 PARAMETER Experiment Name: At_42deg_Heat_P Parameter: Plant Line Value: WS
  misc_feature: MA Experiment 20000171 PARAMETER Experiment Name: At_42deg_Heat_P Parameter: Temperature (deg C) Value: 42 vs. 22
  misc_feature: MA Experiment 20000171 PARAMETER Experiment Name: At_42deg_Heat_P Parameter: Timepoint (hr) Value: 1
  misc_feature: MA Experiment 20000171 PARAMETER Experiment Name: At_42deg_Heat_P Parameter: Tissue Value: Aerial
  misc_feature: MA Experiment ID: 20000173 Result: Up-regulated in Transcription
  misc_feature: MA Experiment 20000173 PARAMETER Experiment Name: At_42deg_Heat_P Parameter: Age (day) Value: 14
  misc_feature: MA Experiment 20000173 PARAMETER Experiment Name: At_42deg_Heat_P Parameter: Organism Value: A. thaliana
  misc_feature: MA Experiment 20000173 PARAMETER Experiment Name: At_42deg_Heat_P Parameter: Plant Line Value: WS
  misc_feature: MA Experiment 20000173 PARAMETER Experiment Name: At_42deg_Heat_P Parameter: Temperature (deg C) Value: 42 vs. 22
  misc_feature: MA Experiment 20000173 PARAMETER Experiment Name: At_42deg_Heat_P Parameter: Timepoint (hr) Value: 6
  misc_feature: MA Experiment 20000173 PARAMETER Experiment Name: At_42deg_Heat_P Parameter: Tissue Value: Aerial
  misc_feature: MA Experiment ID: 20000179 Result: Down-regulated in Transcription
  misc_feature: MA Experiment 20000179 PARAMETER Experiment Name: At_Germinating_Seeds_P Parameter: Age (hr) Value: 6 vs. 0
  misc_feature: MA Experiment 20000179 PARAMETER Experiment Name: At_Germinating_Seeds_P Parameter: Tissue Value: Germinating Seeds
  misc_feature: MA Experiment ID: 20000180 Result: Down-regulated in Transcription
  misc_feature: MA Experiment 20000180 PARAMETER Experiment Name: At_Germinating_Seeds_P Parameter: Age (hr) Value: 24 vs. 0
  misc_feature: MA Experiment 20000180 PARAMETER Experiment Name: At_Germinating_Seeds_P Parameter: Tissue Value: Germinating Seeds
  misc_feature: MA Experiment ID: 20000182 Result: Up-regulated in Transcription
  misc_feature: MA Experiment 20000182 PARAMETER Experiment Name: At_2mM_SA_P Parameter: Age (day) Value: 14
  misc_feature: MA Experiment 20000182 PARAMETER Experiment Name: At_2mM_SA_P Parameter: Organism Value: A. thaliana
  misc_feature: MA Experiment 20000182 PARAMETER Experiment Name: At_2mM_SA_P Parameter: Plant Line Value: WS
  misc_feature: MA Experiment 20000182 PARAMETER Experiment Name: At_2mM_SA_P Parameter: Timepoint (hr) Value: 6
  misc_feature: MA Experiment 20000182 PARAMETER Experiment Name: At_2mM_SA_P Parameter: Tissue Value: Aerial
  misc_feature: MA Experiment 20000182 PARAMETER Experiment Name: At_2mM_SA_P Parameter: Treatment Value: 2mM SA vs. No Treatment
  misc_feature: MA Experiment ID: 20000184 Result: Down-regulated in Transcription
  misc_feature: MA Experiment 20000184 PARAMETER Experiment Name: At_Shoots__P Parameter: Age (day) Value: 7
  misc_feature: MA Experiment 20000184 PARAMETER Experiment Name: At_Shoots__P Parameter: Tissue Value: Shoots vs. Whole Plant
  misc_feature: MA Experiment ID: 20000185 Result: Down-regulated in Transcription
  misc_feature: MA Experiment 20000185 PARAMETER Experiment Name: At_Roots__P Parameter: Age (day) Value: 7 vs. 21
  misc_feature: MA Experiment 20000185 PARAMETER Experiment Name: At_Roots__P Parameter: Organism Value: A. thaliana
  misc_feature: MA Experiment 20000185 PARAMETER Experiment Name: At_Roots__P Parameter: Tissue Value: Roots vs. Whole Plant
  misc_feature: MA Experiment ID: 20000213 Result: Up-regulated in Transcription
  misc_feature: MA Experiment 20000213 PARAMETER Experiment Name: At_4deg_Cold_P Parameter: Timepoint (hr) Value: 2
  misc_feature: MA Experiment ID: 20000227 Result: Down-regulated in Transcription
  misc_feature: MA Experiment 20000227 PARAMETER Experiment Name: At_Root-Tips-vs-Tops_P Parameter: Tissue Value: Root Tips vs. Root Tops
  misc_feature: MA Experiment ID: 20000234 Result: Down-regulated in Transcription
  misc_feature: MA Experiment 20000234 PARAMETER Experiment Name: At_Siliques_P Parameter: Age (day) Value: 21
  misc_feature: MA Experiment 20000234 PARAMETER Experiment Name: At_Siliques_P Parameter: Organism Value: A. thaliana
  misc_feature: MA Experiment 20000234 PARAMETER Experiment Name: At_Siliques_P Parameter: Plant Line Value: WS
  misc_feature: MA Experiment 20000234 PARAMETER Experiment Name: At_Siliques_P Parameter: Tissue Value: Less Than 5mm Siliques vs. Whole Plant
  misc_feature: MA Experiment ID: 20000264 Result: Down-regulated in Transcription
  misc_feature: MA Experiment 20000264 PARAMETER Experiment Name: At_Open_Flower_P Parameter: Age (day) Value: 21
  misc_feature: MA Experiment 20000264 PARAMETER Experiment Name: At_Open_Flower_P Parameter: Plant Line Value: WS
  misc_feature: MA Experiment 20000264 PARAMETER Experiment Name: At_Open_Flower_P Parameter: Tissue Value: Open Flower vs. Whole Plant
  misc_feature: MA Experiment ID: 20000265 Result: Down-regulated in Transcription
  misc_feature: MA Experiment 20000265 PARAMETER Experiment Name: At_Open_Flower_P Parameter: Age (day) Value: 21
  misc_feature: MA Experiment 20000265 PARAMETER Experiment Name: At_Open_Flower_P Parameter: Plant Line Value: WS
  misc_feature: MA Experiment 20000265 PARAMETER Experiment Name: At_Open_Flower_P Parameter: Tissue Value: Closed Flower vs. Whole Plant
  misc_feature: MA Experiment ID: 20000286 Result: Down-regulated in Transcription
  misc_feature: MA Experiment 20000286 PARAMETER Experiment Name: At_Open_Flower_P Parameter: Age (day) Value: 21
  misc_feature: MA Experiment 20000286 PARAMETER Experiment Name: At_Open_Flower_P Parameter: Plant Line Value: WS
  misc_feature: MA Experiment 20000286 PARAMETER Experiment Name: At_Open_Flower_P Parameter: Tissue Value: Half Open vs. Whole Plant
  misc_feature: MA Experiment ID: 20000436 Result: Up-regulated in Transcription
  misc_feature: MA Experiment 20000436 PARAMETER Experiment Name: At_Drought_P Parameter: Age (day) Value: 7
  misc_feature: MA Experiment 20000436 PARAMETER Experiment Name: At_Drought_P Parameter: Organism Value: A. thaliana
  misc_feature: MA Experiment 20000436 PARAMETER Experiment Name: At_Drought_P Parameter: Plant Line Value: WS
  misc_feature: MA Experiment 20000436 PARAMETER Experiment Name: At_Drought_P Parameter: Timepoint (hr) Value: 12
  misc_feature: MA Experiment 20000436 PARAMETER Experiment Name: At_Drought_P Parameter: Tissue Value: Whole Plant
  misc_feature: MA Experiment 20000436 PARAMETER Experiment Name: At_Drought_P Parameter: Treatment Value: Drought vs. No Drought
  misc_feature: MA Experiment ID: 20000437 Result: Up-regulated in Transcription
  misc_feature: MA Experiment 20000437 PARAMETER Experiment Name: At_Drought_P Parameter: Age (day) Value: 8
  misc_feature: MA Experiment 20000437 PARAMETER Experiment Name: At_Drought_P Parameter: Organism Value: A. thaliana
  misc_feature: MA Experiment 20000437 PARAMETER Experiment Name: At_Drought_P Parameter: Plant Line Value: WS
  misc_feature: MA Experiment 20000437 PARAMETER Experiment Name: At_Drought_P Parameter: Timepoint (hr) Value: 24
  misc_feature: MA Experiment 20000437 PARAMETER Experiment Name: At_Drought_P Parameter: Tissue Value: Whole Plant
  misc_feature: MA Experiment 20000437 PARAMETER Experiment Name: At_Drought_P Parameter: Treatment Value: Drought vs. No Drought
  misc_feature: MA Experiment ID: 20000438 Result: Down-regulated in Transcription
  misc_feature: MA Experiment 20000438 PARAMETER Experiment Name: At_Shoots__P Parameter: Age (day) Value: 14
  misc_feature: MA Experiment 20000438 PARAMETER Experiment Name: At_Shoots__P Parameter: Tissue Value: Shoots vs. Whole Plant
  misc_feature: MA Experiment ID: 20000439 Result: Down-regulated in Transcription
  misc_feature: MA Experiment 20000439 PARAMETER Experiment Name: At_Roots__P Parameter: Age (day) Value: 14 vs. 21
  misc_feature: MA Experiment 20000439 PARAMETER Experiment Name: At_Roots__P Parameter: Organism Value: A. thaliana
  misc_feature: MA Experiment 20000439 PARAMETER Experiment Name: At_Roots__P Parameter: Tissue Value: Roots vs. Whole Plant
  misc_feature: MA Experiment ID: 20000441 Result: Up-regulated in Transcription
  misc_feature: MA Experiment 20000441 PARAMETER Experiment Name: At_1uM_BR-BRZ__P Parameter: Tissue Value: Shoot Apices
  misc_feature: MA Experiment 20000441 PARAMETER Experiment Name: At_1uM_BR-BRZ__P Parameter: Treatment Value: 1uM BR vs. No Treatment
  misc_feature: MA Experiment ID: 20000443 Result: Up-regulated in Transcription
  misc_feature: MA Experiment 20000443 PARAMETER Experiment Name: At_1uM_BR-BRZ__P Parameter: Tissue Value: Shoot Apices
  misc_feature: MA Experiment 20000443 PARAMETER Experiment Name: At_1uM_BR-BRZ__P Parameter: Treatment Value: 1uM BRZ vs. No Treatment
  misc_feature: MA Experiment ID: 20000452 Result: Up-regulated in Transcription
  misc_feature: MA Experiment 20000452 PARAMETER Experiment Name: At_CS6879_Shoots-Roots_P Parameter: Age (day) Value: 14
  misc_feature: MA Experiment 20000452 PARAMETER Experiment Name: At_CS6879_Shoots-Roots_P Parameter: Organism Value: A. thaliana
  misc_feature: MA Experiment 20000452 PARAMETER Experiment Name: At_CS6879_Shoots-Roots_P Parameter: Plant Line Value: CS6879 vs. WS
  misc_feature: MA Experiment 20000452 PARAMETER Experiment Name: At_CS6879_Shoots-Roots_P Parameter: Tissue Value: Shoots
  misc_feature: MA Experiment ID: 20000460 Result: Up-regulated in Transcription
  misc_feature: MA Experiment 20000460 PARAMETER Experiment Name: At_10percent_PEG_P Parameter: Age (day) Value: 12
  misc_feature: MA Experiment 20000460 PARAMETER Experiment Name: At_10percent_PEG_P Parameter: Organism Value: A. thaliana
  misc_feature: MA Experiment 20000460 PARAMETER Experiment Name: At_10percent_PEG_P Parameter: Plant Line Value: WS
  misc_feature: MA Experiment 20000460 PARAMETER Experiment Name: At_10percent_PEG_P Parameter: Timepoint (day) Value: 12
  misc_feature: MA Experiment 20000460 PARAMETER Experiment Name: At_10percent_PEG_P Parameter: Tissue Value: Whole Plant
  misc_feature: MA Experiment 20000460 PARAMETER Experiment Name: At_10percent_PEG_P Parameter: Treatment Value: 10percent PEG vs. No Treatment
  misc_feature: MA Experiment ID: 20000495 Result: Down-regulated in Transcription
  misc_feature: MA Experiment 20000495 PARAMETER Experiment Name: At_Guard_Cells_P Parameter: Harvest Date Value: 8/2/2002
  misc_feature: MA Experiment 20000495 PARAMETER Experiment Name: At_Guard_Cells_P Parameter: Organism Value: A. thaliana
  misc_feature: MA Experiment 20000495 PARAMETER Experiment Name: At_Guard_Cells_P Parameter: Tissue Value: Guard Cells vs. Leaves
  misc_feature: MA Experiment ID: 20000527 Result: Up-regulated in Transcription
  misc_feature: MA Experiment 20000527 PARAMETER Experiment Name: At_10percent_PEG_P Parameter: Age (day) Value: 20
  misc_feature: MA Experiment 20000527 PARAMETER Experiment Name: At_10percent_PEG_P Parameter: Organism Value: A. thaliana
  misc_feature: MA Experiment 20000527 PARAMETER Experiment Name: At_10percent_PEG_P Parameter: Plant Line Value: WS
  misc_feature: MA Experiment 20000527 PARAMETER Experiment Name: At_10percent_PEG_P Parameter: Timepoint (day) Value: 20
  misc_feature: MA Experiment 20000527 PARAMETER Experiment Name: At_10percent_PEG_P Parameter: Tissue Value: Whole Plant
  misc_feature: MA Experiment 20000527 PARAMETER Experiment Name: At_10percent_PEG_P Parameter: Treatment Value: 10percent PEG vs. No Treatment
  misc_feature: MA Experiment ID: 20000573 Result: Down-regulated in Transcription
  misc_feature: MA Experiment 20000573 PARAMETER Experiment Name: At_100uM_ABA_Mutants__P Parameter: Organism Value: A. thaliana
  misc_feature: MA Experiment 20000573 PARAMETER Experiment Name: At_100uM_ABA_Mutants__P Parameter: Plant Line Value: CS22 vs. Ler wt
  misc_feature: MA Experiment 20000573 PARAMETER Experiment Name: At_100uM_ABA_Mutants__P Parameter: Timepoint (hr) Value: N/A
  misc_feature: MA Experiment 20000573 PARAMETER Experiment Name: At_100uM_ABA_Mutants__P Parameter: Tissue Value: Whole Plant
  misc_feature: MA Experiment 20000573 PARAMETER Experiment Name: At_100uM_ABA_Mutants__P Parameter: Treatment Value: None
  misc_feature: MA Experiment ID: 20000574 Result: Down-regulated in Transcription
  misc_feature: MA Experiment 20000574 PARAMETER Experiment Name: At_100uM_ABA_Mutants__P Parameter: Organism Value: A. thaliana
  misc_feature: MA Experiment 20000574 PARAMETER Experiment Name: At_100uM_ABA_Mutants__P Parameter: Plant Line Value: CS23 vs. Ler wt
  misc_feature: MA Experiment 20000574 PARAMETER Experiment Name: At_100uM_ABA_Mutants__P Parameter: Timepoint (hr) Value: N/A
  misc_feature: MA Experiment 20000574 PARAMETER Experiment Name: At_100uM_ABA_Mutants__P Parameter: Tissue Value: Whole Plant
  misc_feature: MA Experiment 20000574 PARAMETER Experiment Name: At_100uM_ABA_Mutants__P Parameter: Treatment Value: None
  misc_feature: MA Experiment ID: 20000578 Result: Down-regulated in Transcription
  misc_feature: MA Experiment 20000578 PARAMETER Experiment Name: At_CS3726__P Parameter: Organism Value: A. thaliana
  misc_feature: MA Experiment 20000578 PARAMETER Experiment Name: At_CS3726__P Parameter: Plant Line Value: CS3726
  misc_feature: MA Experiment 20000578 PARAMETER Experiment Name: At_CS3726__P Parameter: Tissue Value: Whole Plant
  misc_feature: MA Experiment ID: 20000794 Result: Down-regulated in Transcription
  misc_feature: MA Experiment 20000794 PARAMETER Experiment Name: At_Petals_P Parameter: Age (day) Value: 23-25 days
  misc_feature: MA Experiment 20000794 PARAMETER Experiment Name: At_Petals_P Parameter: Plant Line Value: WS
  misc_feature: MA Experiment 20000794 PARAMETER Experiment Name: At_Petals_P Parameter: Tissue Value: Petals vs. Whole plant
  misc_feature: MA Experiment ID: 20001247 Result: Up-regulated in Transcription
  misc_feature: MA Experiment 20001247 PARAMETER Experiment Name: At_Far-red-induction_P Parameter: Age (day) Value: 7
  misc_feature: MA Experiment 20001247 PARAMETER Experiment Name: At_Far-red-induction_P Parameter: Light Value: Far-red vs. White
  misc_feature: MA Experiment 20001247 PARAMETER Experiment Name: At_Far-red-induction_P Parameter: Organism Value: A. thaliana
  misc_feature: MA Experiment 20001247 PARAMETER Experiment Name: At_Far-red-induction_P Parameter: Plant Line Value: Columbia
  misc_feature: MA Experiment 20001247 PARAMETER Experiment Name: At_Far-red-induction_P Parameter: Timepoint (hr) Value: 1
  misc_feature: MA Experiment 20001247 PARAMETER Experiment Name: At_Far-red-induction_P Parameter: Tissue Value: Whole Plant
  misc_feature: MA Experiment ID: 20001557 Result: Up-regulated in Transcription
  misc_feature: MA Experiment 20001557 PARAMETER Experiment Name: At_Drought_Soil_Dry_P Parameter: Age (day) Value: 27
  misc_feature: MA Experiment 20001557 PARAMETER Experiment Name: At_Drought_Soil_Dry_P Parameter: Organism Value: A. thaliana
  misc_feature: MA Experiment 20001557 PARAMETER Experiment Name: At_Drought_Soil_Dry_P Parameter: Plant Line Value: WS
  misc_feature: MA Experiment 20001557 PARAMETER Experiment Name: At_Drought_Soil_Dry_P Parameter: Post Timepoint (hr) Value: 3
  misc_feature: MA Experiment 20001557 PARAMETER Experiment Name: At_Drought_Soil_Dry_P Parameter: Post-Treatment Value: Re-Water vs. No Drought
  misc_feature: MA Experiment 20001557 PARAMETER Experiment Name: At_Drought_Soil_Dry_P Parameter: Timepoint (day) Value: 13
  misc_feature: MA Experiment 20001557 PARAMETER Experiment Name: At_Drought_Soil_Dry_P Parameter: Treatment Value: Drought vs. No Drought
  misc_feature: MA Experiment ID: 20001757 Result: Down-regulated in Transcription
  misc_feature: MA Experiment 20001757 PARAMETER Experiment Name: At_50mM_NH4NO3_L-to-H_P Parameter: Timepoint (hr) Value: 6
  misc_feature: MA Experiment 20001757 PARAMETER Experiment Name: At_50mM_NH4NO3_L-to-H_P Parameter: Tissue Value: Leaf
  misc_feature: MA Experiment 20001757 PARAMETER Experiment Name: At_50mM_NH4NO3_L-to-H_P Parameter: Treatment Value: 50mM NH4NO3 vs 100mM Mannitol
  misc_feature: MA Experiment ID: 20001761 Result: Down-regulated in Transcription
  misc_feature: MA Experiment 20001761 PARAMETER Experiment Name: At_50mM_NH4NO3_L-to-H_P Parameter: Timepoint (hr) Value: 4
  misc_feature: MA Experiment 20001761 PARAMETER Experiment Name: At_50mM_NH4NO3_L-to-H_P Parameter: Tissue Value: Siliques
  misc_feature: MA Experiment 20001761 PARAMETER Experiment Name: At_50mM_NH4NO3_L-to-H_P Parameter: Treatment Value: 50mM NH4NO3 vs 100mM Mannitol
  misc_feature: MA Experiment ID: 20001773 Result: Down-regulated in Transcription
  misc_feature: MA Experiment 20001773 PARAMETER Experiment Name: At_Far-red-enriched-adult_P Parameter: Age (day) Value: 30
  misc_feature: MA Experiment 20001773 PARAMETER Experiment Name: At_Far-red-enriched-adult_P Parameter: Light Value: Far-red enriched vs. White
  misc_feature: MA Experiment 20001773 PARAMETER Experiment Name: At_Far-red-enriched-adult_P Parameter: Organism Value: A. thaliana
  misc_feature: MA Experiment 20001773 PARAMETER Experiment Name: At_Far-red-enriched-adult_P Parameter: Plant Line Value: Columbia
  misc_feature: MA Experiment 20001773 PARAMETER Experiment Name: At_Far-red-enriched-adult_P Parameter: Timepoint (hr) Value: 48
  misc_feature: MA Experiment 20001773 PARAMETER Experiment Name: At_Far-red-enriched-adult_P Parameter: Tissue Value: Aerial
  misc_feature: MA Experiment ID: 20001905 Result: Up-regulated in Transcription
  misc_feature: MA Experiment 20001905 PARAMETER Experiment Name: At_Drought_Reproduction_P Parameter: Age (day) Value: 40
  misc_feature: MA Experiment 20001905 PARAMETER Experiment Name: At_Drought_Reproduction_P Parameter: Organism Value: A. thaliana
  misc_feature: MA Experiment 20001905 PARAMETER Experiment Name: At_Drought_Reproduction_P Parameter: Plant Line Value: WS
  misc_feature: MA Experiment 20001905 PARAMETER Experiment Name: At_Drought_Reproduction_P Parameter: Timepoint (day) Value: 10
  misc_feature: MA Experiment 20001905 PARAMETER Experiment Name: At_Drought_Reproduction_P Parameter: Tissue Value: Rosettes
  misc_feature: MA Experiment 20001905 PARAMETER Experiment Name: At_Drought_Reproduction_P Parameter: Treatment Value: Drought vs. No Drought
  misc_feature: MA Experiment ID: 20001906 Result: Up-regulated in Transcription
  misc_feature: MA Experiment 20001906 PARAMETER Experiment Name: At_Drought_Reproduction_P Parameter: Age (day) Value: 35
  misc_feature: MA Experiment 20001906 PARAMETER Experiment Name: At_Drought_Reproduction_P Parameter: Organism Value: A. thaliana
  misc_feature: MA Experiment 20001906 PARAMETER Experiment Name: At_Drought_Reproduction_P Parameter: Plant Line Value: WS
  misc_feature: MA Experiment 20001906 PARAMETER Experiment Name: At_Drought_Reproduction_P Parameter: Timepoint (day) Value: 5
  misc_feature: MA Experiment 20001906 PARAMETER Experiment Name: At_Drought_Reproduction_P Parameter: Tissue Value: Siliques
  misc_feature: MA Experiment 20001906 PARAMETER Experiment Name: At_Drought_Reproduction_P Parameter: Treatment Value: Drought vs. No Drought
  misc_feature: MA Experiment ID: 20001908 Result: Up-regulated in Transcription
  misc_feature: MA Experiment 20001908 PARAMETER Experiment Name: At_Drought_Reproduction_P Parameter: Age (day) Value: 40
  misc_feature: MA Experiment 20001908 PARAMETER Experiment Name: At_Drought_Reproduction_P Parameter: Organism Value: A. thaliana
  misc_feature: MA Experiment 20001908 PARAMETER Experiment Name: At_Drought_Reproduction_P Parameter: Plant Line Value: WS
  misc_feature: MA Experiment 20001908 PARAMETER Experiment Name: At_Drought_Reproduction_P Parameter: Timepoint (day) Value: 10
  misc_feature: MA Experiment 20001908 PARAMETER Experiment Name: At_Drought_Reproduction_P Parameter: Tissue Value: Siliques
  misc_feature: MA Experiment 20001908 PARAMETER Experiment Name: At_Drought_Reproduction_P Parameter: Treatment Value: Drought vs. No Drought
  misc_feature: MA Experiment ID: 20001910 Result: Up-regulated in Transcription
  misc_feature: MA Experiment 20001910 PARAMETER Experiment Name: At_Drought_Reproduction_P Parameter: Age (day) Value: 37
  misc_feature: MA Experiment 20001910 PARAMETER Experiment Name: At_Drought_Reproduction_P Parameter: Organism Value: A. thaliana
  misc_feature: MA Experiment 20001910 PARAMETER Experiment Name: At_Drought_Reproduction_P Parameter: Plant Line Value: WS
  misc_feature: MA Experiment 20001910 PARAMETER Experiment Name: At_Drought_Reproduction_P Parameter: Timepoint (day) Value: 7
  misc_feature: MA Experiment 20001910 PARAMETER Experiment Name: At_Drought_Reproduction_P Parameter: Tissue Value: Flowers
  misc_feature: MA Experiment 20001910 PARAMETER Experiment Name: At_Drought_Reproduction_P Parameter: Treatment Value: Drought vs. No Drought
agcaattaaacaatttcttcactgcaattcacaagcaaccttcaaactaaaactcgagagacaagaaatcctcagaatctttaacttaatggcgctcgaggctcttacatcaccaagattagcttctccgattcctcctttgttcgaagattcttcagtcttccatggagtcgagcactggacaaagggtaagcgatctaagagatcaagatccgatttccaccaccaaaacctcactgaggaagagtatctagctttttgcctcatgcttctcgctcgcgacaaccgtcagcctcctcctcctccggcggtggagaagttgagctacaagtgtagcgtctgcgacaagacgttctcttcttaccaagctctcggtggtcacaaggcaagccaccgtaagaacttatcacagactctctccggcggaggagatgatcattcaacctcgtcggcgacaaccacatccgccgtgactactggaagtgggaaatcacacgtttgcaccatctgtaacaagtcttttccttccggtcaagctctcggcggacacaagcggtgccactacgaaggaaacaacaacatcaacactagtagcgtgtccaactccgaaggtgcggggtccactagccacgttagcagtagccaccgtgggtttgacctcaacatccctccgatccctgaattctcgatggtcaacggagacgacgaagtcatgagccctatgccggcgaagaagcctcggtttgactttccggtcaaacttcaactttaaggaaatttacttagacgataagatttcgtttgtatactgttgagagttgtgtaggaatttgttgactgtacataccaaattggactttgactgattccaattcttcttgttctttcattttaaaaattattaaaccgattctttaccacatatttt

SEQ ID NO: 82463 - protein, 256 aa, Arabidopsis thaliana
  peptide (1)..(256): Ceres Seq. ID no. 12665856
  misc_feature (165)..(187): Pfam Name: Zinc finger, C2H2 type Pfam Description: Zinc finger, C2H2 type
  misc_feature (1)..(256): Homolog of NCBI NO: 6693033 NR Description: T22C5.18 [Arabidopsis thaliana]
  misc_feature (30)..(256): Homolog of NCBI NO: 15217692 NR Description: salt-tolerance zinc finger protein; protein id: supported by cDNA: gi_14334649, supported by cDNA: gi_17104582,
  misc_feature (30)..(256): Homolog of NCBI NO: 1418323 NR Description: zinc finger protein [Arabidopsis thaliana]
  misc_feature (30)..(253): Homolog of NCBI NO: 15237692 NR Description: putative c2h2 zinc finger transcription factor; id: At5g04340.1, supported by cDNA: gi_2511545 [Arabidopsis >gi|2511546|gb|AAB80922.1| putative c2h2 zinc finger
  misc_feature (30)..(253): Homolog of NCBI NO: 26452746 NR Description: putative C2H2 zinc finger transcription factor
  misc_feature (30)..(247): Homolog of NCBI NO: 4666360 NR Description: zinc-finger protein 1 [Datisca glomerata]
  misc_feature (30)..(246): Homolog of NCBI NO: 7228329 NR Description: putative TFIIIA (or kruppel)-like zinc finger
AIKQFLHCNSQATFKLKLERQEILRIFNLMALEALTSPRLASPIPPLFEDSSVFHGVEHWTKGKRSKRSRSDFHHQNLTEEEYLAFCLMLLARDNRQPPPPPAVEKLSYKCSVCDKTFSSYQALGGHKASHRKNLSQTLSGGGDDHSTSSATTTSAVTTGSGKSHVCTICNKSFPSGQALGGHKRCHYEGNNNINTSSVSNSEGAGSTSHVSSSHRGFDLNIPPIPEFSMVNGDDEVMSPMPAKKPRFDFPVKLQL

SEQ ID NO: 82464 - protein, 227 aa, Arabidopsis thaliana
  peptide (1)..(227): Ceres Seq. ID no. 12665857
  misc_feature (136)..(158): Pfam Name: Zinc finger, C2H2 type Pfam Description: Zinc finger, C2H2 type
  misc_feature (1)..(227): Homolog of NCBI NO: 6693033 NR Description: T22C5.18 [Arabidopsis thaliana]
  misc_feature (1)..(227): Homolog of NCBI NO: 15217692 NR Description: salt-tolerance zinc finger protein; protein id: supported by cDNA: gi_14334649, supported by cDNA: gi_17104582,
  misc_feature (1)..(227): Homolog of NCBI NO: 1418323 NR Description: zinc finger protein [Arabidopsis thaliana]
  misc_feature (1)..(224): Homolog of NCBI NO: 15237692 NR Description: putative c2h2 zinc finger transcription factor; id: At5g04340.1, supported by cDNA: gi_2511545 [Arabidopsis >gi|2511546|gb|AAB80922.1| putative c2h2 zinc finger
  misc_feature (1)..(224): Homolog of NCBI NO: 26452746 NR Description: putative C2H2 zinc finger transcription factor
  misc_feature (1)..(218): Homolog of NCBI NO: 4666360 NR Description: zinc-finger protein 1 [Datisca glomerata]
  misc_feature (1)..(217): Homolog of NCBI NO: 7228329 NR Description: putative TFIIIA (or kruppel)-like zinc finger
MALEALTSPRLASPIPPLFEDSSVFHGVEHWTKGKRSKRSRSDFHHQNLTEEEYLAFCLMLLARDNRQPPPPPAVEKLSYKCSVCDKTFSSYQALGGHKASHRKNLSQTLSGGGDDHSTSSATTTSAVTTGSGKSHVCTICNKSFPSGQALGGHKRCHYEGNNNINTSSVSNSEGAGSTSHVSSSHRGFDLNIPPIPEFSMVNGDDEVMSPMPAKKPRFDFPVKLQL

SEQ ID NO: 82465 - protein, 168 aa, Arabidopsis thaliana
  peptide (1)..(168): Ceres Seq. ID no. 12665858
  misc_feature (77)..(99): Pfam Name: Zinc finger, C2H2 type Pfam Description: Zinc finger, C2H2 type
  misc_feature (1)..(168): Homolog of NCBI NO: 6693033 NR Description: T22C5.18 [Arabidopsis thaliana]
  misc_feature (1)..(168): Homolog of NCBI NO: 15217692 NR Description: salt-tolerance zinc finger protein; protein id: supported by cDNA: gi_14334649, supported by cDNA: gi_17104582,
  misc_feature (1)..(168): Homolog of NCBI NO: 1418323 NR Description: zinc finger protein [Arabidopsis thaliana]
  misc_feature (1)..(165): Homolog of NCBI NO: 15237692 NR Description: putative c2h2 zinc finger transcription factor; id: At5g04340.1, supported by cDNA: gi_2511545 [Arabidopsis >gi|2511546|gb|AAB80922.1| putative c2h2 zinc finger
  misc_feature (1)..(165): Homolog of NCBI NO: 26452746 NR Description: putative C2H2 zinc finger transcription factor
  misc_feature (1)..(159): Homolog of NCBI NO: 4666360 NR Description: zinc-finger protein 1 [Datisca glomerata]
  misc_feature (1)..(158): Homolog of NCBI NO: 7228329 NR Description: putative TFIIIA (or kruppel)-like zinc finger
MLLARDNRQPPPPPAVEKLSYKCSVCDKTFSSYQALGGHKASHRKNLSQTLSGGGDDHSTSSATTTSAVTTGSGKSHVCTICNKSFPSGQALGGHKRCHYEGNNNINTSSVSNSEGAGSTSHVSSSHRGFDLNIPPIPEFSMVNGDDEVMSPMPAKKPRFDFPVKLQL

SEQ ID NO: 82466 - DNA, 1642 bp, Arabidopsis thaliana
  misc_feature (1)..(1642): Ceres Seq. ID no. 12665879
  misc_feature: MA Experiment ID: 20000286 Result: Up-regulated in Transcription
  misc_feature: MA Experiment 20000286 PARAMETER Experiment Name: At_Open_Flower_P Parameter: Age (day) Value: 21
  misc_feature: MA Experiment 20000286 PARAMETER Experiment Name: At_Open_Flower_P Parameter: Plant Line Value: WS
  misc_feature: MA Experiment 20000286 PARAMETER Experiment Name: At_Open_Flower_P Parameter: Tissue Value: Half Open vs. Whole Plant
  misc_feature: MA Experiment ID: 20000438 Result: Down-regulated in Transcription
  misc_feature: MA Experiment 20000438 PARAMETER Experiment Name: At_Shoots__P Parameter: Age (day) Value: 14
  misc_feature: MA Experiment 20000438 PARAMETER Experiment Name: At_Shoots__P Parameter: Tissue Value: Shoots vs. Whole Plant
  misc_feature: MA Experiment ID: 20000439 Result: Down-regulated in Transcription
  misc_feature: MA Experiment 20000439 PARAMETER Experiment Name: At_Roots__P Parameter: Age (day) Value: 14 vs. 21
  misc_feature: MA Experiment 20000439 PARAMETER Experiment Name: At_Roots__P Parameter: Organism Value: A. thaliana
  misc_feature: MA Experiment 20000439 PARAMETER Experiment Name: At_Roots__P Parameter: Tissue Value: Roots vs. Whole Plant
  misc_feature: MA Experiment ID: 20000794 Result: Up-regulated in Transcription
  misc_feature: MA Experiment 20000794 PARAMETER Experiment Name: At_Petals_P Parameter: Age (day) Value: 23-25 days
  misc_feature: MA Experiment 20000794 PARAMETER Experiment Name: At_Petals_P Parameter: Plant Line Value: WS
  misc_feature: MA Experiment 20000794 PARAMETER Experiment Name: At_Petals_P Parameter: Tissue Value: Petals vs. Whole plant
  misc_feature: MA Experiment ID: 20001248 Result: Up-regulated in Transcription
  misc_feature: MA Experiment 20001248 PARAMETER Experiment Name: At_Far-red-induction_P Parameter: Age (day) Value: 7
  misc_feature: MA Experiment 20001248 PARAMETER Experiment Name: At_Far-red-induction_P Parameter: Light Value: Far-red vs. White
  misc_feature: MA Experiment 20001248 PARAMETER Experiment Name: At_Far-red-induction_P Parameter: Organism Value: A. thaliana
  misc_feature: MA Experiment 20001248 PARAMETER Experiment Name: At_Far-red-induction_P Parameter: Plant Line Value: Columbia
  misc_feature: MA Experiment 20001248 PARAMETER Experiment Name: At_Far-red-induction_P Parameter: Timepoint (hr) Value: 4
  misc_feature: MA Experiment 20001248 PARAMETER Experiment Name: At_Far-red-induction_P Parameter: Tissue Value: Whole Plant
  misc_feature: MA Experiment ID: 20001459 Result: Down-regulated in Transcription
  misc_feature: MA Experiment 20001459 PARAMETER Experiment Name: At_50mM_NH4NO3_L-to-H_P Parameter: Age (day) Value: Undefined
  misc_feature: MA Experiment 20001459 PARAMETER Experiment Name: At_50mM_NH4NO3_L-to-H_P Parameter: Organism Value: Undefined
  misc_feature: MA Experiment 20001459 PARAMETER Experiment Name: At_50mM_NH4NO3_L-to-H_P Parameter: Plant Line Value: Undefined
  misc_feature: MA Experiment 20001459 PARAMETER Experiment Name: At_50mM_NH4NO3_L-to-H_P Parameter: Timepoint (hr) Value: 4
  misc_feature: MA Experiment 20001459 PARAMETER Experiment Name: At_50mM_NH4NO3_L-to-H_P Parameter: Tissue Value: Siliques
  misc_feature: MA Experiment 20001459 PARAMETER Experiment Name: At_50mM_NH4NO3_L-to-H_P Parameter: Treatment Value: 50mM NH4NO3 vs. 100mM Manitol
gtgagaaatggatttgtcatcattcttctcaccgtccttagtctctgaaaataaattctgattttgatttcgaattttagggattttgagagagagtcagttatgagtagttcggagagagtaccgtgcgatttctgcggcgagcgtacggcggttttgttttgtagagccgatacggcgaagctgtgtttgccttgtgatcagcaagttcacacggcgaatctgttgtcgaggaagcacgtgcgatctcagatctgcgataattgcggtaacgagccagtctctgttcggtgtttcaccgataatctgattttgtgtcaggagtgtgattgggatgttcacggaagttgttcagtttccgatgctcatgttcgatccgccgtggaaggtttttccggttgtccatcggcgttggagcttgctgctttatggggacttgatttggagcaagggaggaaagatgaagagaatcaagttccgatgatggcgatgatgatggataatttcgggatgcagttggattcttgggttttgggatctaatgaattgattgttcccagcgatacgacgtttaagaagcgtggatcttgtggatctagttgtgggaggtataagcaggtattgtgtaagcagcttgaggagttgcttaagagtggtgttgtcggtggtgatggcgatgatggtgatcgtgaccgtgattgtgaccgtgagggtgcttgtgatggagatggagatggagaagcaggagaggggcttatggttccggagatgtcagagagattgaaatggtcaagagatgttgaggagatcaatggtggcggaggaggaggagttaaccagcagtggaatgctactactactaatcctagtggtggccagagttctcagatatgggattttaacttgggacagtcacggggacctgaggatacgagtcgagtggaagctgcatatgtagggaaaggtgctgcttcttcattcacaatcaacaattttgttgaccatatgaatgaaacttgttccactaatgtgaaaggtgtcaaagagattaaaaaggatgactacaagcgatcaacttcaggccaggtacaaccaacaaaatctgagagcaacaatcgtccaattacctttggctctgagaaaggttcgaactcctccagtgacttgcatttcacagagcatattgctggaactagttgtaagaccacaagactagttgcaactaaggctgatctggagcggctggctcagaacagaggagatgcaatgcagcgttacaaggaaaagaggaagacacggagatatgataagaccataaggtatgaatcgaggaaggcaagagctgacactaggttgcgtgtcagaggcagatttgtgaaagctagtgaagctccttacccttaaccttaagtctcttcacataggcttccttttagctacaaacttagttactttttttacttccactgcctcataaatgtacagaccggtctcgtttcatctggccgcccttctgttttattgccttatctggcccttttatgtaccttggaatcttatctagtttaaaaaagattgtaaccttctagaaaaccatattctgttgacagtatatacatgtctatccaagcattttgaagtc

SEQ ID NO: 82467 - protein, 433 aa, Arabidopsis thaliana
  peptide (1)..(433): Ceres Seq. ID no. 12665880
  misc_feature (4)..(51): Pfam Name: B-box zinc finger Pfam Description: B-box zinc finger
  misc_feature (1)..(433): Homolog of NCBI NO: 15217814 NR Description: CONSTANS B-box zinc finger family protein; id: At1g28050.1, supported by cDNA: gi_14335053 [Arabidopsis
  misc_feature (2)..(192): Homolog of NCBI NO: 30685731 NR Description: CONSTANS B-box zinc finger family protein
  misc_feature (243)..(429): Homolog of NCBI NO: 30685731 NR Description: CONSTANS B-box zinc finger family protein
  misc_feature (2)..(192): Homolog of NCBI NO: 17432968 NR Description: Zinc finger protein constans-like 9
  misc_feature (253)..(400): Homolog of NCBI NO: 17432968 NR Description: Zinc finger protein constans-like 9
  misc_feature (243)..(429): Homolog of NCBI NO: 22135884 NR Description: putative CONSTANS-like B-box zinc finger protein
  misc_feature (9)..(115): Homolog of NCBI NO: 7489605 NR Description: zinc-finger protein S3574 [imported] - rice
  misc_feature (384)..(430): Homolog of NCBI NO: 7489605 NR Description: zinc-finger protein S3574 [imported] - rice
  misc_feature (8)..(154): Homolog of NCBI NO: 38175538 NR Description: zinc-finger protein C60910-like [Oryza sativa
  misc_feature (345)..(431): Homolog of NCBI NO: 38175538 NR Description: zinc-finger protein C60910-like [Oryza sativa
MSSSERVPCDFCGERTAVLFCRADTAKLCLPCDQQVHTANLLSRKHVRSQICDNCGNEPVSVRCFTDNLILCQECDWDVHGSCSVSDAHVRSAVEGFSGCPSALELAALWGLDLEQGRKDEENQVPMMAMMMDNFGMQLDSWVLGSNELIVPSDTTFKKRGSCGSSCGRYKQVLCKQLEELLKSGVVGGDGDDGDRDRDCDREGACDGDGDGEAGEGLMVPEMSERLKWSRDVEEINGGGGGGVNQQWNATTTNPSGGQSSQIWDFNLGQSRGPEDTSRVEAAYVGKGAASSFTINNFVDHMNETCSTNVKGVKEIKKDDYKRSTSGQVQPTKSESNNRPITFGSEKGSNSSSDLHFTEHIAGTSCKTTRLVATKADLERLAQNRGDAMQRYKEKRKTRRYDKTIRYESRKARADTRLRVRGRFVKASEAPYP

SEQ ID NO: 82468 - protein, 307 aa, Arabidopsis thaliana
  peptide (1)..(307): Ceres Seq. ID no. 12665881
  misc_feature (264)..(303): Pfam Name: CCT motif Pfam Description: CCT motif
  misc_feature (1)..(307): Homolog of NCBI NO: 15217814 NR Description: CONSTANS B-box zinc finger family protein; id: At1g28050.1, supported by cDNA: gi_14335053 [Arabidopsis
  misc_feature (1)..(66): Homolog of NCBI NO: 30685731 NR Description: CONSTANS B-box zinc finger family protein
  misc_feature (117)..(303): Homolog of NCBI NO: 30685731 NR Description: CONSTANS B-box zinc finger family protein
  misc_feature (1)..(66): Homolog of NCBI NO: 17432968 NR Description: Zinc finger protein constans-like 9
  misc_feature (127)..(274): Homolog of NCBI NO: 17432968 NR Description: Zinc finger protein constans-like 9
  misc_feature (117)..(303): Homolog of NCBI NO: 22135884 NR Description: putative CONSTANS-like B-box zinc finger protein
  misc_feature (258)..(304): Homolog of NCBI NO: 7489605 NR Description: zinc-finger protein S3574 [imported] - rice
  misc_feature (1)..(28): Homolog of NCBI NO: 38175538 NR Description: zinc-finger protein C60910-like [Oryza sativa
  misc_feature (219)..(305): Homolog of NCBI NO: 38175538 NR Description: zinc-finger protein C60910-like [Oryza sativa
  misc_feature (1)..(58): Homolog of NCBI NO: 15227152 NR Description: CONSTANS B-box zinc finger family protein; id: At2g47890.1 [Arabidopsis thaliana]
MMAMMMDNFGMQLDSWVLGSNELIVPSDTTFKKRGSCGSSCGRYKQVLCKQLEELLKSGVVGGDGDDGDRDRDCDREGACDGDGDGEAGEGLMVPEMSERLKWSRDVEEINGGGGGGVNQQWNATTTNPSGGQSSQIWDFNLGQSRGPEDTSRVEAAYVGKGAASSFTINNFVDHMNETCSTNVKGVKEIKKDDYKRSTSGQVQPTKSESNNRPITFGSEKGSNSSSDLHFTEHIAGTSCKTTRLVATKADLERLAQNRGDAMQRYKEKRKTRRYDKTIRYESRKARADTRLRVRGRFVKASEAPYP

SEQ ID NO: 82469 - protein, 306 aa, Arabidopsis thaliana
  peptide (1)..(306): Ceres Seq. ID no. 12665882
  misc_feature (263)..(302): Pfam Name: CCT motif Pfam Description: CCT motif
  misc_feature (1)..(306): Homolog of NCBI NO: 15217814 NR Description: CONSTANS B-box zinc finger family protein; id: At1g28050.1, supported by cDNA: gi_14335053 [Arabidopsis
  misc_feature (1)..(65): Homolog of NCBI NO: 30685731 NR Description: CONSTANS B-box zinc finger family protein
  misc_feature (116)..(302): Homolog of NCBI NO: 30685731 NR Description: CONSTANS B-box zinc finger family protein
  misc_feature (1)..(65): Homolog of NCBI NO: 17432968 NR Description: Zinc finger protein constans-like 9
  misc_feature (126)..(273): Homolog of NCBI NO: 17432968 NR Description: Zinc finger protein constans-like 9
  misc_feature (116)..(302): Homolog of NCBI NO: 22135884 NR Description: putative CONSTANS-like B-box zinc finger protein
  misc_feature (257)..(303): Homolog of NCBI NO: 7489605 NR Description: zinc-finger protein S3574 [imported] - rice
  misc_feature (1)..(27): Homolog of NCBI NO: 38175538 NR Description: zinc-finger protein C60910-like [Oryza sativa
  misc_feature (218)..(304): Homolog of NCBI NO: 38175538 NR Description: zinc-finger protein C60910-like [Oryza sativa
  misc_feature (1)..(57): Homolog of NCBI NO: 15227152 NR Description: CONSTANS B-box zinc finger family protein; id: At2g47890.1 [Arabidopsis thaliana]
MAMMMDNFGMQLDSWVLGSNELIVPSDTTFKKRGSCGSSCGRYKQVLCKQLEELLKSGVVGGDGDDGDRDRDCDREGACDGDGDGEAGEGLMVPEMSERLKWSRDVEEINGGGGGGVNQQWNATTTNPSGGQSSQIWDFNLGQSRGPEDTSRVEAAYVGKGAASSFTINNFVDHMNETCSTNVKGVKEIKKDDYKRSTSGQVQPTKSESNNRPITFGSEKGSNSSSDLHFTEHIAGTSCKTTRLVATKADLERLAQNRGDAMQRYKEKRKTRRYDKTIRYESRKARADTRLRVRGRFVKASEAPYP

SEQ ID NO: 82470 - DNA, 981 bp, Arabidopsis thaliana
  misc_feature (1)..(981): Ceres Seq. ID no. 12665887
  misc_feature: MA Experiment ID: 20000264 Result: Down-regulated in Transcription
  misc_feature: MA Experiment 20000264 PARAMETER Experiment Name: At_Open_Flower_P Parameter: Age (day) Value: 21
  misc_feature: MA Experiment 20000264 PARAMETER Experiment Name: At_Open_Flower_P Parameter: Plant Line Value: WS
  misc_feature: MA Experiment 20000264 PARAMETER Experiment Name: At_Open_Flower_P Parameter: Tissue Value: Open Flower vs. Whole Plant
  misc_feature: MA Experiment ID: 20000265 Result: Down-regulated in Transcription
  misc_feature: MA Experiment 20000265 PARAMETER Experiment Name: At_Open_Flower_P Parameter: Age (day) Value: 21
  misc_feature: MA Experiment 20000265 PARAMETER Experiment Name: At_Open_Flower_P Parameter: Plant Line Value: WS
  misc_feature: MA Experiment 20000265 PARAMETER Experiment Name: At_Open_Flower_P Parameter: Tissue Value: Closed Flower vs. Whole Plant
  misc_feature: MA Experiment ID: 20000496 Result: Up-regulated in Transcription
  misc_feature: MA Experiment 20000496 PARAMETER Experiment Name: At_Guard_Cells_P Parameter: Harvest Date Value: 7/19/2002
  misc_feature: MA Experiment 20000496 PARAMETER Experiment Name: At_Guard_Cells_P Parameter: Organism Value: Canola
  misc_feature: MA Experiment 20000496 PARAMETER Experiment Name: At_Guard_Cells_P Parameter: Tissue Value: Guard Cells vs. Leaves
atggatgagaccaagatcccaaagaaactgcaaagcgatgacgaagaaaacataagtttgatttcttcacttccctttgacgtagatttcgacagcacgaagctcttcaaataccaaggatgttggtacgacgacaaaactctgcaaggagtcctcaattttcaaagaggtttcgagccacaagacaccgatataattattgcttcgttccccaaatctggcactacttggctcaaagctctcacggtagctctcctcgagagatccaaacagaaacactcttctgatgatcatcctcttctacttgataatcctcatggactggtaccattcctcgagctcaggctgttcactgagacctcgaaaccagatctgaccagtatctcatcgtcgccgaggttattttcgactcatgtggcgttccaaacgctgcgagaggctctcaaaaactctccttgtaagatcgtttacgtgtggaggaacgtgaaagacgtactggtgtcgttttggtatttcaacagcgcaaaactaaagatagaagaggagagaagcattttggattcaatgttcgagtccttttgcagaggagttatcaattacggaccatcctgggaacatgtcttgaactattggagagcaagcttggaagactccaagaatgtgcttttcttgaagtacgaggagttaaaaacagaacctcgcgtgcagctgaagagacttgccgagttcttggattgtccttttacggtggaagaagaagagaggggatcagtggaagagatcttggacctttgctcattgcgtaacttgaagaatttggagatcaacaagaccggaaaaacgcttaggggggccgatcacaagattttttttcgtaaaggggaagtcggtgactcgaagaatcatctgactcctgaaatggagaagataattgacatgatcactgaggagaaatttgaaggttcggatttgaaattctga

SEQ ID NO: 82471 - protein, 326 aa, Arabidopsis thaliana
  peptide (1)..(326): Ceres Seq. ID no. 12665888
  misc_feature (62)..(323): Pfam Name: Sulfotransferase domain Pfam Description: Sulfotransferase domain
  misc_feature (1)..(326): Homolog of NCBI NO: 15217849 NR Description: steroid sulfotransferase, putative; protein id: [Arabidopsis thaliana] >gi|25288810|pir||F86407 probable
  misc_feature (1)..(325): Homolog of NCBI NO: 15222843 NR Description: steroid sulfotransferase, putative; protein id: supported by cDNA: 150484. [Arabidopsis thaliana]
  misc_feature (1)..(325): Homolog of NCBI NO: 21553545 NR Description: steroid sulfotransferase, putative [Arabidopsis
  misc_feature (9)..(326): Homolog of NCBI NO: 15230602 NR Description: sulfotransferase-like protein; protein id:
  misc_feature (3)..(326): Homolog of NCBI NO: 15239947 NR Description: steroid sulfotransferase-like; protein id:
  misc_feature (1)..(326): Homolog of NCBI NO: 15230603 NR Description: sulfotransferase-like protein; protein id:
  misc_feature (1)..(326): Homolog of NCBI NO: 15226028 NR Description: putative steroid sulfotransferase; protein id:
  misc_feature (6)..(326): Homolog of NCBI NO: 18395604 NR Description: putative steroid sulfotransferase; protein id: supported by cDNA: 3964., supported by cDNA: gi_20260123 thaliana] >gi|20197902|gb|AAD20077.2| putative steroid putative
  misc_feature (6)..(326): Homolog of NCBI NO: 25288806 NR Description: probable steroid sulfotransferase [imported] - thaliana >gi|13272389|gb|AAK17133.1|AF325065_1 putative steroid
  misc_feature (9)..(326): Homolog of NCBI NO: 9759556 NR Description: steroid sulfotransferase-like protein
MDETKIPKKLQSDDEENISLISSLPFDVDFDSTKLFKYQGCWYDDKTLQGVLNFQRGFEPQDTDIIIASFPKSGTTWLKALTVALLERSKQKHSSDDHPLLLDNPHGLVPFLELRLFTETSKPDLTSISSSPRLFSTHVAFQTLREALKNSPCKIVYVWRNVKDVLVSFWYFNSAKLKIEEERSILDSMFESFCRGVINYGPSWEHVLNYWRASLEDSKNVLFLKYEELKTEPRVQLKRLAEFLDCPFTVEEEERGSVEEILDLCSLRNLKNLEINKTGKTLRGADHKIFFRKGEVGDSKNHLTPEMEKIIDMITEEKFEGSDLKF

SEQ ID NO: 82472 - DNA, 1309 bp, Arabidopsis thaliana
  misc_feature (1)..(1309): Ceres Seq. ID no. 12665901
  misc_feature: MA Experiment ID: 20000185 Result: Down-regulated in Transcription
  misc_feature: MA Experiment 20000185 PARAMETER Experiment Name: At_Roots__P Parameter: Age (day) Value: 7 vs. 21
  misc_feature: MA Experiment 20000185 PARAMETER Experiment Name: At_Roots__P Parameter: Organism Value: A. thaliana
  misc_feature: MA Experiment 20000185 PARAMETER Experiment Name: At_Roots__P Parameter: Tissue Value: Roots vs. Whole Plant
  misc_feature: MA Experiment ID: 20000227 Result: Up-regulated in Transcription
  misc_feature: MA Experiment 20000227 PARAMETER Experiment Name: At_Root-Tips-vs-Tops_P Parameter: Tissue Value: Root Tips vs. Root Tops
  misc_feature: MA Experiment ID: 20000264 Result: Down-regulated in Transcription
  misc_feature: MA Experiment 20000264 PARAMETER Experiment Name: At_Open_Flower_P Parameter: Age (day) Value: 21
  misc_feature: MA Experiment 20000264 PARAMETER Experiment Name: At_Open_Flower_P Parameter: Plant Line Value: WS
  misc_feature: MA Experiment 20000264 PARAMETER Experiment Name: At_Open_Flower_P Parameter: Tissue Value: Open Flower vs. Whole Plant
  misc_feature: MA Experiment ID: 20000438 Result: Down-regulated in Transcription
  misc_feature: MA Experiment 20000438 PARAMETER Experiment Name: At_Shoots__P Parameter: Age (day) Value: 14
  misc_feature: MA Experiment 20000438 PARAMETER Experiment Name: At_Shoots__P Parameter: Tissue Value: Shoots vs. Whole Plant
  misc_feature: MA Experiment ID: 20000441 Result: Down-regulated in Transcription
  misc_feature: MA Experiment 20000441 PARAMETER Experiment Name: At_1uM_BR-BRZ__P Parameter: Tissue Value: Shoot Apices
  misc_feature: MA Experiment 20000441 PARAMETER Experiment Name: At_1uM_BR-BRZ__P Parameter: Treatment Value: 1uM BR vs. No Treatment
  misc_feature: MA Experiment ID: 20000443 Result: Down-regulated in Transcription
  misc_feature: MA Experiment 20000443 PARAMETER Experiment Name: At_1uM_BR-BRZ__P Parameter: Tissue Value: Shoot Apices
  misc_feature: MA Experiment 20000443 PARAMETER Experiment Name: At_1uM_BR-BRZ__P Parameter: Treatment Value: 1uM BRZ vs. No Treatment
  misc_feature: MA Experiment ID: 20000794 Result: Down-regulated in Transcription
  misc_feature: MA Experiment 20000794 PARAMETER Experiment Name: At_Petals_P Parameter: Age (day) Value: 23-25 days
  misc_feature: MA Experiment 20000794 PARAMETER Experiment Name: At_Petals_P Parameter: Plant Line Value: WS
  misc_feature: MA Experiment 20000794 PARAMETER Experiment Name: At_Petals_P Parameter: Tissue Value: Petals vs. Whole plant
  misc_feature: MA Experiment ID: 20001247 Result: Down-regulated in Transcription
  misc_feature: MA Experiment 20001247 PARAMETER Experiment Name: At_Far-red-induction_P Parameter: Age (day) Value: 7
  misc_feature: MA Experiment 20001247 PARAMETER Experiment Name: At_Far-red-induction_P Parameter: Light Value: Far-red vs. White
  misc_feature: MA Experiment 20001247 PARAMETER Experiment Name: At_Far-red-induction_P Parameter: Organism Value: A. thaliana
  misc_feature: MA Experiment 20001247 PARAMETER Experiment Name: At_Far-red-induction_P Parameter: Plant Line Value: Columbia
  misc_feature: MA Experiment 20001247 PARAMETER Experiment Name: At_Far-red-induction_P Parameter: Timepoint (hr) Value: 1
  misc_feature: MA Experiment 20001247 PARAMETER Experiment Name: At_Far-red-induction_P Parameter: Tissue Value: Whole Plant
  misc_feature: MA Experiment ID: 20001248 Result: Up-regulated in Transcription
  misc_feature: MA Experiment 20001248 PARAMETER Experiment Name: At_Far-red-induction_P Parameter: Age (day) Value: 7
  misc_feature: MA Experiment 20001248 PARAMETER Experiment Name: At_Far-red-induction_P Parameter: Light Value: Far-red vs. White
  misc_feature: MA Experiment 20001248 PARAMETER Experiment Name: At_Far-red-induction_P Parameter: Organism Value: A. thaliana
  misc_feature: MA Experiment 20001248 PARAMETER Experiment Name: At_Far-red-induction_P Parameter: Plant Line Value: Columbia
  misc_feature: MA Experiment 20001248 PARAMETER Experiment Name: At_Far-red-induction_P Parameter: Timepoint (hr) Value: 4
  misc_feature: MA Experiment 20001248 PARAMETER Experiment Name: At_Far-red-induction_P Parameter: Tissue Value: Whole Plant
  misc_feature: MA Experiment ID: 20001458 Result: Up-regulated in Transcription
  misc_feature: MA Experiment 20001458 PARAMETER Experiment Name: At_50mM_NH4NO3_L-to-H_P Parameter: Age (day) Value: Undefined
  misc_feature: MA Experiment 20001458 PARAMETER Experiment Name: At_50mM_NH4NO3_L-to-H_P Parameter: Organism Value: Undefined
  misc_feature: MA Experiment 20001458 PARAMETER Experiment Name: At_50mM_NH4NO3_L-to-H_P Parameter: Plant Line Value: Undefined
  misc_feature: MA Experiment 20001458 PARAMETER Experiment Name: At_50mM_NH4NO3_L-to-H_P Parameter: Timepoint (hr) Value: 2
  misc_feature: MA Experiment 20001458 PARAMETER Experiment Name: At_50mM_NH4NO3_L-to-H_P Parameter: Tissue Value: Siliques
  misc_feature: MA Experiment 20001458 PARAMETER Experiment Name: At_50mM_NH4NO3_L-to-H_P Parameter: Treatment Value: 50mM NH4NO3 vs. 100mM Manitol
  misc_feature: MA Experiment ID: 20001459 Result: Down-regulated in Transcription
  misc_feature: MA Experiment 20001459 PARAMETER Experiment Name: At_50mM_NH4NO3_L-to-H_P Parameter: Age (day) Value: Undefined
  misc_feature: MA Experiment 20001459 PARAMETER Experiment Name: At_50mM_NH4NO3_L-to-H_P Parameter: Organism Value: Undefined
  misc_feature: MA Experiment 20001459 PARAMETER Experiment Name: At_50mM_NH4NO3_L-to-H_P Parameter: Plant Line Value: Undefined
  misc_feature: MA Experiment 20001459 PARAMETER Experiment Name: At_50mM_NH4NO3_L-to-H_P Parameter: Timepoint (hr) Value: 4
  misc_feature: MA Experiment 20001459 PARAMETER Experiment Name: At_50mM_NH4NO3_L-to-H_P Parameter: Tissue Value: Siliques
  misc_feature: MA Experiment 20001459 PARAMETER Experiment Name: At_50mM_NH4NO3_L-to-H_P Parameter: Treatment Value: 50mM NH4NO3 vs. 100mM Manitol
tctctccctctctctctctctctctccgggaaaaatggataacttcttaccctttccctcttctaacgcaaactctgtccaagaactctctatggatcctaacaacaatcgctcgcacttcacaacagtccctacttatgatcatcatcaggctcagcctcatcacttcttgcctccgttttcatacccggtggagcagatggcggcggtgatgaatcctcagccggtttacttatcggagtgttatcctcagatcccggttacgcaaaccggaagtgaattcggttctctggttggtaatccttgtttgtggcaagagagaggtggttttcttgatccgcgtatgacgaagatggcaaggatcaacaggaaaaacgccatgatgagatcaagaaacaactctagccctaattctagtccaagtgagttggttgattcaaagagacagctgatgatgcttaacttgaaaaataacgtgcagatctccgacaagaaagatagctaccaacagtccacatttgataacaagaagcttagggttttgtgtgagaaggaattgaagaacagcgatgttgggtcactcgggaggatagttctaccaaagagagatgcagaagcaaatcttccgaagctatctgataaagaaggaatcgttgtacagatgagagatgttttctctatgcagtcttggtctttcaaatacaagttttggtccaataacaagagcagaatgtatgtcctcgagaacacaggagaatttgtgaagcaaaatggagctgagataggagactttttaacaatatacgaggacgaaagcaagaatctctacttcgccatgaatggaaattcgggaaaacaaaatgaaggaagagaaaatgagtcgagggaaaggaaccactacgaagaggcaatgcttgattacataccaagagacgaagaggaagcttccattgcaatgctcatcggaaatctaaacgatcactatcccatccctaacgatctcatggacctcaccactgaccttcagcaccatcaagccacgtcctcatcaatgccacctgaggatcacgcgtacgtgggttcatccgatgatcaggtgagctttaacgactttgagtggtggtgatatggtggtggaagttctcaagttcataaccccctttatgaaaatagaccttaagatatacaaaagagattaaaagaaaaaaaagttagtatatttcatcatatctctcattgaagatgagatttatatctataattgtttaatagtgtttttattacttttctatcaatatattaaagtttt

SEQ ID NO: 82473 - protein, 374 aa, Arabidopsis thaliana
  peptide (1)..(374): Ceres Seq. ID no. 12665902
  misc_feature (12)..(374): Homolog of NCBI NO: 18396728 NR Description: expressed protein; protein id: At1g28300.1
  misc_feature (12)..(374): Homolog of NCBI NO: 15987516 NR Description: LEAFY COTYLEDON 2 [Arabidopsis thaliana]
  misc_feature (12)..(366): Homolog of NCBI NO: 25518439 NR Description: hypothetical protein F3H9.5 - Arabidopsis >gi|9795607|gb|AAF98425.1|AC021044_4 Hypothetical protein
  misc_feature (174)..(327): Homolog of NCBI NO: 3582520 NR Description: FUSCA3 [Arabidopsis thaliana]
  misc_feature (174)..(327): Homolog of NCBI NO: 18405094 NR Description: transcriptional regulator (FUSCA3); protein id:
  misc_feature (126)..(300): Homolog of NCBI NO: 33309513 NR Description: viviparous protein; abscissic acid insensitive
  misc_feature (174)..(288): Homolog of NCBI NO: 3582518 NR Description: FUSCA3 [Arabidopsis thaliana]
  misc_feature (112)..(357): Homolog of NCBI NO: 10764150 NR Description: transcription factor viviparous 1 [Picea abies]
  misc_feature (112)..(276): Homolog of NCBI NO: 11932104 NR Description: VP1/ABI3-like protein [Chamaecyparis nootkatensis]
  misc_feature (174)..(327): Homolog of NCBI NO: 9279669 NR Description: FUSCA3 [Arabidopsis thaliana]
LSLSLSLSPGKMDNFLPFPSSNANSVQELSMDPNNNRSHFTTVPTYDHHQAQPHHFLPPFSYPVEQMAAVMNPQPVYLSECYPQIPVTQTGSEFGSLVGNPCLWQERGGFLDPRMTKMARINRKNAMMRSRNNSSPNSSPSELVDSKRQLMMLNLKNNVQISDKKDSYQQSTFDNKKLRVLCEKELKNSDVGSLGRIVLPKRDAEANLPKLSDKEGIVVQMRDVFSMQSWSFKYKFWSNNKSRMYVLENTGEFVKQNGAEIGDFLTIYEDESKNLYFAMNGNSGKQNEGRENESRERNHYEEAMLDYIPRDEEEASIAMLIGNLNDHYPIPNDLMDLTTDLQHHQATSSSMPPEDHAYVGSSDDQVSFNDFEWW

SEQ ID NO: 82474 - protein, 363 aa, Arabidopsis thaliana
  peptide (1)..(363): Ceres Seq. ID no. 12665903
  misc_feature (1)..(363): Homolog of NCBI NO: 18396728 NR Description: expressed protein; protein id: At1g28300.1
  misc_feature (1)..(363): Homolog of NCBI NO: 15987516 NR Description: LEAFY COTYLEDON 2 [Arabidopsis thaliana]
  misc_feature (1)..(355): Homolog of NCBI NO: 25518439 NR Description: hypothetical protein F3H9.5 - Arabidopsis >gi|9795607|gb|AAF98425.1|AC021044_4 Hypothetical protein
  misc_feature (163)..(316): Homolog of NCBI NO: 3582520 NR Description: FUSCA3 [Arabidopsis thaliana]
  misc_feature (163)..(316): Homolog of NCBI NO: 18405094 NR Description: transcriptional regulator (FUSCA3); protein id:
  misc_feature (115)..(289): Homolog of NCBI NO: 33309513 NR Description: viviparous protein; abscissic acid insensitive
  misc_feature (163)..(277): Homolog of NCBI NO: 3582518 NR Description: FUSCA3 [Arabidopsis thaliana]
  misc_feature (101)..(346): Homolog of NCBI NO: 10764150 NR Description: transcription factor viviparous 1 [Picea abies]
  misc_feature (101)..(265): Homolog of NCBI NO: 11932104 NR Description: VP1/ABI3-like protein [Chamaecyparis nootkatensis]
  misc_feature (163)..(316): Homolog of NCBI NO: 9279669 NR Description: FUSCA3 [Arabidopsis thaliana]
MDNFLPFPSSNANSVQELSMDPNNNRSHFTTVPTYDHHQAQPHHFLPPFSYPVEQMAAVMNPQPVYLSECYPQIPVTQTGSEFGSLVGNPCLWQERGGFLDPRMTKMARINRKNAMMRSRNNSSPNSSPSELVDSKRQLMMLNLKNNVQISDKKDSYQQSTFDNKKLRVLCEKELKNSDVGSLGRIVLPKRDAEANLPKLSDKEGIVVQMRDVFSMQSWSFKYKFWSNNKSRMYVLENTGEFVKQNGAEIGDFLTIYEDESKNLYFAMNGNSGKQNEGRENESRERNHYEEAMLDYIPRDEEEASIAMLIGNLNDHYPIPNDLMDLTTDLQHHQATSSSMPPEDHAYVGSSDDQVSFNDFEWW

SEQ ID NO: 82475 - protein, 344 aa, Arabidopsis thaliana
  peptide (1)..(344): Ceres Seq. ID no. 12665904
  misc_feature (1)..(344): Homolog of NCBI NO: 18396728 NR Description: expressed protein; protein id: At1g28300.1
  misc_feature (1)..(344): Homolog of NCBI NO: 15987516 NR Description: LEAFY COTYLEDON 2 [Arabidopsis thaliana]
  misc_feature (1)..(336): Homolog of NCBI NO: 25518439 NR Description: hypothetical protein F3H9.5 - Arabidopsis >gi|9795607|gb|AAF98425.1|AC021044_4 Hypothetical protein
  misc_feature (144)..(297): Homolog of NCBI NO: 3582520 NR Description: FUSCA3 [Arabidopsis thaliana]
  misc_feature (144)..(297): Homolog of NCBI NO: 18405094 NR Description: transcriptional regulator (FUSCA3); protein id:
  misc_feature (96)..(270): Homolog of NCBI NO: 33309513 NR Description: viviparous protein; abscissic acid insensitive
  misc_feature (144)..(258): Homolog of NCBI NO: 3582518 NR Description: FUSCA3 [Arabidopsis thaliana]
  misc_feature (82)..(327): Homolog of NCBI NO: 10764150 NR Description: transcription factor viviparous 1 [Picea abies]
  misc_feature (82)..(246): Homolog of NCBI NO: 11932104 NR Description: VP1/ABI3-like protein [Chamaecyparis nootkatensis]
  misc_feature (144)..(297): Homolog of NCBI NO: 9279669 NR Description: FUSCA3 [Arabidopsis thaliana]
MDPNNNRSHFTTVPTYDHHQAQPHHFLPPFSYPVEQMAAVMNPQPVYLSECYPQIPVTQTGSEFGSLVGNPCLWQERGGFLDPRMTKMARINRKNAMMRSRNNSSPNSSPSELVDSKRQLMMLNLKNNVQISDKKDSYQQSTFDNKKLRVLCEKELKNSDVGSLGRIVLPKRDAEANLPKLSDKEGIVVQMRDVFSMQSWSFKYKFWSNNKSRMYVLENTGEFVKQNGAEIGDFLTIYEDESKNLYFAMNGNSGKQNEGRENESRERNHYEEAMLDYIPRDEEEASIAMLIGNLNDHYPIPNDLMDLTTDLQHHQATSSSMPPEDHAYVGSSDDQVSFNDFEWW

SEQ ID NO: 82476 - DNA, 1621 bp, Arabidopsis thaliana
  misc_feature (1)..(1621): Ceres Seq. ID no. 12665920
  misc_feature: MA Experiment ID: 20000171 Result: Down-regulated in Transcription
  misc_feature: MA Experiment 20000171 PARAMETER Experiment Name: At_42deg_Heat_P Parameter: Age (day) Value: 14
  misc_feature: MA Experiment 20000171 PARAMETER Experiment Name: At_42deg_Heat_P Parameter: Organism Value: A. thaliana
  misc_feature: MA Experiment 20000171 PARAMETER Experiment Name: At_42deg_Heat_P Parameter: Plant Line Value: WS
  misc_feature: MA Experiment 20000171 PARAMETER Experiment Name: At_42deg_Heat_P Parameter: Temperature (deg C) Value: 42 vs. 22
  misc_feature: MA Experiment 20000171 PARAMETER Experiment Name: At_42deg_Heat_P Parameter: Timepoint (hr) Value: 1
  misc_feature: MA Experiment 20000171 PARAMETER Experiment Name: At_42deg_Heat_P Parameter: Tissue Value: Aerial
  misc_feature: MA Experiment ID: 20000173 Result: Down-regulated in Transcription
  misc_feature: MA Experiment 20000173 PARAMETER Experiment Name: At_42deg_Heat_P Parameter: Age (day) Value: 14
  misc_feature: MA Experiment 20000173 PARAMETER Experiment Name: At_42deg_Heat_P Parameter: Organism Value: A. thaliana
  misc_feature: MA Experiment 20000173 PARAMETER Experiment Name: At_42deg_Heat_P Parameter: Plant Line Value: WS
  misc_feature: MA Experiment 20000173 PARAMETER Experiment Name: At_42deg_Heat_P Parameter: Temperature (deg C) Value: 42 vs. 22
  misc_feature: MA Experiment 20000173 PARAMETER Experiment Name: At_42deg_Heat_P Parameter: Timepoint (hr) Value: 6
  misc_feature: MA Experiment 20000173 PARAMETER Experiment Name: At_42deg_Heat_P Parameter: Tissue Value: Aerial
  misc_feature: MA Experiment ID: 20000180 Result: Up-regulated in Transcription
  misc_feature: MA Experiment 20000180 PARAMETER Experiment Name: At_Germinating_Seeds_P Parameter: Age (hr) Value: 24 vs. 0
  misc_feature: MA Experiment 20000180 PARAMETER Experiment Name: At_Germinating_Seeds_P Parameter: Tissue Value: Germinating Seeds
  misc_feature: MA Experiment ID: 20000234 Result: Down-regulated in Transcription
  misc_feature: MA Experiment 20000234 PARAMETER Experiment Name: At_Siliques_P Parameter: Age (day) Value: 21
  misc_feature: MA Experiment 20000234 PARAMETER Experiment Name: At_Siliques_P Parameter: Organism Value: A. thaliana
  misc_feature: MA Experiment 20000234 PARAMETER Experiment Name: At_Siliques_P Parameter: Plant Line Value: WS
  misc_feature: MA Experiment 20000234 PARAMETER Experiment Name: At_Siliques_P Parameter: Tissue Value: Less Than 5mm Siliques vs. Whole Plant
  misc_feature: MA Experiment ID: 20000264 Result: Down-regulated in Transcription
  misc_feature: MA Experiment 20000264 PARAMETER Experiment Name: At_Open_Flower_P Parameter: Age (day) Value: 21
  misc_feature: MA Experiment 20000264 PARAMETER Experiment Name: At_Open_Flower_P Parameter: Plant Line Value: WS
  misc_feature: MA Experiment 20000264 PARAMETER Experiment Name: At_Open_Flower_P Parameter: Tissue Value: Open Flower vs. Whole Plant
  misc_feature: MA Experiment ID: 20000265 Result: Down-regulated in Transcription
  misc_feature: MA Experiment 20000265 PARAMETER Experiment Name: At_Open_Flower_P Parameter: Age (day) Value: 21
  misc_feature: MA Experiment 20000265 PARAMETER Experiment Name: At_Open_Flower_P Parameter: Plant Line Value: WS
  misc_feature: MA Experiment 20000265 PARAMETER Experiment Name: At_Open_Flower_P Parameter: Tissue Value: Closed Flower vs. Whole Plant
  misc_feature: MA Experiment ID: 20000286 Result: Down-regulated in Transcription
  misc_feature: MA Experiment 20000286 PARAMETER Experiment Name: At_Open_Flower_P Parameter: Age (day) Value: 21
  misc_feature: MA Experiment 20000286 PARAMETER Experiment Name: At_Open_Flower_P Parameter: Plant Line Value: WS
  misc_feature: MA Experiment 20000286 PARAMETER Experiment Name: At_Open_Flower_P Parameter: Tissue Value: Half Open vs. Whole Plant
  misc_feature: MA Experiment ID: 20000438 Result: Down-regulated in Transcription
  misc_feature: MA Experiment 20000438 PARAMETER Experiment Name: At_Shoots__P Parameter: Age (day) Value: 14
  misc_feature: MA Experiment 20000438 PARAMETER Experiment Name: At_Shoots__P Parameter: Tissue Value: Shoots vs. Whole Plant
  misc_feature: MA Experiment ID: 20000495 Result: Up-regulated in Transcription
  misc_feature: MA Experiment 20000495 PARAMETER Experiment Name: At_Guard_Cells_P Parameter: Harvest Date Value: 8/2/2002
  misc_feature: MA Experiment 20000495 PARAMETER Experiment Name: At_Guard_Cells_P Parameter: Organism Value: A. thaliana
  misc_feature: MA Experiment 20000495 PARAMETER Experiment Name: At_Guard_Cells_P Parameter: Tissue Value: Guard Cells vs. Leaves
  misc_feature: MA Experiment ID: 20000794 Result: Down-regulated in Transcription
  misc_feature: MA Experiment 20000794 PARAMETER Experiment Name: At_Petals_P Parameter: Age (day) Value: 23-25 days
  misc_feature: MA Experiment 20000794 PARAMETER Experiment Name: At_Petals_P Parameter: Plant Line Value: WS
  misc_feature: MA Experiment 20000794 PARAMETER Experiment Name: At_Petals_P Parameter: Tissue Value: Petals vs. Whole plant
  misc_feature: MA Experiment ID: 20001556 Result: Down-regulated in Transcription
  misc_feature: MA Experiment 20001556 PARAMETER Experiment Name: At_Drought_Soil_Dry_P Parameter: Age (day) Value: 26
  misc_feature: MA Experiment 20001556 PARAMETER Experiment Name: At_Drought_Soil_Dry_P Parameter: Organism Value: A. thaliana
  misc_feature: MA Experiment 20001556 PARAMETER Experiment Name: At_Drought_Soil_Dry_P Parameter: Plant Line Value: WS
  misc_feature: MA Experiment 20001556 PARAMETER Experiment Name: At_Drought_Soil_Dry_P Parameter: Post Timepoint (hr) Value: None
  misc_feature: MA Experiment 20001556 PARAMETER Experiment Name: At_Drought_Soil_Dry_P Parameter: Post-Treatment Value: None
  misc_feature: MA Experiment 20001556 PARAMETER Experiment Name: At_Drought_Soil_Dry_P Parameter: Timepoint (day) Value: 12
  misc_feature: MA Experiment 20001556 PARAMETER Experiment Name: At_Drought_Soil_Dry_P Parameter: Treatment Value: Drought vs. No Drought
  misc_feature: MA Experiment ID: 20001911 Result: Down-regulated in Transcription
  misc_feature: MA Experiment 20001911 PARAMETER Experiment Name: At_Drought_Reproduction_P Parameter: Age (day) Value: 40
  misc_feature: MA Experiment 20001911 PARAMETER Experiment Name: At_Drought_Reproduction_P Parameter: Organism Value: A. thaliana
  misc_feature: MA Experiment 20001911 PARAMETER Experiment Name: At_Drought_Reproduction_P Parameter: Plant Line Value: WS
  misc_feature: MA Experiment 20001911 PARAMETER Experiment Name: At_Drought_Reproduction_P Parameter: Timepoint (day) Value: 10
  misc_feature: MA Experiment 20001911 PARAMETER Experiment Name: At_Drought_Reproduction_P Parameter: Tissue Value: Flowers
  misc_feature: MA Experiment 20001911 PARAMETER Experiment Name: At_Drought_Reproduction_P Parameter: Treatment Value: Drought vs. No Drought
tctctctctctaaatctctcccatgggttatctctcttgcaacggcgaatccgccgtcgcaatctgcgatacttataactggaatcctcgtcgacgatctaaagtaccggagaaacgtcatcctcctaagcttcgggttttcaactacgacgaactcgccgtcgctactaacggcttctccgccaataacttcctcggaaaaggaagtcacggcagagtttacaaagcagttctcgacgacggaaagcttctcgccgccgtcaagagaacaacaatcaccactaccgttggtaataacaataacaacgtgagtcaggtagacaatgagatcgagattctttcacgggttcgtcaccgttggatggtcaacttaatcggttactgcgttgaccaccggaggaaaacaaagctgttagtcgtcgagtacatgcctaacggtacgcttcacgatcagttacattctcgtagttcgttagattcacggttaagtagttggaatcggagaattaaacacgcgcttcagatcgcgattgctgtccacgctcttcacaccgcagagactcaagtgatccaccgtgacattaaatcgtgtaacgttttaatagacggtgacggtaacgctaggttagctgatttcggattagcattgatcggaaacgttgacgatgagcgtttgaaatatactccgccggcgggtacgttgggatatttagatccgtcgtacttagcaccggcggacttgacggctaagagcgatgttttcagctttgggatattgttgttggagattattagtggtagagaagccattgatttgaattatagtccgtcgtgtatcgttgattgggcggtgccgcttatcaaacgcggcgattacgacgcgatttgtgatttgaagattaagaaccgtccttattacgccgtgattcggaagttggccgttatggcggctaggtgtgttagatcgacggcgaagaaacgtccagatatgttagaggttgttgagtgtttgaaaacggtgaggcagttatctccggcgtggaataaactgcggcggaggagtgaagagagatcggaaaatgttttggcggttgaggaagagaaggaagagattcatgtgaggattgtgagaggaggaagcaggaagaatcggaaggtatcgaacgtgacgacgagtgtggatgatgtttacgagagattagttccggaggaaacgctgccgtttcgtcgtcggaattttgtgctgagatcgagatcagtaggagcgaaagttggaccggatccatacgacgggtttggtgatgagacggtggttacaatgagattacttattgagaaagaaagaccggtgacgacggcagcgatgaggctgagtaagtcgaggtcggtggggattgtacgtagtcataaaacggcgtcgcggaagagatactgacatgttaactaaaagtcagcattttgacaggctatttgtttgaccgttgcctgttttgttttccacttttttctttctatttttgtttttttctgtctcatgtgtttgtctttttttattgagttgatattttggtttttgttttgttttggttgttgtattgaataaaattttgtgtttgctacg

SEQ ID NO: 82477 - protein, 470 aa, Arabidopsis thaliana
  peptide (1)..(470): Ceres Seq. ID no. 12665921
  misc_feature (1)..(470): Homolog of NCBI NO: 15218652 NR Description: wall-associated kinase 1, putative; protein id: supported by cDNA: gi_19715602 [Arabidopsis thaliana] F3M18.17 [Arabidopsis thaliana] >gi|19715603|gb|AAL91624.1|
  misc_feature (1)..(343): Homolog of NCBI NO: 15231097 NR Description: putative serine/threonine protein kinase; protein At3g51990.1, supported by cDNA: gi_16648894, supported by cDNA: [Arabidopsis thaliana] >gi|11259790|pir||T49078 probable
  misc_feature (21)..(336): Homolog of NCBI NO: 15231681 NR Description: putative protein; protein id: At3g59420.1, by cDNA: gi_20302589 [Arabidopsis thaliana]
  misc_feature (3)..(331): Homolog of NCBI NO: 3913366 NR Description: Putative receptor protein kinase CRINKLY4
  misc_feature (3)..(331): Homolog of NCBI NO: 15721862 NR Description: CR4 [Oryza sativa]
  misc_feature (37)..(348): Homolog of NCBI NO: 34903132 NR Description: unnamed protein product [Oryza sativa (japonica group)] >gi|6630693|dbj|BAA88539.1| unnamed protein product
  misc_feature (37)..(346): Homolog of NCBI NO: 15237244 NR Description: serine/threonine protein kinase-like protein; id: At5g23170.1 [Arabidopsis thaliana]
  misc_feature (40)..(331): Homolog of NCBI NO: 13447449 NR Description: receptor protein kinase PERK1 [Brassica napus]
  misc_feature (40)..(331): Homolog of NCBI NO: 13877617 NR Description: protein kinase-like protein [Arabidopsis thaliana]
  misc_feature (40)..(331): Homolog of NCBI NO: 15230130 NR Description: protein kinase, putative; protein id: supported by cDNA: 17909., supported by cDNA: gi_13877616,
MGYLSCNGESAVAICDTYNWNPRRRSKVPEKRHPPKLRVFNYDELAVATNGFSANNFLGKGSHGRVYKAVLDDGKLLAAVKRTTITTTVGNNNNNVSQVDNEIEILSRVRHRWMVNLIGYCVDHRRKTKLLVVEYMPNGTLHDQLHSRSSLDSRLSSWNRRIKHALQIAIAVHALHTAETQVIHRDIKSCNVLIDGDGNARLADFGLALIGNVDDERLKYTPPAGTLGYLDPSYLAPADLTAKSDVFSFGILLLEIISGREAIDLNYSPSCIVDWAVPLIKRGDYDAICDLKIKNRPYYAVIRKLAVMAARCVRSTAKKRPDMLEVVECLKTVRQLSPAWNKLRRRSEERSENVLAVEEEKEEIHVRIVRGGSRKNRKVSNVTTSVDDVYERLVPEETLPFRRRNFVLRSRSVGAKVGPDPYDGFGDETVVTMRLLIEKERPVTTAAMRLSKSRSVGIVRSHKTASRKRY

SEQ ID NO: 82478 - protein, 357 aa, Arabidopsis thaliana
  peptide (1)..(357): Ceres Seq. ID no. 12665922
  misc_feature (1)..(357): Homolog of NCBI NO: 15218652 NR Description: wall-associated kinase 1, putative; protein id: supported by cDNA: gi_19715602 [Arabidopsis thaliana] F3M18.17 [Arabidopsis thaliana] >gi|19715603|gb|AAL91624.1|
  misc_feature (1)..(230): Homolog of NCBI NO: 15231097 NR Description: putative serine/threonine protein kinase; protein At3g51990.1, supported by cDNA: gi_16648894, supported by cDNA: [Arabidopsis thaliana] >gi|11259790|pir||T49078 probable
  misc_feature (1)..(223): Homolog of NCBI NO: 15231681 NR Description: putative protein; protein id: At3g59420.1, by cDNA: gi_20302589 [Arabidopsis thaliana]
  misc_feature (1)..(218): Homolog of NCBI NO: 3913366 NR Description: Putative receptor protein kinase CRINKLY4
  misc_feature (1)..(218): Homolog of NCBI NO: 15721862 NR Description: CR4 [Oryza sativa]
  misc_feature (1)..(235): Homolog of NCBI NO: 34903132 NR Description: unnamed protein product [Oryza sativa (japonica group)] >gi|6630693|dbj|BAA88539.1| unnamed protein product
  misc_feature (1)..(233): Homolog of NCBI NO: 15237244 NR Description: serine/threonine protein kinase-like protein; id: At5g23170.1 [Arabidopsis thaliana]
  misc_feature (1)..(218): Homolog of NCBI NO: 13447449 NR Description: receptor protein kinase PERK1 [Brassica napus]
  misc_feature (1)..(218): Homolog of NCBI NO: 13877617 NR Description: protein kinase-like protein [Arabidopsis thaliana]
  misc_feature (1)..(218): Homolog of NCBI NO: 15230130 NR Description: protein kinase, putative; protein id: supported by cDNA: 17909., supported by cDNA: gi_13877616,
MVNLIGYCVDHRRKTKLLVVEYMPNGTLHDQLHSRSSLDSRLSSWNRRIKHALQIAIAVHALHTAETQVIHRDIKSCNVLIDGDGNARLADFGLALIGNVDDERLKYTPPAGTLGYLDPSYLAPADLTAKSDVFSFGILLLEIISGREAIDLNYSPSCIVDWAVPLIKRGDYDAICDLKIKNRPYYAVIRKLAVMAARCVRSTAKKRPDMLEVVECLKTVRQLSPAWNKLRRRSEERSENVLAVEEEKEEIHVRIVRGGSRKNRKVSNVTTSVDDVYERLVPEETLPFRRRNFVLRSRSVGAKVGPDPYDGFGDETVVTMRLLIEKERPVTTAAMRLSKSRSVGIVRSHKTASRKRY

SEQ ID NO: 82479 - protein, 335 aa, Arabidopsis thaliana
  peptide (1)..(335): Ceres Seq. ID no. 12665923
  misc_feature (1)..(335): Homolog of NCBI NO: 15218652 NR Description: wall-associated kinase 1, putative; protein id: supported by cDNA: gi_19715602 [Arabidopsis thaliana] F3M18.17 [Arabidopsis thaliana] >gi|19715603|gb|AAL91624.1|
  misc_feature (1)..(208): Homolog of NCBI NO: 15231097 NR Description: putative serine/threonine protein kinase; protein At3g51990.1, supported by cDNA: gi_16648894, supported by cDNA: [Arabidopsis thaliana] >gi|11259790|pir||T49078 probable
  misc_feature (1)..(201): Homolog of NCBI NO: 15231681 NR Description: putative protein; protein id: At3g59420.1, by cDNA: gi_20302589 [Arabidopsis thaliana]
  misc_feature (1)..(196): Homolog of NCBI NO: 3913366 NR Description: Putative receptor protein kinase CRINKLY4
  misc_feature (1)..(196): Homolog of NCBI NO: 15721862 NR Description: CR4 [Oryza sativa]
  misc_feature (1)..(213): Homolog of NCBI NO: 34903132 NR Description: unnamed protein product [Oryza sativa (japonica group)] >gi|6630693|dbj|BAA88539.1| unnamed protein product
  misc_feature (1)..(211): Homolog of NCBI NO: 15237244 NR Description: serine/threonine protein kinase-like protein; id: At5g23170.1 [Arabidopsis thaliana]
  misc_feature (1)..(196): Homolog of NCBI NO: 13447449 NR Description: receptor protein kinase PERK1 [Brassica napus]
  misc_feature (1)..(196): Homolog of NCBI NO: 13877617 NR Description: protein kinase-like protein [Arabidopsis thaliana]
  misc_feature (1)..(196): Homolog of NCBI NO: 15230130 NR Description: protein kinase, putative; protein id: supported by cDNA: 17909., supported by cDNA: gi_13877616,
MPNGTLHDQLHSRSSLDSRLSSWNRRIKHALQIAIAVHALHTAETQVIHRDIKSCNVLIDGDGNARLADFGLALIGNVDDERLKYTPPAGTLGYLDPSYLAPADLTAKSDVFSFGILLLEIISGREAIDLNYSPSCIVDWAVPLIKRGDYDAICDLKIKNRPYYAVIRKLAVMAARCVRSTAKKRPDMLEVVECLKTVRQLSPAWNKLRRRSEERSENVLAVEEEKEEIHVRIVRGGSRKNRKVSNVTTSVDDVYERLVPEETLPFRRRNFVLRSRSVGAKVGPDPYDGFGDETVVTMRLLIEKERPVTTAAMRLSKSRSVGIVRSHKTASRKRY

SEQ ID NO: 82480 - DNA, 657 bp, Arabidopsis thaliana
  misc_feature (1)..(657): Ceres Seq. ID no. 12665941
  misc_feature: MA Experiment ID: 20000440 Result: Up-regulated in Transcription
  misc_feature: MA Experiment 20000440 PARAMETER Experiment Name: At_Closed-Flower__Sub_P Parameter: Tissue Value: Closed Flower vs. Whole Plant
atgggagcatatagagcagaagacgattatgattacctcttcaaggtggtcttaaccggagattccggcgtcgggaaatctaatttgttatctcgtttcaccagaaatgatttcagccacgactcacgtgcaaccatcggtgtcgaattcgccacacgaagcatccaatgcgatgataagatcgtcaaggctcaaatatgggataccgccggccaagaaaggtaccgagccatcacgagcgcttattaccgaggagctgttggtgcattgcttgtttatgacgtgacgcgccacgtgacattcgagaatgttgagagatggctaaaggagcttagggaccacacggacgcaaacattgtgatcatgctcgttggcaacaaagctgatcttcgtcaccttcgagccatctcaaccgaagaagctaaagcttttgcagagagggagaatacctttttcatggagacttctgcacttgaagctgtgaatgttgataatgctttcactgaagttctcactcagatttacagagttgttagcaagaaggctcttgaagctggagatgatccaaccactgctttgcctaaaggacagatgattaatgttggaggccgagatgatatctcagccgttaaaaaacctggttgctgctctgcatag

SEQ ID NO: 82481 - protein, 218 aa, Arabidopsis thaliana
  peptide (1)..(218): Ceres Seq. ID no. 12665942
  misc_feature (15)..(176): Pfam Name: Ras family Pfam Description: Ras family
  misc_feature (1)..(218): Homolog of NCBI NO: 15218719 NR Description: GTP-binding protein, putative; protein id: [Arabidopsis thaliana] >gi|6560749|gb|AAF16749.1|AC010155_2
  misc_feature (1)..(218): Homolog of NCBI NO: 10764861 NR Description: F1K23.21 [Arabidopsis thaliana]
  misc_feature (1)..(217): Homolog of NCBI NO: 15226182 NR Description: GTP-binding protein, putative; protein id:
  misc_feature (1)..(218): Homolog of NCBI NO: 7438432 NR Description: GTP-binding protein - garden pea
  misc_feature (1)..(217): Homolog of NCBI NO: 15239462 NR Description: GTP-binding protein, putative; protein id:
  misc_feature (1)..(218): Homolog of NCBI NO: 15232477 NR Description: Ras family GTP-binding protein, putative; protein
  misc_feature (2)..(218): Homolog of NCBI NO: 3024504 NR Description: RAS-RELATED PROTEIN RAB11B
  misc_feature (1)..(218): Homolog of NCBI NO: 1370156 NR Description: RAB11H [Lotus japonicus]
  misc_feature (11)..(218): Homolog of NCBI NO: 7438389 NR Description: GTP-binding protein, ras-like (clone vfa-ypt3a) - bean (fragment) >gi|452357|emb|CAA82708.1| guanine nucleotide
  misc_feature (1)..(217): Homolog of NCBI NO: 15233873 NR Description: membrane-bound small GTP-binding - like protein;
MGAYRAEDDYDYLFKVVLTGDSGVGKSNLLSRFTRNDFSHDSRATIGVEFATRSIQCDDKIVKAQIWDTAGQERYRAITSAYYRGAVGALLVYDVTRHVTFENVERWLKELRDHTDANIVIMLVGNKADLRHLRAISTEEAKAFAERENTFFMETSALEAVNVDNAFTEVLTQIYRVVSKKALEAGDDPTTALPKGQMINVGGRDDISAVKKPGCCSA

SEQ ID NO: 82482 - DNA, 1451 bp, Arabidopsis thaliana
  misc_feature (1)..(1451): Ceres Seq. ID no. 12665943
  misc_feature: MA Experiment ID: 20000173 Result: Down-regulated in Transcription
  misc_feature: MA Experiment 20000173 PARAMETER Experiment Name: At_42deg_Heat_P Parameter: Age (day) Value: 14
  misc_feature: MA Experiment 20000173 PARAMETER Experiment Name: At_42deg_Heat_P Parameter: Organism Value: A. thaliana
  misc_feature: MA Experiment 20000173 PARAMETER Experiment Name: At_42deg_Heat_P Parameter: Plant Line Value: WS
  misc_feature: MA Experiment 20000173 PARAMETER Experiment Name: At_42deg_Heat_P Parameter: Temperature (deg C) Value: 42 vs. 22
  misc_feature: MA Experiment 20000173 PARAMETER Experiment Name: At_42deg_Heat_P Parameter: Timepoint (hr) Value: 6
  misc_feature: MA Experiment 20000173 PARAMETER Experiment Name: At_42deg_Heat_P Parameter: Tissue Value: Aerial
  misc_feature: MA Experiment ID: 20000179 Result: Up-regulated in Transcription
  misc_feature: MA Experiment 20000179 PARAMETER Experiment Name: At_Germinating_Seeds_P Parameter: Age (hr) Value: 6 vs. 0
  misc_feature: MA Experiment 20000179 PARAMETER Experiment Name: At_Germinating_Seeds_P Parameter: Tissue Value: Germinating Seeds
  misc_feature: MA Experiment ID: 20000180 Result: Up-regulated in Transcription
  misc_feature: MA Experiment 20000180 PARAMETER Experiment Name: At_Germinating_Seeds_P Parameter: Age (hr) Value: 24 vs. 0
  misc_feature: MA Experiment 20000180 PARAMETER Experiment Name: At_Germinating_Seeds_P Parameter: Tissue Value: Germinating Seeds
  misc_feature: MA Experiment ID: 20000265 Result: Down-regulated in Transcription
  misc_feature: MA Experiment 20000265 PARAMETER Experiment Name: At_Open_Flower_P Parameter: Age (day) Value: 21
  misc_feature: MA Experiment 20000265 PARAMETER Experiment Name: At_Open_Flower_P Parameter: Plant Line Value: WS
  misc_feature: MA Experiment 20000265 PARAMETER Experiment Name: At_Open_Flower_P Parameter: Tissue Value: Closed Flower vs. Whole Plant
agctctctggcaatggcgtatcccggttcgcctatcttgatgaagctcctcgtcttcatctttttatcaacttttgtagtcactaacgtgagctcggaaactaagtgccgggagttcaaatcgatcatcagtttcggagattccattgccgacactggaaacttgcttggcctctcagatcctaaagatcttcctcacatggcgtttccaccgtatggagagaacttcttccaccacccaactggtcgtttctccaacggccgcctcatcattgatttcatcgctgaattcttgggtttaccgcttgtgcctccattctatggatctcataatgcaaactttgaaaagggagttaatttcgcggtagggggagcaaccgctttggaacgttcctttcttgaagacagaggaattcattttccttacactaatgtgagtttaggcgttcagcttaatagcttcaaggagagtttacctagcatatgtggctctccttcagactgtagagatatgatagaaaatgctttgattctcatgggggaaattggagggaatgactataactacgcgttcttcgtggacaaaggcattgaagagatcaaggagctgatgcccctggtgatcactactatttcttctgcaatcacggagttgatcggtatggggggaagaacatttttggtgcccggagagttcccagtcggatgctcagtattgtatttgacatcacatcaaacatcaaacatggaagaatacgatcctttaacaggatgtttgaaatggctgaacaagtttggtgaaaaccatggtgagcagcttagagcagaactcaacagactccagaagttgtaccctcatgttaacatcatatacgctgactactacaacgcgctgtttcacctttatcaagaaccagccaaattcggattcatgaacagacctttgtccgcttgttgcggcgcaggaggaccgtacaactataccgtaggtaggaaatgtgggactgatatagttgaaagttgtgatgatccttcaaagtatgtggcttgggacggtgttcatatgactgaggctgcgtacagattgatggctgagggtatactaaatggaccgtatgcgattcctccttttgattggtcttgccgtagctctggagttaagaacagtgggtcatctgacacatagaattctttgatgagaaactgatacaagttggtcaaaaaattgagaaaaggatactgataaaaacatgtatgttccttagtattgtcttggatcatgttcatgtattgtatcatgttgttatgtgaaataatttaaaagggtatcatgttcatgtatactccactccatatagagagtaagtaaccggcaacggcattgaaaacttggagataaattggaatatttgttgattcaatttggaaaatggcaaaaacaaattatttagc

SEQ ID NO: 82483 - protein, 394 aa, Arabidopsis thaliana
  peptide (1)..(394): Ceres Seq. ID no. 12665944
  misc_feature (42)..(367): Pfam Name: GDSL-like Lipase/Acylhydrolase Pfam Description: GDSL-like Lipase/Acylhydrolase
  misc_feature (5)..(394): Homolog of NCBI NO: 15218725 NR Description: lipase, putative; protein id: At1g28580.1, by cDNA: gi_13605564, supported by cDNA: gi_15027914, supported cDNA: gi_18491140, supported by cDNA: gi_19310790 [Arabidopsis
  misc_feature (12)..(394): Homolog of NCBI NO: 15218723 NR Description: lipase, putative; protein id: At1g28570.1 thaliana] >gi|10764860|gb|AAG22837.1|AC007508_14 F1K23.19
  misc_feature (14)..(394): Homolog of NCBI NO: 10764858 NR Description: F1K23.17 [Arabidopsis thaliana]
  misc_feature (14)..(394): Homolog of NCBI NO: 15218728 NR Description: lipase, putative; protein id: At1g28590.1
  misc_feature (16)..(394): Homolog of NCBI NO: 15225872 NR Description: putative lipase; protein id: At2g27360.1
  misc_feature (13)..(387): Homolog of NCBI NO: 21593234 NR Description: lipase, putative [Arabidopsis thaliana]
  misc_feature (5)..(387): Homolog of NCBI NO: 12597843 NR Description: lipase, putative [Arabidopsis thaliana]
  misc_feature (13)..(387): Homolog of NCBI NO: 10764858 NR Description: F1K23.17 [Arabidopsis thaliana]
  misc_feature (13)..(387): Homolog of NCBI NO: 15218731 NR Description: lipase, putative; protein id: At1g28600.1, by cDNA: 37307., supported by cDNA: gi_14326569 [Arabidopsis >gi|14326570|gb|AAK60329.1|AF385739_1 At1g28600/F1K23_6
  misc_feature (17)..(394): Homolog of NCBI NO: 25336243 NR Description: pnrotein F1K23.16 [imported] - Arabidopsis >gi|10764857|gb|AAG22835.1|AC007508_11 F1K23.16 [Arabidopsis
SSLAMAYPGSPILMKLLVFIFLSTFVVTNVSSETKCREFKSIISFGDSIADTGNLLGLSDPKDLPHMAFPPYGENFFHHPTGRFSNGRLIIDFIAEFLGLPLVPPFYGSHNANFEKGVNFAVGGATALERSFLEDRGIHFPYTNVSLGVQLNSFKESLPSICGSPSDCRDMIENALILMGEIGGNDYNYAFFVDKGIEEIKELMPLVITTISSAITELIGMGGRTFLVPGEFPVGCSVLYLTSHQTSNMEEYDPLTGCLKWLNKFGENHGEQLRAELNRLQKLYPHVNIIYADYYNALFHLYQEPAKFGFMNRPLSACCGAGGPYNYTVGRKCGTDIVESCDDPSKYVAWDGVHMTEAAYRLMAEGILNGPYAIPPFDWSCRSSGVKNSGSSDT

SEQ ID NO: 82484 - protein, 390 aa, Arabidopsis thaliana
  peptide (1)..(390): Ceres Seq. ID no. 12665945
  misc_feature (38)..(363): Pfam Name: GDSL-like Lipase/Acylhydrolase Pfam Description: GDSL-like Lipase/Acylhydrolase
  misc_feature (1)..(390): Homolog of NCBI NO: 15218725 NR Description: lipase, putative; protein id: At1g28580.1, by cDNA: gi_13605564, supported by cDNA: gi_15027914, supported cDNA: gi_18491140, supported by cDNA: gi_19310790 [Arabidopsis
  misc_feature (8)..(390): Homolog of NCBI NO: 15218723 NR Description: lipase, putative; protein id: At1g28570.1 thaliana] >gi|10764860|gb|AAG22837.1|AC007508_14 F1K23.19
  misc_feature (10)..(390): Homolog of NCBI NO: 10764858 NR Description: F1K23.17 [Arabidopsis thaliana]
  misc_feature (10)..(390): Homolog of NCBI NO: 15218728 NR Description: lipase, putative; protein id: At1g28590.1
  misc_feature (12)..(390): Homolog of NCBI NO: 15225872 NR Description: putative lipase; protein id: At2g27360.1
  misc_feature (9)..(383): Homolog of NCBI NO: 21593234 NR Description: lipase, putative [Arabidopsis thaliana]
  misc_feature (1)..(383): Homolog of NCBI NO: 12597843 NR Description: lipase, putative [Arabidopsis thaliana]
  misc_feature (9)..(383): Homolog of NCBI NO: 10764858 NR Description: F1K23.17 [Arabidopsis thaliana]
  misc_feature (9)..(383): Homolog of NCBI NO: 15218731 NR Description: lipase, putative; protein id: At1g28600.1, by cDNA: 37307., supported by cDNA: gi_14326569 [Arabidopsis >gi|14326570|gb|AAK60329.1|AF385739_1 At1g28600/F1K23_6
  misc_feature (13)..(390): Homolog of NCBI NO: 25336243 NR Description: pnrotein F1K23.16 [imported] - Arabidopsis >gi|10764857|gb|AAG22835.1|AC007508_11 F1K23.16 [Arabidopsis
MAYPGSPILMKLLVFIFLSTFVVTNVSSETKCREFKSIISFGDSIADTGNLLGLSDPKDLPHMAFPPYGENFFHHPTGRFSNGRLIIDFIAEFLGLPLVPPFYGSHNANFEKGVNFAVGGATALERSFLEDRGIHFPYTNVSLGVQLNSFKESLPSICGSPSDCRDMIENALILMGEIGGNDYNYAFFVDKGIEEIKELMPLVITTISSAITELIGMGGRTFLVPGEFPVGCSVLYLTSHQTSNMEEYDPLTGCLKWLNKFGENHGEQLRAELNRLQKLYPHVNIIYADYYNALFHLYQEPAKFGFMNRPLSACCGAGGPYNYTVGRKCGTDIVESCDDPSKYVAWDGVHMTEAAYRLMAEGILNGPYAIPPFDWSCRSSGVKNSGSSDT

SEQ ID NO: 82485 - protein, 381 aa, Arabidopsis thaliana
  peptide (1)..(381): Ceres Seq. ID no. 12665946
  misc_feature (29)..(354): Pfam Name: GDSL-like Lipase/Acylhydrolase Pfam Description: GDSL-like Lipase/Acylhydrolase
  misc_feature (1)..(381): Homolog of NCBI NO: 15218725 NR Description: lipase, putative; protein id: At1g28580.1, by cDNA: gi_13605564, supported by cDNA: gi_15027914, supported cDNA: gi_18491140, supported by cDNA: gi_19310790 [Arabidopsis
  misc_feature (1)..(381): Homolog of NCBI NO: 15218723 NR Description: lipase, putative; protein id: At1g28570.1 thaliana] >gi|10764860|gb|AAG22837.1|AC007508_14 F1K23.19
  misc_feature (1)..(381): Homolog of NCBI NO: 10764858 NR Description: F1K23.17 [Arabidopsis thaliana]
  misc_feature (1)..(381): Homolog of NCBI NO: 15218728 NR Description: lipase, putative; protein id: At1g28590.1
  misc_feature (3)..(381): Homolog of NCBI NO: 15225872 NR Description: putative lipase; protein id: At2g27360.1
  misc_feature (1)..(374): Homolog of NCBI NO: 21593234 NR Description: lipase, putative [Arabidopsis thaliana]
  misc_feature (1)..(374): Homolog of NCBI NO: 12597843 NR Description: lipase, putative [Arabidopsis thaliana]
  misc_feature (1)..(374): Homolog of NCBI NO: 10764858 NR Description: F1K23.17 [Arabidopsis thaliana]
  misc_feature (1)..(374): Homolog of NCBI NO: 15218731 NR Description: lipase, putative; protein id: At1g28600.1, by cDNA: 37307., supported by cDNA: gi_14326569 [Arabidopsis >gi|14326570|gb|AAK60329.1|AF385739_1 At1g28600/F1K23_6
  misc_feature (4)..(381): Homolog of NCBI NO: 25336243 NR Description: pnrotein F1K23.16 [imported] - Arabidopsis >gi|10764857|gb|AAG22835.1|AC007508_11 F1K23.16 [Arabidopsis
MKLLVFIFLSTFVVTNVSSETKCREFKSIISFGDSIADTGNLLGLSDPKDLPHMAFPPYGENFFHHPTGRFSNGRLIIDFIAEFLGLPLVPPFYGSHNANFEKGVNFAVGGATALERSFLEDRGIHFPYTNVSLGVQLNSFKESLPSICGSPSDCRDMIENALILMGEIGGNDYNYAFFVDKGIEEIKELMPLVITTISSAITELIGMGGRTFLVPGEFPVGCSVLYLTSHQTSNMEEYDPLTGCLKWLNKFGENHGEQLRAELNRLQKLYPHVNIIYADYYNALFHLYQEPAKFGFMNRPLSACCGAGGPYNYTVGRKCGTDIVESCDDPSKYVAWDGVHMTEAAYRLMAEGILNGPYAIPPFDWSCRSSGVKNSGSSDT

SEQ ID NO: 82486 - DNA, 1656 bp, Arabidopsis thaliana
  misc_feature (1)..(1656): Ceres Seq. ID no. 12665951
  misc_feature: MA Experiment ID: 20000306 Result: Up-regulated in Transcription
  misc_feature: MA Experiment 20000306 PARAMETER Experiment Name: At_Germinating_Seeds_Sub_P Parameter: Age (hr) Value: 6 vs. 0
  misc_feature: MA Experiment 20000306 PARAMETER Experiment Name: At_Germinating_Seeds_Sub_P Parameter: Organism Value: A. thaliana
  misc_feature: MA Experiment 20000306 PARAMETER Experiment Name: At_Germinating_Seeds_Sub_P Parameter: Plant Line Value: WS
  misc_feature: MA Experiment 20000306 PARAMETER Experiment Name: At_Germinating_Seeds_Sub_P Parameter: Tissue Value: Germinating Seeds
  misc_feature: MA Experiment ID: 20000307 Result: Up-regulated in Transcription
  misc_feature: MA Experiment 20000307 PARAMETER Experiment Name: At_Germinating_Seeds_Sub_P Parameter: Age (hr) Value: 24 vs. 0
  misc_feature: MA Experiment 20000307 PARAMETER Experiment Name: At_Germinating_Seeds_Sub_P Parameter: Organism Value: A. thaliana
  misc_feature: MA Experiment 20000307 PARAMETER Experiment Name: At_Germinating_Seeds_Sub_P Parameter: Plant Line Value: WS
  misc_feature: MA Experiment 20000307 PARAMETER Experiment Name: At_Germinating_Seeds_Sub_P Parameter: Tissue Value: Germinating Seeds
  misc_feature: MA Experiment ID: 20000327 Result: Down-regulated in Transcription
  misc_feature: MA Experiment 20000327 PARAMETER Experiment Name: At_42deg_Heat_Sub_P Parameter: Age (day) Value: 14
  misc_feature: MA Experiment 20000327 PARAMETER Experiment Name: At_42deg_Heat_Sub_P Parameter: Organism Value: A. thaliana
  misc_feature: MA Experiment 20000327 PARAMETER Experiment Name: At_42deg_Heat_Sub_P Parameter: Plant Line Value: WS
  misc_feature: MA Experiment 20000327 PARAMETER Experiment Name: At_42deg_Heat_Sub_P Parameter: Temperature (deg C) Value: 42 vs. 22
  misc_feature: MA Experiment 20000327 PARAMETER Experiment Name: At_42deg_Heat_Sub_P Parameter: Timepoint (hr) Value: 1
  misc_feature: MA Experiment 20000327 PARAMETER Experiment Name: At_42deg_Heat_Sub_P Parameter: Tissue Value: Aerial
  misc_feature: MA Experiment ID: 20000355 Result: Up-regulated in Transcription
  misc_feature: MA Experiment 20000355 PARAMETER Experiment Name: At_Siliques_Sub_P Parameter: Age (day) Value: 21
  misc_feature: MA Experiment 20000355 PARAMETER Experiment Name: At_Siliques_Sub_P Parameter: Organism Value: A. thaliana
  misc_feature: MA Experiment 20000355 PARAMETER Experiment Name: At_Siliques_Sub_P Parameter: Plant Line Value: WS
  misc_feature: MA Experiment 20000355 PARAMETER Experiment Name: At_Siliques_Sub_P Parameter: Tissue Value: Less Than 5mm Siliques vs. Whole Plant
atggaggtcaaaagcgtgaacaccacggcgatgatacttggtctattttttctaatcagcttcgtcgctgcggaagatccgtataaattcttcgaatggcacgtaacttatggtaacatatctccgctcaaggttgcacaacagggtatattgatcaatgggaagttcccaggaccggacatcgccgctgttaccaatgataatctcatcattaacgtattcaaccatctcgacgaacctttccttatatcatggagcgggattcgaaactggaggaattcataccaggacggagtgtacgggacgacgtgtccaatcccgccggggaaaaactacacctacgctcttcaggttaaagatcagattggaagtttctactacttcccctctctcggctttcacaaagccgccggtggatttggagctattcgtatctccagccgccccagaatccccgttccattcccagcccccgctggtgattacaccgttctcatcggtgactggtacaaaaccaaccataaggacttgagagcacaactcgataatggtggaaagcttccattcccggatggaattctcatcaatgggcgcggtagtggcgccaccctcaacattgaaccaggtaagacttatagactgaggatatcaaatgttggattgcaaaactctctcaacttccgaatccaaaaccacaagatgaagttagttgaggtcgaagggacacacactattcagactccattctcttcgcttgatgttcacgtcggtcaatcttactcggtccttataacagctgaccagcctgcaaaagattattacattgtggtctctagtaggtttacctcgaagatccttattaccgctggtgttcttcattacagtaattctgctggacctgtttctggacctattccagaagcaccaattcagttgcgctggtcttttgaccaagcacgagccatcaagaccaaccttgcagcgagtggacctaggccaaacccacaaggtacataccactatggcaagataaaagtcactcgaacaatcaaacttgctagctctgctggaaatatcaatggcaagcaacgatacgcggtgaatagtgcatcattctacccaacagacacacctttgaaactagcggactacttcaaaattgccggtgtatacaaccctggaagcatacctgatcagcccacacatggagcaatataccctgtcacatctgttatgcaaactgattacaaagcttttgtggagattgttttcgagaattgggaagatattgtccagacctggcacctcgacggttactctttcttcgtggttgggatggaacttgggaagtggagtgctgccagtagaaaagtctacaatctaaacgacgcagtctcacggtgcactgttcaggtgtatccaagatcatggactgccatatacgtatcactggacaatgtaggaatgtggaacctaagatcagagttatgggaaagacaatacctgggacaacagttttacatgcgtgtttacacaccctccacttccctcagagatgagtacttgatcccgaagaacgctcttctctgcggcagggccactggccaccacaccacgacacccggtcctctgagtgaaggaagtgagaggttttga

SEQ ID NO: 82487 - protein, 551 aa, Arabidopsis thaliana
  peptide (1)..(551): Ceres Seq. ID no. 12665952
  misc_feature (1)..(551): Homolog of NCBI NO: 15219118 NR Description: pectinesterase (pectin methylesterase), putative; id: At1g21850.1 [Arabidopsis thaliana] >gi|25285548|pir||H86351
  misc_feature (1)..(537): Homolog of NCBI NO: 15219120 NR Description: pectinesterase (pectin methylesterase), putative; id: At1g21860.1 [Arabidopsis thaliana]
  misc_feature (10)..(538): Homolog of NCBI NO: 15222981 NR Description: pectinesterase (pectin methylesterase), putative; id: At1g76160.1, supported by cDNA: gi_15982770 [Arabidopsis
  misc_feature (10)..(538): Homolog of NCBI NO: 15982771 NR Description: At1g76160/T23E18_10 [Arabidopsis thaliana]
  misc_feature (10)..(538): Homolog of NCBI NO: 22531132 NR Description: pectinesterase, putative [Arabidopsis thaliana]
  misc_feature (15)..(538): Homolog of NCBI NO: 16648889 NR Description: Unknown protein [Arabidopsis thaliana]
  misc_feature (15)..(538): Homolog of NCBI NO: 18400509 NR Description: pectinesterase (pectin methylesterase), putative; id: At1g41830.1, supported by cDNA: gi_16648888 [Arabidopsis
  misc_feature (15)..(538): Homolog of NCBI NO: 25285550 NR Description: probable pectinesterase [imported] - Arabidopsis >gi|9802764|gb|AAF99833.1|AC008046_5 Putative pectinesterase
  misc_feature (18)..(538): Homolog of NCBI NO: 1255951 NR Description: PS60 [Nicotiana tabacum]
  misc_feature (25)..(525): Homolog of NCBI NO: 7432997 NR Description: pollen-specific protein homolog - tomato >gi|1944575|emb|CAB08077.1| pectinesterase [Lycopersicon
MEVKSVNTTAMILGLFFLISFVAAEDPYKFFEWHVTYGNISPLKVAQQGILINGKFPGPDIAAVTNDNLIINVFNHLDEPFLISWSGIRNWRNSYQDGVYGTTCPIPPGKNYTYALQVKDQIGSFYYFPSLGFHKAAGGFGAIRISSRPRIPVPFPAPAGDYTVLIGDWYKTNHKDLRAQLDNGGKLPFPDGILINGRGSGATLNIEPGKTYRLRISNVGLQNSLNFRIQNHKMKLVEVEGTHTIQTPFSSLDVHVGQSYSVLITADQPAKDYYIVVSSRFTSKILITAGVLHYSNSAGPVSGPIPEAPIQLRWSFDQARAIKTNLAASGPRPNPQGTYHYGKIKVTRTIKLASSAGNINGKQRYAVNSASFYPTDTPLKLADYFKIAGVYNPGSIPDQPTHGAIYPVTSVMQTDYKAFVEIVFENWEDIVQTWHLDGYSFFVVGMELGKWSAASRKVYNLNDAVSRCTVQVYPRSWTAIYVSLDNVGMWNLRSELWERQYLGQQFYMRVYTPSTSLRDEYLIPKNALLCGRATGHHTTTPGPLSEGSERF

SEQ ID NO: 82488 - protein, 541 aa, Arabidopsis thaliana
  peptide (1)..(541): Ceres Seq. ID no. 12665953
  misc_feature (1)..(541): Homolog of NCBI NO: 15219118 NR Description: pectinesterase (pectin methylesterase), putative; id: At1g21850.1 [Arabidopsis thaliana] >gi|25285548|pir||H86351
  misc_feature (1)..(527): Homolog of NCBI NO: 15219120 NR Description: pectinesterase (pectin methylesterase), putative; id: At1g21860.1 [Arabidopsis thaliana]
  misc_feature (1)..(528): Homolog of NCBI NO: 15222981 NR Description: pectinesterase (pectin methylesterase), putative; id: At1g76160.1, supported by cDNA: gi_15982770 [Arabidopsis
  misc_feature (1)..(528): Homolog of NCBI NO: 15982771 NR Description: At1g76160/T23E18_10 [Arabidopsis thaliana]
  misc_feature (1)..(528): Homolog of NCBI NO: 22531132 NR Description: pectinesterase, putative [Arabidopsis thaliana]
  misc_feature (5)..(528): Homolog of NCBI NO: 16648889 NR Description: Unknown protein [Arabidopsis thaliana]
  misc_feature (5)..(528): Homolog of NCBI NO: 18400509 NR Description: pectinesterase (pectin methylesterase), putative; id: At1g41830.1, supported by cDNA: gi_16648888 [Arabidopsis
  misc_feature (5)..(528): Homolog of NCBI NO: 25285550 NR Description: probable pectinesterase [imported] - Arabidopsis >gi|9802764|gb|AAF99833.1|AC008046_5 Putative pectinesterase
  misc_feature (8)..(528): Homolog of NCBI NO: 1255951 NR Description: PS60 [Nicotiana tabacum]
  misc_feature (15)..(515): Homolog of NCBI NO: 7432997 NR Description: pollen-specific protein homolog - tomato >gi|1944575|emb|CAB08077.1| pectinesterase [Lycopersicon
MILGLFFLISFVAAEDPYKFFEWHVTYGNISPLKVAQQGILINGKFPGPDIAAVTNDNLIINVFNHLDEPFLISWSGIRNWRNSYQDGVYGTTCPIPPGKNYTYALQVKDQIGSFYYFPSLGFHKAAGGFGAIRISSRPRIPVPFPAPAGDYTVLIGDWYKTNHKDLRAQLDNGGKLPFPDGILINGRGSGATLNIEPGKTYRLRISNVGLQNSLNFRIQNHKMKLVEVEGTHTIQTPFSSLDVHVGQSYSVLITADQPAKDYYIVVSSRFTSKILITAGVLHYSNSAGPVSGPIPEAPIQLRWSFDQARAIKTNLAASGPRPNPQGTYHYGKIKVTRTIKLASSAGNINGKQRYAVNSASFYPTDTPLKLADYFKIAGVYNPGSIPDQPTHGAIYPVTSVMQTDYKAFVEIVFENWEDIVQTWHLDGYSFFVVGMELGKWSAASRKVYNLNDAVSRCTVQVYPRSWTAIYVSLDNVGMWNLRSELWERQYLGQQFYMRVYTPSTSLRDEYLIPKNALLCGRATGHHTTTPGPLSEGSERF

SEQ ID NO: 82489 - protein, 318 aa, Arabidopsis thaliana
  peptide (1)..(318): Ceres Seq. ID no. 12665954
  misc_feature (1)..(318): Homolog of NCBI NO: 15219118 NR Description: pectinesterase (pectin methylesterase), putative; id: At1g21850.1 [Arabidopsis thaliana] >gi|25285548|pir||H86351
  misc_feature (1)..(304): Homolog of NCBI NO: 15219120 NR Description: pectinesterase (pectin methylesterase), putative; id: At1g21860.1 [Arabidopsis thaliana]
  misc_feature (1)..(305): Homolog of NCBI NO: 15222981 NR Description: pectinesterase (pectin methylesterase), putative; id: At1g76160.1, supported by cDNA: gi_15982770 [Arabidopsis
  misc_feature (1)..(305): Homolog of NCBI NO: 15982771 NR Description: At1g76160/T23E18_10 [Arabidopsis thaliana]
  misc_feature (1)..(305): Homolog of NCBI NO: 22531132 NR Description: pectinesterase, putative [Arabidopsis thaliana]
  misc_feature (1)..(305): Homolog of NCBI NO: 16648889 NR Description: Unknown protein [Arabidopsis thaliana]
  misc_feature (1)..(305): Homolog of NCBI NO: 18400509 NR Description: pectinesterase (pectin methylesterase), putative; id: At1g41830.1, supported by cDNA: gi_16648888 [Arabidopsis
  misc_feature (1)..(305): Homolog of NCBI NO: 25285550 NR Description: probable pectinesterase [imported] - Arabidopsis >gi|9802764|gb|AAF99833.1|AC008046_5 Putative pectinesterase
  misc_feature (1)..(305): Homolog of NCBI NO: 1255951 NR Description: PS60 [Nicotiana tabacum]
  misc_feature (1)..(292): Homolog of NCBI NO: 7432997 NR Description: pollen-specific protein homolog - tomato >gi|1944575|emb|CAB08077.1| pectinesterase [Lycopersicon
MKLVEVEGTHTIQTPFSSLDVHVGQSYSVLITADQPAKDYYIVVSSRFTSKILITAGVLHYSNSAGPVSGPIPEAPIQLRWSFDQARAIKTNLAASGPRPNPQGTYHYGKIKVTRTIKLASSAGNINGKQRYAVNSASFYPTDTPLKLADYFKIAGVYNPGSIPDQPTHGAIYPVTSVMQTDYKAFVEIVFENWEDIVQTWHLDGYSFFVVGMELGKWSAASRKVYNLNDAVSRCTVQVYPRSWTAIYVSLDNVGMWNLRSELWERQYLGQQFYMRVYTPSTSLRDEYLIPKNALLCGRATGHHTTTPGPLSEGSERF

SEQ ID NO: 82490 - DNA, 1617 bp, Arabidopsis thaliana
  misc_feature (1)..(1617): Ceres Seq. ID no. 12665955
  misc_feature: MA Experiment ID: 20000185 Result: Down-regulated in Transcription
  misc_feature: MA Experiment 20000185 PARAMETER Experiment Name: At_Roots__P Parameter: Age (day) Value: 7 vs. 21
  misc_feature: MA Experiment 20000185 PARAMETER Experiment Name: At_Roots__P Parameter: Organism Value: A. thaliana
  misc_feature: MA Experiment 20000185 PARAMETER Experiment Name: At_Roots__P Parameter: Tissue Value: Roots vs. Whole Plant
  misc_feature: MA Experiment ID: 20000213 Result: Up-regulated in Transcription
  misc_feature: MA Experiment 20000213 PARAMETER Experiment Name: At_4deg_Cold_P Parameter: Timepoint (hr) Value: 2
  misc_feature: MA Experiment ID: 20000439 Result: Down-regulated in Transcription
  misc_feature: MA Experiment 20000439 PARAMETER Experiment Name: At_Roots__P Parameter: Age (day) Value: 14 vs. 21
  misc_feature: MA Experiment 20000439 PARAMETER Experiment Name: At_Roots__P Parameter: Organism Value: A. thaliana
  misc_feature: MA Experiment 20000439 PARAMETER Experiment Name: At_Roots__P Parameter: Tissue Value: Roots vs. Whole Plant
  misc_feature: MA Experiment ID: 20001248 Result: Up-regulated in Transcription
  misc_feature: MA Experiment 20001248 PARAMETER Experiment Name: At_Far-red-induction_P Parameter: Age (day) Value: 7
  misc_feature: MA Experiment 20001248 PARAMETER Experiment Name: At_Far-red-induction_P Parameter: Light Value: Far-red vs. White
  misc_feature: MA Experiment 20001248 PARAMETER Experiment Name: At_Far-red-induction_P Parameter: Organism Value: A. thaliana
  misc_feature: MA Experiment 20001248 PARAMETER Experiment Name: At_Far-red-induction_P Parameter: Plant Line Value: Columbia
  misc_feature: MA Experiment 20001248 PARAMETER Experiment Name: At_Far-red-induction_P Parameter: Timepoint (hr) Value: 4
  misc_feature: MA Experiment 20001248 PARAMETER Experiment Name: At_Far-red-induction_P Parameter: Tissue Value: Whole Plant
  misc_feature: MA Experiment ID: 20001451 Result: Down-regulated in Transcription
  misc_feature: MA Experiment 20001451 PARAMETER Experiment Name: At_Far-red-induction_P Parameter: Age (day) Value: 7
  misc_feature: MA Experiment 20001451 PARAMETER Experiment Name: At_Far-red-induction_P Parameter: Light Value: Far-red vs. White
  misc_feature: MA Experiment 20001451 PARAMETER Experiment Name: At_Far-red-induction_P Parameter: Organism Value: A. thaliana
  misc_feature: MA Experiment 20001451 PARAMETER Experiment Name: At_Far-red-induction_P Parameter: Plant Line Value: Columbia
  misc_feature: MA Experiment 20001451 PARAMETER Experiment Name: At_Far-red-induction_P Parameter: Timepoint (hr) Value: 24
  misc_feature: MA Experiment 20001451 PARAMETER Experiment Name: At_Far-red-induction_P Parameter: Tissue Value: Whole Plant
  misc_feature: MA Experiment ID: 20001560 Result: Up-regulated in Transcription
  misc_feature: MA Experiment 20001560 PARAMETER Experiment Name: At_Drought_Soil_Dry_P Parameter: Age (day) Value: 28
  misc_feature: MA Experiment 20001560 PARAMETER Experiment Name: At_Drought_Soil_Dry_P Parameter: Organism Value: A. thaliana
  misc_feature: MA Experiment 20001560 PARAMETER Experiment Name: At_Drought_Soil_Dry_P Parameter: Plant Line Value: WS
  misc_feature: MA Experiment 20001560 PARAMETER Experiment Name: At_Drought_Soil_Dry_P Parameter: Post Timepoint (hr) Value: None
  misc_feature: MA Experiment 20001560 PARAMETER Experiment Name: At_Drought_Soil_Dry_P Parameter: Post-Treatment Value: None
  misc_feature: MA Experiment 20001560 PARAMETER Experiment Name: At_Drought_Soil_Dry_P Parameter: Timepoint (day) Value: 14
  misc_feature: MA Experiment 20001560 PARAMETER Experiment Name: At_Drought_Soil_Dry_P Parameter: Treatment Value: Drought vs. No Drought
atgaaggtcaaaagcatgaacactagggcgatgataaccactctattgtttctaatcagcctcgccttcgctgaagatccatacagattcttcgaatggcacgtaacctatggcaacatatctcctcttggtgttgcgcaacagggtatattgattaacgggaagtttccaggaccagacatcatctctattaccaatgacaatctcatcattaacgtattcaaccatctcgacgaacctttccttttgtcttggaacgggattcgaaattggaaaaattcgttccaggatggagtctacggaacgatgtgcccaatcccaccggggaagaactacacttacgctcttcaggttaaagatcagatcggaagtttctactacttcccctctctaggatttcacaaagctgccggcggattcggaggtatccgtatctccagccgtgcattgatccccgtccccttccccactccggccgatgattacactctcctagtaggcgactggtacaaaaccaaccacaaggacttgaaggcacaactcgataatggtggaaaacttcctttaccagatggaattctcataaatggtcgtagtagtggcgccactctcaacattgaaccaggtaagacttatagactgaggatatcaaatgttggattacagaactccctcaacttccgaatccaaaaccatacgatgaagttggttgaggtcgaagggagatacactattcagaatcttttctcttcgcttgatgttcacgttggtcaatcttactcggtccttataacagccgatcagcctgcaaaagattattacgttgtcgtctctagtaggtttacatcaaagatactcactactactggagttcttcattacagtaattctgttgcacctgtttctggacctattccagatggaccaattaagttaagctggtcttttaaccaagctcgagctatcaggaccaaccttacagcaagcggaccaaggccaaacccacaaggttcataccgctatggtgtgataaacatcacccgaacgatcagacttgctaacaatcttggacatattgaaggcaagcaacgatacgccgtgaacagtgcatcattttacccagcagacacccctttgaaactagtggattacttcaaaattgacggtgtatacaagcctggaagtatatctgaccagcccacaaatggagcaatattccctaccacatctgtaatgcaagctgatttcagagcctttgtggaagttattttcgagaattcggaagatattgtccagagctggcacctcgacggttactctttctacgttgttggaatggaacttgggaagtggagtcctgccagtagaaaagtctacaatctaaacgacgcaatcttacggtgcactattcaggtgtatccgagatcatggactgccatatacatagcactggacaatgtaggaatgtggaatatgagatcagagatatgggaaagacaatacttgggacaacagttctacatgcgtgtttacacaacctctacttctctcagagatgaatacttgatccctaagaacgctcttctgtgtggcagggccagcagcagccacagatga

SEQ ID NO: 82491 - protein, 538 aa, Arabidopsis thaliana
  peptide (1)..(538): Ceres Seq. ID no. 12665956
  misc_feature (1)..(538): Homolog of NCBI NO: 15219120 NR Description: pectinesterase (pectin methylesterase), putative; id: At1g21860.1 [Arabidopsis thaliana]
  misc_feature (1)..(537): Homolog of NCBI NO: 15219118 NR Description: pectinesterase (pectin methylesterase), putative; id: At1g21850.1 [Arabidopsis thaliana] >gi|25285548|pir||H86351
  misc_feature (10)..(534): Homolog of NCBI NO: 15222981 NR Description: pectinesterase (pectin methylesterase), putative; id: At1g76160.1, supported by cDNA: gi_15982770 [Arabidopsis
  misc_feature (10)..(534): Homolog of NCBI NO: 15982771 NR Description: At1g76160/T23E18_10 [Arabidopsis thaliana]
  misc_feature (10)..(534): Homolog of NCBI NO: 22531132 NR Description: pectinesterase, putative [Arabidopsis thaliana]
  misc_feature (18)..(537): Homolog of NCBI NO: 1255951 NR Description: PS60 [Nicotiana tabacum]
  misc_feature (13)..(537): Homolog of NCBI NO: 16648889 NR Description: Unknown protein [Arabidopsis thaliana]
  misc_feature (13)..(537): Homolog of NCBI NO: 25285550 NR Description: probable pectinesterase [imported] - Arabidopsis >gi|9802764|gb|AAF99833.1|AC008046_5 Putative pectinesterase
  misc_feature (13)..(537): Homolog of NCBI NO: 18400509 NR Description: pectinesterase (pectin methylesterase), putative; id: At1g41830.1, supported by cDNA: gi_16648888 [Arabidopsis
  misc_feature (25)..(525): Homolog of NCBI NO: 7432997 NR Description: pollen-specific protein homolog - tomato >gi|1944575|emb|CAB08077.1| pectinesterase [Lycopersicon
MKVKSMNTRAMITTLLFLISLAFAEDPYRFFEWHVTYGNISPLGVAQQGILINGKFPGPDIISITNDNLIINVFNHLDEPFLLSWNGIRNWKNSFQDGVYGTMCPIPPGKNYTYALQVKDQIGSFYYFPSLGFHKAAGGFGGIRISSRALIPVPFPTPADDYTLLVGDWYKTNHKDLKAQLDNGGKLPLPDGILINGRSSGATLNIEPGKTYRLRISNVGLQNSLNFRIQNHTMKLVEVEGRYTIQNLFSSLDVHVGQSYSVLITADQPAKDYYVVVSSRFTSKILTTTGVLHYSNSVAPVSGPIPDGPIKLSWSFNQARAIRTNLTASGPRPNPQGSYRYGVINITRTIRLANNLGHIEGKQRYAVNSASFYPADTPLKLVDYFKIDGVYKPGSISDQPTNGAIFPTTSVMQADFRAFVEVIFENSEDIVQSWHLDGYSFYVVGMELGKWSPASRKVYNLNDAILRCTIQVYPRSWTAIYIALDNVGMWNMRSEIWERQYLGQQFYMRVYTTSTSLRDEYLIPKNALLCGRASSSHR

SEQ ID NO: 82492 - protein, 533 aa, Arabidopsis thaliana
  peptide (1)..(533): Ceres Seq. ID no. 12665957
  misc_feature (1)..(533): Homolog of NCBI NO: 15219120 NR Description: pectinesterase (pectin methylesterase), putative; id: At1g21860.1 [Arabidopsis thaliana]
  misc_feature (1)..(532): Homolog of NCBI NO: 15219118 NR Description: pectinesterase (pectin methylesterase), putative; id: At1g21850.1 [Arabidopsis thaliana] >gi|25285548|pir||H86351
  misc_feature (5)..(529): Homolog of NCBI NO: 15222981 NR Description: pectinesterase (pectin methylesterase), putative; id: At1g76160.1, supported by cDNA: gi_15982770 [Arabidopsis
  misc_feature (5)..(529): Homolog of NCBI NO: 15982771 NR Description: At1g76160/T23E18_10 [Arabidopsis thaliana]
  misc_feature (5)..(529): Homolog of NCBI NO: 22531132 NR Description: pectinesterase, putative [Arabidopsis thaliana]
  misc_feature (13)..(532): Homolog of NCBI NO: 1255951 NR Description: PS60 [Nicotiana tabacum]
  misc_feature (8)..(532): Homolog of NCBI NO: 16648889 NR Description: Unknown protein [Arabidopsis thaliana]
  misc_feature (8)..(532): Homolog of NCBI NO: 18400509 NR Description: pectinesterase (pectin methylesterase), putative; id: At1g41830.1, supported by cDNA: gi_16648888 [Arabidopsis
  misc_feature (8)..(532): Homolog of NCBI NO: 25285550 NR Description: probable pectinesterase [imported] - Arabidopsis >gi|9802764|gb|AAF99833.1|AC008046_5 Putative pectinesterase
  misc_feature (20)..(520): Homolog of NCBI NO: 7432997 NR Description: pollen-specific protein homolog - tomato >gi|1944575|emb|CAB08077.1| pectinesterase [Lycopersicon
MNTRAMITTLLFLISLAFAEDPYRFFEWHVTYGNISPLGVAQQGILINGKFPGPDIISITNDNLIINVFNHLDEPFLLSWNGIRNWKNSFQDGVYGTMCPIPPGKNYTYALQVKDQIGSFYYFPSLGFHKAAGGFGGIRISSRALIPVPFPTPADDYTLLVGDWYKTNHKDLKAQLDNGGKLPLPDGILINGRSSGATLNIEPGKTYRLRISNVGLQNSLNFRIQNHTMKLVEVEGRYTIQNLFSSLDVHVGQSYSVLITADQPAKDYYVVVSSRFTSKILTTTGVLHYSNSVAPVSGPIPDGPIKLSWSFNQARAIRTNLTASGPRPNPQGSYRYGVINITRTIRLANNLGHIEGKQRYAVNSASFYPADTPLKLVDYFKIDGVYKPGSISDQPTNGAIFPTTSVMQADFRAFVEVIFENSEDIVQSWHLDGYSFYVVGMELGKWSPASRKVYNLNDAILRCTIQVYPRSWTAIYIALDNVGMWNMRSEIWERQYLGQQFYMRVYTTSTSLRDEYLIPKNALLCGRASSSHR

SEQ ID NO: 82493 - protein, 528 aa, Arabidopsis thaliana
  peptide (1)..(528): Ceres Seq. ID no. 12665958
  misc_feature (1)..(528): Homolog of NCBI NO: 15219120 NR Description: pectinesterase (pectin methylesterase), putative; id: At1g21860.1 [Arabidopsis thaliana]
  misc_feature (1)..(527): Homolog of NCBI NO: 15219118 NR Description: pectinesterase (pectin methylesterase), putative; id: At1g21850.1 [Arabidopsis thaliana] >gi|25285548|pir||H86351
  misc_feature (1)..(524): Homolog of NCBI NO: 15222981 NR Description: pectinesterase (pectin methylesterase), putative; id: At1g76160.1, supported by cDNA: gi_15982770 [Arabidopsis
  misc_feature (1)..(524): Homolog of NCBI NO: 15982771 NR Description: At1g76160/T23E18_10 [Arabidopsis thaliana]
  misc_feature (1)..(524): Homolog of NCBI NO: 22531132 NR Description: pectinesterase, putative [Arabidopsis thaliana]
  misc_feature (8)..(527): Homolog of NCBI NO: 1255951 NR Description: PS60 [Nicotiana tabacum]
  misc_feature (3)..(527): Homolog of NCBI NO: 16648889 NR Description: Unknown protein [Arabidopsis thaliana]
  misc_feature (3)..(527): Homolog of NCBI NO: 25285550 NR Description: probable pectinesterase [imported] - Arabidopsis >gi|9802764|gb|AAF99833.1|AC008046_5 Putative pectinesterase
  misc_feature (3)..(527): Homolog of NCBI NO: 18400509 NR Description: pectinesterase (pectin methylesterase), putative; id: At1g41830.1, supported by cDNA: gi_16648888 [Arabidopsis
  misc_feature (15)..(515): Homolog of NCBI NO: 7432997 NR Description: pollen-specific protein homolog - tomato >gi|1944575|emb|CAB08077.1| pectinesterase [Lycopersicon
MITTLLFLISLAFAEDPYRFFEWHVTYGNISPLGVAQQGILINGKFPGPDIISITNDNLIINVFNHLDEPFLLSWNGIRNWKNSFQDGVYGTMCPIPPGKNYTYALQVKDQIGSFYYFPSLGFHKAAGGFGGIRISSRALIPVPFPTPADDYTLLVGDWYKTNHKDLKAQLDNGGKLPLPDGILINGRSSGATLNIEPGKTYRLRISNVGLQNSLNFRIQNHTMKLVEVEGRYTIQNLFSSLDVHVGQSYSVLITADQPAKDYYVVVSSRFTSKILTTTGVLHYSNSVAPVSGPIPDGPIKLSWSFNQARAIRTNLTASGPRPNPQGSYRYGVINITRTIRLANNLGHIEGKQRYAVNSASFYPADTPLKLVDYFKIDGVYKPGSISDQPTNGAIFPTTSVMQADFRAFVEVIFENSEDIVQSWHLDGYSFYVVGMELGKWSPASRKVYNLNDAILRCTIQVYPRSWTAIYIALDNVGMWNMRSEIWERQYLGQQFYMRVYTTSTSLRDEYLIPKNALLCGRASSSHR

SEQ ID NO: 82494 - DNA, 1474 bp, Arabidopsis thaliana
  misc_feature (1)..(1474): Ceres Seq. ID no. 12665963
  misc_feature: MA Experiment ID: 20000234 Result: Down-regulated in Transcription
  misc_feature: MA Experiment 20000234 PARAMETER Experiment Name: At_Siliques_P Parameter: Age (day) Value: 21
  misc_feature: MA Experiment 20000234 PARAMETER Experiment Name: At_Siliques_P Parameter: Organism Value: A. thaliana
  misc_feature: MA Experiment 20000234 PARAMETER Experiment Name: At_Siliques_P Parameter: Plant Line Value: WS
  misc_feature: MA Experiment 20000234 PARAMETER Experiment Name: At_Siliques_P Parameter: Tissue Value: Less Than 5mm Siliques vs. Whole Plant
  misc_feature: MA Experiment ID: 20000451 Result: Down-regulated in Transcription
  misc_feature: MA Experiment 20000451 PARAMETER Experiment Name: At_CS6879_Shoots-Roots_P Parameter: Age (day) Value: 14
  misc_feature: MA Experiment 20000451 PARAMETER Experiment Name: At_CS6879_Shoots-Roots_P Parameter: Organism Value: A. thaliana
  misc_feature: MA Experiment 20000451 PARAMETER Experiment Name: At_CS6879_Shoots-Roots_P Parameter: Plant Line Value: CS6879 vs. WS
  misc_feature: MA Experiment 20000451 PARAMETER Experiment Name: At_CS6879_Shoots-Roots_P Parameter: Tissue Value: Roots
  misc_feature: MA Experiment ID: 20000709 Result: Down-regulated in Transcription
  misc_feature: MA Experiment 20000709 PARAMETER Experiment Name: At_15mM_NH4NO3_L-to-H_P Parameter: Age (hr) Value: 14
  misc_feature: MA Experiment 20000709 PARAMETER Experiment Name: At_15mM_NH4NO3_L-to-H_P Parameter: Organism Value: A. thaliana
  misc_feature: MA Experiment 20000709 PARAMETER Experiment Name: At_15mM_NH4NO3_L-to-H_P Parameter: Plant Line Value: WS
  misc_feature: MA Experiment 20000709 PARAMETER Experiment Name: At_15mM_NH4NO3_L-to-H_P Parameter: Timepoint (hr) Value: 4
  misc_feature: MA Experiment 20000709 PARAMETER Experiment Name: At_15mM_NH4NO3_L-to-H_P Parameter: Tissue Value: Aerial
  misc_feature: MA Experiment 20000709 PARAMETER Experiment Name: At_15mM_NH4NO3_L-to-H_P Parameter: Treatment Value: 15mM NH4NO3 vs. 30mM Mannitol
acagtcataactaattaagtacatttgaatacatcaaataccaagaaagagaaatttagagagaaagagaaagagataaaatggggagagggttaatgaatagtttgaaaccatacttagcaatgatatctatgcagtttggttatgccggtatgtacataatcaccatggtctctcttaagcatggcatgaaccattacgtcctagccgtttatcgccatgcaattgccactgccgtcatcgctccatttgctcttttccatgaaaggaaaataaggcccaagatgacgttccgaatattcctccaaattgcgctgctcggttttattgagccggtgcttgatcagaacctctactacgtcgggatgacttacacgtcagcaactttcgcttctgctactgctaatgtccttccggccatcaccttcgtcttggccattattttcaggttagaaagcgtgaactttaagaaggtacgaagcatagccaaagttgtaggaacggtgatcacagtctccggagcacttctcatgactctctacaagggtccaatagttgactttatccgattcggcggtggaggaggaggaggtagtgatggtgcaggaggatcccacggtggtgcaggagcggcagcgatggacaaacactggattccgggaacacttatgctgttgggaagaacttttggttgggccggtttcttcatcctacaatcgtttacactgaagcagtacccagctgagctgtcattaacgacgttaatatgtttaatgggaacgttagaaggaaccgctgtttcattggtaacggtacgtgacttgagtgcttggaaaatcggcttcgactctaatctcttcgccgctgcttactccggggtgatttgttcgggagtggcgtattacgtgcaaggagtagtaatgagagaaagaggaccagtttttgttgcgacatttaatccactttgtgtcgttataactgctgctcttggtgttgttgtcttgtctgaaagcattcatctcggaagtgtgattggaacgctatttataatcgtgggcctatacactgttgtatggggtaaaggcaaagacaaaagaatgacggatgatgacgaagattgcaaaggacttccgattaaaagtccggttaaaccggtagataccggtaaaggcttagccgcagaactggagatgaaatcaaaggaaggtcaagaggcaaaggctactactactactcaagttgagatttgaggatgcttatgtactgttgacggaggaagacacaaatctgtctttctttctctgtatattaagtttatgttttttgctttccaaggttacagaaagattttggcacatcagatgtaatatgatgagatgattcaatcatcttgtagttttaactagaagtttttgtgagatatgcaacttcaaaaattatcaaagagatcaataacaatgttttggttctactc

SEQ ID NO: 82495 - protein, 389 aa, Arabidopsis thaliana
  peptide (1)..(389): Ceres Seq. ID no. 12665964
  misc_feature (203)..(332): Pfam Name: Integral membrane protein DUF6 Pfam Description: Integral membrane protein DUF6
  misc_feature (1)..(389): Homolog of NCBI NO: 15219123 NR Description: nodulin-like protein; protein id: At1g21890.1,
  misc_feature (1)..(389): Homolog of NCBI NO: 17529004 NR Description: putative nodulin protein [Arabidopsis thaliana]
  misc_feature (1)..(389): Homolog of NCBI NO: 6552743 NR Description: T26F17.11 [Arabidopsis thaliana]
  misc_feature (1)..(369): Homolog of NCBI NO: 30680708 NR Description: nodulin MtN21 family protein [Arabidopsis
  misc_feature (6)..(369): Homolog of NCBI NO: 7486870 NR Description: hypothetical protein T12G13.140 - Arabidopsis
  misc_feature (1)..(357): Homolog of NCBI NO: 15219448 NR Description: nodulin protein, putative; protein id: supported by cDNA: 149985., supported by cDNA: gi_15146329
  misc_feature (6)..(357): Homolog of NCBI NO: 21553533 NR Description: nodulin protein, putative [Arabidopsis thaliana]
  misc_feature (6)..(383): Homolog of NCBI NO: 15240683 NR Description: MtN21 nodulin protein-like; protein id:
  misc_feature (4)..(354): Homolog of NCBI NO: 34908998 NR Description: nodulin-like protein [Oryza sativa (japonica
  misc_feature (3)..(385): Homolog of NCBI NO: 15224291 NR Description: nodulin-like protein; protein id: At2g37460.1, by cDNA: 16393., supported by cDNA: gi_14334857, supported by
MGRGLMNSLKPYLAMISMQFGYAGMYIITMVSLKHGMNHYVLAVYRHAIATAVIAPFALFHERKIRPKMTFRIFLQIALLGFIEPVLDQNLYYVGMTYTSATFASATANVLPAITFVLAIIFRLESVNFKKVRSIAKVVGTVITVSGALLMTLYKGPIVDFIRFGGGGGGGSDGAGGSHGGAGAAAMDKHWIPGTLMLLGRTFGWAGFFILQSFTLKQYPAELSLTTLICLMGTLEGTAVSLVTVRDLSAWKIGFDSNLFAAAYSGVICSGVAYYVQGVVMRERGPVFVATFNPLCVVITAALGVVVLSESIHLGSVIGTLFIIVGLYTVVWGKGKDKRMTDDDEDCKGLPIKSPVKPVDTGKGLAAELEMKSKEGQEAKATTTTQVEI

SEQ ID NO: 82496 - protein, 384 aa, Arabidopsis thaliana
  peptide (1)..(384): Ceres Seq. ID no. 12665965
  misc_feature (198)..(327): Pfam Name: Integral membrane protein DUF6 Pfam Description: Integral membrane protein DUF6
  misc_feature (1)..(384): Homolog of NCBI NO: 15219123 NR Description: nodulin-like protein; protein id: At1g21890.1,
  misc_feature (1)..(384): Homolog of NCBI NO: 17529004 NR Description: putative nodulin protein [Arabidopsis thaliana]
  misc_feature (1)..(384): Homolog of NCBI NO: 6552743 NR Description: T26F17.11 [Arabidopsis thaliana]
  misc_feature (1)..(364): Homolog of NCBI NO: 30680708 NR Description: nodulin MtN21 family protein [Arabidopsis
  misc_feature (1)..(364): Homolog of NCBI NO: 7486870 NR Description: hypothetical protein T12G13.140 - Arabidopsis
  misc_feature (1)..(352): Homolog of NCBI NO: 15219448 NR Description: nodulin protein, putative; protein id: supported by cDNA: 149985., supported by cDNA: gi_15146329
  misc_feature (1)..(352): Homolog of NCBI NO: 21553533 NR Description: nodulin protein, putative [Arabidopsis thaliana]
  misc_feature (1)..(378): Homolog of NCBI NO: 15240683 NR Description: MtN21 nodulin protein-like; protein id:
  misc_feature (1)..(349): Homolog of NCBI NO: 34908998 NR Description: nodulin-like protein [Oryza sativa (japonica
  misc_feature (1)..(380): Homolog of NCBI NO: 15224291 NR Description: nodulin-like protein; protein id: At2g37460.1, by cDNA: 16393., supported by cDNA: gi_14334857, supported by
MNSLKPYLAMISMQFGYAGMYIITMVSLKHGMNHYVLAVYRHAIATAVIAPFALFHERKIRPKMTFRIFLQIALLGFIEPVLDQNLYYVGMTYTSATFASATANVLPAITFVLAIIFRLESVNFKKVRSIAKVVGTVITVSGALLMTLYKGPIVDFIRFGGGGGGGSDGAGGSHGGAGAAAMDKHWIPGTLMLLGRTFGWAGFFILQSFTLKQYPAELSLTTLICLMGTLEGTAVSLVTVRDLSAWKIGFDSNLFAAAYSGVICSGVAYYVQGVVMRERGPVFVATFNPLCVVITAALGVVVLSESIHLGSVIGTLFIIVGLYTVVWGKGKDKRMTDDDEDCKGLPIKSPVKPVDTGKGLAAELEMKSKEGQEAKATTTTQVEI

SEQ ID NO: 82497 - protein, 375 aa, Arabidopsis thaliana
  peptide (1)..(375): Ceres Seq. ID no. 12665966
  misc_feature (189)..(318): Pfam Name: Integral membrane protein DUF6 Pfam Description: Integral membrane protein DUF6
  misc_feature (1)..(375): Homolog of NCBI NO: 15219123 NR Description: nodulin-like protein; protein id: At1g21890.1,
  misc_feature (1)..(375): Homolog of NCBI NO: 17529004 NR Description: putative nodulin protein [Arabidopsis thaliana]
  misc_feature (1)..(375): Homolog of NCBI NO: 6552743 NR Description: T26F17.11 [Arabidopsis thaliana]
  misc_feature (1)..(355): Homolog of NCBI NO: 30680708 NR Description: nodulin MtN21 family protein [Arabidopsis
  misc_feature (1)..(355): Homolog of NCBI NO: 7486870 NR Description: hypothetical protein T12G13.140 - Arabidopsis
  misc_feature (1)..(343): Homolog of NCBI NO: 15219448 NR Description: nodulin protein, putative; protein id: supported by cDNA: 149985., supported by cDNA: gi_15146329
  misc_feature (1)..(343): Homolog of NCBI NO: 21553533 NR Description: nodulin protein, putative [Arabidopsis thaliana]
  misc_feature (1)..(369): Homolog of NCBI NO: 15240683 NR Description: MtN21 nodulin protein-like; protein id:
  misc_feature (1)..(340): Homolog of NCBI NO: 34908998 NR Description: nodulin-like protein [Oryza sativa (japonica
  misc_feature (1)..(371): Homolog of NCBI NO: 15224291 NR Description: nodulin-like protein; protein id: At2g37460.1, by cDNA: 16393., supported by cDNA: gi_14334857, supported by
MISMQFGYAGMYIITMVSLKHGMNHYVLAVYRHAIATAVIAPFALFHERKIRPKMTFRIFLQIALLGFIEPVLDQNLYYVGMTYTSATFASATANVLPAITFVLAIIFRLESVNFKKVRSIAKVVGTVITVSGALLMTLYKGPIVDFIRFGGGGGGGSDGAGGSHGGAGAAAMDKHWIPGTLMLLGRTFGWAGFFILQSFTLKQYPAELSLTTLICLMGTLEGTAVSLVTVRDLSAWKIGFDSNLFAAAYSGVICSGVAYYVQGVVMRERGPVFVATFNPLCVVITAALGVVVLSESIHLGSVIGTLFIIVGLYTVVWGKGKDKRMTDDDEDCKGLPIKSPVKPVDTGKGLAAELEMKSKEGQEAKATTTTQVEI

SEQ ID NO: 82498 - DNA, 1971 bp, Arabidopsis thaliana
  misc_feature (1)..(1971): Ceres Seq. ID no. 12665990
  misc_feature: MA Experiment ID: 20000451 Result: Up-regulated in Transcription
  misc_feature: MA Experiment 20000451 PARAMETER Experiment Name: At_CS6879_Shoots-Roots_P Parameter: Age (day) Value: 14
  misc_feature: MA Experiment 20000451 PARAMETER Experiment Name: At_CS6879_Shoots-Roots_P Parameter: Organism Value: A. thaliana
  misc_feature: MA Experiment 20000451 PARAMETER Experiment Name: At_CS6879_Shoots-Roots_P Parameter: Plant Line Value: CS6879 vs. WS
  misc_feature: MA Experiment 20000451 PARAMETER Experiment Name: At_CS6879_Shoots-Roots_P Parameter: Tissue Value: Roots
atgtcggctagagctcatcctgtggacgatgacggagagatttccccggtggaaagatcttccccgcggcaagcaaatacaccgtatgtccacaaagtcgaagttcctcctaagcaaaaccttttcaatgagttcatgtacacttttaaagaaactttcttccacgatgatcctctaaggcatttcaaggaccagtcaaaatccaaaaagctcatgctcggtatccagtccgtctttccggttatcgagtggggaagaaaatataatcttaagttgtttcgcggcgatcttattgccggtttaaccatagccagtctctgcattcctcaggatattggatatgcaaagctcgcgagtcttgaccctaagtatggtctatattcaagttttgttcctccgttggtgtacgcatgtatgggaagctcaaaggatatagcgattggacccgttgcagtggtttcactcctattaggtactctgcttcgtgctgagatcgaccccaacacaaaccctaatgaatatctccgcttagccttcacctccacgttctttgccggtgtcactcaagcagcactcggattcttcagattgggtttcttgatcgatttcttgtcccacgcggcggtggtaggtttcatgggcggagcagccatcaccattgcgctgcaacagctcaaaggcttcctaggaatcaataagttcacaaagaaaaccgatatcatcgcggttctttcttccgtaatcagctcagcccatcacggatggaattggcagacaatactcattagtgcatcgttcttgatcttccttctcatctccaagtttatcgggaagagaaacaagaaactgttttggattccagctattgctccgttagtatctgtcatcatttcaaccttcttcgtctacataacccgagccgacaagaaaggagttcagatagtgaaacatcttgacaaaggtctgaacccttcttctttgcgtctaatatatttctcgggcgattaccttctcaagggcttccgcataggcgttgtctcaggcatggttgccttgacggaagctgtagcgataggaagaacatttgcagcaatgaaagactaccaaatcgatggtaacaaagagatggtagcattaggagcaatgaacgtaatcggttcaatgacctcttgctatgtatccaccggttctttctcaagatccgccgtcaactttatggccggatgtcaaacggcagtctccaacatcatcatgtccattgtcgtcctcttaacgcttctcttcctcactcctcttttcaaatacacacccaacgcaattcttgcagcgatcatcatcaacgctgtgattcctttggttgacgttaatgctaccattttgatcttcaagatcgataagctcgattttgttgcttgtatgggggctttttttggtgtcatctttgtatccgtagagattggccttctaatagccgtggggatatcttttgccaagatacttttgcaagttacgagacctaggacagcgattcttggaaagataccagggacttcggtttacaggaatatcaatcagtatcctgaagcgactaggattccgggagttttgacaattcgtgttgactccgcgatttacttctccaactccaattatgttagggaaaggattcaaagatggttgacagatgaagaagagatggtggaagctgcaagattgcctaggatccagtttcttatcatcgaaatgtcacctgttacggacatcgatactagtggtattcacgccttagaagacttgtataagtctctccaaaaacgagacattcagttggttctagcgaatccaggaccgccggtcataaataagctacatgtttctcactttgcggacttgataggacacgacaaaatctttctgacggtggctgaggccgtggattcttgctcccctaaactgtccgacgaggtctga

SEQ ID NO: 82499 - protein, 656 aa, Arabidopsis thaliana
  peptide (1)..(656): Ceres Seq. ID no. 12665991
  misc_feature (192)..(503): Pfam Name: Sulfate transporter family Pfam Description: Sulfate transporter family
  misc_feature (1)..(656): Homolog of NCBI NO: 14270243 NR Description: sulfate transporter [Brassica napus]
  misc_feature (1)..(656): Homolog of NCBI NO: 18411776 NR Description: high affinity sulphate transporter, putative; id: At1g78000.1, supported by cDNA: gi_14245726 [Arabidopsis >gi|7768660|dbj|BAA95484.1| sulfate transporter [Arabidopsis
  misc_feature (309)..(656): Homolog of NCBI NO: 25310835 NR Description: protein F28K19.22 [imported] - Arabidopsis >gi|6573765|gb|AAF17685.1|AC009243_12 F28K19.22 [Arabidopsis
  misc_feature (106)..(276): Homolog of NCBI NO: 25310835 NR Description: protein F28K19.22 [imported] - Arabidopsis >gi|6573765|gb|AAF17685.1|AC009243_12 F28K19.22 [Arabidopsis
  misc_feature (1)..(110): Homolog of NCBI NO: 25310835 NR Description: protein F28K19.22 [imported] - Arabidopsis >gi|6573765|gb|AAF17685.1|AC009243_12 F28K19.22 [Arabidopsis
  misc_feature (20)..(656): Homolog of NCBI NO: 13487717 NR Description: sulfate transporter 2 [Lycopersicon esculentum]
  misc_feature (13)..(652): Homolog of NCBI NO: 14484936 NR Description: high affinity sulfate transporter [Lycopersicon
  misc_feature (5)..(652): Homolog of NCBI NO: 13487715 NR Description: sulfate transporter 1 [Lycopersicon esculentum]
  misc_feature (1)..(652): Homolog of NCBI NO: 11907976 NR Description: high affinity sulfate transporter type 1 [Solanum
  misc_feature (21)..(655): Homolog of NCBI NO: 16197732 NR Description: sulfate transporter [Brassica napus]
MSARAHPVDDDGEISPVERSSPRQANTPYVHKVEVPPKQNLFNEFMYTFKETFFHDDPLRHFKDQSKSKKLMLGIQSVFPVIEWGRKYNLKLFRGDLIAGLTIASLCIPQDIGYAKLASLDPKYGLYSSFVPPLVYACMGSSKDIAIGPVAVVSLLLGTLLRAEIDPNTNPNEYLRLAFTSTFFAGVTQAALGFFRLGFLIDFLSHAAVVGFMGGAAITIALQQLKGFLGINKFTKKTDIIAVLSSVISSAHHGWNWQTILISASFLIFLLISKFIGKRNKKLFWIPAIAPLVSVIISTFFVYITRADKKGVQIVKHLDKGLNPSSLRLIYFSGDYLLKGFRIGVVSGMVALTEAVAIGRTFAAMKDYQIDGNKEMVALGAMNVIGSMTSCYVSTGSFSRSAVNFMAGCQTAVSNIIMSIVVLLTLLFLTPLFKYTPNAILAAIIINAVIPLVDVNATILIFKIDKLDFVACMGAFFGVIFVSVEIGLLIAVGISFAKILLQVTRPRTAILGKIPGTSVYRNINQYPEATRIPGVLTIRVDSAIYFSNSNYVRERIQRWLTDEEEMVEAARLPRIQFLIIEMSPVTDIDTSGIHALEDLYKSLQKRDIQLVLANPGPPVINKLHVSHFADLIGHDKIFLTVAEAVDSCSPKLSDEV

SEQ ID NO: 82500 - protein, 611 aa, Arabidopsis thaliana
  peptide (1)..(611): Ceres Seq. ID no. 12665992
  misc_feature (147)..(458): Pfam Name: Sulfate transporter family Pfam Description: Sulfate transporter family
  misc_feature (1)..(611): Homolog of NCBI NO: 14270243 NR Description: sulfate transporter [Brassica napus]
  misc_feature (1)..(611): Homolog of NCBI NO: 18411776 NR Description: high affinity sulphate transporter, putative; id: At1g78000.1, supported by cDNA: gi_14245726 [Arabidopsis >gi|7768660|dbj|BAA95484.1| sulfate transporter [Arabidopsis
  misc_feature (264)..(611): Homolog of NCBI NO: 25310835 NR Description: protein F28K19.22 [imported] - Arabidopsis >gi|6573765|gb|AAF17685.1|AC009243_12 F28K19.22 [Arabidopsis
  misc_feature (61)..(231): Homolog of NCBI NO: 25310835 NR Description: protein F28K19.22 [imported] - Arabidopsis >gi|6573765|gb|AAF17685.1|AC009243_12 F28K19.22 [Arabidopsis
  misc_feature (1)..(65): Homolog of NCBI NO: 25310835 NR Description: protein F28K19.22 [imported] - Arabidopsis >gi|6573765|gb|AAF17685.1|AC009243_12 F28K19.22 [Arabidopsis
  misc_feature (1)..(611): Homolog of NCBI NO: 13487717 NR Description: sulfate transporter 2 [Lycopersicon esculentum]
  misc_feature (1)..(607): Homolog of NCBI NO: 14484936 NR Description: high affinity sulfate transporter [Lycopersicon
  misc_feature (1)..(607): Homolog of NCBI NO: 13487715 NR Description: sulfate transporter 1 [Lycopersicon esculentum]
  misc_feature (1)..(607): Homolog of NCBI NO: 11907976 NR Description: high affinity sulfate transporter type 1 [Solanum
  misc_feature (1)..(610): Homolog of NCBI NO: 16197732 NR Description: sulfate transporter [Brassica napus]
MYTFKETFFHDDPLRHFKDQSKSKKLMLGIQSVFPVIEWGRKYNLKLFRGDLIAGLTIASLCIPQDIGYAKLASLDPKYGLYSSFVPPLVYACMGSSKDIAIGPVAVVSLLLGTLLRAEIDPNTNPNEYLRLAFTSTFFAGVTQAALGFFRLGFLIDFLSHAAVVGFMGGAAITIALQQLKGFLGINKFTKKTDIIAVLSSVISSAHHGWNWQTILISASFLIFLLISKFIGKRNKKLFWIPAIAPLVSVIISTFFVYITRADKKGVQIVKHLDKGLNPSSLRLIYFSGDYLLKGFRIGVVSGMVALTEAVAIGRTFAAMKDYQIDGNKEMVALGAMNVIGSMTSCYVSTGSFSRSAVNFMAGCQTAVSNIIMSIVVLLTLLFLTPLFKYTPNAILAAIIINAVIPLVDVNATILIFKIDKLDFVACMGAFFGVIFVSVEIGLLIAVGISFAKILLQVTRPRTAILGKIPGTSVYRNINQYPEATRIPGVLTIRVDSAIYFSNSNYVRERIQRWLTDEEEMVEAARLPRIQFLIIEMSPVTDIDTSGIHALEDLYKSLQKRDIQLVLANPGPPVINKLHVSHFADLIGHDKIFLTVAEAVDSCSPKLSDEV

SEQ ID NO: 82501 - protein, 585 aa, Arabidopsis thaliana
  peptide (1)..(585): Ceres Seq. ID no. 12665993
  misc_feature (121)..(432): Pfam Name: Sulfate transporter family Pfam Description: Sulfate transporter family
  misc_feature (1)..(585): Homolog of NCBI NO: 14270243 NR Description: sulfate transporter [Brassica napus]
  misc_feature (1)..(585): Homolog of NCBI NO: 18411776 NR Description: high affinity sulphate transporter, putative; id: At1g78000.1, supported by cDNA: gi_14245726 [Arabidopsis >gi|7768660|dbj|BAA95484.1| sulfate transporter [Arabidopsis
  misc_feature (238)..(585): Homolog of NCBI NO: 25310835 NR Description: protein F28K19.22 [imported] - Arabidopsis >gi|6573765|gb|AAF17685.1|AC009243_12 F28K19.22 [Arabidopsis
  misc_feature (35)..(205): Homolog of NCBI NO: 25310835 NR Description: protein F28K19.22 [imported] - Arabidopsis >gi|6573765|gb|AAF17685.1|AC009243_12 F28K19.22 [Arabidopsis
  misc_feature (1)..(39): Homolog of NCBI NO: 25310835 NR Description: protein F28K19.22 [imported] - Arabidopsis >gi|6573765|gb|AAF17685.1|AC009243_12 F28K19.22 [Arabidopsis
  misc_feature (1)..(585): Homolog of NCBI NO: 13487717 NR Description: sulfate transporter 2 [Lycopersicon esculentum]
  misc_feature (1)..(581): Homolog of NCBI NO: 14484936 NR Description: high affinity sulfate transporter [Lycopersicon
  misc_feature (1)..(581): Homolog of NCBI NO: 13487715 NR Description: sulfate transporter 1 [Lycopersicon esculentum]
  misc_feature (1)..(581): Homolog of NCBI NO: 11907976 NR Description: high affinity sulfate transporter type 1 [Solanum
  misc_feature (1)..(584): Homolog of NCBI NO: 16197732 NR Description: sulfate transporter [Brassica napus]
MLGIQSVFPVIEWGRKYNLKLFRGDLIAGLTIASLCIPQDIGYAKLASLDPKYGLYSSFVPPLVYACMGSSKDIAIGPVAVVSLLLGTLLRAEIDPNTNPNEYLRLAFTSTFFAGVTQAALGFFRLGFLIDFLSHAAVVGFMGGAAITIALQQLKGFLGINKFTKKTDIIAVLSSVISSAHHGWNWQTILISASFLIFLLISKFIGKRNKKLFWIPAIAPLVSVIISTFFVYITRADKKGVQIVKHLDKGLNPSSLRLIYFSGDYLLKGFRIGVVSGMVALTEAVAIGRTFAAMKDYQIDGNKEMVALGAMNVIGSMTSCYVSTGSFSRSAVNFMAGCQTAVSNIIMSIVVLLTLLFLTPLFKYTPNAILAAIIINAVIPLVDVNATILIFKIDKLDFVACMGAFFGVIFVSVEIGLLIAVGISFAKILLQVTRPRTAILGKIPGTSVYRNINQYPEATRIPGVLTIRVDSAIYFSNSNYVRERIQRWLTDEEEMVEAARLPRIQFLIIEMSPVTDIDTSGIHALEDLYKSLQKRDIQLVLANPGPPVINKLHVSHFADLIGHDKIFLTVAEAVDSCSPKLSDEV

SEQ ID NO: 82502 - DNA, 1477 bp, Arabidopsis thaliana
  misc_feature (1)..(1477): Ceres Seq. ID no. 12665994
  misc_feature: MA Experiment ID: 20000179 Result: Down-regulated in Transcription
  misc_feature: MA Experiment 20000179 PARAMETER Experiment Name: At_Germinating_Seeds_P Parameter: Age (hr) Value: 6 vs. 0
  misc_feature: MA Experiment 20000179 PARAMETER Experiment Name: At_Germinating_Seeds_P Parameter: Tissue Value: Germinating Seeds
  misc_feature: MA Experiment ID: 20000227 Result: Down-regulated in Transcription
  misc_feature: MA Experiment 20000227 PARAMETER Experiment Name: At_Root-Tips-vs-Tops_P Parameter: Tissue Value: Root Tips vs. Root Tops
  misc_feature: MA Experiment ID: 20000234 Result: Down-regulated in Transcription
  misc_feature: MA Experiment 20000234 PARAMETER Experiment Name: At_Siliques_P Parameter: Age (day) Value: 21
  misc_feature: MA Experiment 20000234 PARAMETER Experiment Name: At_Siliques_P Parameter: Organism Value: A. thaliana
  misc_feature: MA Experiment 20000234 PARAMETER Experiment Name: At_Siliques_P Parameter: Plant Line Value: WS
  misc_feature: MA Experiment 20000234 PARAMETER Experiment Name: At_Siliques_P Parameter: Tissue Value: Less Than 5mm Siliques vs. Whole Plant
  misc_feature: MA Experiment ID: 20000235 Result: Down-regulated in Transcription
  misc_feature: MA Experiment 20000235 PARAMETER Experiment Name: At_Siliques_P Parameter: Age (day) Value: 21
  misc_feature: MA Experiment 20000235 PARAMETER Experiment Name: At_Siliques_P Parameter: Organism Value: A. thaliana
  misc_feature: MA Experiment 20000235 PARAMETER Experiment Name: At_Siliques_P Parameter: Plant Line Value: WS
  misc_feature: MA Experiment 20000235 PARAMETER Experiment Name: At_Siliques_P Parameter: Tissue Value: 5-10mm Siliques vs. Whole Plant
  misc_feature: MA Experiment ID: 20000264 Result: Down-regulated in Transcription
  misc_feature: MA Experiment 20000264 PARAMETER Experiment Name: At_Open_Flower_P Parameter: Age (day) Value: 21
  misc_feature: MA Experiment 20000264 PARAMETER Experiment Name: At_Open_Flower_P Parameter: Plant Line Value: WS
  misc_feature: MA Experiment 20000264 PARAMETER Experiment Name: At_Open_Flower_P Parameter: Tissue Value: Open Flower vs. Whole Plant
  misc_feature: MA Experiment ID: 20000265 Result: Down-regulated in Transcription
  misc_feature: MA Experiment 20000265 PARAMETER Experiment Name: At_Open_Flower_P Parameter: Age (day) Value: 21
  misc_feature: MA Experiment 20000265 PARAMETER Experiment Name: At_Open_Flower_P Parameter: Plant Line Value: WS
  misc_feature: MA Experiment 20000265 PARAMETER Experiment Name: At_Open_Flower_P Parameter: Tissue Value: Closed Flower vs. Whole Plant
  misc_feature: MA Experiment ID: 20000286 Result: Down-regulated in Transcription
  misc_feature: MA Experiment 20000286 PARAMETER Experiment Name: At_Open_Flower_P Parameter: Age (day) Value: 21
  misc_feature: MA Experiment 20000286 PARAMETER Experiment Name: At_Open_Flower_P Parameter: Plant Line Value: WS
  misc_feature: MA Experiment 20000286 PARAMETER Experiment Name: At_Open_Flower_P Parameter: Tissue Value: Half Open vs. Whole Plant
  misc_feature: MA Experiment ID: 20000438 Result: Down-regulated in Transcription
  misc_feature: MA Experiment 20000438 PARAMETER Experiment Name: At_Shoots__P Parameter: Age (day) Value: 14
  misc_feature: MA Experiment 20000438 PARAMETER Experiment Name: At_Shoots__P Parameter: Tissue Value: Shoots vs. Whole Plant
  misc_feature: MA Experiment ID: 20000441 Result: Up-regulated in Transcription
  misc_feature: MA Experiment 20000441 PARAMETER Experiment Name: At_1uM_BR-BRZ__P Parameter: Tissue Value: Shoot Apices
  misc_feature: MA Experiment 20000441 PARAMETER Experiment Name: At_1uM_BR-BRZ__P Parameter: Treatment Value: 1uM BR vs. No Treatment
  misc_feature: MA Experiment ID: 20000527 Result: Up-regulated in Transcription
  misc_feature: MA Experiment 20000527 PARAMETER Experiment Name: At_10percent_PEG_P Parameter: Age (day) Value: 20
  misc_feature: MA Experiment 20000527 PARAMETER Experiment Name: At_10percent_PEG_P Parameter: Organism Value: A. thaliana
  misc_feature: MA Experiment 20000527 PARAMETER Experiment Name: At_10percent_PEG_P Parameter: Plant Line Value: WS
  misc_feature: MA Experiment 20000527 PARAMETER Experiment Name: At_10percent_PEG_P Parameter: Timepoint (day) Value: 20
  misc_feature: MA Experiment 20000527 PARAMETER Experiment Name: At_10percent_PEG_P Parameter: Tissue Value: Whole Plant
  misc_feature: MA Experiment 20000527 PARAMETER Experiment Name: At_10percent_PEG_P Parameter: Treatment Value: 10percent PEG vs. No Treatment
  misc_feature: MA Experiment ID: 20000573 Result: Down-regulated in Transcription
  misc_feature: MA Experiment 20000573 PARAMETER Experiment Name: At_100uM_ABA_Mutants__P Parameter: Organism Value: A. thaliana
  misc_feature: MA Experiment 20000573 PARAMETER Experiment Name: At_100uM_ABA_Mutants__P Parameter: Plant Line Value: CS22 vs. Ler wt
  misc_feature: MA Experiment 20000573 PARAMETER Experiment Name: At_100uM_ABA_Mutants__P Parameter: Timepoint (hr) Value: N/A
  misc_feature: MA Experiment 20000573 PARAMETER Experiment Name: At_100uM_ABA_Mutants__P Parameter: Tissue Value: Whole Plant
  misc_feature: MA Experiment 20000573 PARAMETER Experiment Name: At_100uM_ABA_Mutants__P Parameter: Treatment Value: None
  misc_feature: MA Experiment ID: 20000574 Result: Down-regulated in Transcription
  misc_feature: MA Experiment 20000574 PARAMETER Experiment Name: At_100uM_ABA_Mutants__P Parameter: Organism Value: A. thaliana
  misc_feature: MA Experiment 20000574 PARAMETER Experiment Name: At_100uM_ABA_Mutants__P Parameter: Plant Line Value: CS23 vs. Ler wt
  misc_feature: MA Experiment 20000574 PARAMETER Experiment Name: At_100uM_ABA_Mutants__P Parameter: Timepoint (hr) Value: N/A
  misc_feature: MA Experiment 20000574 PARAMETER Experiment Name: At_100uM_ABA_Mutants__P Parameter: Tissue Value: Whole Plant
  misc_feature: MA Experiment 20000574 PARAMETER Experiment Name: At_100uM_ABA_Mutants__P Parameter: Treatment Value: None
  misc_feature: MA Experiment ID: 20000794 Result: Down-regulated in Transcription
  misc_feature: MA Experiment 20000794 PARAMETER Experiment Name: At_Petals_P Parameter: Age (day) Value: 23-25 days
  misc_feature: MA Experiment 20000794 PARAMETER Experiment Name: At_Petals_P Parameter: Plant Line Value: WS
  misc_feature: MA Experiment 20000794 PARAMETER Experiment Name: At_Petals_P Parameter: Tissue Value: Petals vs. Whole plant
  misc_feature: MA Experiment ID: 20001247 Result: Up-regulated in Transcription
  misc_feature: MA Experiment 20001247 PARAMETER Experiment Name: At_Far-red-induction_P Parameter: Age (day) Value: 7
  misc_feature: MA Experiment 20001247 PARAMETER Experiment Name: At_Far-red-induction_P Parameter: Light Value: Far-red vs. White
  misc_feature: MA Experiment 20001247 PARAMETER Experiment Name: At_Far-red-induction_P Parameter: Organism Value: A. thaliana
  misc_feature: MA Experiment 20001247 PARAMETER Experiment Name: At_Far-red-induction_P Parameter: Plant Line Value: Columbia
  misc_feature: MA Experiment 20001247 PARAMETER Experiment Name: At_Far-red-induction_P Parameter: Timepoint (hr) Value: 1
  misc_feature: MA Experiment 20001247 PARAMETER Experiment Name: At_Far-red-induction_P Parameter: Tissue Value: Whole Plant
  misc_feature: MA Experiment ID: 20001451 Result: Up-regulated in Transcription
  misc_feature: MA Experiment 20001451 PARAMETER Experiment Name: At_Far-red-induction_P Parameter: Age (day) Value: 7
  misc_feature: MA Experiment 20001451 PARAMETER Experiment Name: At_Far-red-induction_P Parameter: Light Value: Far-red vs. White
  misc_feature: MA Experiment 20001451 PARAMETER Experiment Name: At_Far-red-induction_P Parameter: Organism Value: A. thaliana
  misc_feature: MA Experiment 20001451 PARAMETER Experiment Name: At_Far-red-induction_P Parameter: Plant Line Value: Columbia
  misc_feature: MA Experiment 20001451 PARAMETER Experiment Name: At_Far-red-induction_P Parameter: Timepoint (hr) Value: 24
  misc_feature: MA Experiment 20001451 PARAMETER Experiment Name: At_Far-red-induction_P Parameter: Tissue Value: Whole Plant
  misc_feature: MA Experiment ID: 20001905 Result: Up-regulated in Transcription
  misc_feature: MA Experiment 20001905 PARAMETER Experiment Name: At_Drought_Reproduction_P Parameter: Age (day) Value: 40
  misc_feature: MA Experiment 20001905 PARAMETER Experiment Name: At_Drought_Reproduction_P Parameter: Organism Value: A. thaliana
  misc_feature: MA Experiment 20001905 PARAMETER Experiment Name: At_Drought_Reproduction_P Parameter: Plant Line Value: WS
  misc_feature: MA Experiment 20001905 PARAMETER Experiment Name: At_Drought_Reproduction_P Parameter: Timepoint (day) Value: 10
  misc_feature: MA Experiment 20001905 PARAMETER Experiment Name: At_Drought_Reproduction_P Parameter: Tissue Value: Rosettes
  misc_feature: MA Experiment 20001905 PARAMETER Experiment Name: At_Drought_Reproduction_P Parameter: Treatment Value: Drought vs. No Drought
  misc_feature: MA Experiment ID: 20001906 Result: Up-regulated in Transcription
  misc_feature: MA Experiment 20001906 PARAMETER Experiment Name: At_Drought_Reproduction_P Parameter: Age (day) Value: 35
  misc_feature: MA Experiment 20001906 PARAMETER Experiment Name: At_Drought_Reproduction_P Parameter: Organism Value: A. thaliana
  misc_feature: MA Experiment 20001906 PARAMETER Experiment Name: At_Drought_Reproduction_P Parameter: Plant Line Value: WS
  misc_feature: MA Experiment 20001906 PARAMETER Experiment Name: At_Drought_Reproduction_P Parameter: Timepoint (day) Value: 5
  misc_feature: MA Experiment 20001906 PARAMETER Experiment Name: At_Drought_Reproduction_P Parameter: Tissue Value: Siliques
  misc_feature: MA Experiment 20001906 PARAMETER Experiment Name: At_Drought_Reproduction_P Parameter: Treatment Value: Drought vs. No Drought
  misc_feature: MA Experiment ID: 20001911 Result: Up-regulated in Transcription
  misc_feature: MA Experiment 20001911 PARAMETER Experiment Name: At_Drought_Reproduction_P Parameter: Age (day) Value: 40
  misc_feature: MA Experiment 20001911 PARAMETER Experiment Name: At_Drought_Reproduction_P Parameter: Organism Value: A. thaliana
  misc_feature: MA Experiment 20001911 PARAMETER Experiment Name: At_Drought_Reproduction_P Parameter: Plant Line Value: WS
  misc_feature: MA Experiment 20001911 PARAMETER Experiment Name: At_Drought_Reproduction_P Parameter: Timepoint (day) Value: 10
  misc_feature: MA Experiment 20001911 PARAMETER Experiment Name: At_Drought_Reproduction_P Parameter: Tissue Value: Flowers
  misc_feature: MA Experiment 20001911 PARAMETER Experiment Name: At_Drought_Reproduction_P Parameter: Treatment Value: Drought vs. No Drought
gtatcggtgaggctgagagttattcacttacaaaaaaaaaaaaaaacttgagtgtaaccaaaaaaaaaagttgatatactttctggttttctccttaacttttattctttacaaatccatcccccttagatctgtttatttcccgctactttgattcatttctgttagtaatctgtctttcgtatagaagaaaactgatttcttggtttgtattttcttaaagagatcaatctttttttatttttgatcttcttgtgtttttttttctttgtagaattaatcgtttgtgagggtatttttttaattccctcctctcagaaatctacacagaggttttttattttataaacctctttttcgattttcttgaaaacaaaaaatcctgttctttactttttttacaagaacaagggaaaaaaatttctttttattagaaatgacaacttctatggatttttacagtaacaaaacgtttcaacaatctgatccattcggtggtgaattaatggaagcgcttttaccttttatcaaaagcccttccaacgattcatccgcgtttgcgttctctctacccgctccaatttcatacgggtcggatctccactcattttctcaccatcttagtcctaaaccggtctcaatgaaacaaaccggtacttccgcggctaaaccgacgaagctatacagaggagtgagacaacgtcactggggaaaatgggtggctgagattcgtttaccgaggaatcgaactcgactttggctcggaacattcgacacggcggaggaagctgctttagcttatgacaaggcggcgtataagctccgaggagattttgcgcggcttaatttccctgatctccgtcataacgacgagtatcaacctcttcaatcatcagtcgacgctaagcttgaagctatttgtcaaaacttagctgagacgacgcagaaacaggtgagatcaacgaagaagtcttcttctcggaaacgttcatcaaccgtcgcagtgaaactaccggaggaggactactctagcgccggatcttcgccgctgttaacggagagttatggatctggtggatcttcttcgccgttgtcggagctgacgtttggtgatacggaggaggagattcagccgccgtggaacgagaacgcgttggagaagtatccgtcgtacgagatcgattgggattcgattcttcagtgttcgagtcttgtaaattagatgttgccataggggtattttagggactttagagctctctgcgatggagtttttggtcattgcagagattttattattattaagggggtttgttatgttaatatcaaataagtttatctactttgatgttaattagtgttaatctctgcgtcggtccaagctgtttttttttggcatgcttcgaccgtgtgagatttcttatgtaatttttgtagttccttgattttcttagttcaagttaaattggcacaaaag

SEQ ID NO: 82503 - protein, 261 aa, Arabidopsis thaliana
  peptide (1)..(261): Ceres Seq. ID no. 12665995
  misc_feature (80)..(144): Pfam Name: AP2 domain Pfam Description: AP2 domain
  misc_feature (1)..(261): Homolog of NCBI NO: 15219839 NR Description: AP2 domain transcription factor RAP2, putative; id: At1g22190.1, supported by cDNA: gi_15292782 [Arabidopsis
  misc_feature (7)..(254): Homolog of NCBI NO: 6573771 NR Description: F28K19.29 [Arabidopsis thaliana]
  misc_feature (7)..(254): Homolog of NCBI NO: 15218204 NR Description: AP2 domain protein RAP2.4; protein id: supported by cDNA: gi_13877778 [Arabidopsis thaliana]
  misc_feature (7)..(254): Homolog of NCBI NO: 13877779 NR Description: putative AP2 domain-containing protein
  misc_feature (48)..(254): Homolog of NCBI NO: 2281633 NR Description: AP2 domain containing protein RAP2.4 [Arabidopsis
  misc_feature (81)..(254): Homolog of NCBI NO: 12324244 NR Description: putative AP2 domain transcriptional regulator, 5'
  misc_feature (57)..(253): Homolog of NCBI NO: 27436378 NR Description: dehydration-responsive element binding protein 3
  misc_feature (1)..(254): Homolog of NCBI NO: 18400001 NR Description: AP2 domain transcription factor RAP2, putative; id: At1g36060.1 [Arabidopsis thaliana] >gi|25350213|pir||E86482
  misc_feature (42)..(207): Homolog of NCBI NO: 8571476 NR Description: apetala2 domain-containing protein [Atriplex
  misc_feature (4)..(257): Homolog of NCBI NO: 15236020 NR Description: AP2 domain transcription factor RAP2, putative; id: At4g39780.1 [Arabidopsis thaliana] >gi|7487213|pir||T05015
MTTSMDFYSNKTFQQSDPFGGELMEALLPFIKSPSNDSSAFAFSLPAPISYGSDLHSFSHHLSPKPVSMKQTGTSAAKPTKLYRGVRQRHWGKWVAEIRLPRNRTRLWLGTFDTAEEAALAYDKAAYKLRGDFARLNFPDLRHNDEYQPLQSSVDAKLEAICQNLAETTQKQVRSTKKSSSRKRSSTVAVKLPEEDYSSAGSSPLLTESYGSGGSSSPLSELTFGDTEEEIQPPWNENALEKYPSYEIDWDSILQCSSLVN

SEQ ID NO: 82504 - protein, 257 aa, Arabidopsis thaliana
  peptide (1)..(257): Ceres Seq. ID no. 12665996
  misc_feature (76)..(140): Pfam Name: AP2 domain Pfam Description: AP2 domain
  misc_feature (1)..(257): Homolog of NCBI NO: 15219839 NR Description: AP2 domain transcription factor RAP2, putative; id: At1g22190.1, supported by cDNA: gi_15292782 [Arabidopsis
  misc_feature (3)..(250): Homolog of NCBI NO: 6573771 NR Description: F28K19.29 [Arabidopsis thaliana]
  misc_feature (3)..(250): Homolog of NCBI NO: 15218204 NR Description: AP2 domain protein RAP2.4; protein id: supported by cDNA: gi_13877778 [Arabidopsis thaliana]
  misc_feature (3)..(250): Homolog of NCBI NO: 13877779 NR Description: putative AP2 domain-containing protein
  misc_feature (44)..(250): Homolog of NCBI NO: 2281633 NR Description: AP2 domain containing protein RAP2.4 [Arabidopsis
  misc_feature (77)..(250): Homolog of NCBI NO: 12324244 NR Description: putative AP2 domain transcriptional regulator, 5'
  misc_feature (53)..(249): Homolog of NCBI NO: 27436378 NR Description: dehydration-responsive element binding protein 3
  misc_feature (1)..(250): Homolog of NCBI NO: 18400001 NR Description: AP2 domain transcription factor RAP2, putative; id: At1g36060.1 [Arabidopsis thaliana] >gi|25350213|pir||E86482
  misc_feature (38)..(203): Homolog of NCBI NO: 8571476 NR Description: apetala2 domain-containing protein [Atriplex
  misc_feature (1)..(253): Homolog of NCBI NO: 15236020 NR Description: AP2 domain transcription factor RAP2, putative; id: At4g39780.1 [Arabidopsis thaliana] >gi|7487213|pir||T05015
MDFYSNKTFQQSDPFGGELMEALLPFIKSPSNDSSAFAFSLPAPISYGSDLHSFSHHLSPKPVSMKQTGTSAAKPTKLYRGVRQRHWGKWVAEIRLPRNRTRLWLGTFDTAEEAALAYDKAAYKLRGDFARLNFPDLRHNDEYQPLQSSVDAKLEAICQNLAETTQKQVRSTKKSSSRKRSSTVAVKLPEEDYSSAGSSPLLTESYGSGGSSSPLSELTFGDTEEEIQPPWNENALEKYPSYEIDWDSILQCSSLVN

SEQ ID NO: 82505 - protein, 238 aa, Arabidopsis thaliana
  peptide (1)..(238): Ceres Seq. ID no. 12665997
  misc_feature (57)..(121): Pfam Name: AP2 domain Pfam Description: AP2 domain
  misc_feature (1)..(238): Homolog of NCBI NO: 15219839 NR Description: AP2 domain transcription factor RAP2, putative; id: At1g22190.1, supported by cDNA: gi_15292782 [Arabidopsis
  misc_feature (1)..(231): Homolog of NCBI NO: 6573771 NR Description: F28K19.29 [Arabidopsis thaliana]
  misc_feature (1)..(231): Homolog of NCBI NO: 15218204 NR Description: AP2 domain protein RAP2.4; protein id: supported by cDNA: gi_13877778 [Arabidopsis thaliana]
  misc_feature (1)..(231): Homolog of NCBI NO: 13877779 NR Description: putative AP2 domain-containing protein
  misc_feature (25)..(231): Homolog of NCBI NO: 2281633 NR Description: AP2 domain containing protein RAP2.4 [Arabidopsis
  misc_feature (58)..(231): Homolog of NCBI NO: 12324244 NR Description: putative AP2 domain transcriptional regulator, 5'
  misc_feature (34)..(230): Homolog of NCBI NO: 27436378 NR Description: dehydration-responsive element binding protein 3
  misc_feature (1)..(231): Homolog of NCBI NO: 18400001 NR Description: AP2 domain transcription factor RAP2, putative; id: At1g36060.1 [Arabidopsis thaliana] >gi|25350213|pir||E86482
  misc_feature (19)..(184): Homolog of NCBI NO: 8571476 NR Description: apetala2 domain-containing protein [Atriplex
  misc_feature (1)..(234): Homolog of NCBI NO: 15236020 NR Description: AP2 domain transcription factor RAP2, putative; id: At4g39780.1 [Arabidopsis thaliana] >gi|7487213|pir||T05015
MEALLPFIKSPSNDSSAFAFSLPAPISYGSDLHSFSHHLSPKPVSMKQTGTSAAKPTKLYRGVRQRHWGKWVAEIRLPRNRTRLWLGTFDTAEEAALAYDKAAYKLRGDFARLNFPDLRHNDEYQPLQSSVDAKLEAICQNLAETTQKQVRSTKKSSSRKRSSTVAVKLPEEDYSSAGSSPLLTESYGSGGSSSPLSELTFGDTEEEIQPPWNENALEKYPSYEIDWDSILQCSSLVN

SEQ ID NO: 82506 - DNA, 945 bp, Arabidopsis thaliana
  misc_feature (1)..(945): Ceres Seq. ID no. 12666002
  misc_feature: MA Experiment ID: 20000306 Result: Up-regulated in Transcription
  misc_feature: MA Experiment 20000306 PARAMETER Experiment Name: At_Germinating_Seeds_Sub_P Parameter: Age (hr) Value: 6 vs. 0
  misc_feature: MA Experiment 20000306 PARAMETER Experiment Name: At_Germinating_Seeds_Sub_P Parameter: Organism Value: A. thaliana
  misc_feature: MA Experiment 20000306 PARAMETER Experiment Name: At_Germinating_Seeds_Sub_P Parameter: Plant Line Value: WS
  misc_feature: MA Experiment 20000306 PARAMETER Experiment Name: At_Germinating_Seeds_Sub_P Parameter: Tissue Value: Germinating Seeds
  misc_feature: MA Experiment ID: 20000307 Result: Up-regulated in Transcription
  misc_feature: MA Experiment 20000307 PARAMETER Experiment Name: At_Germinating_Seeds_Sub_P Parameter: Age (hr) Value: 24 vs. 0
  misc_feature: MA Experiment 20000307 PARAMETER Experiment Name: At_Germinating_Seeds_Sub_P Parameter: Organism Value: A. thaliana
  misc_feature: MA Experiment 20000307 PARAMETER Experiment Name: At_Germinating_Seeds_Sub_P Parameter: Plant Line Value: WS
  misc_feature: MA Experiment 20000307 PARAMETER Experiment Name: At_Germinating_Seeds_Sub_P Parameter: Tissue Value: Germinating Seeds
  misc_feature: MA Experiment ID: 20000314 Result: Up-regulated in Transcription
  misc_feature: MA Experiment 20000314 PARAMETER Experiment Name: At_14day_Shoots-Roots_Sub_P Parameter: Age (day) Value: 14
  misc_feature: MA Experiment 20000314 PARAMETER Experiment Name: At_14day_Shoots-Roots_Sub_P Parameter: Organism Value: A. thaliana
  misc_feature: MA Experiment 20000314 PARAMETER Experiment Name: At_14day_Shoots-Roots_Sub_P Parameter: Plant Line Value: WS
  misc_feature: MA Experiment 20000314 PARAMETER Experiment Name: At_14day_Shoots-Roots_Sub_P Parameter: Tissue Value: Roots vs. Whole Plant
  misc_feature: MA Experiment ID: 20000315 Result: Down-regulated in Transcription
  misc_feature: MA Experiment 20000315 PARAMETER Experiment Name: At_14day_Shoots-Roots_Sub_P Parameter: Age (day) Value: 14
  misc_feature: MA Experiment 20000315 PARAMETER Experiment Name: At_14day_Shoots-Roots_Sub_P Parameter: Organism Value: A. thaliana
  misc_feature: MA Experiment 20000315 PARAMETER Experiment Name: At_14day_Shoots-Roots_Sub_P Parameter: Plant Line Value: WS
  misc_feature: MA Experiment 20000315 PARAMETER Experiment Name: At_14day_Shoots-Roots_Sub_P Parameter: Tissue Value: Shoots vs. Whole Plant
  misc_feature: MA Experiment ID: 20000440 Result: Down-regulated in Transcription
  misc_feature: MA Experiment 20000440 PARAMETER Experiment Name: At_Closed-Flower__Sub_P Parameter: Tissue Value: Closed Flower vs. Whole Plant
atggacgtttttgatggacttcctgacccgatcatcgtcgacatcttgaacaaagtcggtgacgtcaaaaccttacttcgatgcagctctctttcaaaaagatttaactcgcttgtccctcagtctgagtcactcaccctccgactcgaccactcagtatccgattcacccgtcgtcacaagcattttccgatctttattcaacggtctagtttctcttttatccaaaccggctaaaccaatcacaataaccaccctctctccgagtctccccttcaagattctctcccggttcgaccggattcgaaatctggacgtagagcttcccggcggcgatgtaaagctcgagaaaggtgcagccgttaagtggaaagctgagtttgggaaaacactcaaaagctgcgtcatcgtcgcgttccgttccgccggtaccgtgtcttctcccgtcgccgtagaaggtgagtcagacgccgagttcgtgactggactgaagacgcgcgtggtgtggactataagcgcgttgatggctgcttcgtctcgtcattacttgatgagagaagtcgtgaaggagcatgaggagatagaaagtttagttatgcgtgacaaagaaagagaagggacggtggtgatgaacgaggaagggcttaaagagttaagaaatacggaggcgcgtgtggaagacgaggagcgcgtggtaaaaaataagaggagtgttgtcccgagcgtgaggatgagtatgagacacgcgccgtctcttaaacttaagagtggtatctgtttagaatctgctacgcttgtgattgttcgaccgagcggagcggattttgaagttggagatgatgctgagttggcgacggaggctttcgtcggagattgtatgtacggtgaagcggtcgtcgctttgttaaagtgcaagaagaacgctttagagatgaattcgttttaa

SEQ ID NO: 82507 - protein, 314 aa, Arabidopsis thaliana
  peptide (1)..(314): Ceres Seq. ID no. 12666003
  misc_feature (1)..(314): Homolog of NCBI NO: 15219845 NR Description: hypothetical protein; protein id: At1g22220.1
  misc_feature (27)..(314): Homolog of NCBI NO: 18411823 NR Description: expressed protein; protein id: At1g78100.1, by cDNA: gi_15450975, supported by cDNA: gi_20148730 [Arabidopsis
  misc_feature (91)..(314): Homolog of NCBI NO: 15236865 NR Description: hypothetical protein; protein id: At4g18380.1
  misc_feature (1)..(55): Homolog of NCBI NO: 15236865 NR Description: hypothetical protein; protein id: At4g18380.1
  misc_feature (153)..(314): Homolog of NCBI NO: 15237391 NR Description: putative protein; protein id: At5g46170.1, by cDNA: gi_17979206 [Arabidopsis thaliana] gene_id:MCL19.23~pir||T04534~strong similarity to unknown protein
  misc_feature (91)..(160): Homolog of NCBI NO: 15237391 NR Description: putative protein; protein id: At5g46170.1, by cDNA: gi_17979206 [Arabidopsis thaliana] gene_id:MCL19.23~pir||T04534~strong similarity to unknown protein
  misc_feature (1)..(55): Homolog of NCBI NO: 15237391 NR Description: putative protein; protein id: At5g46170.1, by cDNA: gi_17979206 [Arabidopsis thaliana] gene_id:MCL19.23~pir||T04534~strong similarity to unknown protein
  misc_feature (86)..(312): Homolog of NCBI NO: 34909194 NR Description: P0425G02.20 [Oryza sativa (japonica
  misc_feature (2)..(54): Homolog of NCBI NO: 34909194 NR Description: P0425G02.20 [Oryza sativa (japonica
  misc_feature (91)..(314): Homolog of NCBI NO: 18397400 NR Description: expressed protein; protein id: At1g30200.1, by cDNA: gi_14335117, supported by cDNA: gi_16604496 [Arabidopsis
MDVFDGLPDPIIVDILNKVGDVKTLLRCSSLSKRFNSLVPQSESLTLRLDHSVSDSPVVTSIFRSLFNGLVSLLSKPAKPITITTLSPSLPFKILSRFDRIRNLDVELPGGDVKLEKGAAVKWKAEFGKTLKSCVIVAFRSAGTVSSPVAVEGESDAEFVTGLKTRVVWTISALMAASSRHYLMREVVKEHEEIESLVMRDKEREGTVVMNEEGLKELRNTEARVEDEERVVKNKRSVVPSVRMSMRHAPSLKLKSGICLESATLVIVRPSGADFEVGDDAELATEAFVGDCMYGEAVVALLKCKKNALEMNSF

SEQ ID NO: 82508 - DNA, 429 bp, Arabidopsis thaliana
  misc_feature (1)..(429): Ceres Seq. ID no. 12666008
  misc_feature: MA Experiment ID: 20000180 Result: Up-regulated in Transcription
  misc_feature: MA Experiment 20000180 PARAMETER Experiment Name: At_Germinating_Seeds_P Parameter: Age (hr) Value: 24 vs. 0
  misc_feature: MA Experiment 20000180 PARAMETER Experiment Name: At_Germinating_Seeds_P Parameter: Tissue Value: Germinating Seeds
  misc_feature: MA Experiment ID: 20000185 Result: Down-regulated in Transcription
  misc_feature: MA Experiment 20000185 PARAMETER Experiment Name: At_Roots__P Parameter: Age (day) Value: 7 vs. 21
  misc_feature: MA Experiment 20000185 PARAMETER Experiment Name: At_Roots__P Parameter: Organism Value: A. thaliana
  misc_feature: MA Experiment 20000185 PARAMETER Experiment Name: At_Roots__P Parameter: Tissue Value: Roots vs. Whole Plant
  misc_feature: MA Experiment ID: 20000265 Result: Up-regulated in Transcription
  misc_feature: MA Experiment 20000265 PARAMETER Experiment Name: At_Open_Flower_P Parameter: Age (day) Value: 21
  misc_feature: MA Experiment 20000265 PARAMETER Experiment Name: At_Open_Flower_P Parameter: Plant Line Value: WS
  misc_feature: MA Experiment 20000265 PARAMETER Experiment Name: At_Open_Flower_P Parameter: Tissue Value: Closed Flower vs. Whole Plant
  misc_feature: MA Experiment ID: 20000288 Result: Up-regulated in Transcription
  misc_feature: MA Experiment 20000288 PARAMETER Experiment Name: At_Drought_P Parameter: Age (day) Value: 7
  misc_feature: MA Experiment 20000288 PARAMETER Experiment Name: At_Drought_P Parameter: Organism Value: A. thaliana
  misc_feature: MA Experiment 20000288 PARAMETER Experiment Name: At_Drought_P Parameter: Plant Line Value: WS
  misc_feature: MA Experiment 20000288 PARAMETER Experiment Name: At_Drought_P Parameter: Timepoint (hr) Value: 1
  misc_feature: MA Experiment 20000288 PARAMETER Experiment Name: At_Drought_P Parameter: Tissue Value: Whole Plant
  misc_feature: MA Experiment 20000288 PARAMETER Experiment Name: At_Drought_P Parameter: Treatment Value: Drought vs. No Drought
  misc_feature: MA Experiment ID: 20000439 Result: Down-regulated in Transcription
  misc_feature: MA Experiment 20000439 PARAMETER Experiment Name: At_Roots__P Parameter: Age (day) Value: 14 vs. 21
  misc_feature: MA Experiment 20000439 PARAMETER Experiment Name: At_Roots__P Parameter: Organism Value: A. thaliana
  misc_feature: MA Experiment 20000439 PARAMETER Experiment Name: At_Roots__P Parameter: Tissue Value: Roots vs. Whole Plant
atgttgataaagcctgatgttcagcttcacctagaggctaagacccaatcagagacatttgaagatcataggacagacctggaccttaatttgaacctttattcgtcatcaagttcctctgtcaaaaaaacaatcatggagaaagatgaatgttccaaaggcggaactgtgatcatcagcccaagtaagaaggtgagatcaggtgatatagggctaagtcgatccccgtcttggctagcgtttgaaggtgatgatgatgataatcagaagaagcaagagatgataacaacagtgtgcatgaagtgtcacatgctggttatgctctgcaaatctactcttgtctgtcctaactgcaaattcatgcaccatgatgatcatagctccactaaacagtttcagactttaaatttgtttaagctcttatgctag

SEQ ID NO: 82509 - protein, 142 aa, Arabidopsis thaliana
  peptide (1)..(142): Ceres Seq. ID no. 12666009
  misc_feature (1)..(142): Homolog of NCBI NO: 30687784 NR Description: expressed protein [Arabidopsis thaliana]
  misc_feature (6)..(142): Homolog of NCBI NO: 25372722 NR Description: unknown protein T11I11.11 [imported] -
  misc_feature (20)..(142): Homolog of NCBI NO: 30699311 NR Description: expressed protein [Arabidopsis thaliana] unknown protein [Arabidopsis thaliana]
  misc_feature (18)..(128): Homolog of NCBI NO: 15236641 NR Description: hypothetical protein; protein id: At4g08910.1
MLIKPDVQLHLEAKTQSETFEDHRTDLDLNLNLYSSSSSSVKKTIMEKDECSKGGTVIISPSKKVRSGDIGLSRSPSWLAFEGDDDDNQKKQEMITTVCMKCHMLVMLCKSTLVCPNCKFMHHDDHSSTKQFQTLNLFKLLC

SEQ ID NO: 82510 - protein, 97 aa, Arabidopsis thaliana
  peptide (1)..(97): Ceres Seq. ID no. 12666010
  misc_feature (1)..(97): Homolog of NCBI NO: 30687784 NR Description: expressed protein [Arabidopsis thaliana]
  misc_feature (1)..(97): Homolog of NCBI NO: 25372722 NR Description: unknown protein T11I11.11 [imported] -
  misc_feature (1)..(97): Homolog of NCBI NO: 30699311 NR Description: expressed protein [Arabidopsis thaliana] unknown protein [Arabidopsis thaliana]
  misc_feature (1)..(83): Homolog of NCBI NO: 15236641 NR Description: hypothetical protein; protein id: At4g08910.1
MEKDECSKGGTVIISPSKKVRSGDIGLSRSPSWLAFEGDDDDNQKKQEMITTVCMKCHMLVMLCKSTLVCPNCKFMHHDDHSSTKQFQTLNLFKLLC

SEQ ID NO: 82511 - DNA, 1464 bp, Arabidopsis thaliana
  misc_feature (1)..(1464): Ceres Seq. ID no. 12666026
  misc_feature: MA Experiment ID: 20000180 Result: Down-regulated in Transcription
  misc_feature: MA Experiment 20000180 PARAMETER Experiment Name: At_Germinating_Seeds_P Parameter: Age (hr) Value: 24 vs. 0
  misc_feature: MA Experiment 20000180 PARAMETER Experiment Name: At_Germinating_Seeds_P Parameter: Tissue Value: Germinating Seeds
  misc_feature: MA Experiment ID: 20001904 Result: Up-regulated in Transcription
  misc_feature: MA Experiment 20001904 PARAMETER Experiment Name: At_Drought_Reproduction_P Parameter: Age (day) Value: 37
  misc_feature: MA Experiment 20001904 PARAMETER Experiment Name: At_Drought_Reproduction_P Parameter: Organism Value: A. thaliana
  misc_feature: MA Experiment 20001904 PARAMETER Experiment Name: At_Drought_Reproduction_P Parameter: Plant Line Value: WS
  misc_feature: MA Experiment 20001904 PARAMETER Experiment Name: At_Drought_Reproduction_P Parameter: Timepoint (day) Value: 7
  misc_feature: MA Experiment 20001904 PARAMETER Experiment Name: At_Drought_Reproduction_P Parameter: Tissue Value: Rosettes
  misc_feature: MA Experiment 20001904 PARAMETER Experiment Name: At_Drought_Reproduction_P Parameter: Treatment Value: Drought vs. No Drought
  misc_feature: MA Experiment ID: 20001905 Result: Up-regulated in Transcription
  misc_feature: MA Experiment 20001905 PARAMETER Experiment Name: At_Drought_Reproduction_P Parameter: Age (day) Value: 40
  misc_feature: MA Experiment 20001905 PARAMETER Experiment Name: At_Drought_Reproduction_P Parameter: Organism Value: A. thaliana
  misc_feature: MA Experiment 20001905 PARAMETER Experiment Name: At_Drought_Reproduction_P Parameter: Plant Line Value: WS
  misc_feature: MA Experiment 20001905 PARAMETER Experiment Name: At_Drought_Reproduction_P Parameter: Timepoint (day) Value: 10
  misc_feature: MA Experiment 20001905 PARAMETER Experiment Name: At_Drought_Reproduction_P Parameter: Tissue Value: Rosettes
  misc_feature: MA Experiment 20001905 PARAMETER Experiment Name: At_Drought_Reproduction_P Parameter: Treatment Value: Drought vs. No Drought
atggaatctcatgttgttcataacgcacaaaagccacacgtagtttgcgtgccttacccggctcaaggccacatcaatccgatgctgaaagtggctaaactcctctacgctaaaggctttcacgtcaccttcgttaacactctctacaaccacaaccgtctcctccggtcccgtggtcccaacgcgctcgacgggtttccttcattccggttcgagtccatccctgacggtctaccggagactgatggcgataggacgcagcatactcctaccgtttgcatgtccattgagaaaaactgtctcgctccattcaaagagattctgcgccggatcaacgataaagatgatgttcctccagtgagttgtattgtatcggacggtgtgatgagttttactcttgacgcagccgaggaactaggtgtcccagaggttattttttggaccaatagtgcttgtggtttcatgactattctacacttttatcttttcatcgagaagggtctatctccttttaaagacgaaagttacatgtcaaaggagcatctagacacagttatagattggataccatcaatgaagaatcttaggttaaaggacatccctagctatatacgtaccacaaatcctgacaacataatgcttaatttcctcattcgagaagttgagcgatctaaacgcgctagtgctatcattctcaacacgtttgatgaactcgagcatgatgttatccagtctatgcaatctattttacctccggtttattctattgggccactccatctccttgtgaaggaagaaataaacgaggctagtgaaataggacagatgggattaaatttgtggagagaggagatggaatgtttggattggctcgatacaaaaactccaaacagtgttctttttgttaactttggatgcataacggtgatgagtgcaaaacagcttgaagaatttgcttggggtttggcggcaagtaggaaagagtttttatgggtgatccgtcctaatttagtggtgggagaggcgatggtggttcttccacaagagtttttagcggagacgatagaccggagaatgttagctagttggtgtcctcaggagaaagttctttctcatcccgcgataggagggttcttgacgcattgcgggtggaactcaacattggagagtctcgctggtggtgttccgatgatatgttggccatgtttttcggagcaaccgacgaattgtaagttttgttgtgatgagtggggagtgggtatagagattggtaaagatgtgaagagagaggaggtcgagacggtggttagagaacttatggatggagaaaaggggaaaaagctgagagaaaaggcggaagagtggcggcggttggccgaggaagcgacgaggtataaacatggttcgtcggtcatgaatcttgagacgcttatacataaagttttcttagaaaatcttagatga

SEQ ID NO: 82512 - protein, 487 aa, Arabidopsis thaliana
  peptide (1)..(487): Ceres Seq. ID no. 12666027
  misc_feature (12)..(485): Pfam Name: UDP-glucoronosyl and UDP-glucosyl transferase Pfam Description: UDP-glucoronosyl and UDP-glucosyl transferase
  misc_feature (1)..(487): Homolog of NCBI NO: 15219867 NR Description: UDP-glucose glucosyltransferase, putative;
  misc_feature (1)..(483): Homolog of NCBI NO: 15219870 NR Description: UDP-glucose glucosyltransferase; protein id: supported by cDNA: gi_12083243, supported by cDNA: gi_17065005,
  misc_feature (1)..(483): Homolog of NCBI NO: 17065006 NR Description: UDP-glucose glucosyltransferase [Arabidopsis
  misc_feature (1)..(483): Homolog of NCBI NO: 15219876 NR Description: UDP-glucose glucosyltransferase, putative; id: At1g22400.1, supported by cDNA: gi_19698984 [Arabidopsis
  misc_feature (1)..(483): Homolog of NCBI NO: 25286821 NR Description: T16E15.2 protein - Arabidopsis thaliana
  misc_feature (227)..(483): Homolog of NCBI NO: 25286822 NR Description: hypothetical protein T16E15.4 - Arabidopsis
  misc_feature (1)..(184): Homolog of NCBI NO: 25286822 NR Description: hypothetical protein T16E15.4 - Arabidopsis
  misc_feature (1)..(398): Homolog of NCBI NO: 15220950 NR Description: UDP-glucose glucosyltransferase, putative;
  misc_feature (419)..(483): Homolog of NCBI NO: 15220950 NR Description: UDP-glucose glucosyltransferase, putative;
  misc_feature (1)..(481): Homolog of NCBI NO: 15218268 NR Description: UDP-glucose glucosyltransferase, putative; id: At1g78270.1, supported by cDNA: gi_20466351 [Arabidopsis >gi|8052539|gb|AAF71803.1|AC013430_12 F3F9.19 [Arabidopsis
MESHVVHNAQKPHVVCVPYPAQGHINPMLKVAKLLYAKGFHVTFVNTLYNHNRLLRSRGPNALDGFPSFRFESIPDGLPETDGDRTQHTPTVCMSIEKNCLAPFKEILRRINDKDDVPPVSCIVSDGVMSFTLDAAEELGVPEVIFWTNSACGFMTILHFYLFIEKGLSPFKDESYMSKEHLDTVIDWIPSMKNLRLKDIPSYIRTTNPDNIMLNFLIREVERSKRASAIILNTFDELEHDVIQSMQSILPPVYSIGPLHLLVKEEINEASEIGQMGLNLWREEMECLDWLDTKTPNSVLFVNFGCITVMSAKQLEEFAWGLAASRKEFLWVIRPNLVVGEAMVVLPQEFLAETIDRRMLASWCPQEKVLSHPAIGGFLTHCGWNSTLESLAGGVPMICWPCFSEQPTNCKFCCDEWGVGIEIGKDVKREEVETVVRELMDGEKGKKLREKAEEWRRLAEEATRYKHGSSVMNLETLIHKVFLENLR

SEQ ID NO: 82513 - protein, 460 aa, Arabidopsis thaliana
  peptide (1)..(460): Ceres Seq. ID no. 12666028
  misc_feature (1)..(458): Pfam Name: UDP-glucoronosyl and UDP-glucosyl transferase Pfam Description: UDP-glucoronosyl and UDP-glucosyl transferase
  misc_feature (1)..(460): Homolog of NCBI NO: 15219867 NR Description: UDP-glucose glucosyltransferase, putative;
  misc_feature (1)..(456): Homolog of NCBI NO: 15219870 NR Description: UDP-glucose glucosyltransferase; protein id: supported by cDNA: gi_12083243, supported by cDNA: gi_17065005,
  misc_feature (1)..(456): Homolog of NCBI NO: 17065006 NR Description: UDP-glucose glucosyltransferase [Arabidopsis
  misc_feature (1)..(456): Homolog of NCBI NO: 15219876 NR Description: UDP-glucose glucosyltransferase, putative; id: At1g22400.1, supported by cDNA: gi_19698984 [Arabidopsis
  misc_feature (1)..(456): Homolog of NCBI NO: 25286821 NR Description: T16E15.2 protein - Arabidopsis thaliana
  misc_feature (200)..(456): Homolog of NCBI NO: 25286822 NR Description: hypothetical protein T16E15.4 - Arabidopsis
  misc_feature (1)..(157): Homolog of NCBI NO: 25286822 NR Description: hypothetical protein T16E15.4 - Arabidopsis
  misc_feature (1)..(371): Homolog of NCBI NO: 15220950 NR Description: UDP-glucose glucosyltransferase, putative;
  misc_feature (392)..(456): Homolog of NCBI NO: 15220950 NR Description: UDP-glucose glucosyltransferase, putative;
  misc_feature (1)..(454): Homolog of NCBI NO: 15218268 NR Description: UDP-glucose glucosyltransferase, putative; id: At1g78270.1, supported by cDNA: gi_20466351 [Arabidopsis >gi|8052539|gb|AAF71803.1|AC013430_12 F3F9.19 [Arabidopsis
MLKVAKLLYAKGFHVTFVNTLYNHNRLLRSRGPNALDGFPSFRFESIPDGLPETDGDRTQHTPTVCMSIEKNCLAPFKEILRRINDKDDVPPVSCIVSDGVMSFTLDAAEELGVPEVIFWTNSACGFMTILHFYLFIEKGLSPFKDESYMSKEHLDTVIDWIPSMKNLRLKDIPSYIRTTNPDNIMLNFLIREVERSKRASAIILNTFDELEHDVIQSMQSILPPVYSIGPLHLLVKEEINEASEIGQMGLNLWREEMECLDWLDTKTPNSVLFVNFGCITVMSAKQLEEFAWGLAASRKEFLWVIRPNLVVGEAMVVLPQEFLAETIDRRMLASWCPQEKVLSHPAIGGFLTHCGWNSTLESLAGGVPMICWPCFSEQPTNCKFCCDEWGVGIEIGKDVKREEVETVVRELMDGEKGKKLREKAEEWRRLAEEATRYKHGSSVMNLETLIHKVFLENLR

SEQ ID NO: 82514 - protein, 394 aa, Arabidopsis thaliana
  peptide (1)..(394): Ceres Seq. ID no. 12666029
  misc_feature (1)..(392): Pfam Name: UDP-glucoronosyl and UDP-glucosyl transferase Pfam Description: UDP-glucoronosyl and UDP-glucosyl transferase
  misc_feature (1)..(394): Homolog of NCBI NO: 15219867 NR Description: UDP-glucose glucosyltransferase, putative;
  misc_feature (1)..(390): Homolog of NCBI NO: 15219870 NR Description: UDP-glucose glucosyltransferase; protein id: supported by cDNA: gi_12083243, supported by cDNA: gi_17065005,
  misc_feature (1)..(390): Homolog of NCBI NO: 17065006 NR Description: UDP-glucose glucosyltransferase [Arabidopsis
  misc_feature (1)..(390): Homolog of NCBI NO: 15219876 NR Description: UDP-glucose glucosyltransferase, putative; id: At1g22400.1, supported by cDNA: gi_19698984 [Arabidopsis
  misc_feature (1)..(390): Homolog of NCBI NO: 25286821 NR Description: T16E15.2 protein - Arabidopsis thaliana
  misc_feature (134)..(390): Homolog of NCBI NO: 25286822 NR Description: hypothetical protein T16E15.4 - Arabidopsis
  misc_feature (1)..(91): Homolog of NCBI NO: 25286822 NR Description: hypothetical protein T16E15.4 - Arabidopsis
  misc_feature (1)..(305): Homolog of NCBI NO: 15220950 NR Description: UDP-glucose glucosyltransferase, putative;
  misc_feature (326)..(390): Homolog of NCBI NO: 15220950 NR Description: UDP-glucose glucosyltransferase, putative;
  misc_feature (1)..(388): Homolog of NCBI NO: 15218268 NR Description: UDP-glucose glucosyltransferase, putative; id: At1g78270.1, supported by cDNA: gi_20466351 [Arabidopsis >gi|8052539|gb|AAF71803.1|AC013430_12 F3F9.19 [Arabidopsis
MSIEKNCLAPFKEILRRINDKDDVPPVSCIVSDGVMSFTLDAAEELGVPEVIFWTNSACGFMTILHFYLFIEKGLSPFKDESYMSKEHLDTVIDWIPSMKNLRLKDIPSYIRTTNPDNIMLNFLIREVERSKRASAIILNTFDELEHDVIQSMQSILPPVYSIGPLHLLVKEEINEASEIGQMGLNLWREEMECLDWLDTKTPNSVLFVNFGCITVMSAKQLEEFAWGLAASRKEFLWVIRPNLVVGEAMVVLPQEFLAETIDRRMLASWCPQEKVLSHPAIGGFLTHCGWNSTLESLAGGVPMICWPCFSEQPTNCKFCCDEWGVGIEIGKDVKREEVETVVRELMDGEKGKKLREKAEEWRRLAEEATRYKHGSSVMNLETLIHKVFLENLR

SEQ ID NO: 82515 - DNA, 1249 bp, Arabidopsis thaliana
  misc_feature (1)..(1249): Ceres Seq. ID no. 12666030
  misc_feature: MA Experiment ID: 20000327 Result: Down-regulated in Transcription
  misc_feature: MA Experiment 20000327 PARAMETER Experiment Name: At_42deg_Heat_Sub_P Parameter: Age (day) Value: 14
  misc_feature: MA Experiment 20000327 PARAMETER Experiment Name: At_42deg_Heat_Sub_P Parameter: Organism Value: A. thaliana
  misc_feature: MA Experiment 20000327 PARAMETER Experiment Name: At_42deg_Heat_Sub_P Parameter: Plant Line Value: WS
  misc_feature: MA Experiment 20000327 PARAMETER Experiment Name: At_42deg_Heat_Sub_P Parameter: Temperature (deg C) Value: 42 vs. 22
  misc_feature: MA Experiment 20000327 PARAMETER Experiment Name: At_42deg_Heat_Sub_P Parameter: Timepoint (hr) Value: 1
  misc_feature: MA Experiment 20000327 PARAMETER Experiment Name: At_42deg_Heat_Sub_P Parameter: Tissue Value: Aerial
  misc_feature: MA Experiment ID: 20000328 Result: Down-regulated in Transcription
  misc_feature: MA Experiment 20000328 PARAMETER Experiment Name: At_42deg_Heat_Sub_P Parameter: Age (day) Value: 14
  misc_feature: MA Experiment 20000328 PARAMETER Experiment Name: At_42deg_Heat_Sub_P Parameter: Organism Value: A. thaliana
  misc_feature: MA Experiment 20000328 PARAMETER Experiment Name: At_42deg_Heat_Sub_P Parameter: Plant Line Value: WS
  misc_feature: MA Experiment 20000328 PARAMETER Experiment Name: At_42deg_Heat_Sub_P Parameter: Temperature (deg C) Value: 42 vs. 22
  misc_feature: MA Experiment 20000328 PARAMETER Experiment Name: At_42deg_Heat_Sub_P Parameter: Timepoint (hr) Value: 6
  misc_feature: MA Experiment 20000328 PARAMETER Experiment Name: At_42deg_Heat_Sub_P Parameter: Tissue Value: Aerial
  misc_feature: MA Experiment ID: 20000349 Result: Up-regulated in Transcription
  misc_feature: MA Experiment 20000349 PARAMETER Experiment Name: At_100uM_ABA_Sub_P Parameter: Age (day) Value: 14
  misc_feature: MA Experiment 20000349 PARAMETER Experiment Name: At_100uM_ABA_Sub_P Parameter: Organism Value: A. thaliana
  misc_feature: MA Experiment 20000349 PARAMETER Experiment Name: At_100uM_ABA_Sub_P Parameter: Plant Line Value: WS
  misc_feature: MA Experiment 20000349 PARAMETER Experiment Name: At_100uM_ABA_Sub_P Parameter: Timepoint (hr) Value: 6
  misc_feature: MA Experiment 20000349 PARAMETER Experiment Name: At_100uM_ABA_Sub_P Parameter: Tissue Value: Aerial
  misc_feature: MA Experiment 20000349 PARAMETER Experiment Name: At_100uM_ABA_Sub_P Parameter: Treatment Value: 100uM ABA vs. No Treatment
  misc_feature: MA Experiment ID: 20000352 Result: Up-regulated in Transcription
  misc_feature: MA Experiment 20000352 PARAMETER Experiment Name: At_Drought_Sub_P Parameter: Age (day) Value: 7
  misc_feature: MA Experiment 20000352 PARAMETER Experiment Name: At_Drought_Sub_P Parameter: Organism Value: A. thaliana
  misc_feature: MA Experiment 20000352 PARAMETER Experiment Name: At_Drought_Sub_P Parameter: Plant Line Value: WS
  misc_feature: MA Experiment 20000352 PARAMETER Experiment Name: At_Drought_Sub_P Parameter: Timepoint (hr) Value: 6
  misc_feature: MA Experiment 20000352 PARAMETER Experiment Name: At_Drought_Sub_P Parameter: Tissue Value: Whole Plant
  misc_feature: MA Experiment 20000352 PARAMETER Experiment Name: At_Drought_Sub_P Parameter: Treatment Value: Drought vs. No Drought
  misc_feature: MA Experiment ID: 20000355 Result: Down-regulated in Transcription
  misc_feature: MA Experiment 20000355 PARAMETER Experiment Name: At_Siliques_Sub_P Parameter: Age (day) Value: 21
  misc_feature: MA Experiment 20000355 PARAMETER Experiment Name: At_Siliques_Sub_P Parameter: Organism Value: A. thaliana
  misc_feature: MA Experiment 20000355 PARAMETER Experiment Name: At_Siliques_Sub_P Parameter: Plant Line Value: WS
  misc_feature: MA Experiment 20000355 PARAMETER Experiment Name: At_Siliques_Sub_P Parameter: Tissue Value: Less Than 5mm Siliques vs. Whole Plant
  misc_feature: MA Experiment ID: 20001807 Result: Down-regulated in Transcription
  misc_feature: MA Experiment 20001807 PARAMETER Experiment Name: At_50mM_NH4NO3_L-to-H_Sub_P Parameter: Timepoint (hr) Value: 6
  misc_feature: MA Experiment 20001807 PARAMETER Experiment Name: At_50mM_NH4NO3_L-to-H_Sub_P Parameter: Tissue Value: Leaf
  misc_feature: MA Experiment 20001807 PARAMETER Experiment Name: At_50mM_NH4NO3_L-to-H_Sub_P Parameter: Treatment Value: 50mM NH4NO3 vs 100mM Mannitol
tacctataatacagatacgtaagaagtaccgtcgtctaggcctttttctgtcattgttagggcgaccaagaataactcatccttactctgaaattaatctatagtattaattgatcaaaattaaatgcatcaaaaatttgcatataatacggtgcttgaatgtttttatagtaaatattgagatataaaattatacttataaaatggaagtggattatggcagatgaaagttctttggacacaaaaataaattggataccatcgatgaaaaacctaggacttaaagacatcccaagctttatccgtgcaactaatactgaagacataatgcttaacttttttgtccatgaggctgaccgagccaaacgcgcttccgctatcattctcaacacattcgatagtcttgagcatgatgtcgtccgttctattcaatctatcatacctcaagtgtacactattggaccgcttcatctatttgtgaatcgggatatcgacgaggaaagtgacatcggacagataggaacgaatatgtggagagaggagatggagtgtttggattggcttgatactaagtctccaaacagtgtcgtttatgttaatttcggtagcataacagtgatgagtgcgaaacaactcgtggagtttgcttggggtttagcagcgaccaaaaaagattttttgtgggtgattaggccggatttagtagccggtgatgtgccaatgcttccgccggactttctaatagagacggctaaccgaaggatgctagcgagttggtgtcctcaagaaaaagttctttctcatccggcagttggagggttcttaacgcatagtggatggaattcgactttggagagtctctccggtggagttccaatggtgtgttggccgttctttgcggaacagcaaacaaattgtaaatattgttgtgatgaatgggaagtggggatggagatcggtggagatgtgaggagggaggaggttgaggagttggttagagaactcatggacggagacaaaggaaagaaaatgaggcaaaaggccgaagagtggcagcgcttggctgaggaagcgacgaagcctatttatggttcgtcggaactaaattttcagatggtcgttgacaaggttcttttaggggagtagagagactacaatttattttagatatgatcgttacaaaattatgttatgtattgaaatttaataaagtgttatcatatatataatgatgaacaagtatctgttt

SEQ ID NO: 82516 - protein, 309 aa, Arabidopsis thaliana
  peptide (1)..(309): Ceres Seq. ID no. 12666031
  misc_feature (3)..(309): Pfam Name: UDP-glucoronosyl and UDP-glucosyl transferase Pfam Description: UDP-glucoronosyl and UDP-glucosyl transferase
  misc_feature (1)..(309): Homolog of NCBI NO: 18395112 NR Description: UDP-glucose glucosyltransferase, putative; id: At1g22370.1, supported by cDNA: gi_14532545, supported by gi_18655386 [Arabidopsis thaliana] >gi|14532546|gb|AAK64001.1|
  misc_feature (3)..(309): Homolog of NCBI NO: 25286821 NR Description: T16E15.2 protein - Arabidopsis thaliana
  misc_feature (7)..(309): Homolog of NCBI NO: 15219870 NR Description: UDP-glucose glucosyltransferase; protein id: supported by cDNA: gi_12083243, supported by cDNA: gi_17065005,
  misc_feature (7)..(309): Homolog of NCBI NO: 17065006 NR Description: UDP-glucose glucosyltransferase [Arabidopsis
  misc_feature (1)..(309): Homolog of NCBI NO: 15219876 NR Description: UDP-glucose glucosyltransferase, putative; id: At1g22400.1, supported by cDNA: gi_19698984 [Arabidopsis
  misc_feature (1)..(307): Homolog of NCBI NO: 15219867 NR Description: UDP-glucose glucosyltransferase, putative;
  misc_feature (7)..(222): Homolog of NCBI NO: 15220950 NR Description: UDP-glucose glucosyltransferase, putative;
  misc_feature (243)..(309): Homolog of NCBI NO: 15220950 NR Description: UDP-glucose glucosyltransferase, putative;
  misc_feature (7)..(306): Homolog of NCBI NO: 15218268 NR Description: UDP-glucose glucosyltransferase, putative; id: At1g78270.1, supported by cDNA: gi_20466351 [Arabidopsis >gi|8052539|gb|AAF71803.1|AC013430_12 F3F9.19 [Arabidopsis
  misc_feature (52)..(309): Homolog of NCBI NO: 25286822 NR Description: hypothetical protein T16E15.4 - Arabidopsis
MADESSLDTKINWIPSMKNLGLKDIPSFIRATNTEDIMLNFFVHEADRAKRASAIILNTFDSLEHDVVRSIQSIIPQVYTIGPLHLFVNRDIDEESDIGQIGTNMWREEMECLDWLDTKSPNSVVYVNFGSITVMSAKQLVEFAWGLAATKKDFLWVIRPDLVAGDVPMLPPDFLIETANRRMLASWCPQEKVLSHPAVGGFLTHSGWNSTLESLSGGVPMVCWPFFAEQQTNCKYCCDEWEVGMEIGGDVRREEVEELVRELMDGDKGKKMRQKAEEWQRLAEEATKPIYGSSELNFQMVVDKVLLGE

SEQ ID NO: 82517 - protein, 293 aa, Arabidopsis thaliana
  peptide (1)..(293): Ceres Seq. ID no. 12666032
  misc_feature (1)..(293): Pfam Name: UDP-glucoronosyl and UDP-glucosyl transferase Pfam Description: UDP-glucoronosyl and UDP-glucosyl transferase
  misc_feature (1)..(293): Homolog of NCBI NO: 18395112 NR Description: UDP-glucose glucosyltransferase, putative; id: At1g22370.1, supported by cDNA: gi_14532545, supported by gi_18655386 [Arabidopsis thaliana] >gi|14532546|gb|AAK64001.1|
  misc_feature (1)..(293): Homolog of NCBI NO: 25286821 NR Description: T16E15.2 protein - Arabidopsis thaliana
  misc_feature (1)..(293): Homolog of NCBI NO: 15219870 NR Description: UDP-glucose glucosyltransferase; protein id: supported by cDNA: gi_12083243, supported by cDNA: gi_17065005,
  misc_feature (1)..(293): Homolog of NCBI NO: 17065006 NR Description: UDP-glucose glucosyltransferase [Arabidopsis
  misc_feature (1)..(293): Homolog of NCBI NO: 15219876 NR Description: UDP-glucose glucosyltransferase, putative; id: At1g22400.1, supported by cDNA: gi_19698984 [Arabidopsis
  misc_feature (1)..(291): Homolog of NCBI NO: 15219867 NR Description: UDP-glucose glucosyltransferase, putative;
  misc_feature (1)..(206): Homolog of NCBI NO: 15220950 NR Description: UDP-glucose glucosyltransferase, putative;
  misc_feature (227)..(293): Homolog of NCBI NO: 15220950 NR Description: UDP-glucose glucosyltransferase, putative;
  misc_feature (1)..(290): Homolog of NCBI NO: 15218268 NR Description: UDP-glucose glucosyltransferase, putative; id: At1g78270.1, supported by cDNA: gi_20466351 [Arabidopsis >gi|8052539|gb|AAF71803.1|AC013430_12 F3F9.19 [Arabidopsis
  misc_feature (36)..(293): Homolog of NCBI NO: 25286822 NR Description: hypothetical protein T16E15.4 - Arabidopsis
MKNLGLKDIPSFIRATNTEDIMLNFFVHEADRAKRASAIILNTFDSLEHDVVRSIQSIIPQVYTIGPLHLFVNRDIDEESDIGQIGTNMWREEMECLDWLDTKSPNSVVYVNFGSITVMSAKQLVEFAWGLAATKKDFLWVIRPDLVAGDVPMLPPDFLIETANRRMLASWCPQEKVLSHPAVGGFLTHSGWNSTLESLSGGVPMVCWPFFAEQQTNCKYCCDEWEVGMEIGGDVRREEVEELVRELMDGDKGKKMRQKAEEWQRLAEEATKPIYGSSELNFQMVVDKVLLGE

SEQ ID NO: 82518 - protein, 272 aa, Arabidopsis thaliana
  peptide (1)..(272): Ceres Seq. ID no. 12666033
  misc_feature (1)..(272): Pfam Name: UDP-glucoronosyl and UDP-glucosyl transferase Pfam Description: UDP-glucoronosyl and UDP-glucosyl transferase
  misc_feature (1)..(272): Homolog of NCBI NO: 18395112 NR Description: UDP-glucose glucosyltransferase, putative; id: At1g22370.1, supported by cDNA: gi_14532545, supported by gi_18655386 [Arabidopsis thaliana] >gi|14532546|gb|AAK64001.1|
  misc_feature (1)..(272): Homolog of NCBI NO: 25286821 NR Description: T16E15.2 protein - Arabidopsis thaliana
  misc_feature (1)..(272): Homolog of NCBI NO: 15219870 NR Description: UDP-glucose glucosyltransferase; protein id: supported by cDNA: gi_12083243, supported by cDNA: gi_17065005,
  misc_feature (1)..(272): Homolog of NCBI NO: 17065006 NR Description: UDP-glucose glucosyltransferase [Arabidopsis
  misc_feature (1)..(272): Homolog of NCBI NO: 15219876 NR Description: UDP-glucose glucosyltransferase, putative; id: At1g22400.1, supported by cDNA: gi_19698984 [Arabidopsis
  misc_feature (1)..(270): Homolog of NCBI NO: 15219867 NR Description: UDP-glucose glucosyltransferase, putative;
  misc_feature (1)..(185): Homolog of NCBI NO: 15220950 NR Description: UDP-glucose glucosyltransferase, putative;
  misc_feature (206)..(272): Homolog of NCBI NO: 15220950 NR Description: UDP-glucose glucosyltransferase, putative;
  misc_feature (1)..(269): Homolog of NCBI NO: 15218268 NR Description: UDP-glucose glucosyltransferase, putative; id: At1g78270.1, supported by cDNA: gi_20466351 [Arabidopsis >gi|8052539|gb|AAF71803.1|AC013430_12 F3F9.19 [Arabidopsis
  misc_feature (15)..(272): Homolog of NCBI NO: 25286822 NR Description: hypothetical protein T16E15.4 - Arabidopsis
MLNFFVHEADRAKRASAIILNTFDSLEHDVVRSIQSIIPQVYTIGPLHLFVNRDIDEESDIGQIGTNMWREEMECLDWLDTKSPNSVVYVNFGSITVMSAKQLVEFAWGLAATKKDFLWVIRPDLVAGDVPMLPPDFLIETANRRMLASWCPQEKVLSHPAVGGFLTHSGWNSTLESLSGGVPMVCWPFFAEQQTNCKYCCDEWEVGMEIGGDVRREEVEELVRELMDGDKGKKMRQKAEEWQRLAEEATKPIYGSSELNFQMVVDKVLLGE

SEQ ID NO: 82519 - DNA, 525 bp, Arabidopsis thaliana
  misc_feature (1)..(525): Ceres Seq. ID no. 12666042
  misc_feature: MA Experiment ID: 20000184 Result: Down-regulated in Transcription
  misc_feature: MA Experiment 20000184 PARAMETER Experiment Name: At_Shoots__P Parameter: Age (day) Value: 7
  misc_feature: MA Experiment 20000184 PARAMETER Experiment Name: At_Shoots__P Parameter: Tissue Value: Shoots vs. Whole Plant
  misc_feature: MA Experiment ID: 20000185 Result: Down-regulated in Transcription
  misc_feature: MA Experiment 20000185 PARAMETER Experiment Name: At_Roots__P Parameter: Age (day) Value: 7 vs. 21
  misc_feature: MA Experiment 20000185 PARAMETER Experiment Name: At_Roots__P Parameter: Organism Value: A. thaliana
  misc_feature: MA Experiment 20000185 PARAMETER Experiment Name: At_Roots__P Parameter: Tissue Value: Roots vs. Whole Plant
  misc_feature: MA Experiment ID: 20000234 Result: Down-regulated in Transcription
  misc_feature: MA Experiment 20000234 PARAMETER Experiment Name: At_Siliques_P Parameter: Age (day) Value: 21
  misc_feature: MA Experiment 20000234 PARAMETER Experiment Name: At_Siliques_P Parameter: Organism Value: A. thaliana
  misc_feature: MA Experiment 20000234 PARAMETER Experiment Name: At_Siliques_P Parameter: Plant Line Value: WS
  misc_feature: MA Experiment 20000234 PARAMETER Experiment Name: At_Siliques_P Parameter: Tissue Value: Less Than 5mm Siliques vs. Whole Plant
  misc_feature: MA Experiment ID: 20000235 Result: Down-regulated in Transcription
  misc_feature: MA Experiment 20000235 PARAMETER Experiment Name: At_Siliques_P Parameter: Age (day) Value: 21
  misc_feature: MA Experiment 20000235 PARAMETER Experiment Name: At_Siliques_P Parameter: Organism Value: A. thaliana
  misc_feature: MA Experiment 20000235 PARAMETER Experiment Name: At_Siliques_P Parameter: Plant Line Value: WS
  misc_feature: MA Experiment 20000235 PARAMETER Experiment Name: At_Siliques_P Parameter: Tissue Value: 5-10mm Siliques vs. Whole Plant
  misc_feature: MA Experiment ID: 20000264 Result: Down-regulated in Transcription
  misc_feature: MA Experiment 20000264 PARAMETER Experiment Name: At_Open_Flower_P Parameter: Age (day) Value: 21
  misc_feature: MA Experiment 20000264 PARAMETER Experiment Name: At_Open_Flower_P Parameter: Plant Line Value: WS
  misc_feature: MA Experiment 20000264 PARAMETER Experiment Name: At_Open_Flower_P Parameter: Tissue Value: Open Flower vs. Whole Plant
  misc_feature: MA Experiment ID: 20000265 Result: Down-regulated in Transcription
  misc_feature: MA Experiment 20000265 PARAMETER Experiment Name: At_Open_Flower_P Parameter: Age (day) Value: 21
  misc_feature: MA Experiment 20000265 PARAMETER Experiment Name: At_Open_Flower_P Parameter: Plant Line Value: WS
  misc_feature: MA Experiment 20000265 PARAMETER Experiment Name: At_Open_Flower_P Parameter: Tissue Value: Closed Flower vs. Whole Plant
  misc_feature: MA Experiment ID: 20000286 Result: Down-regulated in Transcription
  misc_feature: MA Experiment 20000286 PARAMETER Experiment Name: At_Open_Flower_P Parameter: Age (day) Value: 21
  misc_feature: MA Experiment 20000286 PARAMETER Experiment Name: At_Open_Flower_P Parameter: Plant Line Value: WS
  misc_feature: MA Experiment 20000286 PARAMETER Experiment Name: At_Open_Flower_P Parameter: Tissue Value: Half Open vs. Whole Plant
  misc_feature: MA Experiment ID: 20000438 Result: Down-regulated in Transcription
  misc_feature: MA Experiment 20000438 PARAMETER Experiment Name: At_Shoots__P Parameter: Age (day) Value: 14
  misc_feature: MA Experiment 20000438 PARAMETER Experiment Name: At_Shoots__P Parameter: Tissue Value: Shoots vs. Whole Plant
  misc_feature: MA Experiment ID: 20000439 Result: Down-regulated in Transcription
  misc_feature: MA Experiment 20000439 PARAMETER Experiment Name: At_Roots__P Parameter: Age (day) Value: 14 vs. 21
  misc_feature: MA Experiment 20000439 PARAMETER Experiment Name: At_Roots__P Parameter: Organism Value: A. thaliana
  misc_feature: MA Experiment 20000439 PARAMETER Experiment Name: At_Roots__P Parameter: Tissue Value: Roots vs. Whole Plant
  misc_feature: MA Experiment ID: 20000794 Result: Down-regulated in Transcription
  misc_feature: MA Experiment 20000794 PARAMETER Experiment Name: At_Petals_P Parameter: Age (day) Value: 23-25 days
  misc_feature: MA Experiment 20000794 PARAMETER Experiment Name: At_Petals_P Parameter: Plant Line Value: WS
  misc_feature: MA Experiment 20000794 PARAMETER Experiment Name: At_Petals_P Parameter: Tissue Value: Petals vs. Whole plant
  misc_feature: MA Experiment ID: 20001555 Result: Up-regulated in Transcription
  misc_feature: MA Experiment 20001555 PARAMETER Experiment Name: At_Drought_Soil_Dry_P Parameter: Age (day) Value: 24
  misc_feature: MA Experiment 20001555 PARAMETER Experiment Name: At_Drought_Soil_Dry_P Parameter: Organism Value: A. thaliana
  misc_feature: MA Experiment 20001555 PARAMETER Experiment Name: At_Drought_Soil_Dry_P Parameter: Plant Line Value: WS
  misc_feature: MA Experiment 20001555 PARAMETER Experiment Name: At_Drought_Soil_Dry_P Parameter: Post Timepoint (hr) Value: None
  misc_feature: MA Experiment 20001555 PARAMETER Experiment Name: At_Drought_Soil_Dry_P Parameter: Post-Treatment Value: None
  misc_feature: MA Experiment 20001555 PARAMETER Experiment Name: At_Drought_Soil_Dry_P Parameter: Timepoint (day) Value: 10
  misc_feature: MA Experiment 20001555 PARAMETER Experiment Name: At_Drought_Soil_Dry_P Parameter: Treatment Value: Drought vs. No Drought
  misc_feature: MA Experiment ID: 20001556 Result: Down-regulated in Transcription
  misc_feature: MA Experiment 20001556 PARAMETER Experiment Name: At_Drought_Soil_Dry_P Parameter: Age (day) Value: 26
  misc_feature: MA Experiment 20001556 PARAMETER Experiment Name: At_Drought_Soil_Dry_P Parameter: Organism Value: A. thaliana
  misc_feature: MA Experiment 20001556 PARAMETER Experiment Name: At_Drought_Soil_Dry_P Parameter: Plant Line Value: WS
  misc_feature: MA Experiment 20001556 PARAMETER Experiment Name: At_Drought_Soil_Dry_P Parameter: Post Timepoint (hr) Value: None
  misc_feature: MA Experiment 20001556 PARAMETER Experiment Name: At_Drought_Soil_Dry_P Parameter: Post-Treatment Value: None
  misc_feature: MA Experiment 20001556 PARAMETER Experiment Name: At_Drought_Soil_Dry_P Parameter: Timepoint (day) Value: 12
  misc_feature: MA Experiment 20001556 PARAMETER Experiment Name: At_Drought_Soil_Dry_P Parameter: Treatment Value: Drought vs. No Drought
  misc_feature: MA Experiment ID: 20001557 Result: Down-regulated in Transcription
  misc_feature: MA Experiment 20001557 PARAMETER Experiment Name: At_Drought_Soil_Dry_P Parameter: Age (day) Value: 27
  misc_feature: MA Experiment 20001557 PARAMETER Experiment Name: At_Drought_Soil_Dry_P Parameter: Organism Value: A. thaliana
  misc_feature: MA Experiment 20001557 PARAMETER Experiment Name: At_Drought_Soil_Dry_P Parameter: Plant Line Value: WS
  misc_feature: MA Experiment 20001557 PARAMETER Experiment Name: At_Drought_Soil_Dry_P Parameter: Post Timepoint (hr) Value: 3
  misc_feature: MA Experiment 20001557 PARAMETER Experiment Name: At_Drought_Soil_Dry_P Parameter: Post-Treatment Value: Re-Water vs. No Drought
  misc_feature: MA Experiment 20001557 PARAMETER Experiment Name: At_Drought_Soil_Dry_P Parameter: Timepoint (day) Value: 13
  misc_feature: MA Experiment 20001557 PARAMETER Experiment Name: At_Drought_Soil_Dry_P Parameter: Treatment Value: Drought vs. No Drought
  misc_feature: MA Experiment ID: 20001558 Result: Down-regulated in Transcription
  misc_feature: MA Experiment 20001558 PARAMETER Experiment Name: At_Drought_Soil_Dry_P Parameter: Age (day) Value: 27
  misc_feature: MA Experiment 20001558 PARAMETER Experiment Name: At_Drought_Soil_Dry_P Parameter: Organism Value: A. thaliana
  misc_feature: MA Experiment 20001558 PARAMETER Experiment Name: At_Drought_Soil_Dry_P Parameter: Plant Line Value: WS
  misc_feature: MA Experiment 20001558 PARAMETER Experiment Name: At_Drought_Soil_Dry_P Parameter: Post Timepoint (hr) Value: 6
  misc_feature: MA Experiment 20001558 PARAMETER Experiment Name: At_Drought_Soil_Dry_P Parameter: Post-Treatment Value: Re-Water vs. No Drought
  misc_feature: MA Experiment 20001558 PARAMETER Experiment Name: At_Drought_Soil_Dry_P Parameter: Timepoint (day) Value: 13
  misc_feature: MA Experiment 20001558 PARAMETER Experiment Name: At_Drought_Soil_Dry_P Parameter: Treatment Value: Drought vs. No Drought
  misc_feature: MA Experiment ID: 20001559 Result: Down-regulated in Transcription
  misc_feature: MA Experiment 20001559 PARAMETER Experiment Name: At_Drought_Soil_Dry_P Parameter: Age (day) Value: 28
  misc_feature: MA Experiment 20001559 PARAMETER Experiment Name: At_Drought_Soil_Dry_P Parameter: Organism Value: A. thaliana
  misc_feature: MA Experiment 20001559 PARAMETER Experiment Name: At_Drought_Soil_Dry_P Parameter: Plant Line Value: WS
  misc_feature: MA Experiment 20001559 PARAMETER Experiment Name: At_Drought_Soil_Dry_P Parameter: Post Timepoint (hr) Value: 29
  misc_feature: MA Experiment 20001559 PARAMETER Experiment Name: At_Drought_Soil_Dry_P Parameter: Post-Treatment Value: Re-Water vs. No Drought
  misc_feature: MA Experiment 20001559 PARAMETER Experiment Name: At_Drought_Soil_Dry_P Parameter: Timepoint (day) Value: 14
  misc_feature: MA Experiment 20001559 PARAMETER Experiment Name: At_Drought_Soil_Dry_P Parameter: Treatment Value: Drought vs. No Drought
  misc_feature: MA Experiment ID: 20001768 Result: Up-regulated in Transcription
  misc_feature: MA Experiment 20001768 PARAMETER Experiment Name: At_Far-red-enriched-adult_P Parameter: Age (day) Value: 28
  misc_feature: MA Experiment 20001768 PARAMETER Experiment Name: At_Far-red-enriched-adult_P Parameter: Light Value: Far-red enriched vs. White
  misc_feature: MA Experiment 20001768 PARAMETER Experiment Name: At_Far-red-enriched-adult_P Parameter: Organism Value: A. thaliana
  misc_feature: MA Experiment 20001768 PARAMETER Experiment Name: At_Far-red-enriched-adult_P Parameter: Plant Line Value: Columbia
  misc_feature: MA Experiment 20001768 PARAMETER Experiment Name: At_Far-red-enriched-adult_P Parameter: Timepoint (hr) Value: 1
  misc_feature: MA Experiment 20001768 PARAMETER Experiment Name: At_Far-red-enriched-adult_P Parameter: Tissue Value: Aerial
  misc_feature: MA Experiment ID: 20001771 Result: Up-regulated in Transcription
  misc_feature: MA Experiment 20001771 PARAMETER Experiment Name: At_Far-red-enriched-adult_P Parameter: Age (day) Value: 28
  misc_feature: MA Experiment 20001771 PARAMETER Experiment Name: At_Far-red-enriched-adult_P Parameter: Light Value: Far-red enriched vs. White
  misc_feature: MA Experiment 20001771 PARAMETER Experiment Name: At_Far-red-enriched-adult_P Parameter: Organism Value: A. thaliana
  misc_feature: MA Experiment 20001771 PARAMETER Experiment Name: At_Far-red-enriched-adult_P Parameter: Plant Line Value: Columbia
  misc_feature: MA Experiment 20001771 PARAMETER Experiment Name: At_Far-red-enriched-adult_P Parameter: Timepoint (hr) Value: 16
  misc_feature: MA Experiment 20001771 PARAMETER Experiment Name: At_Far-red-enriched-adult_P Parameter: Tissue Value: Aerial
  misc_feature: MA Experiment ID: 20001773 Result: Up-regulated in Transcription
  misc_feature: MA Experiment 20001773 PARAMETER Experiment Name: At_Far-red-enriched-adult_P Parameter: Age (day) Value: 30
  misc_feature: MA Experiment 20001773 PARAMETER Experiment Name: At_Far-red-enriched-adult_P Parameter: Light Value: Far-red enriched vs. White
  misc_feature: MA Experiment 20001773 PARAMETER Experiment Name: At_Far-red-enriched-adult_P Parameter: Organism Value: A. thaliana
  misc_feature: MA Experiment 20001773 PARAMETER Experiment Name: At_Far-red-enriched-adult_P Parameter: Plant Line Value: Columbia
  misc_feature: MA Experiment 20001773 PARAMETER Experiment Name: At_Far-red-enriched-adult_P Parameter: Timepoint (hr) Value: 48
  misc_feature: MA Experiment 20001773 PARAMETER Experiment Name: At_Far-red-enriched-adult_P Parameter: Tissue Value: Aerial
  misc_feature: MA Experiment ID: 20001905 Result: Down-regulated in Transcription
  misc_feature: MA Experiment 20001905 PARAMETER Experiment Name: At_Drought_Reproduction_P Parameter: Age (day) Value: 40
  misc_feature: MA Experiment 20001905 PARAMETER Experiment Name: At_Drought_Reproduction_P Parameter: Organism Value: A. thaliana
  misc_feature: MA Experiment 20001905 PARAMETER Experiment Name: At_Drought_Reproduction_P Parameter: Plant Line Value: WS
  misc_feature: MA Experiment 20001905 PARAMETER Experiment Name: At_Drought_Reproduction_P Parameter: Timepoint (day) Value: 10
  misc_feature: MA Experiment 20001905 PARAMETER Experiment Name: At_Drought_Reproduction_P Parameter: Tissue Value: Rosettes
  misc_feature: MA Experiment 20001905 PARAMETER Experiment Name: At_Drought_Reproduction_P Parameter: Treatment Value: Drought vs. No Drought
  misc_feature: MA Experiment ID: 20001906 Result: Down-regulated in Transcription
  misc_feature: MA Experiment 20001906 PARAMETER Experiment Name: At_Drought_Reproduction_P Parameter: Age (day) Value: 35
  misc_feature: MA Experiment 20001906 PARAMETER Experiment Name: At_Drought_Reproduction_P Parameter: Organism Value: A. thaliana
  misc_feature: MA Experiment 20001906 PARAMETER Experiment Name: At_Drought_Reproduction_P Parameter: Plant Line Value: WS
  misc_feature: MA Experiment 20001906 PARAMETER Experiment Name: At_Drought_Reproduction_P Parameter: Timepoint (day) Value: 5
  misc_feature: MA Experiment 20001906 PARAMETER Experiment Name: At_Drought_Reproduction_P Parameter: Tissue Value: Siliques
  misc_feature: MA Experiment 20001906 PARAMETER Experiment Name: At_Drought_Reproduction_P Parameter: Treatment Value: Drought vs. No Drought
  misc_feature: MA Experiment ID: 20001908 Result: Down-regulated in Transcription
  misc_feature: MA Experiment 20001908 PARAMETER Experiment Name: At_Drought_Reproduction_P Parameter: Age (day) Value: 40
  misc_feature: MA Experiment 20001908 PARAMETER Experiment Name: At_Drought_Reproduction_P Parameter: Organism Value: A. thaliana
  misc_feature: MA Experiment 20001908 PARAMETER Experiment Name: At_Drought_Reproduction_P Parameter: Plant Line Value: WS
  misc_feature: MA Experiment 20001908 PARAMETER Experiment Name: At_Drought_Reproduction_P Parameter: Timepoint (day) Value: 10
  misc_feature: MA Experiment 20001908 PARAMETER Experiment Name: At_Drought_Reproduction_P Parameter: Tissue Value: Siliques
  misc_feature: MA Experiment 20001908 PARAMETER Experiment Name: At_Drought_Reproduction_P Parameter: Treatment Value: Drought vs. No Drought
atgagcacacttcttggttgtcttgtcctcatattctctatggtcgcacaggcctcatccgccagtcttacggtgaactggtcccttggcaccgactacactccgctcaccactggaaagaccttctctgtcggcgataccatagtgttcaattatggtgcgggtcacacggtggatgaagtgagcgagaacgactacaagagttgcactctagggaactccattacgtccgacagcagcggaaccacgaccatagctctcacgaccactggtcctcgctacttcatctgtggaatccccggccattgcgctgccggtatgaagctcgcagtcaccgtcgcgtcgaactcttcaaacggtgtagctggtggcaccactacaccaaccccattcaccggaggtggtggtggttacaatcccacgaccacacaggccattccttgtgcggcttgggccgtgtcctgtccattacgggctttggttgctacttgggccgttgttttttatgctttggctttgtcttag

SEQ ID NO: 82520 - protein, 174 aa, Arabidopsis thaliana
  peptide (1)..(174): Ceres Seq. ID no. 12666043
  misc_feature (27)..(107): Pfam Name: Plastocyanin-like domain Pfam Description: Plastocyanin-like domain
  misc_feature (1)..(174): Homolog of NCBI NO: 15219890 NR Description: uclacyanin II, putative; protein id: At1g22480.1
  misc_feature (1)..(173): Homolog of NCBI NO: 15218396 NR Description: blue copper protein, putative; protein id: supported by cDNA: 16991., supported by cDNA: gi_15529179
  misc_feature (4)..(158): Homolog of NCBI NO: 2493318 NR Description: Blue copper protein precursor
  misc_feature (1)..(171): Homolog of NCBI NO: 38346158 NR Description: OSJNBa0079A21.5 [Oryza sativa (japonica
  misc_feature (6)..(156): Homolog of NCBI NO: 14140127 NR Description: uclacyanin 3-like protein [Oryza sativa]
  misc_feature (8)..(147): Homolog of NCBI NO: 21554060 NR Description: phytocyanin [Arabidopsis thaliana]
  misc_feature (8)..(147): Homolog of NCBI NO: 15224960 NR Description: phytocyanin; protein id: At2g44790.1, supported cDNA: 19760., supported by cDNA: gi_15146301, supported by cDNA: supported by cDNA: gi_20147336, supported by cDNA: gi_3399768
  misc_feature (8)..(171): Homolog of NCBI NO: 25453521 NR Description: blue copper-binding protein II [imported] -
  misc_feature (8)..(171): Homolog of NCBI NO: 25453522 NR Description: blue copper-binding protein II [imported] -
  misc_feature (7)..(170): Homolog of NCBI NO: 38345959 NR Description: OSJNBb0038F03.17 [Oryza sativa (japonica
MSTLLGCLVLIFSMVAQASSASLTVNWSLGTDYTPLTTGKTFSVGDTIVFNYGAGHTVDEVSENDYKSCTLGNSITSDSSGTTTIALTTTGPRYFICGIPGHCAAGMKLAVTVASNSSNGVAGGTTTPTPFTGGGGGYNPTTTQAIPCAAWAVSCPLRALVATWAVVFYALALS

SEQ ID NO: 82521 - protein, 161 aa, Arabidopsis thaliana
  peptide (1)..(161): Ceres Seq. ID no. 12666044
  misc_feature (14)..(94): Pfam Name: Plastocyanin-like domain Pfam Description: Plastocyanin-like domain
  misc_feature (1)..(161): Homolog of NCBI NO: 15219890 NR Description: uclacyanin II, putative; protein id: At1g22480.1
  misc_feature (1)..(160): Homolog of NCBI NO: 15218396 NR Description: blue copper protein, putative; protein id: supported by cDNA: 16991., supported by cDNA: gi_15529179
  misc_feature (1)..(145): Homolog of NCBI NO: 2493318 NR Description: Blue copper protein precursor
  misc_feature (1)..(158): Homolog of NCBI NO: 38346158 NR Description: OSJNBa0079A21.5 [Oryza sativa (japonica
  misc_feature (1)..(143): Homolog of NCBI NO: 14140127 NR Description: uclacyanin 3-like protein [Oryza sativa]
  misc_feature (1)..(134): Homolog of NCBI NO: 21554060 NR Description: phytocyanin [Arabidopsis thaliana]
  misc_feature (1)..(134): Homolog of NCBI NO: 15224960 NR Description: phytocyanin; protein id: At2g44790.1, supported cDNA: 19760., supported by cDNA: gi_15146301, supported by cDNA: supported by cDNA: gi_20147336, supported by cDNA: gi_3399768
  misc_feature (1)..(158): Homolog of NCBI NO: 25453521 NR Description: blue copper-binding protein II [imported] -
  misc_feature (1)..(158): Homolog of NCBI NO: 25453522 NR Description: blue copper-binding protein II [imported] -
  misc_feature (1)..(157): Homolog of NCBI NO: 38345959 NR Description: OSJNBb0038F03.17 [Oryza sativa (japonica
MVAQASSASLTVNWSLGTDYTPLTTGKTFSVGDTIVFNYGAGHTVDEVSENDYKSCTLGNSITSDSSGTTTIALTTTGPRYFICGIPGHCAAGMKLAVTVASNSSNGVAGGTTTPTPFTGGGGGYNPTTTQAIPCAAWAVSCPLRALVATWAVVFYALALS

SEQ ID NO: 82522 - DNA, 1695 bp, Arabidopsis thaliana
  misc_feature (1)..(1695): Ceres Seq. ID no. 12666045
  misc_feature: MA Experiment ID: 20000180 Result: Up-regulated in Transcription
  misc_feature: MA Experiment 20000180 PARAMETER Experiment Name: At_Germinating_Seeds_P Parameter: Age (hr) Value: 24 vs. 0
  misc_feature: MA Experiment 20000180 PARAMETER Experiment Name: At_Germinating_Seeds_P Parameter: Tissue Value: Germinating Seeds
  misc_feature: MA Experiment ID: 20000185 Result: Up-regulated in Transcription
  misc_feature: MA Experiment 20000185 PARAMETER Experiment Name: At_Roots__P Parameter: Age (day) Value: 7 vs. 21
  misc_feature: MA Experiment 20000185 PARAMETER Experiment Name: At_Roots__P Parameter: Organism Value: A. thaliana
  misc_feature: MA Experiment 20000185 PARAMETER Experiment Name: At_Roots__P Parameter: Tissue Value: Roots vs. Whole Plant
  misc_feature: MA Experiment ID: 20000439 Result: Up-regulated in Transcription
  misc_feature: MA Experiment 20000439 PARAMETER Experiment Name: At_Roots__P Parameter: Age (day) Value: 14 vs. 21
  misc_feature: MA Experiment 20000439 PARAMETER Experiment Name: At_Roots__P Parameter: Organism Value: A. thaliana
  misc_feature: MA Experiment 20000439 PARAMETER Experiment Name: At_Roots__P Parameter: Tissue Value: Roots vs. Whole Plant
atggcgatagccgaagaagaagctgcacttatagaagattccgtcagcgactccgttgaccaccgtggacttcctgccggaaaatcttccaccggcggatggagatccgcctggtacattataggtgtggaagttggagaaagatttgcttactttgggattggttccaacttaattacttacctcaccggacctctcggacaatcaacagccaccgccgccgtgaacgtgaacacatggtcaggaaccgcctcgatacttcctgttttaggagctttcattgcagatgcttatcttggtcgttaccgtaccattgttgttgcttccctcatctacatacttggactaggactattgaccttatcctctatcttaatcctaatgggattatcggagcaacgtcaacataaccgcaacgcttctgctaaaccgtttttttgggtgaatatattattcttttgttctctgtatttggtggcgatcggacaaggcggacacaagccatgtgttcaagcttttggtgctgaccagtttgatgtgggagatccaaaggagagaataagtagaggatcgtttttcaattggtggttcttgagtttatccgcgggaataactttgtcgattattgtggtggtttacgttcaagacaatgttaattgggctcttgggtttggtatcccttgtttgttcatggtcatggctcttgctctcttcttgtttggaagaaaaacttatagatatccaagaggagatcgcgaggggaagaataacgcttttgcgaggatcggtagagttttcttggtggcgttcaagaatcggaaactgaagttaacacattcaggtcagttggaagttggttcgtacaagaaatgtaaaggacaacttgagttcctagcaaaagcgttgctaccaggagaaggaggtgtagagccatgtagtagtagggacgtggaagacgcgatggctttggttaggcttattccgatatggatcacatcagtagtgagcacgattccttacgctcaatatgctactttcttcacaaaacaaggcgttacggtggacagaaaaatcttgccgggtttcgagatccctccggcttcttttcaagcactcatcggtttatcgattttcatctcagttccaacttatgagcgtgttttccttccgttagctagattgattaccaaaaagccttcagggatcacaatgctacaaagaataggagctggaatggtgctctccagcttaaatatggtggttgcagcgttagtagaaatgaaacggctcgagacggctaaagaacatgggcttgtggatagaccggacgcaaccatcccaatgtccatatggtggttcgttcctcagtatttactacttgggatgatcgatgtattctcactagtggggacacaagaattcttctacgaccaggtccccacggagctaaggagtattggtcttgcactttctttgagtgcgatgggtcttgcgagcttcttgagcggttttctaatcactgtgattaattgggctaccgggaaaaatggcggcgatagctggttcaatactaacctgaacagagcccatgtcgattatttttactggttgcttgctgctttcactgccattgggttcttggcgtttttgttattatccaggctgtatgtgtatcgccgtgtagatcaagtctaa

SEQ ID NO: 82523 - protein, 564 aa, Arabidopsis thaliana
  peptide (1)..(564): Ceres Seq. ID no. 12666046
  misc_feature (102)..(495): Pfam Name: POT family Pfam Description: POT family
  misc_feature (1)..(564): Homolog of NCBI NO: 15219905 NR Description: peptide transporter, putative; protein id: [Arabidopsis thaliana] >gi|25402971|pir||G86358 protein Similar
  misc_feature (1)..(564): Homolog of NCBI NO: 28416707 NR Description: At1g22550 [Arabidopsis thaliana]
  misc_feature (1)..(564): Homolog of NCBI NO: 15219907 NR Description: peptide transporter, putative; protein id: [Arabidopsis thaliana] >gi|25402974|pir||B86359 protein Similar
  misc_feature (7)..(564): Homolog of NCBI NO: 18086410 NR Description: At1g72120/F28P5_2 [Arabidopsis thaliana]
  misc_feature (7)..(564): Homolog of NCBI NO: 15218352 NR Description: oligopeptide transporter, putative; protein id: [Arabidopsis thaliana] >gi|25406146|pir||E96744 probable
  misc_feature (7)..(539): Homolog of NCBI NO: 15218352 NR Description: oligopeptide transporter, putative; protein id: [Arabidopsis thaliana] >gi|25406146|pir||E96744 probable
  misc_feature (18)..(562): Homolog of NCBI NO: 30687920 NR Description: oligopeptide transporter -related [Arabidopsis
  misc_feature (18)..(562): Homolog of NCBI NO: 25402970 NR Description: Similar to peptide transporter [imported] - thaliana >gi|6587835|gb|AAF18524.1|AC006551_10 Similar to peptide
  misc_feature (6)..(558): Homolog of NCBI NO: 15218381 NR Description: peptide transporter PTR2-B, putative; protein id:
  misc_feature (318)..(560): Homolog of NCBI NO: 34908688 NR Description: P0039A07.25 [Oryza sativa (japonica
MAIAEEEAALIEDSVSDSVDHRGLPAGKSSTGGWRSAWYIIGVEVGERFAYFGIGSNLITYLTGPLGQSTATAAVNVNTWSGTASILPVLGAFIADAYLGRYRTIVVASLIYILGLGLLTLSSILILMGLSEQRQHNRNASAKPFFWVNILFFCSLYLVAIGQGGHKPCVQAFGADQFDVGDPKERISRGSFFNWWFLSLSAGITLSIIVVVYVQDNVNWALGFGIPCLFMVMALALFLFGRKTYRYPRGDREGKNNAFARIGRVFLVAFKNRKLKLTHSGQLEVGSYKKCKGQLEFLAKALLPGEGGVEPCSSRDVEDAMALVRLIPIWITSVVSTIPYAQYATFFTKQGVTVDRKILPGFEIPPASFQALIGLSIFISVPTYERVFLPLARLITKKPSGITMLQRIGAGMVLSSLNMVVAALVEMKRLETAKEHGLVDRPDATIPMSIWWFVPQYLLLGMIDVFSLVGTQEFFYDQVPTELRSIGLALSLSAMGLASFLSGFLITVINWATGKNGGDSWFNTNLNRAHVDYFYWLLAAFTAIGFLAFLLLSRLYVYRRVDQV

SEQ ID NO: 82524 - protein, 437 aa, Arabidopsis thaliana
  peptide (1)..(437): Ceres Seq. ID no. 12666047
  misc_feature (1)..(368): Pfam Name: POT family Pfam Description: POT family
  misc_feature (1)..(437): Homolog of NCBI NO: 15219905 NR Description: peptide transporter, putative; protein id: [Arabidopsis thaliana] >gi|25402971|pir||G86358 protein Similar
  misc_feature (1)..(437): Homolog of NCBI NO: 28416707 NR Description: At1g22550 [Arabidopsis thaliana]
  misc_feature (1)..(437): Homolog of NCBI NO: 15219907 NR Description: peptide transporter, putative; protein id: [Arabidopsis thaliana] >gi|25402974|pir||B86359 protein Similar
  misc_feature (1)..(437): Homolog of NCBI NO: 18086410 NR Description: At1g72120/F28P5_2 [Arabidopsis thaliana]
  misc_feature (1)..(437): Homolog of NCBI NO: 15218352 NR Description: oligopeptide transporter, putative; protein id: [Arabidopsis thaliana] >gi|25406146|pir||E96744 probable
  misc_feature (1)..(412): Homolog of NCBI NO: 15218352 NR Description: oligopeptide transporter, putative; protein id: [Arabidopsis thaliana] >gi|25406146|pir||E96744 probable
  misc_feature (1)..(435): Homolog of NCBI NO: 30687920 NR Description: oligopeptide transporter -related [Arabidopsis
  misc_feature (1)..(435): Homolog of NCBI NO: 25402970 NR Description: Similar to peptide transporter [imported] - thaliana >gi|6587835|gb|AAF18524.1|AC006551_10 Similar to peptide
  misc_feature (1)..(431): Homolog of NCBI NO: 15218381 NR Description: peptide transporter PTR2-B, putative; protein id:
  misc_feature (191)..(433): Homolog of NCBI NO: 34908688 NR Description: P0039A07.25 [Oryza sativa (japonica
MGLSEQRQHNRNASAKPFFWVNILFFCSLYLVAIGQGGHKPCVQAFGADQFDVGDPKERISRGSFFNWWFLSLSAGITLSIIVVVYVQDNVNWALGFGIPCLFMVMALALFLFGRKTYRYPRGDREGKNNAFARIGRVFLVAFKNRKLKLTHSGQLEVGSYKKCKGQLEFLAKALLPGEGGVEPCSSRDVEDAMALVRLIPIWITSVVSTIPYAQYATFFTKQGVTVDRKILPGFEIPPASFQALIGLSIFISVPTYERVFLPLARLITKKPSGITMLQRIGAGMVLSSLNMVVAALVEMKRLETAKEHGLVDRPDATIPMSIWWFVPQYLLLGMIDVFSLVGTQEFFYDQVPTELRSIGLALSLSAMGLASFLSGFLITVINWATGKNGGDSWFNTNLNRAHVDYFYWLLAAFTAIGFLAFLLLSRLYVYRRVDQV

SEQ ID NO: 82525 - protein, 334 aa, Arabidopsis thaliana
  peptide (1)..(334): Ceres Seq. ID no. 12666048
  misc_feature (1)..(265): Pfam Name: POT family Pfam Description: POT family
  misc_feature (1)..(334): Homolog of NCBI NO: 15219905 NR Description: peptide transporter, putative; protein id: [Arabidopsis thaliana] >gi|25402971|pir||G86358 protein Similar
  misc_feature (1)..(334): Homolog of NCBI NO: 28416707 NR Description: At1g22550 [Arabidopsis thaliana]
  misc_feature (1)..(334): Homolog of NCBI NO: 15219907 NR Description: peptide transporter, putative; protein id: [Arabidopsis thaliana] >gi|25402974|pir||B86359 protein Similar
  misc_feature (1)..(334): Homolog of NCBI NO: 18086410 NR Description: At1g72120/F28P5_2 [Arabidopsis thaliana]
  misc_feature (1)..(334): Homolog of NCBI NO: 15218352 NR Description: oligopeptide transporter, putative; protein id: [Arabidopsis thaliana] >gi|25406146|pir||E96744 probable
  misc_feature (1)..(309): Homolog of NCBI NO: 15218352 NR Description: oligopeptide transporter, putative; protein id: [Arabidopsis thaliana] >gi|25406146|pir||E96744 probable
  misc_feature (1)..(332): Homolog of NCBI NO: 30687920 NR Description: oligopeptide transporter -related [Arabidopsis
  misc_feature (1)..(332): Homolog of NCBI NO: 25402970 NR Description: Similar to peptide transporter [imported] - thaliana >gi|6587835|gb|AAF18524.1|AC006551_10 Similar to peptide
  misc_feature (1)..(328): Homolog of NCBI NO: 15218381 NR Description: peptide transporter PTR2-B, putative; protein id:
  misc_feature (88)..(330): Homolog of NCBI NO: 34908688 NR Description: P0039A07.25 [Oryza sativa (japonica
MVMALALFLFGRKTYRYPRGDREGKNNAFARIGRVFLVAFKNRKLKLTHSGQLEVGSYKKCKGQLEFLAKALLPGEGGVEPCSSRDVEDAMALVRLIPIWITSVVSTIPYAQYATFFTKQGVTVDRKILPGFEIPPASFQALIGLSIFISVPTYERVFLPLARLITKKPSGITMLQRIGAGMVLSSLNMVVAALVEMKRLETAKEHGLVDRPDATIPMSIWWFVPQYLLLGMIDVFSLVGTQEFFYDQVPTELRSIGLALSLSAMGLASFLSGFLITVINWATGKNGGDSWFNTNLNRAHVDYFYWLLAAFTAIGFLAFLLLSRLYVYRRVDQV

SEQ ID NO: 82526 - DNA, 1698 bp, Arabidopsis thaliana
  misc_feature (1)..(1698): Ceres Seq. ID no. 12666049
  misc_feature: MA Experiment ID: 20000234 Result: Down-regulated in Transcription
  misc_feature: MA Experiment 20000234 PARAMETER Experiment Name: At_Siliques_P Parameter: Age (day) Value: 21
  misc_feature: MA Experiment 20000234 PARAMETER Experiment Name: At_Siliques_P Parameter: Organism Value: A. thaliana
  misc_feature: MA Experiment 20000234 PARAMETER Experiment Name: At_Siliques_P Parameter: Plant Line Value: WS
  misc_feature: MA Experiment 20000234 PARAMETER Experiment Name: At_Siliques_P Parameter: Tissue Value: Less Than 5mm Siliques vs. Whole Plant
  misc_feature: MA Experiment ID: 20000235 Result: Down-regulated in Transcription
  misc_feature: MA Experiment 20000235 PARAMETER Experiment Name: At_Siliques_P Parameter: Age (day) Value: 21
  misc_feature: MA Experiment 20000235 PARAMETER Experiment Name: At_Siliques_P Parameter: Organism Value: A. thaliana
  misc_feature: MA Experiment 20000235 PARAMETER Experiment Name: At_Siliques_P Parameter: Plant Line Value: WS
  misc_feature: MA Experiment 20000235 PARAMETER Experiment Name: At_Siliques_P Parameter: Tissue Value: 5-10mm Siliques vs. Whole Plant
  misc_feature: MA Experiment ID: 20000264 Result: Down-regulated in Transcription
  misc_feature: MA Experiment 20000264 PARAMETER Experiment Name: At_Open_Flower_P Parameter: Age (day) Value: 21
  misc_feature: MA Experiment 20000264 PARAMETER Experiment Name: At_Open_Flower_P Parameter: Plant Line Value: WS
  misc_feature: MA Experiment 20000264 PARAMETER Experiment Name: At_Open_Flower_P Parameter: Tissue Value: Open Flower vs. Whole Plant
  misc_feature: MA Experiment ID: 20000265 Result: Down-regulated in Transcription
  misc_feature: MA Experiment 20000265 PARAMETER Experiment Name: At_Open_Flower_P Parameter: Age (day) Value: 21
  misc_feature: MA Experiment 20000265 PARAMETER Experiment Name: At_Open_Flower_P Parameter: Plant Line Value: WS
  misc_feature: MA Experiment 20000265 PARAMETER Experiment Name: At_Open_Flower_P Parameter: Tissue Value: Closed Flower vs. Whole Plant
  misc_feature: MA Experiment ID: 20000286 Result: Down-regulated in Transcription
  misc_feature: MA Experiment 20000286 PARAMETER Experiment Name: At_Open_Flower_P Parameter: Age (day) Value: 21
  misc_feature: MA Experiment 20000286 PARAMETER Experiment Name: At_Open_Flower_P Parameter: Plant Line Value: WS
  misc_feature: MA Experiment 20000286 PARAMETER Experiment Name: At_Open_Flower_P Parameter: Tissue Value: Half Open vs. Whole Plant
  misc_feature: MA Experiment ID: 20000439 Result: Down-regulated in Transcription
  misc_feature: MA Experiment 20000439 PARAMETER Experiment Name: At_Roots__P Parameter: Age (day) Value: 14 vs. 21
  misc_feature: MA Experiment 20000439 PARAMETER Experiment Name: At_Roots__P Parameter: Organism Value: A. thaliana
  misc_feature: MA Experiment 20000439 PARAMETER Experiment Name: At_Roots__P Parameter: Tissue Value: Roots vs. Whole Plant
  misc_feature: MA Experiment ID: 20000495 Result: Down-regulated in Transcription
  misc_feature: MA Experiment 20000495 PARAMETER Experiment Name: At_Guard_Cells_P Parameter: Harvest Date Value: 8/2/2002
  misc_feature: MA Experiment 20000495 PARAMETER Experiment Name: At_Guard_Cells_P Parameter: Organism Value: A. thaliana
  misc_feature: MA Experiment 20000495 PARAMETER Experiment Name: At_Guard_Cells_P Parameter: Tissue Value: Guard Cells vs. Leaves
  misc_feature: MA Experiment ID: 20000496 Result: Down-regulated in Transcription
  misc_feature: MA Experiment 20000496 PARAMETER Experiment Name: At_Guard_Cells_P Parameter: Harvest Date Value: 7/19/2002
  misc_feature: MA Experiment 20000496 PARAMETER Experiment Name: At_Guard_Cells_P Parameter: Organism Value: Canola
  misc_feature: MA Experiment 20000496 PARAMETER Experiment Name: At_Guard_Cells_P Parameter: Tissue Value: Guard Cells vs. Leaves
  misc_feature: MA Experiment ID: 20001247 Result: Up-regulated in Transcription
  misc_feature: MA Experiment 20001247 PARAMETER Experiment Name: At_Far-red-induction_P Parameter: Age (day) Value: 7
  misc_feature: MA Experiment 20001247 PARAMETER Experiment Name: At_Far-red-induction_P Parameter: Light Value: Far-red vs. White
  misc_feature: MA Experiment 20001247 PARAMETER Experiment Name: At_Far-red-induction_P Parameter: Organism Value: A. thaliana
  misc_feature: MA Experiment 20001247 PARAMETER Experiment Name: At_Far-red-induction_P Parameter: Plant Line Value: Columbia
  misc_feature: MA Experiment 20001247 PARAMETER Experiment Name: At_Far-red-induction_P Parameter: Timepoint (hr) Value: 1
  misc_feature: MA Experiment 20001247 PARAMETER Experiment Name: At_Far-red-induction_P Parameter: Tissue Value: Whole Plant
  misc_feature: MA Experiment ID: 20001557 Result: Up-regulated in Transcription
  misc_feature: MA Experiment 20001557 PARAMETER Experiment Name: At_Drought_Soil_Dry_P Parameter: Age (day) Value: 27
  misc_feature: MA Experiment 20001557 PARAMETER Experiment Name: At_Drought_Soil_Dry_P Parameter: Organism Value: A. thaliana
  misc_feature: MA Experiment 20001557 PARAMETER Experiment Name: At_Drought_Soil_Dry_P Parameter: Plant Line Value: WS
  misc_feature: MA Experiment 20001557 PARAMETER Experiment Name: At_Drought_Soil_Dry_P Parameter: Post Timepoint (hr) Value: 3
  misc_feature: MA Experiment 20001557 PARAMETER Experiment Name: At_Drought_Soil_Dry_P Parameter: Post-Treatment Value: Re-Water vs. No Drought
  misc_feature: MA Experiment 20001557 PARAMETER Experiment Name: At_Drought_Soil_Dry_P Parameter: Timepoint (day) Value: 13
  misc_feature: MA Experiment 20001557 PARAMETER Experiment Name: At_Drought_Soil_Dry_P Parameter: Treatment Value: Drought vs. No Drought
  misc_feature: MA Experiment ID: 20001906 Result: Up-regulated in Transcription
  misc_feature: MA Experiment 20001906 PARAMETER Experiment Name: At_Drought_Reproduction_P Parameter: Age (day) Value: 35
  misc_feature: MA Experiment 20001906 PARAMETER Experiment Name: At_Drought_Reproduction_P Parameter: Organism Value: A. thaliana
  misc_feature: MA Experiment 20001906 PARAMETER Experiment Name: At_Drought_Reproduction_P Parameter: Plant Line Value: WS
  misc_feature: MA Experiment 20001906 PARAMETER Experiment Name: At_Drought_Reproduction_P Parameter: Timepoint (day) Value: 5
  misc_feature: MA Experiment 20001906 PARAMETER Experiment Name: At_Drought_Reproduction_P Parameter: Tissue Value: Siliques
  misc_feature: MA Experiment 20001906 PARAMETER Experiment Name: At_Drought_Reproduction_P Parameter: Treatment Value: Drought vs. No Drought
atgaagataccagaggaagaagttgcactcttagaagattacgttagcgattccgtcgaccaccgtggatttcccgccggaaaatcttccaccggcggatggagatcggcctggttcattataggtgtggaagttgcagagaggtttgcttactttgggattgcctgcaatttgattacttacctcaccggacctctcggacaatcgacggcgaaagctgccgtgaacgtgaacacgtggtcgggaactgcctctatacttcctattttaggagctttcgtagctgacgcttatcttggtcgttaccgtactattgtcgtagcttccctcatctacatattggggctaggactattgacgttatcagcttctttaatcataatgggattatctaagcaacgtaacgacgcttctgctaaaccatctatttgggttaatacacttttcttctgttctctgtatttggtggcgatcggacaaggtggacacaaaccgtgtgttcaagcgtttggtgcggaccagtttgatgctgaagatccgaaggaggtaatagcgagagggtcgtttttcaattggtggttcttgagtttatctgcgggaataagcatatcgattattgtggtcgcttatgttcaagaaaatgttaattgggcgtttgggtttgggattccttgtttgtttatggttatggctcttgctatcttcttgctcgggaggaagatatatagatacccaaagggacatcatgaggaggttaatagtagtaacacttttgcaagaatcggtagagtttttgttattgcgttcaagaatcggaaactgaggttagaacattctagtttggaattggatcaaggtctattggaggatggtcagtccgagaaacgtaaagatcggctcaatttcctagcaaaagcaatgatctcaagagaaggtgttgagccatgtagtggtagggacgtggatgacgcgaaggctttggtaaggcttattccgatatggatcacatacgtggtgagcacgattccgtacgctcagtacataactttcttcacgaagcaaggggtcacggtggacagaagaatcttaccgggagtagaaattccagcggcttctttattgtcattcgttggtgtatctattctcatctcagtgcccctatatgagcgtgtatttctcccgatagctaggaagattaccaaaaagccttttgggatcacaatgctccaaaggataggagctggaatggtgctttcagtcttcaatatgatgctcgctgcattagtagaatcaaaacggctaaaaatcgctagggaacacgggctagtggacaagccggacgtgaccgttccaatgtccatatggtggttcgtccctcagtatttgctactcgggatgatcgatctgttctctatggtgggaacacaagaattcttctacgaccaagtcccaacggagctaaggagcattggtctctcgctttctctgagtgcgatgggtctttcaagcttcttgagtggttttctcatcagtttgattgattgggctacgggaaaagacggctggttcaactctaacttgaaccgagcccatgtggattacttttattggttgctcgctgctttcacggccattgctttctttgcgttcttgttcatctccaagatgtatgtgtatcgtcggctagaccaagtctaa

SEQ ID NO: 82527 - protein, 565 aa, Arabidopsis thaliana
  peptide (1)..(565): Ceres Seq. ID no. 12666050
  misc_feature (102)..(499): Pfam Name: POT family Pfam Description: POT family
  misc_feature (1)..(565): Homolog of NCBI NO: 15219907 NR Description: peptide transporter, putative; protein id: [Arabidopsis thaliana] >gi|25402974|pir||B86359 protein Similar
  misc_feature (1)..(565): Homolog of NCBI NO: 15219905 NR Description: peptide transporter, putative; protein id: [Arabidopsis thaliana] >gi|25402971|pir||G86358 protein Similar
  misc_feature (1)..(565): Homolog of NCBI NO: 28416707 NR Description: At1g22550 [Arabidopsis thaliana]
  misc_feature (7)..(565): Homolog of NCBI NO: 18086410 NR Description: At1g72120/F28P5_2 [Arabidopsis thaliana]
  misc_feature (7)..(565): Homolog of NCBI NO: 15218352 NR Description: oligopeptide transporter, putative; protein id: [Arabidopsis thaliana] >gi|25406146|pir||E96744 probable
  misc_feature (7)..(540): Homolog of NCBI NO: 15218352 NR Description: oligopeptide transporter, putative; protein id: [Arabidopsis thaliana] >gi|25406146|pir||E96744 probable
  misc_feature (18)..(563): Homolog of NCBI NO: 30687920 NR Description: oligopeptide transporter -related [Arabidopsis
  misc_feature (18)..(563): Homolog of NCBI NO: 25402970 NR Description: Similar to peptide transporter [imported] - thaliana >gi|6587835|gb|AAF18524.1|AC006551_10 Similar to peptide
  misc_feature (15)..(559): Homolog of NCBI NO: 15218381 NR Description: peptide transporter PTR2-B, putative; protein id:
  misc_feature (322)..(561): Homolog of NCBI NO: 34908688 NR Description: P0039A07.25 [Oryza sativa (japonica
MKIPEEEVALLEDYVSDSVDHRGFPAGKSSTGGWRSAWFIIGVEVAERFAYFGIACNLITYLTGPLGQSTAKAAVNVNTWSGTASILPILGAFVADAYLGRYRTIVVASLIYILGLGLLTLSASLIIMGLSKQRNDASAKPSIWVNTLFFCSLYLVAIGQGGHKPCVQAFGADQFDAEDPKEVIARGSFFNWWFLSLSAGISISIIVVAYVQENVNWAFGFGIPCLFMVMALAIFLLGRKIYRYPKGHHEEVNSSNTFARIGRVFVIAFKNRKLRLEHSSLELDQGLLEDGQSEKRKDRLNFLAKAMISREGVEPCSGRDVDDAKALVRLIPIWITYVVSTIPYAQYITFFTKQGVTVDRRILPGVEIPAASLLSFVGVSILISVPLYERVFLPIARKITKKPFGITMLQRIGAGMVLSVFNMMLAALVESKRLKIAREHGLVDKPDVTVPMSIWWFVPQYLLLGMIDLFSMVGTQEFFYDQVPTELRSIGLSLSLSAMGLSSFLSGFLISLIDWATGKDGWFNSNLNRAHVDYFYWLLAAFTAIAFFAFLFISKMYVYRRLDQV

SEQ ID NO: 82528 - protein, 438 aa, Arabidopsis thaliana
  peptide (1)..(438): Ceres Seq. ID no. 12666051
  misc_feature (1)..(372): Pfam Name: POT family Pfam Description: POT family
  misc_feature (1)..(438): Homolog of NCBI NO: 15219907 NR Description: peptide transporter, putative; protein id: [Arabidopsis thaliana] >gi|25402974|pir||B86359 protein Similar
  misc_feature (1)..(438): Homolog of NCBI NO: 15219905 NR Description: peptide transporter, putative; protein id: [Arabidopsis thaliana] >gi|25402971|pir||G86358 protein Similar
  misc_feature (1)..(438): Homolog of NCBI NO: 28416707 NR Description: At1g22550 [Arabidopsis thaliana]
  misc_feature (1)..(438): Homolog of NCBI NO: 18086410 NR Description: At1g72120/F28P5_2 [Arabidopsis thaliana]
  misc_feature (1)..(438): Homolog of NCBI NO: 15218352 NR Description: oligopeptide transporter, putative; protein id: [Arabidopsis thaliana] >gi|25406146|pir||E96744 probable
  misc_feature (1)..(413): Homolog of NCBI NO: 15218352 NR Description: oligopeptide transporter, putative; protein id: [Arabidopsis thaliana] >gi|25406146|pir||E96744 probable
  misc_feature (1)..(436): Homolog of NCBI NO: 30687920 NR Description: oligopeptide transporter -related [Arabidopsis
  misc_feature (1)..(436): Homolog of NCBI NO: 25402970 NR Description: Similar to peptide transporter [imported] - thaliana >gi|6587835|gb|AAF18524.1|AC006551_10 Similar to peptide
  misc_feature (1)..(432): Homolog of NCBI NO: 15218381 NR Description: peptide transporter PTR2-B, putative; protein id:
  misc_feature (195)..(434): Homolog of NCBI NO: 34908688 NR Description: P0039A07.25 [Oryza sativa (japonica
MGLSKQRNDASAKPSIWVNTLFFCSLYLVAIGQGGHKPCVQAFGADQFDAEDPKEVIARGSFFNWWFLSLSAGISISIIVVAYVQENVNWAFGFGIPCLFMVMALAIFLLGRKIYRYPKGHHEEVNSSNTFARIGRVFVIAFKNRKLRLEHSSLELDQGLLEDGQSEKRKDRLNFLAKAMISREGVEPCSGRDVDDAKALVRLIPIWITYVVSTIPYAQYITFFTKQGVTVDRRILPGVEIPAASLLSFVGVSILISVPLYERVFLPIARKITKKPFGITMLQRIGAGMVLSVFNMMLAALVESKRLKIAREHGLVDKPDVTVPMSIWWFVPQYLLLGMIDLFSMVGTQEFFYDQVPTELRSIGLSLSLSAMGLSSFLSGFLISLIDWATGKDGWFNSNLNRAHVDYFYWLLAAFTAIAFFAFLFISKMYVYRRLDQV

SEQ ID NO: 82529 - protein, 338 aa, Arabidopsis thaliana
  peptide (1)..(338): Ceres Seq. ID no. 12666052
  misc_feature (1)..(272): Pfam Name: POT family Pfam Description: POT family
  misc_feature (1)..(338): Homolog of NCBI NO: 15219907 NR Description: peptide transporter, putative; protein id: [Arabidopsis thaliana] >gi|25402974|pir||B86359 protein Similar
  misc_feature (1)..(338): Homolog of NCBI NO: 15219905 NR Description: peptide transporter, putative; protein id: [Arabidopsis thaliana] >gi|25402971|pir||G86358 protein Similar
  misc_feature (1)..(338): Homolog of NCBI NO: 28416707 NR Description: At1g22550 [Arabidopsis thaliana]
  misc_feature (1)..(338): Homolog of NCBI NO: 18086410 NR Description: At1g72120/F28P5_2 [Arabidopsis thaliana]
  misc_feature (1)..(338): Homolog of NCBI NO: 15218352 NR Description: oligopeptide transporter, putative; protein id: [Arabidopsis thaliana] >gi|25406146|pir||E96744 probable
  misc_feature (1)..(313): Homolog of NCBI NO: 15218352 NR Description: oligopeptide transporter, putative; protein id: [Arabidopsis thaliana] >gi|25406146|pir||E96744 probable
  misc_feature (1)..(336): Homolog of NCBI NO: 30687920 NR Description: oligopeptide transporter -related [Arabidopsis
  misc_feature (1)..(336): Homolog of NCBI NO: 25402970 NR Description: Similar to peptide transporter [imported] - thaliana >gi|6587835|gb|AAF18524.1|AC006551_10 Similar to peptide
  misc_feature (1)..(332): Homolog of NCBI NO: 15218381 NR Description: peptide transporter PTR2-B, putative; protein id:
  misc_feature (95)..(334): Homolog of NCBI NO: 34908688 NR Description: P0039A07.25 [Oryza sativa (japonica
MVMALAIFLLGRKIYRYPKGHHEEVNSSNTFARIGRVFVIAFKNRKLRLEHSSLELDQGLLEDGQSEKRKDRLNFLAKAMISREGVEPCSGRDVDDAKALVRLIPIWITYVVSTIPYAQYITFFTKQGVTVDRRILPGVEIPAASLLSFVGVSILISVPLYERVFLPIARKITKKPFGITMLQRIGAGMVLSVFNMMLAALVESKRLKIAREHGLVDKPDVTVPMSIWWFVPQYLLLGMIDLFSMVGTQEFFYDQVPTELRSIGLSLSLSAMGLSSFLSGFLISLIDWATGKDGWFNSNLNRAHVDYFYWLLAAFTAIAFFAFLFISKMYVYRRLDQV

SEQ ID NO: 82530 - DNA, 3081 bp, Arabidopsis thaliana
  misc_feature (1)..(3081): Ceres Seq. ID no. 12666060
  misc_feature: MA Experiment ID: 20000173 Result: Down-regulated in Transcription
  misc_feature: MA Experiment 20000173 PARAMETER Experiment Name: At_42deg_Heat_P Parameter: Age (day) Value: 14
  misc_feature: MA Experiment 20000173 PARAMETER Experiment Name: At_42deg_Heat_P Parameter: Organism Value: A. thaliana
  misc_feature: MA Experiment 20000173 PARAMETER Experiment Name: At_42deg_Heat_P Parameter: Plant Line Value: WS
  misc_feature: MA Experiment 20000173 PARAMETER Experiment Name: At_42deg_Heat_P Parameter: Temperature (deg C) Value: 42 vs. 22
  misc_feature: MA Experiment 20000173 PARAMETER Experiment Name: At_42deg_Heat_P Parameter: Timepoint (hr) Value: 6
  misc_feature: MA Experiment 20000173 PARAMETER Experiment Name: At_42deg_Heat_P Parameter: Tissue Value: Aerial
  misc_feature: MA Experiment ID: 20000184 Result: Down-regulated in Transcription
  misc_feature: MA Experiment 20000184 PARAMETER Experiment Name: At_Shoots__P Parameter: Age (day) Value: 7
  misc_feature: MA Experiment 20000184 PARAMETER Experiment Name: At_Shoots__P Parameter: Tissue Value: Shoots vs. Whole Plant
aaaggataattaattcaatgaacacgatcctaaaatagaaaagtacgaaaacaccccttatcttccgaacacttttccgatcgcaaaatgatcgcctgaaaccatcgccggcttcagagtgtttgatcgtttctccagatagatagattgatccaatatggcgaaatcggaaaactcaacgacttcgactttctcttctttcgccaacaagattcaaccgtccaacgatgcagagtccgatcccgattcgtatgccctcgagaaattcaaactctacgaaaccagagcgaggttttatctagtagggagtgataggaataaaagattcttcagagtgttgaagattgatcgttcagagccatctgagcttaatattagtgaagatcctgttgtatattcgcctcaagagatcaagagtctgcttcagcgtatcgctgaaggcaatcgtgccacgggaggattggcttttgtggccaaagtctatggaattgctggttgtgctaagtttatggagtcatactatttagttttggttacaaaacggcgacagattggatgtatatgcgggcatgcgatatatgctattgatgaaagtcaaatgatcagtgttccacatgcaactattcaatctgatgttgcgaattccaaaactgaactaaggtacaagaagcttctgtcaagtgtagatttgacaaaagatttcttctacagttacacttaccctataatgcaaagcttgcaaaagaatgttctatcatctggtgaggaagggatgccttatgataacatattcgtatggaattcgtatctgacgcagcctattcgatcaaggtgcaacaacactatttggacactggcattagttcatgggcactttaagcagataagactatcaatatatggaagagacttcagtgttactttagtctccagacgttctcgacattttgcaggcacacgttacttgaaaaggggagtgaatgatcgtggaagggttgcaaatgatgttgaaacagaacaacttgttcttgatgatgaagctggatcatgcaaaggaaaaatgagctcagtggtgcagatgcgagggtcaattccactcttttggtcacaagaggcctccagatttagtcctaagcctgatatcttcttacagaggtatgaccctacatatgagtcaaccaaaatgcattttgaagacctggtgaatcgatatgggaatccgatcattgtgctcaacttaattaagacagttgagaaaaggccaagggaaatggtgctaagacgtgagtttgcgaatgctgtgggttatctaaattcaatttttcgtgaagaaaatcatctcaaattcatccactgggatttccataaatttgcgaagagcaagtcggcgaatgtattggctgttttgggtgctgtagcaagcgaagcccttgatttgactggattatatttcagcggcaagcctaaaattgttaagaagaaggctagccaacttagtcatgctaacactgcaagggaaccttctctgcgtgatctaagagcttactctgcggaactttcaaggggtgagagtgcaaatgatatacttagtgctcttgctaatcgagagaaagagatgaagctaacccaacaaaaaaaagacgagggaactaattcttcagctcctcgttaccaaagtggtgttctgcgtactaactgtatcgattgcttggatcgaacaaatgtagcacagtatgcatatggtttggctgctttaggccggcagctgcatgcaatgggtttgagcgatacacctaagatcgaccctgacagtagcatagctgctgcacttatggatatgtaccagagcatgggagatgcccttgcacaacaatatggcggctcagctgctcataacactgttttcccagaaaggcaggggaaatggaaggccacgacacagtctagagagtttctcaagtctatcaaacgatactacagcaatacctacactgatggcgaaaagcaagacgccataaacttattcttgggctactttcaacctcaggaagggaaacctgcgctctgggagctggattctgattactatctccatgtttcagggattggagatgatattttcccagatatcggggtccagtccattgctaaacctatgagtggtattggagtcaatcttgcaccagtgccagctttcagagacgacttctcgcggaagaagctgacatcgtttgacaaactgatagagcagacatgcagttcaataaagaacgtgaggctttgtagtgagacagaccaaaggccaggtggcaacactggaagcactggtgtggctcctgatgcagctgagattcaactcaagagccccaattggctgtttggttcaagaaagcccgaagagagtagctctgccacaaaatctggtgcagacgatagtgagaaaggagtaacctcgactgagagagtcaacgatttctgcaacttggactggctttctaagtccgaccgtcatcaaggagatatcttccaaaggtatctatcgattacatcaaccaatgaagccaatggttggtatggtggcactctcctcggtgaccaagatgaaaacagcgaaatttacagacattacgcccaattctgtcagtgtccagcgatggaaccatttgagaacgatcatgagtttgaacagaactttgcggaagttctccgcatgaacacaatcgatgtaatggacattgaagaagaagaaacggagatggaaagcgatttcaatgaatacactcagatcggtagcgatctcgggatcattccaatgcaatgcaaacactttgctagtgatccttgttggctagccagatggcttgtcggagatgataaggtcccgaaggtcatttaatcacgaaaccaatgattttgctccccaagaacgtcacggagacacttcttttttggttgcatgtttgtgaatgtgttcgagtgtgcattttgtgtagatatatgtaagaagggacaaacccaaagcaatattttgtaccccaaaaaatatttgttggtttatgattaagctcacgtataatacag

SEQ ID NO: 82531 - protein, 912 aa, Arabidopsis thaliana
  peptide (1)..(912): Ceres Seq. ID no. 12666061
  misc_feature (108)..(414): Pfam Name: SacI homology domain Pfam Description: SacI homology domain
  misc_feature (22)..(712): Homolog of NCBI NO: 18400310 NR Description: Expressed protein; protein id: At3g14205.1, by cDNA: gi_15215805, supported by cDNA: gi_20334797 [Arabidopsis >gi|15215806|gb|AAK91448.1| At3g14201 [Arabidopsis thaliana]
  misc_feature (22)..(712): Homolog of NCBI NO: 9294649 NR Description: gb|AAC25523.1~gene_id:MAG2.20~similar to unknown
  misc_feature (34)..(428): Homolog of NCBI NO: 15217295 NR Description: Putative phosphoinositide phosphatase [Oryza
  misc_feature (437)..(668): Homolog of NCBI NO: 15217295 NR Description: Putative phosphoinositide phosphatase [Oryza
  misc_feature (22)..(642): Homolog of NCBI NO: 22331537 NR Description: putative protein; protein id: At3g43220.1,
  misc_feature (34)..(654): Homolog of NCBI NO: 30688003 NR Description: expressed protein [Arabidopsis thaliana]
  misc_feature (22)..(624): Homolog of NCBI NO: 20453210 NR Description: AT3g43220/F7K15_70 [Arabidopsis thaliana]
  misc_feature (185)..(642): Homolog of NCBI NO: 11357847 NR Description: hypothetical protein F7K15.70 - Arabidopsis >gi|7649362|emb|CAB89043.1| putative protein [Arabidopsis
  misc_feature (22)..(169): Homolog of NCBI NO: 11357847 NR Description: hypothetical protein F7K15.70 - Arabidopsis >gi|7649362|emb|CAB89043.1| putative protein [Arabidopsis
  misc_feature (30)..(436): Homolog of NCBI NO: 22329625 NR Description: unknown protein; protein id: At1g17340.1, by cDNA: gi_20147340 [Arabidopsis thaliana] At1g17340/F28G4_6 [Arabidopsis thaliana]
MAKSENSTTSTFSSFANKIQPSNDAESDPDSYALEKFKLYETRARFYLVGSDRNKRFFRVLKIDRSEPSELNISEDPVVYSPQEIKSLLQRIAEGNRATGGLAFVAKVYGIAGCAKFMESYYLVLVTKRRQIGCICGHAIYAIDESQMISVPHATIQSDVANSKTELRYKKLLSSVDLTKDFFYSYTYPIMQSLQKNVLSSGEEGMPYDNIFVWNSYLTQPIRSRCNNTIWTLALVHGHFKQIRLSIYGRDFSVTLVSRRSRHFAGTRYLKRGVNDRGRVANDVETEQLVLDDEAGSCKGKMSSVVQMRGSIPLFWSQEASRFSPKPDIFLQRYDPTYESTKMHFEDLVNRYGNPIIVLNLIKTVEKRPREMVLRREFANAVGYLNSIFREENHLKFIHWDFHKFAKSKSANVLAVLGAVASEALDLTGLYFSGKPKIVKKKASQLSHANTAREPSLRDLRAYSAELSRGESANDILSALANREKEMKLTQQKKDEGTNSSAPRYQSGVLRTNCIDCLDRTNVAQYAYGLAALGRQLHAMGLSDTPKIDPDSSIAAALMDMYQSMGDALAQQYGGSAAHNTVFPERQGKWKATTQSREFLKSIKRYYSNTYTDGEKQDAINLFLGYFQPQEGKPALWELDSDYYLHVSGIGDDIFPDIGVQSIAKPMSGIGVNLAPVPAFRDDFSRKKLTSFDKLIEQTCSSIKNVRLCSETDQRPGGNTGSTGVAPDAAEIQLKSPNWLFGSRKPEESSSATKSGADDSEKGVTSTERVNDFCNLDWLSKSDRHQGDIFQRYLSITSTNEANGWYGGTLLGDQDENSEIYRHYAQFCQCPAMEPFENDHEFEQNFAEVLRMNTIDVMDIEEEETEMESDFNEYTQIGSDLGIIPMQCKHFASDPCWLARWLVGDDKVPKVI

SEQ ID NO: 82532 - protein, 795 aa, Arabidopsis thaliana
  peptide (1)..(795): Ceres Seq. ID no. 12666062
  misc_feature (1)..(297): Pfam Name: SacI homology domain Pfam Description: SacI homology domain
  misc_feature (1)..(595): Homolog of NCBI NO: 18400310 NR Description: Expressed protein; protein id: At3g14205.1, by cDNA: gi_15215805, supported by cDNA: gi_20334797 [Arabidopsis >gi|15215806|gb|AAK91448.1| At3g14201 [Arabidopsis thaliana]
  misc_feature (1)..(595): Homolog of NCBI NO: 9294649 NR Description: gb|AAC25523.1~gene_id:MAG2.20~similar to unknown
  misc_feature (1)..(311): Homolog of NCBI NO: 15217295 NR Description: Putative phosphoinositide phosphatase [Oryza
  misc_feature (320)..(551): Homolog of NCBI NO: 15217295 NR Description: Putative phosphoinositide phosphatase [Oryza
  misc_feature (1)..(525): Homolog of NCBI NO: 22331537 NR Description: putative protein; protein id: At3g43220.1,
  misc_feature (1)..(537): Homolog of NCBI NO: 30688003 NR Description: expressed protein [Arabidopsis thaliana]
  misc_feature (1)..(507): Homolog of NCBI NO: 20453210 NR Description: AT3g43220/F7K15_70 [Arabidopsis thaliana]
  misc_feature (68)..(525): Homolog of NCBI NO: 11357847 NR Description: hypothetical protein F7K15.70 - Arabidopsis >gi|7649362|emb|CAB89043.1| putative protein [Arabidopsis
  misc_feature (1)..(52): Homolog of NCBI NO: 11357847 NR Description: hypothetical protein F7K15.70 - Arabidopsis >gi|7649362|emb|CAB89043.1| putative protein [Arabidopsis
  misc_feature (1)..(319): Homolog of NCBI NO: 22329625 NR Description: unknown protein; protein id: At1g17340.1, by cDNA: gi_20147340 [Arabidopsis thaliana] At1g17340/F28G4_6 [Arabidopsis thaliana]
MESYYLVLVTKRRQIGCICGHAIYAIDESQMISVPHATIQSDVANSKTELRYKKLLSSVDLTKDFFYSYTYPIMQSLQKNVLSSGEEGMPYDNIFVWNSYLTQPIRSRCNNTIWTLALVHGHFKQIRLSIYGRDFSVTLVSRRSRHFAGTRYLKRGVNDRGRVANDVETEQLVLDDEAGSCKGKMSSVVQMRGSIPLFWSQEASRFSPKPDIFLQRYDPTYESTKMHFEDLVNRYGNPIIVLNLIKTVEKRPREMVLRREFANAVGYLNSIFREENHLKFIHWDFHKFAKSKSANVLAVLGAVASEALDLTGLYFSGKPKIVKKKASQLSHANTAREPSLRDLRAYSAELSRGESANDILSALANREKEMKLTQQKKDEGTNSSAPRYQSGVLRTNCIDCLDRTNVAQYAYGLAALGRQLHAMGLSDTPKIDPDSSIAAALMDMYQSMGDALAQQYGGSAAHNTVFPERQGKWKATTQSREFLKSIKRYYSNTYTDGEKQDAINLFLGYFQPQEGKPALWELDSDYYLHVSGIGDDIFPDIGVQSIAKPMSGIGVNLAPVPAFRDDFSRKKLTSFDKLIEQTCSSIKNVRLCSETDQRPGGNTGSTGVAPDAAEIQLKSPNWLFGSRKPEESSSATKSGADDSEKGVTSTERVNDFCNLDWLSKSDRHQGDIFQRYLSITSTNEANGWYGGTLLGDQDENSEIYRHYAQFCQCPAMEPFENDHEFEQNFAEVLRMNTIDVMDIEEEETEMESDFNEYTQIGSDLGIIPMQCKHFASDPCWLARWLVGDDKVPKVI

SEQ ID NO: 82533 - protein, 765 aa, Arabidopsis thaliana
  peptide (1)..(765): Ceres Seq. ID no. 12666063
  misc_feature (1)..(267): Pfam Name: SacI homology domain Pfam Description: SacI homology domain
  misc_feature (1)..(565): Homolog of NCBI NO: 18400310 NR Description: Expressed protein; protein id: At3g14205.1, by cDNA: gi_15215805, supported by cDNA: gi_20334797 [Arabidopsis >gi|15215806|gb|AAK91448.1| At3g14201 [Arabidopsis thaliana]
  misc_feature (1)..(565): Homolog of NCBI NO: 9294649 NR Description: gb|AAC25523.1~gene_id:MAG2.20~similar to unknown
  misc_feature (1)..(281): Homolog of NCBI NO: 15217295 NR Description: Putative phosphoinositide phosphatase [Oryza
  misc_feature (290)..(521): Homolog of NCBI NO: 15217295 NR Description: Putative phosphoinositide phosphatase [Oryza
  misc_feature (1)..(495): Homolog of NCBI NO: 22331537 NR Description: putative protein; protein id: At3g43220.1,
  misc_feature (1)..(507): Homolog of NCBI NO: 30688003 NR Description: expressed protein [Arabidopsis thaliana]
  misc_feature (1)..(477): Homolog of NCBI NO: 20453210 NR Description: AT3g43220/F7K15_70 [Arabidopsis thaliana]
  misc_feature (38)..(495): Homolog of NCBI NO: 11357847 NR Description: hypothetical protein F7K15.70 - Arabidopsis >gi|7649362|emb|CAB89043.1| putative protein [Arabidopsis
  misc_feature (1)..(22): Homolog of NCBI NO: 11357847 NR Description: hypothetical protein F7K15.70 - Arabidopsis >gi|7649362|emb|CAB89043.1| putative protein [Arabidopsis
  misc_feature (1)..(289): Homolog of NCBI NO: 22329625 NR Description: unknown protein; protein id: At1g17340.1, by cDNA: gi_20147340 [Arabidopsis thaliana] At1g17340/F28G4_6 [Arabidopsis thaliana]
MISVPHATIQSDVANSKTELRYKKLLSSVDLTKDFFYSYTYPIMQSLQKNVLSSGEEGMPYDNIFVWNSYLTQPIRSRCNNTIWTLALVHGHFKQIRLSIYGRDFSVTLVSRRSRHFAGTRYLKRGVNDRGRVANDVETEQLVLDDEAGSCKGKMSSVVQMRGSIPLFWSQEASRFSPKPDIFLQRYDPTYESTKMHFEDLVNRYGNPIIVLNLIKTVEKRPREMVLRREFANAVGYLNSIFREENHLKFIHWDFHKFAKSKSANVLAVLGAVASEALDLTGLYFSGKPKIVKKKASQLSHANTAREPSLRDLRAYSAELSRGESANDILSALANREKEMKLTQQKKDEGTNSSAPRYQSGVLRTNCIDCLDRTNVAQYAYGLAALGRQLHAMGLSDTPKIDPDSSIAAALMDMYQSMGDALAQQYGGSAAHNTVFPERQGKWKATTQSREFLKSIKRYYSNTYTDGEKQDAINLFLGYFQPQEGKPALWELDSDYYLHVSGIGDDIFPDIGVQSIAKPMSGIGVNLAPVPAFRDDFSRKKLTSFDKLIEQTCSSIKNVRLCSETDQRPGGNTGSTGVAPDAAEIQLKSPNWLFGSRKPEESSSATKSGADDSEKGVTSTERVNDFCNLDWLSKSDRHQGDIFQRYLSITSTNEANGWYGGTLLGDQDENSEIYRHYAQFCQCPAMEPFENDHEFEQNFAEVLRMNTIDVMDIEEEETEMESDFNEYTQIGSDLGIIPMQCKHFASDPCWLARWLVGDDKVPKVI

SEQ ID NO: 82534 - DNA, 1959 bp, Arabidopsis thaliana
  misc_feature (1)..(1959): Ceres Seq. ID no. 12666067
  misc_feature: MA Experiment ID: 20000234 Result: Up-regulated in Transcription
  misc_feature: MA Experiment 20000234 PARAMETER Experiment Name: At_Siliques_P Parameter: Age (day) Value: 21
  misc_feature: MA Experiment 20000234 PARAMETER Experiment Name: At_Siliques_P Parameter: Organism Value: A. thaliana
  misc_feature: MA Experiment 20000234 PARAMETER Experiment Name: At_Siliques_P Parameter: Plant Line Value: WS
  misc_feature: MA Experiment 20000234 PARAMETER Experiment Name: At_Siliques_P Parameter: Tissue Value: Less Than 5mm Siliques vs. Whole Plant
  misc_feature: MA Experiment ID: 20000235 Result: Up-regulated in Transcription
  misc_feature: MA Experiment 20000235 PARAMETER Experiment Name: At_Siliques_P Parameter: Age (day) Value: 21
  misc_feature: MA Experiment 20000235 PARAMETER Experiment Name: At_Siliques_P Parameter: Organism Value: A. thaliana
  misc_feature: MA Experiment 20000235 PARAMETER Experiment Name: At_Siliques_P Parameter: Plant Line Value: WS
  misc_feature: MA Experiment 20000235 PARAMETER Experiment Name: At_Siliques_P Parameter: Tissue Value: 5-10mm Siliques vs. Whole Plant
  misc_feature: MA Experiment ID: 20000264 Result: Up-regulated in Transcription
  misc_feature: MA Experiment 20000264 PARAMETER Experiment Name: At_Open_Flower_P Parameter: Age (day) Value: 21
  misc_feature: MA Experiment 20000264 PARAMETER Experiment Name: At_Open_Flower_P Parameter: Plant Line Value: WS
  misc_feature: MA Experiment 20000264 PARAMETER Experiment Name: At_Open_Flower_P Parameter: Tissue Value: Open Flower vs. Whole Plant
  misc_feature: MA Experiment ID: 20000286 Result: Up-regulated in Transcription
  misc_feature: MA Experiment 20000286 PARAMETER Experiment Name: At_Open_Flower_P Parameter: Age (day) Value: 21
  misc_feature: MA Experiment 20000286 PARAMETER Experiment Name: At_Open_Flower_P Parameter: Plant Line Value: WS
  misc_feature: MA Experiment 20000286 PARAMETER Experiment Name: At_Open_Flower_P Parameter: Tissue Value: Half Open vs. Whole Plant
  misc_feature: MA Experiment ID: 20000794 Result: Up-regulated in Transcription
  misc_feature: MA Experiment 20000794 PARAMETER Experiment Name: At_Petals_P Parameter: Age (day) Value: 23-25 days
  misc_feature: MA Experiment 20000794 PARAMETER Experiment Name: At_Petals_P Parameter: Plant Line Value: WS
  misc_feature: MA Experiment 20000794 PARAMETER Experiment Name: At_Petals_P Parameter: Tissue Value: Petals vs. Whole plant
gatactaaaaaccatgagactgtcttctcttccgatcaacactctcataaatctcccaaaatctctctttctaatttctccttttcgcttccgtaaccttaatcgttcccttaccgtcgcgtctcgcatttcatcaacgcttcttcgcgtttccggtgtctcgtctcgtccgtgtggttactggttctcgacgaacgcggcgatgacgaatgttggagaggaagataagcaatcgattccttcaatcgaattgaaggagaatattgagctcactgacaaagaacggaaaattttcgatcggcttcttagtactctccgttactgtaaccttgacacacagcttcgtgtcgccggtggttgggtccgtgataagctgctagggaaagagagtgatgatattgatatagctattgataatatgtctggaagtgaatttcttgataagtttaaggaatatttatcttcgagagatgaagaagtacaaggcgacactgttattgaaaggaaccctgaccaatctaaacacttggagacagcaaagttgcggatttatgaccagtggatagattttgttaacttgagaagtgaagaatacacagagaatagtcgtattcctacaatgaaatttggcaccgcaaaagatgatgcttttcgtagagatttaaccataaatagtttattctacaatatcaactctggcgcagtagaagaccttacagaaagaggcatcgatgacctcaagtccggaaaaattgttacacccttgcctgcaaaagccacatttttggatgatcctttgcgagttctccgggctgttcgctttggtgcaaggtttggttttactttggatgaagaactaaaagaagctgcttcaagtgaggaagtaagggtagctcttggagaaaaaattagcagagagcggattgggaatgagattgacttgatgatatctgggaatggaccagtttcagcggttacctatctttctgacctgaaactatttagtgttgtctttgcccttccctcttcagctgagccttcaccaccagaaaattgtggcagcctctcccaatcctacttggaagctatgtggagcttacttaaaacacctcggccaggaaagttcagtggtgaacaaagacggcttgctctctatgctgctatgtttctcccttttaggaaaactgtatacaaggacactaagggcaaatcgattcctgttgtcaaccacatttttaaattctccatgaagaggaagaccagtgacgctgaaacagttatgaatatacatcagaccacggagagatttcgttcgttgattccttcccttgaagtgaagaaagatgtagaactggacgagctaacttgggccgctgatattcttgagcattggaaatccatcacccttaatgatccagtgatcccagcaacttcaaaaataagagtactcacagggtttctacttagagatattaaagacttctggcgtgtttctctgttaacatctttgttattgtctgctacggttgacggtagcaacgatcatcaagatatcgggcagctggacttccaactggaaaggatgcgagaaacttatctgacagttgaggccaccattcatgaactgggtcttgataagatctgggatgcaaagcctctagtcaatggcagggagataatgcaaattgctgagctgaagggaggatcccggctcatccgtgaatggcaacagaagctgctcacttggcagctggcttaccccaacggcaccgcagaggagtgcaaggagtggatgagagatatcaaagctaaacgacaaaggatagagtgacttaagaatctagtggctagttgtgctgtgtagtcttataaaaatccactaacattgtagattaatttaaactcagttttgacaaattttatcgattctaggctcattccctggcaagtttctgatgt

SEQ ID NO: 82535 - protein, 609 aa, Arabidopsis thaliana
  peptide (1)..(609): Ceres Seq. ID no. 12666068
  misc_feature (178)..(347): Pfam Name: Poly A polymerase family Pfam Description: Poly A polymerase family
  misc_feature (5)..(369): Homolog of NCBI NO: 7434868 NR Description: probable tRNA adenylyltransferase (EC 2.7.7.25) - Arabidopsis thaliana >gi|3287692|gb|AAC25520.1|AAC25520 Similar tRNA adenylyltransferase gb|U15930 from Lupinus albus. EST
  misc_feature (370)..(575): Homolog of NCBI NO: 7434868 NR Description: probable tRNA adenylyltransferase (EC 2.7.7.25) - Arabidopsis thaliana >gi|3287692|gb|AAC25520.1|AAC25520 Similar tRNA adenylyltransferase gb|U15930 from Lupinus albus. EST
  misc_feature (81)..(568): Homolog of NCBI NO: 2129851 NR Description: tRNA adenylyltransferase (EC 2.7.7.25) - white
  misc_feature (114)..(604): Homolog of NCBI NO: 6321016 NR Description: tRNA nucleotidyltransferase (tRNA Cca1p [Saccharomyces cerevisiae] >gi|135969|sp|P21269|CCA1_YEAST nucleotidyltransferase, mitochondrial precursor (tRNA
  misc_feature (88)..(338): Homolog of NCBI NO: 27734230 NR Description: tRNA nucleotidyltransferase (tRNA
  misc_feature (81)..(369): Homolog of NCBI NO: 29246802 NR Description: GLP_0_2580_4190 [Giardia lamblia ATCC 50803]
  misc_feature (115)..(467): Homolog of NCBI NO: 9836828 NR Description: tRNA nucleotidyltransferase [Kluyveromyces lactis]
  misc_feature (68)..(339): Homolog of NCBI NO: 40742173 NR Description: hypothetical protein AN7312.2 [Aspergillus
  misc_feature (88)..(519): Homolog of NCBI NO: 19075619 NR Description: putative trna nucleotidyltransferase precursor
  misc_feature (86)..(343): Homolog of NCBI NO: 23508403 NR Description: hypothetical protein [Plasmodium falciparum 3D7]
ILKTMRLSSLPINTLINLPKSLFLISPFRFRNLNRSLTVASRISSTLLRVSGVSSRPCGYWFSTNAAMTNVGEEDKQSIPSIELKENIELTDKERKIFDRLLSTLRYCNLDTQLRVAGGWVRDKLLGKESDDIDIAIDNMSGSEFLDKFKEYLSSRDEEVQGDTVIERNPDQSKHLETAKLRIYDQWIDFVNLRSEEYTENSRIPTMKFGTAKDDAFRRDLTINSLFYNINSGAVEDLTERGIDDLKSGKIVTPLPAKATFLDDPLRVLRAVRFGARFGFTLDEELKEAASSEEVRVALGEKISRERIGNEIDLMISGNGPVSAVTYLSDLKLFSVVFALPSSAEPSPPENCGSLSQSYLEAMWSLLKTPRPGKFSGEQRRLALYAAMFLPFRKTVYKDTKGKSIPVVNHIFKFSMKRKTSDAETVMNIHQTTERFRSLIPSLEVKKDVELDELTWAADILEHWKSITLNDPVIPATSKIRVLTGFLLRDIKDFWRVSLLTSLLLSATVDGSNDHQDIGQLDFQLERMRETYLTVEATIHELGLDKIWDAKPLVNGREIMQIAELKGGSRLIREWQQKLLTWQLAYPNGTAEECKEWMRDIKAKRQRIE

SEQ ID NO: 82536 - protein, 605 aa, Arabidopsis thaliana
  peptide (1)..(605): Ceres Seq. ID no. 12666069
  misc_feature (174)..(343): Pfam Name: Poly A polymerase family Pfam Description: Poly A polymerase family
  misc_feature (1)..(365): Homolog of NCBI NO: 7434868 NR Description: probable tRNA adenylyltransferase (EC 2.7.7.25) - Arabidopsis thaliana >gi|3287692|gb|AAC25520.1|AAC25520 Similar tRNA adenylyltransferase gb|U15930 from Lupinus albus. EST
  misc_feature (366)..(571): Homolog of NCBI NO: 7434868 NR Description: probable tRNA adenylyltransferase (EC 2.7.7.25) - Arabidopsis thaliana >gi|3287692|gb|AAC25520.1|AAC25520 Similar tRNA adenylyltransferase gb|U15930 from Lupinus albus. EST
  misc_feature (77)..(564): Homolog of NCBI NO: 2129851 NR Description: tRNA adenylyltransferase (EC 2.7.7.25) - white
  misc_feature (110)..(600): Homolog of NCBI NO: 6321016 NR Description: tRNA nucleotidyltransferase (tRNA Cca1p [Saccharomyces cerevisiae] >gi|135969|sp|P21269|CCA1_YEAST nucleotidyltransferase, mitochondrial precursor (tRNA
  misc_feature (84)..(334): Homolog of NCBI NO: 27734230 NR Description: tRNA nucleotidyltransferase (tRNA
  misc_feature (77)..(365): Homolog of NCBI NO: 29246802 NR Description: GLP_0_2580_4190 [Giardia lamblia ATCC 50803]
  misc_feature (111)..(463): Homolog of NCBI NO: 9836828 NR Description: tRNA nucleotidyltransferase [Kluyveromyces lactis]
  misc_feature (64)..(335): Homolog of NCBI NO: 40742173 NR Description: hypothetical protein AN7312.2 [Aspergillus
  misc_feature (84)..(515): Homolog of NCBI NO: 19075619 NR Description: putative trna nucleotidyltransferase precursor
  misc_feature (82)..(339): Homolog of NCBI NO: 23508403 NR Description: hypothetical protein [Plasmodium falciparum 3D7]
MRLSSLPINTLINLPKSLFLISPFRFRNLNRSLTVASRISSTLLRVSGVSSRPCGYWFSTNAAMTNVGEEDKQSIPSIELKENIELTDKERKIFDRLLSTLRYCNLDTQLRVAGGWVRDKLLGKESDDIDIAIDNMSGSEFLDKFKEYLSSRDEEVQGDTVIERNPDQSKHLETAKLRIYDQWIDFVNLRSEEYTENSRIPTMKFGTAKDDAFRRDLTINSLFYNINSGAVEDLTERGIDDLKSGKIVTPLPAKATFLDDPLRVLRAVRFGARFGFTLDEELKEAASSEEVRVALGEKISRERIGNEIDLMISGNGPVSAVTYLSDLKLFSVVFALPSSAEPSPPENCGSLSQSYLEAMWSLLKTPRPGKFSGEQRRLALYAAMFLPFRKTVYKDTKGKSIPVVNHIFKFSMKRKTSDAETVMNIHQTTERFRSLIPSLEVKKDVELDELTWAADILEHWKSITLNDPVIPATSKIRVLTGFLLRDIKDFWRVSLLTSLLLSATVDGSNDHQDIGQLDFQLERMRETYLTVEATIHELGLDKIWDAKPLVNGREIMQIAELKGGSRLIREWQQKLLTWQLAYPNGTAEECKEWMRDIKAKRQRIE

SEQ ID NO: 82537 - protein, 542 aa, Arabidopsis thaliana
  peptide (1)..(542): Ceres Seq. ID no. 12666070
  misc_feature (111)..(280): Pfam Name: Poly A polymerase family Pfam Description: Poly A polymerase family
  misc_feature (1)..(302): Homolog of NCBI NO: 7434868 NR Description: probable tRNA adenylyltransferase (EC 2.7.7.25) - Arabidopsis thaliana >gi|3287692|gb|AAC25520.1|AAC25520 Similar tRNA adenylyltransferase gb|U15930 from Lupinus albus. EST
  misc_feature (303)..(508): Homolog of NCBI NO: 7434868 NR Description: probable tRNA adenylyltransferase (EC 2.7.7.25) - Arabidopsis thaliana >gi|3287692|gb|AAC25520.1|AAC25520 Similar tRNA adenylyltransferase gb|U15930 from Lupinus albus. EST
  misc_feature (14)..(501): Homolog of NCBI NO: 2129851 NR Description: tRNA adenylyltransferase (EC 2.7.7.25) - white
  misc_feature (47)..(537): Homolog of NCBI NO: 6321016 NR Description: tRNA nucleotidyltransferase (tRNA Cca1p [Saccharomyces cerevisiae] >gi|135969|sp|P21269|CCA1_YEAST nucleotidyltransferase, mitochondrial precursor (tRNA
  misc_feature (21)..(271): Homolog of NCBI NO: 27734230 NR Description: tRNA nucleotidyltransferase (tRNA
  misc_feature (14)..(302): Homolog of NCBI NO: 29246802 NR Description: GLP_0_2580_4190 [Giardia lamblia ATCC 50803]
  misc_feature (48)..(400): Homolog of NCBI NO: 9836828 NR Description: tRNA nucleotidyltransferase [Kluyveromyces lactis]
  misc_feature (1)..(272): Homolog of NCBI NO: 40742173 NR Description: hypothetical protein AN7312.2 [Aspergillus
  misc_feature (21)..(452): Homolog of NCBI NO: 19075619 NR Description: putative trna nucleotidyltransferase precursor
  misc_feature (19)..(276): Homolog of NCBI NO: 23508403 NR Description: hypothetical protein [Plasmodium falciparum 3D7]
MTNVGEEDKQSIPSIELKENIELTDKERKIFDRLLSTLRYCNLDTQLRVAGGWVRDKLLGKESDDIDIAIDNMSGSEFLDKFKEYLSSRDEEVQGDTVIERNPDQSKHLETAKLRIYDQWIDFVNLRSEEYTENSRIPTMKFGTAKDDAFRRDLTINSLFYNINSGAVEDLTERGIDDLKSGKIVTPLPAKATFLDDPLRVLRAVRFGARFGFTLDEELKEAASSEEVRVALGEKISRERIGNEIDLMISGNGPVSAVTYLSDLKLFSVVFALPSSAEPSPPENCGSLSQSYLEAMWSLLKTPRPGKFSGEQRRLALYAAMFLPFRKTVYKDTKGKSIPVVNHIFKFSMKRKTSDAETVMNIHQTTERFRSLIPSLEVKKDVELDELTWAADILEHWKSITLNDPVIPATSKIRVLTGFLLRDIKDFWRVSLLTSLLLSATVDGSNDHQDIGQLDFQLERMRETYLTVEATIHELGLDKIWDAKPLVNGREIMQIAELKGGSRLIREWQQKLLTWQLAYPNGTAEECKEWMRDIKAKRQRIE

SEQ ID NO: 82538 - DNA, 1188 bp, Arabidopsis thaliana
  misc_feature (1)..(1188): Ceres Seq. ID no. 12666081
  misc_feature: MA Experiment ID: 20000355 Result: Up-regulated in Transcription
  misc_feature: MA Experiment 20000355 PARAMETER Experiment Name: At_Siliques_Sub_P Parameter: Age (day) Value: 21
  misc_feature: MA Experiment 20000355 PARAMETER Experiment Name: At_Siliques_Sub_P Parameter: Organism Value: A. thaliana
  misc_feature: MA Experiment 20000355 PARAMETER Experiment Name: At_Siliques_Sub_P Parameter: Plant Line Value: WS
  misc_feature: MA Experiment 20000355 PARAMETER Experiment Name: At_Siliques_Sub_P Parameter: Tissue Value: Less Than 5mm Siliques vs. Whole Plant
  misc_feature: MA Experiment ID: 20000440 Result: Up-regulated in Transcription
  misc_feature: MA Experiment 20000440 PARAMETER Experiment Name: At_Closed-Flower__Sub_P Parameter: Tissue Value: Closed Flower vs. Whole Plant
atgagatttgctactctgttttcggttttgctgcttcttcttcgattcggtttaatcgtggaatcgatcatcgtcccagttgatttcttggctctgcaagcgattcgtaaatcactcgatgatttgccaggttccaatttcttcgattcatgggatttcacctctgatccttgtaacttcgcaggagtttactgtgacgatgataaagtaaccgcgcttaacctcggtgatccaagagccggttcacccggtttatctggtcggattgacccggctattggaaaactctctgctttaacggagctctctatcgtcccgggtcggatcatgggttcgttaccgcatacaatctcacagtcaaagaatcttcgatttctcgcaatcagtcggaatttcatctccggtgagattccagcgagtctaagcgagcttcggggactcaaaacgcttgatttgagctataatcagctaaccgggtcgatccctccgtcaatcggatccttaccggagctatccaatctgattctatgtcacaatcacttgaacggatcaattcctcaattcctctcacaatccttaacccgaatcgatctcaagcgcaacaatctcaccggtataatttctctgacgtctcttccgccgtcgttacaatatctctcgctcgcttggaaccagctaaccggtccagtataccgggttttactcagattaaaccagctcaattaccttgatctcagcttaaaccggttcaccggtgcaatccccggtcagatcttcaccttcccgatcaccaatcttcaattacaacgcaatttcttctacggcgtgatccaaccgccgaatcaggtaacaataccaaccgtcgatttaagctacaacagattctccggcgagctttctccgcttctctccaacgtacagaacctatatttgaacaataaccggttcaccggtcaagttccggttagcttcgtggatcggttattggcatcgaatattcaaacactgtacctccaacacaacttcttgacgggaatacaaattagcccggcggcagatattccggtgagcagctcgctgtgtctgcaatacaactgtatggtgctaccggtacagacgccgtgtccggttaaagccggtttgcagaaaactagacccacaacgcagtgcagcgagtggcgagggtaa

SEQ ID NO: 82539 - protein, 395 aa, Arabidopsis thaliana
  peptide (1)..(395): Ceres Seq. ID no. 12666082
  misc_feature (305)..(329): Pfam Name: Leucine Rich Repeat Pfam Description: Leucine Rich Repeat
  misc_feature (1)..(395): Homolog of NCBI NO: 15236232 NR Description: leucine rich repeat protein family; protein id:
  misc_feature (1)..(395): Homolog of NCBI NO: 25406734 NR Description: protein F21B7.6 [imported] - Arabidopsis thaliana F21B7.6 [Arabidopsis thaliana]
  misc_feature (1)..(395): Homolog of NCBI NO: 30678566 NR Description: leucine rich repeat protein family [Arabidopsis
  misc_feature (7)..(393): Homolog of NCBI NO: 15229088 NR Description: leucine rich repeat protein family; protein id:
  misc_feature (6)..(391): Homolog of NCBI NO: 15231699 NR Description: leucine rich repeat protein family; protein id:
  misc_feature (6)..(350): Homolog of NCBI NO: 15225286 NR Description: putative receptor-like protein kinase, ERECTA; id: At2g26330.1, supported by cDNA: gi_1345131, supported by
  misc_feature (31)..(371): Homolog of NCBI NO: 15241760 NR Description: putative protein; protein id: At5g62230.1
  misc_feature (31)..(345): Homolog of NCBI NO: 8809636 NR Description: receptor-like protein kinase [Arabidopsis
  misc_feature (85)..(345): Homolog of NCBI NO: 3894385 NR Description: Hcr2-0A [Lycopersicon esculentum]
  misc_feature (34)..(350): Homolog of NCBI NO: 15240720 NR Description: receptor-like protein kinase; protein id:
MRFATLFSVLLLLLRFGLIVESIIVPVDFLALQAIRKSLDDLPGSNFFDSWDFTSDPCNFAGVYCDDDKVTALNLGDPRAGSPGLSGRIDPAIGKLSALTELSIVPGRIMGSLPHTISQSKNLRFLAISRNFISGEIPASLSELRGLKTLDLSYNQLTGSIPPSIGSLPELSNLILCHNHLNGSIPQFLSQSLTRIDLKRNNLTGIISLTSLPPSLQYLSLAWNQLTGPVYRVLLRLNQLNYLDLSLNRFTGAIPGQIFTFPITNLQLQRNFFYGVIQPPNQVTIPTVDLSYNRFSGELSPLLSNVQNLYLNNNRFTGQVPVSFVDRLLASNIQTLYLQHNFLTGIQISPAADIPVSSSLCLQYNCMVLPVQTPCPVKAGLQKTRPTTQCSEWRG

SEQ ID NO: 82540 - protein, 286 aa, Arabidopsis thaliana
  peptide (1)..(286): Ceres Seq. ID no. 12666083
  misc_feature (196)..(220): Pfam Name: Leucine Rich Repeat Pfam Description: Leucine Rich Repeat
  misc_feature (1)..(286): Homolog of NCBI NO: 15236232 NR Description: leucine rich repeat protein family; protein id:
  misc_feature (1)..(286): Homolog of NCBI NO: 25406734 NR Description: protein F21B7.6 [imported] - Arabidopsis thaliana F21B7.6 [Arabidopsis thaliana]
  misc_feature (1)..(286): Homolog of NCBI NO: 30678566 NR Description: leucine rich repeat protein family [Arabidopsis
  misc_feature (1)..(284): Homolog of NCBI NO: 15229088 NR Description: leucine rich repeat protein family; protein id:
  misc_feature (1)..(282): Homolog of NCBI NO: 15231699 NR Description: leucine rich repeat protein family; protein id:
  misc_feature (1)..(241): Homolog of NCBI NO: 15225286 NR Description: putative receptor-like protein kinase, ERECTA; id: At2g26330.1, supported by cDNA: gi_1345131, supported by
  misc_feature (1)..(262): Homolog of NCBI NO: 15241760 NR Description: putative protein; protein id: At5g62230.1
  misc_feature (1)..(236): Homolog of NCBI NO: 8809636 NR Description: receptor-like protein kinase [Arabidopsis
  misc_feature (1)..(236): Homolog of NCBI NO: 3894385 NR Description: Hcr2-0A [Lycopersicon esculentum]
  misc_feature (1)..(241): Homolog of NCBI NO: 15240720 NR Description: receptor-like protein kinase; protein id:
MGSLPHTISQSKNLRFLAISRNFISGEIPASLSELRGLKTLDLSYNQLTGSIPPSIGSLPELSNLILCHNHLNGSIPQFLSQSLTRIDLKRNNLTGIISLTSLPPSLQYLSLAWNQLTGPVYRVLLRLNQLNYLDLSLNRFTGAIPGQIFTFPITNLQLQRNFFYGVIQPPNQVTIPTVDLSYNRFSGELSPLLSNVQNLYLNNNRFTGQVPVSFVDRLLASNIQTLYLQHNFLTGIQISPAADIPVSSSLCLQYNCMVLPVQTPCPVKAGLQKTRPTTQCSEWRG

SEQ ID NO: 82541 - DNA, 840 bp, Arabidopsis thaliana
  misc_feature (1)..(840): Ceres Seq. ID no. 12666101
  misc_feature: MA Experiment ID: 20000185 Result: Up-regulated in Transcription
  misc_feature: MA Experiment 20000185 PARAMETER Experiment Name: At_Roots__P Parameter: Age (day) Value: 7 vs. 21
  misc_feature: MA Experiment 20000185 PARAMETER Experiment Name: At_Roots__P Parameter: Organism Value: A. thaliana
  misc_feature: MA Experiment 20000185 PARAMETER Experiment Name: At_Roots__P Parameter: Tissue Value: Roots vs. Whole Plant
  misc_feature: MA Experiment ID: 20000227 Result: Up-regulated in Transcription
  misc_feature: MA Experiment 20000227 PARAMETER Experiment Name: At_Root-Tips-vs-Tops_P Parameter: Tissue Value: Root Tips vs. Root Tops
  misc_feature: MA Experiment ID: 20000436 Result: Up-regulated in Transcription
  misc_feature: MA Experiment 20000436 PARAMETER Experiment Name: At_Drought_P Parameter: Age (day) Value: 7
  misc_feature: MA Experiment 20000436 PARAMETER Experiment Name: At_Drought_P Parameter: Organism Value: A. thaliana
  misc_feature: MA Experiment 20000436 PARAMETER Experiment Name: At_Drought_P Parameter: Plant Line Value: WS
  misc_feature: MA Experiment 20000436 PARAMETER Experiment Name: At_Drought_P Parameter: Timepoint (hr) Value: 12
  misc_feature: MA Experiment 20000436 PARAMETER Experiment Name: At_Drought_P Parameter: Tissue Value: Whole Plant
  misc_feature: MA Experiment 20000436 PARAMETER Experiment Name: At_Drought_P Parameter: Treatment Value: Drought vs. No Drought
  misc_feature: MA Experiment ID: 20000437 Result: Up-regulated in Transcription
  misc_feature: MA Experiment 20000437 PARAMETER Experiment Name: At_Drought_P Parameter: Age (day) Value: 8
  misc_feature: MA Experiment 20000437 PARAMETER Experiment Name: At_Drought_P Parameter: Organism Value: A. thaliana
  misc_feature: MA Experiment 20000437 PARAMETER Experiment Name: At_Drought_P Parameter: Plant Line Value: WS
  misc_feature: MA Experiment 20000437 PARAMETER Experiment Name: At_Drought_P Parameter: Timepoint (hr) Value: 24
  misc_feature: MA Experiment 20000437 PARAMETER Experiment Name: At_Drought_P Parameter: Tissue Value: Whole Plant
  misc_feature: MA Experiment 20000437 PARAMETER Experiment Name: At_Drought_P Parameter: Treatment Value: Drought vs. No Drought
  misc_feature: MA Experiment ID: 20001557 Result: Up-regulated in Transcription
  misc_feature: MA Experiment 20001557 PARAMETER Experiment Name: At_Drought_Soil_Dry_P Parameter: Age (day) Value: 27
  misc_feature: MA Experiment 20001557 PARAMETER Experiment Name: At_Drought_Soil_Dry_P Parameter: Organism Value: A. thaliana
  misc_feature: MA Experiment 20001557 PARAMETER Experiment Name: At_Drought_Soil_Dry_P Parameter: Plant Line Value: WS
  misc_feature: MA Experiment 20001557 PARAMETER Experiment Name: At_Drought_Soil_Dry_P Parameter: Post Timepoint (hr) Value: 3
  misc_feature: MA Experiment 20001557 PARAMETER Experiment Name: At_Drought_Soil_Dry_P Parameter: Post-Treatment Value: Re-Water vs. No Drought
  misc_feature: MA Experiment 20001557 PARAMETER Experiment Name: At_Drought_Soil_Dry_P Parameter: Timepoint (day) Value: 13
  misc_feature: MA Experiment 20001557 PARAMETER Experiment Name: At_Drought_Soil_Dry_P Parameter: Treatment Value: Drought vs. No Drought
  misc_feature: MA Experiment ID: 20001558 Result: Up-regulated in Transcription
  misc_feature: MA Experiment 20001558 PARAMETER Experiment Name: At_Drought_Soil_Dry_P Parameter: Age (day) Value: 27
  misc_feature: MA Experiment 20001558 PARAMETER Experiment Name: At_Drought_Soil_Dry_P Parameter: Organism Value: A. thaliana
  misc_feature: MA Experiment 20001558 PARAMETER Experiment Name: At_Drought_Soil_Dry_P Parameter: Plant Line Value: WS
  misc_feature: MA Experiment 20001558 PARAMETER Experiment Name: At_Drought_Soil_Dry_P Parameter: Post Timepoint (hr) Value: 6
  misc_feature: MA Experiment 20001558 PARAMETER Experiment Name: At_Drought_Soil_Dry_P Parameter: Post-Treatment Value: Re-Water vs. No Drought
  misc_feature: MA Experiment 20001558 PARAMETER Experiment Name: At_Drought_Soil_Dry_P Parameter: Timepoint (day) Value: 13
  misc_feature: MA Experiment 20001558 PARAMETER Experiment Name: At_Drought_Soil_Dry_P Parameter: Treatment Value: Drought vs. No Drought
  misc_feature: Pfam Name: adh_short Pfam Description: short chain dehydrogenase
atgacagggatatacaaagtaatttgctattacaagaagctagaaggtaaagtagcactcatcactggaggagcaagtgggattggcaaagcaacagccggaaaattcatcagtcatggagccaaagttatcattgccgatatccaaccgcagattgggcgagaaaccgagcaagaactcggtcccagttgtgcttacttcccatgcgatgtgaccaaagaatcagacattgctaacgcagttgacttcgctgtctcgctccatacaaagctcgacattatgtacaacaatgctggtattccctgcaaaacgcctcctagtatcgttgatcttgatctcaatgttttcgacaaggtaatcaacacaaatgtccgtggagtcatggcaggaatcaaacatgctgctcgtgtgatgatcccgcgtaactctggatccatcatttgtgcagggagtgtcacggggatgatgggcggtttagcccaacatacttacagcgtctcaaaatccgctgttatcggaattgtaagatcaacagcttcagaactatgcaagcacaggatccgggtcaactgcatttctccttttgcgatcacaacatcattcgtgatggatgagatgcgacagatttaccccggtgttgatgactcaaggctgatccagatagtgcagagtacaggagtgttaaatggagaggtttgtgaaccaaccgatgtagctaatgcagcggtgtatctcgcttccgatgattcaaagtatgtaaatgggcataatctggtggtagatggaggattcacaactgtaaagacgttagatttccctgcacctgaccaagtgaagtaa

SEQ ID NO: 82542 - protein, 279 aa, Arabidopsis thaliana
  peptide (1)..(279): Ceres Seq. ID no. 12666102
  misc_feature: Pfam Name: adh_short Pfam Description: short chain dehydrogenase
  misc_feature (1)..(279): Homolog of NCBI NO: 18412155 NR Description: putative alcohol dehydrogenase; protein id:
  misc_feature (12)..(279): Homolog of NCBI NO: 25283123 NR Description: probable alcohol dehydrogenase [imported] - thaliana >gi|4262142|gb|AAD14442.1| putative alcohol [Arabidopsis thaliana] >gi|7270184|emb|CAB77799.1| putative
  misc_feature (113)..(279): Homolog of NCBI NO: 21618306 NR Description: unknown [Arabidopsis thaliana]
  misc_feature (12)..(274): Homolog of NCBI NO: 30688484 NR Description: short-chain dehydrogenase/reductase family protein
  misc_feature (9)..(275): Homolog of NCBI NO: 18405088 NR Description: putative short chain alcohol dehydrogenase; id: At3g26770.1, supported by cDNA: gi_15529183 [Arabidopsis
  misc_feature (9)..(275): Homolog of NCBI NO: 15529184 NR Description: AT3g26770/MDJ14_21 [Arabidopsis thaliana]
  misc_feature (12)..(275): Homolog of NCBI NO: 33146507 NR Description: putative short-chain alcohol dehydrogenase [Oryza
  misc_feature (12)..(272): Homolog of NCBI NO: 34899216 NR Description: alcohol dehydrogenase-like protein [Oryza sativa
  misc_feature (12)..(276): Homolog of NCBI NO: 34899222 NR Description: alcohol dehydrogenase-like protein~contains EST
  misc_feature (11)..(268): Homolog of NCBI NO: 34899202 NR Description: short chain alcohol dehydrogenase-like protein
MTGIYKVICYYKKLEGKVALITGGASGIGKATAGKFISHGAKVIIADIQPQIGRETEQELGPSCAYFPCDVTKESDIANAVDFAVSLHTKLDIMYNNAGIPCKTPPSIVDLDLNVFDKVINTNVRGVMAGIKHAARVMIPRNSGSIICAGSVTGMMGGLAQHTYSVSKSAVIGIVRSTASELCKHRIRVNCISPFAITTSFVMDEMRQIYPGVDDSRLIQIVQSTGVLNGEVCEPTDVANAAVYLASDDSKYVNGHNLVVDGGFTTVKTLDFPAPDQVK

SEQ ID NO: 82543 - protein, 186 aa, Arabidopsis thaliana; identical to SEQ ID NO: 29806
  peptide (1)..(186): Ceres Seq. ID no. 12666103
  misc_feature: Pfam Name: adh_short Pfam Description: short chain dehydrogenase
  misc_feature (1)..(186): Homolog of NCBI NO: 18412155 NR Description: putative alcohol dehydrogenase; protein id:
  misc_feature (1)..(186): Homolog of NCBI NO: 25283123 NR Description: probable alcohol dehydrogenase [imported] - thaliana >gi|4262142|gb|AAD14442.1| putative alcohol [Arabidopsis thaliana] >gi|7270184|emb|CAB77799.1| putative
  misc_feature (20)..(186): Homolog of NCBI NO: 21618306 NR Description: unknown [Arabidopsis thaliana]
  misc_feature (1)..(181): Homolog of NCBI NO: 30688484 NR Description: short-chain dehydrogenase/reductase family protein
  misc_feature (1)..(182): Homolog of NCBI NO: 18405088 NR Description: putative short chain alcohol dehydrogenase; id: At3g26770.1, supported by cDNA: gi_15529183 [Arabidopsis
  misc_feature (1)..(182): Homolog of NCBI NO: 15529184 NR Description: AT3g26770/MDJ14_21 [Arabidopsis thaliana]
  misc_feature (1)..(182): Homolog of NCBI NO: 33146507 NR Description: putative short-chain alcohol dehydrogenase [Oryza
  misc_feature (1)..(179): Homolog of NCBI NO: 34899216 NR Description: alcohol dehydrogenase-like protein [Oryza sativa
  misc_feature (1)..(183): Homolog of NCBI NO: 34899222 NR Description: alcohol dehydrogenase-like protein~contains EST
  misc_feature (1)..(175): Homolog of NCBI NO: 34899202 NR Description: short chain alcohol dehydrogenase-like protein

SEQ ID NO: 82544 - protein, 152 aa, Arabidopsis thaliana
  peptide (1)..(152): Ceres Seq. ID no. 12666104
  misc_feature: Pfam Name: adh_short Pfam Description: short chain dehydrogenase
  misc_feature (1)..(152): Homolog of NCBI NO: 18412155 NR Description: putative alcohol dehydrogenase; protein id:
  misc_feature (1)..(152): Homolog of NCBI NO: 25283123 NR Description: probable alcohol dehydrogenase [imported] - thaliana >gi|4262142|gb|AAD14442.1| putative alcohol [Arabidopsis thaliana] >gi|7270184|emb|CAB77799.1| putative
  misc_feature (1)..(152): Homolog of NCBI NO: 21618306 NR Description: unknown [Arabidopsis thaliana]
  misc_feature (1)..(147): Homolog of NCBI NO: 30688484 NR Description: short-chain dehydrogenase/reductase family protein
  misc_feature (1)..(148): Homolog of NCBI NO: 18405088 NR Description: putative short chain alcohol dehydrogenase; id: At3g26770.1, supported by cDNA: gi_15529183 [Arabidopsis
  misc_feature (1)..(148): Homolog of NCBI NO: 15529184 NR Description: AT3g26770/MDJ14_21 [Arabidopsis thaliana]
  misc_feature (1)..(148): Homolog of NCBI NO: 33146507 NR Description: putative short-chain alcohol dehydrogenase [Oryza
  misc_feature (1)..(145): Homolog of NCBI NO: 34899216 NR Description: alcohol dehydrogenase-like protein [Oryza sativa
  misc_feature (1)..(149): Homolog of NCBI NO: 34899222 NR Description: alcohol dehydrogenase-like protein~contains EST
  misc_feature (1)..(141): Homolog of NCBI NO: 34899202 NR Description: short chain alcohol dehydrogenase-like protein
MAGIKHAARVMIPRNSGSIICAGSVTGMMGGLAQHTYSVSKSAVIGIVRSTASELCKHRIRVNCISPFAITTSFVMDEMRQIYPGVDDSRLIQIVQSTGVLNGEVCEPTDVANAAVYLASDDSKYVNGHNLVVDGGFTTVKTLDFPAPDQVK

SEQ ID NO: 82545 - DNA, 909 bp, Arabidopsis thaliana
  misc_feature (1)..(909): Ceres Seq. ID no. 12666133
atggagtttcatcttgaacatcctctctcacattcttcactccacaataacttcaacgacgacacagactatgaaactttaccacactctctcttcctcgtcgagtttcaacacatgccttcttctcattacttccatagcctcaagtcctctgcttttcttctctctaatcgaaaccaagccatttcttcaatcactcagtattcaagaaaattcgacgacccatctctgacgtatcttgctgtgaattatctagacaggttcttgtctagcgaagatatgccgcagtcaaagccctggattcttaagctcatatctctctcttgtgtctctttgtctgcaaaaatgaggaaaccagacatgtctgtttctgatcttccggtggaaggtgagttttttgatgctcagatgatagagagaatggagaatgtgattctaggagctcttaaatggaggatgcgctctgttactcctttctcctttttggcctttttcattagtctctttgagctcaaagaagaagatcctttactactaaaacattccctcaaatctcaaaccagtgatcttactttcagtcttcaacatgatatcagtttcctcgagtttaaaccatcggtgattgcaggcgcggcacttctctttgcttctttcgagctctgtcctctacagtttccatgtttcagtaacagaatcaaccaatgcacatatgtaaataaggatgagttaatggagtgttacaaagcaatacaagagagagatattatagttggagaaaacgaaggaagcactgaaacagcagtaaatgtgcttgatcagcaattctcgagttgtgaaagcgataagagcatcacaatcacagcttcttcttcacctaagaggaggaaaactagtactcgtcgttactaa

SEQ ID NO: 82546 - protein, 302 aa, Arabidopsis thaliana
  peptide (1)..(302): Ceres Seq. ID no. 12666134
  misc_feature (156)..(293): Pfam Name: Cyclin, C-terminal domain Pfam Description: Cyclin, C-terminal domain
  misc_feature (1)..(302): Homolog of NCBI NO: 15236274 NR Description: Cyclin D6;1; protein id: At4g03270.1 [Arabidopsis
  misc_feature (35)..(296): Homolog of NCBI NO: 34906810 NR Description: D-type cyclin-like protein [Oryza sativa
  misc_feature (35)..(301): Homolog of NCBI NO: 19070611 NR Description: D-type cyclin [Zea mays]
  misc_feature (23)..(283): Homolog of NCBI NO: 7484663 NR Description: cyclin D-like protein - red goosefoot
  misc_feature (35)..(296): Homolog of NCBI NO: 25989347 NR Description: cyclin D1 [Helianthus tuberosus]
  misc_feature (30)..(255): Homolog of NCBI NO: 25809160 NR Description: cyclin D protein [Physcomitrella patens]
  misc_feature (23)..(291): Homolog of NCBI NO: 4586801 NR Description: NtcycD3-1 [Nicotiana tabacum]
  misc_feature (6)..(225): Homolog of NCBI NO: 15238462 NR Description: Cyclin D4;1; protein id: At5g65420.1, supported
  misc_feature (6)..(225): Homolog of NCBI NO: 21536631 NR Description: D-type cyclin [Arabidopsis thaliana]
  misc_feature (6)..(225): Homolog of NCBI NO: 4688615 NR Description: D-type cyclin [Arabidopsis thaliana]
MEFHLEHPLSHSSLHNNFNDDTDYETLPHSLFLVEFQHMPSSHYFHSLKSSAFLLSNRNQAISSITQYSRKFDDPSLTYLAVNYLDRFLSSEDMPQSKPWILKLISLSCVSLSAKMRKPDMSVSDLPVEGEFFDAQMIERMENVILGALKWRMRSVTPFSFLAFFISLFELKEEDPLLLKHSLKSQTSDLTFSLQHDISFLEFKPSVIAGAALLFASFELCPLQFPCFSNRINQCTYVNKDELMECYKAIQERDIIVGENEGSTETAVNVLDQQFSSCESDKSITITASSSPKRRKTSTRRY

SEQ ID NO: 82547 - protein, 264 aa, Arabidopsis thaliana
  peptide (1)..(264): Ceres Seq. ID no. 12666135
  misc_feature (118)..(255): Pfam Name: Cyclin, C-terminal domain Pfam Description: Cyclin, C-terminal domain
  misc_feature (1)..(264): Homolog of NCBI NO: 15236274 NR Description: Cyclin D6;1; protein id: At4g03270.1 [Arabidopsis
  misc_feature (1)..(258): Homolog of NCBI NO: 34906810 NR Description: D-type cyclin-like protein [Oryza sativa
  misc_feature (1)..(263): Homolog of NCBI NO: 19070611 NR Description: D-type cyclin [Zea mays]
  misc_feature (1)..(245): Homolog of NCBI NO: 7484663 NR Description: cyclin D-like protein - red goosefoot
  misc_feature (1)..(258): Homolog of NCBI NO: 25989347 NR Description: cyclin D1 [Helianthus tuberosus]
  misc_feature (1)..(217): Homolog of NCBI NO: 25809160 NR Description: cyclin D protein [Physcomitrella patens]
  misc_feature (1)..(253): Homolog of NCBI NO: 4586801 NR Description: NtcycD3-1 [Nicotiana tabacum]
  misc_feature (1)..(187): Homolog of NCBI NO: 15238462 NR Description: Cyclin D4;1; protein id: At5g65420.1, supported
  misc_feature (1)..(187): Homolog of NCBI NO: 21536631 NR Description: D-type cyclin [Arabidopsis thaliana]
  misc_feature (1)..(187): Homolog of NCBI NO: 4688615 NR Description: D-type cyclin [Arabidopsis thaliana]
MPSSHYFHSLKSSAFLLSNRNQAISSITQYSRKFDDPSLTYLAVNYLDRFLSSEDMPQSKPWILKLISLSCVSLSAKMRKPDMSVSDLPVEGEFFDAQMIERMENVILGALKWRMRSVTPFSFLAFFISLFELKEEDPLLLKHSLKSQTSDLTFSLQHDISFLEFKPSVIAGAALLFASFELCPLQFPCFSNRINQCTYVNKDELMECYKAIQERDIIVGENEGSTETAVNVLDQQFSSCESDKSITITASSSPKRRKTSTRRY

SEQ ID NO: 82548 - protein, 209 aa, Arabidopsis thaliana
  peptide (1)..(209): Ceres Seq. ID no. 12666136
  misc_feature (63)..(200): Pfam Name: Cyclin, C-terminal domain Pfam Description: Cyclin, C-terminal domain
  misc_feature (1)..(209): Homolog of NCBI NO: 15236274 NR Description: Cyclin D6;1; protein id: At4g03270.1 [Arabidopsis
  misc_feature (1)..(203): Homolog of NCBI NO: 34906810 NR Description: D-type cyclin-like protein [Oryza sativa
  misc_feature (1)..(208): Homolog of NCBI NO: 19070611 NR Description: D-type cyclin [Zea mays]
  misc_feature (1)..(190): Homolog of NCBI NO: 7484663 NR Description: cyclin D-like protein - red goosefoot
  misc_feature (1)..(203): Homolog of NCBI NO: 25989347 NR Description: cyclin D1 [Helianthus tuberosus]
  misc_feature (1)..(162): Homolog of NCBI NO: 25809160 NR Description: cyclin D protein [Physcomitrella patens]
  misc_feature (1)..(198): Homolog of NCBI NO: 4586801 NR Description: NtcycD3-1 [Nicotiana tabacum]
  misc_feature (1)..(132): Homolog of NCBI NO: 15238462 NR Description: Cyclin D4;1; protein id: At5g65420.1, supported
  misc_feature (1)..(132): Homolog of NCBI NO: 21536631 NR Description: D-type cyclin [Arabidopsis thaliana]
  misc_feature (1)..(132): Homolog of NCBI NO: 4688615 NR Description: D-type cyclin [Arabidopsis thaliana]
MPQSKPWILKLISLSCVSLSAKMRKPDMSVSDLPVEGEFFDAQMIERMENVILGALKWRMRSVTPFSFLAFFISLFELKEEDPLLLKHSLKSQTSDLTFSLQHDISFLEFKPSVIAGAALLFASFELCPLQFPCFSNRINQCTYVNKDELMECYKAIQERDIIVGENEGSTETAVNVLDQQFSSCESDKSITITASSSPKRRKTSTRRY

SEQ ID NO: 82549 - DNA, 1486 bp, Arabidopsis thaliana
  misc_feature (1)..(1486): Ceres Seq. ID no. 12666154
  misc_feature: MA Experiment ID: 20000171 Result: Up-regulated in Transcription
  misc_feature: MA Experiment 20000171 PARAMETER Experiment Name: At_42deg_Heat_P Parameter: Age (day) Value: 14
  misc_feature: MA Experiment 20000171 PARAMETER Experiment Name: At_42deg_Heat_P Parameter: Organism Value: A. thaliana
  misc_feature: MA Experiment 20000171 PARAMETER Experiment Name: At_42deg_Heat_P Parameter: Plant Line Value: WS
  misc_feature: MA Experiment 20000171 PARAMETER Experiment Name: At_42deg_Heat_P Parameter: Temperature (deg C) Value: 42 vs. 22
  misc_feature: MA Experiment 20000171 PARAMETER Experiment Name: At_42deg_Heat_P Parameter: Timepoint (hr) Value: 1
  misc_feature: MA Experiment 20000171 PARAMETER Experiment Name: At_42deg_Heat_P Parameter: Tissue Value: Aerial
  misc_feature: MA Experiment ID: 20000173 Result: Up-regulated in Transcription
  misc_feature: MA Experiment 20000173 PARAMETER Experiment Name: At_42deg_Heat_P Parameter: Age (day) Value: 14
  misc_feature: MA Experiment 20000173 PARAMETER Experiment Name: At_42deg_Heat_P Parameter: Organism Value: A. thaliana
  misc_feature: MA Experiment 20000173 PARAMETER Experiment Name: At_42deg_Heat_P Parameter: Plant Line Value: WS
  misc_feature: MA Experiment 20000173 PARAMETER Experiment Name: At_42deg_Heat_P Parameter: Temperature (deg C) Value: 42 vs. 22
  misc_feature: MA Experiment 20000173 PARAMETER Experiment Name: At_42deg_Heat_P Parameter: Timepoint (hr) Value: 6
  misc_feature: MA Experiment 20000173 PARAMETER Experiment Name: At_42deg_Heat_P Parameter: Tissue Value: Aerial
  misc_feature: MA Experiment ID: 20000182 Result: Up-regulated in Transcription
  misc_feature: MA Experiment 20000182 PARAMETER Experiment Name: At_2mM_SA_P Parameter: Age (day) Value: 14
  misc_feature: MA Experiment 20000182 PARAMETER Experiment Name: At_2mM_SA_P Parameter: Organism Value: A. thaliana
  misc_feature: MA Experiment 20000182 PARAMETER Experiment Name: At_2mM_SA_P Parameter: Plant Line Value: WS
  misc_feature: MA Experiment 20000182 PARAMETER Experiment Name: At_2mM_SA_P Parameter: Timepoint (hr) Value: 6
  misc_feature: MA Experiment 20000182 PARAMETER Experiment Name: At_2mM_SA_P Parameter: Tissue Value: Aerial
  misc_feature: MA Experiment 20000182 PARAMETER Experiment Name: At_2mM_SA_P Parameter: Treatment Value: 2mM SA vs. No Treatment
  misc_feature: MA Experiment ID: 20000184 Result: Down-regulated in Transcription
  misc_feature: MA Experiment 20000184 PARAMETER Experiment Name: At_Shoots__P Parameter: Age (day) Value: 7
  misc_feature: MA Experiment 20000184 PARAMETER Experiment Name: At_Shoots__P Parameter: Tissue Value: Shoots vs. Whole Plant
  misc_feature: MA Experiment ID: 20000211 Result: Up-regulated in Transcription
  misc_feature: MA Experiment 20000211 PARAMETER Experiment Name: At_0.001percent_MeJA__P Parameter: Age (day) Value: 14
  misc_feature: MA Experiment 20000211 PARAMETER Experiment Name: At_0.001percent_MeJA__P Parameter: Organism Value: A. thaliana
  misc_feature: MA Experiment 20000211 PARAMETER Experiment Name: At_0.001percent_MeJA__P Parameter: Plant Line Value: WS
  misc_feature: MA Experiment 20000211 PARAMETER Experiment Name: At_0.001percent_MeJA__P Parameter: Timepoint (hr) Value: 1
  misc_feature: MA Experiment 20000211 PARAMETER Experiment Name: At_0.001percent_MeJA__P Parameter: Tissue Value: Aerial
  misc_feature: MA Experiment 20000211 PARAMETER Experiment Name: At_0.001percent_MeJA__P Parameter: Treatment Value: 0.001percent MeJA vs. No Treatment
  misc_feature: MA Experiment ID: 20000227 Result: Down-regulated in Transcription
  misc_feature: MA Experiment 20000227 PARAMETER Experiment Name: At_Root-Tips-vs-Tops_P Parameter: Tissue Value: Root Tips vs. Root Tops
  misc_feature: MA Experiment ID: 20000234 Result: Down-regulated in Transcription
  misc_feature: MA Experiment 20000234 PARAMETER Experiment Name: At_Siliques_P Parameter: Age (day) Value: 21
  misc_feature: MA Experiment 20000234 PARAMETER Experiment Name: At_Siliques_P Parameter: Organism Value: A. thaliana
  misc_feature: MA Experiment 20000234 PARAMETER Experiment Name: At_Siliques_P Parameter: Plant Line Value: WS
  misc_feature: MA Experiment 20000234 PARAMETER Experiment Name: At_Siliques_P Parameter: Tissue Value: Less Than 5mm Siliques vs. Whole Plant
  misc_feature: MA Experiment ID: 20000268 Result: Up-regulated in Transcription
  misc_feature: MA Experiment 20000268 PARAMETER Experiment Name: At_100mM_NaCl__P Parameter: Age (day) Value: 14
  misc_feature: MA Experiment 20000268 PARAMETER Experiment Name: At_100mM_NaCl__P Parameter: Organism Value: A. thaliana
  misc_feature: MA Experiment 20000268 PARAMETER Experiment Name: At_100mM_NaCl__P Parameter: Plant Line Value: WS
  misc_feature: MA Experiment 20000268 PARAMETER Experiment Name: At_100mM_NaCl__P Parameter: Timepoint (hr) Value: 6
  misc_feature: MA Experiment 20000268 PARAMETER Experiment Name: At_100mM_NaCl__P Parameter: Tissue Value: Whole Plant
  misc_feature: MA Experiment 20000268 PARAMETER Experiment Name: At_100mM_NaCl__P Parameter: Treatment Value: 100mM NaCl vs. No Treatment
  misc_feature: MA Experiment ID: 20000436 Result: Up-regulated in Transcription
  misc_feature: MA Experiment 20000436 PARAMETER Experiment Name: At_Drought_P Parameter: Age (day) Value: 7
  misc_feature: MA Experiment 20000436 PARAMETER Experiment Name: At_Drought_P Parameter: Organism Value: A. thaliana
  misc_feature: MA Experiment 20000436 PARAMETER Experiment Name: At_Drought_P Parameter: Plant Line Value: WS
  misc_feature: MA Experiment 20000436 PARAMETER Experiment Name: At_Drought_P Parameter: Timepoint (hr) Value: 12
  misc_feature: MA Experiment 20000436 PARAMETER Experiment Name: At_Drought_P Parameter: Tissue Value: Whole Plant
  misc_feature: MA Experiment 20000436 PARAMETER Experiment Name: At_Drought_P Parameter: Treatment Value: Drought vs. No Drought
  misc_feature: MA Experiment ID: 20000437 Result: Up-regulated in Transcription
  misc_feature: MA Experiment 20000437 PARAMETER Experiment Name: At_Drought_P Parameter: Age (day) Value: 8
  misc_feature: MA Experiment 20000437 PARAMETER Experiment Name: At_Drought_P Parameter: Organism Value: A. thaliana
  misc_feature: MA Experiment 20000437 PARAMETER Experiment Name: At_Drought_P Parameter: Plant Line Value: WS
  misc_feature: MA Experiment 20000437 PARAMETER Experiment Name: At_Drought_P Parameter: Timepoint (hr) Value: 24
  misc_feature: MA Experiment 20000437 PARAMETER Experiment Name: At_Drought_P Parameter: Tissue Value: Whole Plant
  misc_feature: MA Experiment 20000437 PARAMETER Experiment Name: At_Drought_P Parameter: Treatment Value: Drought vs. No Drought
  misc_feature: MA Experiment ID: 20000438 Result: Down-regulated in Transcription
  misc_feature: MA Experiment 20000438 PARAMETER Experiment Name: At_Shoots__P Parameter: Age (day) Value: 14
  misc_feature: MA Experiment 20000438 PARAMETER Experiment Name: At_Shoots__P Parameter: Tissue Value: Shoots vs. Whole Plant
  misc_feature: MA Experiment ID: 20000455 Result: Up-regulated in Transcription
  misc_feature: MA Experiment 20000455 PARAMETER Experiment Name: At_100uM_ABA_P Parameter: Age (day) Value: 16
  misc_feature: MA Experiment 20000455 PARAMETER Experiment Name: At_100uM_ABA_P Parameter: Organism Value: A. thaliana
  misc_feature: MA Experiment 20000455 PARAMETER Experiment Name: At_100uM_ABA_P Parameter: Plant Line Value: WS
  misc_feature: MA Experiment 20000455 PARAMETER Experiment Name: At_100uM_ABA_P Parameter: Timepoint (hr) Value: 48
  misc_feature: MA Experiment 20000455 PARAMETER Experiment Name: At_100uM_ABA_P Parameter: Tissue Value: Aerial
  misc_feature: MA Experiment 20000455 PARAMETER Experiment Name: At_100uM_ABA_P Parameter: Treatment Value: 100uM ABA vs. No Treatment
  misc_feature: MA Experiment ID: 20001247 Result: Up-regulated in Transcription
  misc_feature: MA Experiment 20001247 PARAMETER Experiment Name: At_Far-red-induction_P Parameter: Age (day) Value: 7
  misc_feature: MA Experiment 20001247 PARAMETER Experiment Name: At_Far-red-induction_P Parameter: Light Value: Far-red vs. White
  misc_feature: MA Experiment 20001247 PARAMETER Experiment Name: At_Far-red-induction_P Parameter: Organism Value: A. thaliana
  misc_feature: MA Experiment 20001247 PARAMETER Experiment Name: At_Far-red-induction_P Parameter: Plant Line Value: Columbia
  misc_feature: MA Experiment 20001247 PARAMETER Experiment Name: At_Far-red-induction_P Parameter: Timepoint (hr) Value: 1
  misc_feature: MA Experiment 20001247 PARAMETER Experiment Name: At_Far-red-induction_P Parameter: Tissue Value: Whole Plant
  misc_feature: MA Experiment ID: 20001905 Result: Up-regulated in Transcription
  misc_feature: MA Experiment 20001905 PARAMETER Experiment Name: At_Drought_Reproduction_P Parameter: Age (day) Value: 40
  misc_feature: MA Experiment 20001905 PARAMETER Experiment Name: At_Drought_Reproduction_P Parameter: Organism Value: A. thaliana
  misc_feature: MA Experiment 20001905 PARAMETER Experiment Name: At_Drought_Reproduction_P Parameter: Plant Line Value: WS
  misc_feature: MA Experiment 20001905 PARAMETER Experiment Name: At_Drought_Reproduction_P Parameter: Timepoint (day) Value: 10
  misc_feature: MA Experiment 20001905 PARAMETER Experiment Name: At_Drought_Reproduction_P Parameter: Tissue Value: Rosettes
  misc_feature: MA Experiment 20001905 PARAMETER Experiment Name: At_Drought_Reproduction_P Parameter: Treatment Value: Drought vs. No Drought
agacactcgcttgcgtgtctccctctcttaaactctctctttctctttctcttttggtttctgggttatttcaaagaaaagaatcaagaaacccctctttctctcttacaagaatcccatcatggtgtttggaaaagggtcaaaccttgacagattccttcattgcacaacacctgtagtgccaccccaatctctatccaaggcggagattaggagtttgaataggatttggcatccatgggagagacaaaaggttgagtttttcagattgagtgatctatgggattgttatgatgaatggagtgcttatggagctggtgttccaattcgtctctctaatggagaatctcttgttcaatattatgttccctatctctctgctattcagattttcacctctcgttcttccttgatccgcttaagggatgattctgaagatggggaaagcagagattcgtttagtgattcatatagtgatgagagtgaaagtgataaactttcgagatgtgcttctgatgaaggacttgaacatgacgctctcttgcatcctaatgatcggttgggatatctttatctgcaatactttgagagatcagctccttatgctcgagttcctctcatggataagatcaatgaattggctcaaaggtacccgggactaatgtcgttgcgaagcgtagatctttccccggcaagttggatggcggtagcgtggtaccctatttaccatattccaatgggaaggaccatcaaagatttgtccacttgtttcctcacttatcacactctttcatcttctttccaagatatggagccagaagaaaatggcggggaaaaggagaggatccggaaggaaggagaaggtgtaactttgcttccttttgggttagccacttataagatgcaaggcaatgtttggctctcggaagacgatcaaggtcaagatcaagagcgagttctttcgcttctaagtgttgcggattcttggctaaaacagctaagagtccaacaccatgacttcaactacttctcaagaatggctcaccgtggctgaaacaaatccgttgctatatactgatgagttcaaatgtagattttgtatctctttttgtttttcttgttggtctcaagtggcaaggagattacttttttccctggtcgcaatataccgtgtttgtccagtggttggagtagcagtggcagccgtgaagaggactgagcgtttccttaacacacaagtacagcggtttcaacgttttgggtgtagaatagctttaaagtagcatcaatgggagatgtcatatattataagtgctgatttgttgaaaagagtggtttcttgtttcttgataaacattgattgagagggtcttgttcttgtacctcagtaatactttaaaggagtagcaagtgtaacaatctcatcatatttgtaactgtttttacccaaatacataaatcaaagctgatgatttttgtgtgtttt

SEQ ID NO: 82550 - protein, 310 aa, Arabidopsis thaliana
  peptide (1)..(310): Ceres Seq. ID no. 12666155
  misc_feature (7)..(303): Pfam Name: Protein of unknown function (DUF789) Pfam Description: Protein of unknown function (DUF789)
  misc_feature (1)..(308): Homolog of NCBI NO: 25373431 NR Description: hypothetical protein AT4g03420 [imported] - thaliana >gi|4206196|gb|AAD11584.1|AAD11584 hypothetical protein thaliana] >gi|7270212|emb|CAB77827.1| hypothetical protein
  misc_feature (1)..(310): Homolog of NCBI NO: 22328289 NR Description: hypothetical protein; protein id: At4g03420.1, by cDNA: gi_18650615, supported by cDNA: gi_20453246 [Arabidopsis >gi|18650616|gb|AAL75907.1| AT4g03420/F9H3_4 [Arabidopsis
  misc_feature (5)..(310): Homolog of NCBI NO: 18379117 NR Description: expressed protein; protein id: At1g03610.1, by cDNA: 123030., supported by cDNA: gi_18958012 [Arabidopsis
  misc_feature (5)..(310): Homolog of NCBI NO: 18958013 NR Description: At1g03610/F21B7_13 [Arabidopsis thaliana]
  misc_feature (5)..(310): Homolog of NCBI NO: 9280648 NR Description: F21B7.22 [Arabidopsis thaliana]
  misc_feature (5)..(310): Homolog of NCBI NO: 7485906 NR Description: hypothetical protein F21B7.13 - Arabidopsis
  misc_feature (1)..(266): Homolog of NCBI NO: 18417136 NR Description: putative protein; protein id: At4g28150.1, by cDNA: 7221. [Arabidopsis thaliana] >gi|26983868|gb|AAN86186.1|
  misc_feature (1)..(266): Homolog of NCBI NO: 21594686 NR Description: unknown [Arabidopsis thaliana]
  misc_feature (1)..(266): Homolog of NCBI NO: 30687867 NR Description: expressed protein [Arabidopsis thaliana]
  misc_feature (1)..(228): Homolog of NCBI NO: 7486201 NR Description: hypothetical protein F26K10.30 - Arabidopsis >gi|7269669|emb|CAB79617.1| putative protein [Arabidopsis
MVFGKGSNLDRFLHCTTPVVPPQSLSKAEIRSLNRIWHPWERQKVEFFRLSDLWDCYDEWSAYGAGVPIRLSNGESLVQYYVPYLSAIQIFTSRSSLIRLRDDSEDGESRDSFSDSYSDESESDKLSRCASDEGLEHDALLHPNDRLGYLYLQYFERSAPYARVPLMDKINELAQRYPGLMSLRSVDLSPASWMAVAWYPIYHIPMGRTIKDLSTCFLTYHTLSSSFQDMEPEENGGEKERIRKEGEGVTLLPFGLATYKMQGNVWLSEDDQGQDQERVLSLLSVADSWLKQLRVQHHDFNYFSRMAHRG

SEQ ID NO: 82551 - DNA, 1608 bp, Arabidopsis thaliana
  misc_feature (1)..(1608): Ceres Seq. ID no. 12666226
  misc_feature: MA Experiment ID: 20000355 Result: Up-regulated in Transcription
  misc_feature: MA Experiment 20000355 PARAMETER Experiment Name: At_Siliques_Sub_P Parameter: Age (day) Value: 21
  misc_feature: MA Experiment 20000355 PARAMETER Experiment Name: At_Siliques_Sub_P Parameter: Organism Value: A. thaliana
  misc_feature: MA Experiment 20000355 PARAMETER Experiment Name: At_Siliques_Sub_P Parameter: Plant Line Value: WS
  misc_feature: MA Experiment 20000355 PARAMETER Experiment Name: At_Siliques_Sub_P Parameter: Tissue Value: Less Than 5mm Siliques vs. Whole Plant
atgttggttaaagttttctcttttttcatccttatgataacaatggtggttattggtgttagcaaagaatattgtgatgacaaacactcatgtcaaaactttttgttggagcttaagacagcttcctcgtcactctcggagattagacgtcgtgacttattgatcatcgttttgaagaattccgtgcggaagatcgacatggctatgattggtgtgatggaagatacaaaacaacatgaggagatggagaatgataagctatgtttgaaggaggacacaaatctatttgaggagatgatggagtcggcaaaagataggatgatccgttcagtggaggaactcttaggaggagaattcccttatcttggatcttacgaaaacatccacacttggctcagtggcgttcttactagctacatcacatgtatcgacgaaattggtgacggtgcctataaacgtcgggtcgagccacagcttcaagacctcatttctaaggcaaaggtagctttggctctttttatctccatttcgccgagagacaacaccgaacttaactcggtggttcccaatagcccgtcttggttatctcatgttgacaagaaagatctatatctcaatgctgaggctctaaaaaagattgccgatgttgtggtcgcgaaagatgggaccggaaagtacaacacagtgaatgcggccattgcagcagcacctcaacacagccacaagagattcatcatctatataaagacaggcatttatgatgaaatcgtcgccattgagaatacgaaacccaatttaactcttataggtgatggtcaagattcaaccatcatcacgggcaatttaagcgctagcaatgttagaagaacgttctacactgcaacttttgacaattctaattatactaaaaatatgtttgaagcttctaatggtaaaggattcatcggagtagacatgtgcttccgaaacacggtcgggccggcaaaaggaccagctgttgccctccgtgtgagtggtgatatgtccgtcatttacagatgtcgtgtcgagggatatcaggatgccttgtatcctcacatagaccgccagttttatagggagtgctttattaccggtactgtagatttcatttgtggaaacgcagcggcggtatttcaattctgccagattgtagcaagacagcctaatatggggcaaagcaatttcataaccgctcaatcacgcgagactaaggacgacaaatcgggcttctcaattcaaaactgcaacatcacagcaagttcggatctagatacagcaaccgtaaaaacgtatcttggaaggccttggaggatattttcaacagtcgcggttctgcagtctttcatcggtgatttagttgatcccgcaggctggactccttgggaaggagaaactggtctgtcaactctccactaccgcgaatatcaaaataggggtccgggagctgtgactagcagaagggtgaagtggtcgggctttaaagttatgaaagatcctaaacaggctacagaattcactgtagccaagctcttagatggagaaacttggctaaaagaaagtcgaattccatataaaagtggattgtaa

SEQ ID NO: 82552 - protein, 535 aa, Arabidopsis thaliana
  peptide (1)..(535): Ceres Seq. ID no. 12666227
  misc_feature (215)..(521): Pfam Name: Pectinesterase Pfam Description: Pectinesterase
  misc_feature (1)..(535): Homolog of NCBI NO: 22328305 NR Description: pectin methylesterase, putative; protein id:
  misc_feature (1)..(535): Homolog of NCBI NO: 7447391 NR Description: probable pectinesterase (EC 3.1.1.11) - thaliana >gi|3319371|gb|AAC28220.1| Similar to pectinesterase; [Arabidopsis thaliana] >gi|7267148|emb|CAB80816.1| putative
  misc_feature (1)..(535): Homolog of NCBI NO: 6554192 NR Description: T23J18.25 [Arabidopsis thaliana]
  misc_feature (1)..(535): Homolog of NCBI NO: 28393148 NR Description: putative pectin methylesterase [Arabidopsis >gi|28827352|gb|AAO50520.1| putative pectin methylesterase
  misc_feature (1)..(535): Homolog of NCBI NO: 30682309 NR Description: pectin methylesterase, putative [Arabidopsis
  misc_feature (124)..(535): Homolog of NCBI NO: 15232875 NR Description: pectinesterase family; protein id: At3g27980.1
  misc_feature (1)..(105): Homolog of NCBI NO: 15232875 NR Description: pectinesterase family; protein id: At3g27980.1
  misc_feature (44)..(535): Homolog of NCBI NO: 14334992 NR Description: At1g11580/T23J18_33 [Arabidopsis thaliana]
  misc_feature (44)..(535): Homolog of NCBI NO: 15220424 NR Description: pectin methylesterase, putative; protein id:
  misc_feature (125)..(535): Homolog of NCBI NO: 1617588 NR Description: pectin methylesterase [Lycopersicon esculentum]
MLVKVFSFFILMITMVVIGVSKEYCDDKHSCQNFLLELKTASSSLSEIRRRDLLIIVLKNSVRKIDMAMIGVMEDTKQHEEMENDKLCLKEDTNLFEEMMESAKDRMIRSVEELLGGEFPYLGSYENIHTWLSGVLTSYITCIDEIGDGAYKRRVEPQLQDLISKAKVALALFISISPRDNTELNSVVPNSPSWLSHVDKKDLYLNAEALKKIADVVVAKDGTGKYNTVNAAIAAAPQHSHKRFIIYIKTGIYDEIVAIENTKPNLTLIGDGQDSTIITGNLSASNVRRTFYTATFDNSNYTKNMFEASNGKGFIGVDMCFRNTVGPAKGPAVALRVSGDMSVIYRCRVEGYQDALYPHIDRQFYRECFITGTVDFICGNAAAVFQFCQIVARQPNMGQSNFITAQSRETKDDKSGFSIQNCNITASSDLDTATVKTYLGRPWRIFSTVAVLQSFIGDLVDPAGWTPWEGETGLSTLHYREYQNRGPGAVTSRRVKWSGFKVMKDPKQATEFTVAKLLDGETWLKESRIPYKSGL

SEQ ID NO: 82553 - protein, 524 aa, Arabidopsis thaliana
  peptide (1)..(524): Ceres Seq. ID no. 12666228
  misc_feature (204)..(510): Pfam Name: Pectinesterase Pfam Description: Pectinesterase
  misc_feature (1)..(524): Homolog of NCBI NO: 22328305 NR Description: pectin methylesterase, putative; protein id:
  misc_feature (1)..(524): Homolog of NCBI NO: 7447391 NR Description: probable pectinesterase (EC 3.1.1.11) - thaliana >gi|3319371|gb|AAC28220.1| Similar to pectinesterase; [Arabidopsis thaliana] >gi|7267148|emb|CAB80816.1| putative
  misc_feature (1)..(524): Homolog of NCBI NO: 6554192 NR Description: T23J18.25 [Arabidopsis thaliana]
  misc_feature (1)..(524): Homolog of NCBI NO: 28393148 NR Description: putative pectin methylesterase [Arabidopsis >gi|28827352|gb|AAO50520.1| putative pectin methylesterase
  misc_feature (1)..(524): Homolog of NCBI NO: 30682309 NR Description: pectin methylesterase, putative [Arabidopsis
  misc_feature (113)..(524): Homolog of NCBI NO: 15232875 NR Description: pectinesterase family; protein id: At3g27980.1
  misc_feature (1)..(94): Homolog of NCBI NO: 15232875 NR Description: pectinesterase family; protein id: At3g27980.1
  misc_feature (33)..(524): Homolog of NCBI NO: 14334992 NR Description: At1g11580/T23J18_33 [Arabidopsis thaliana]
  misc_feature (33)..(524): Homolog of NCBI NO: 15220424 NR Description: pectin methylesterase, putative; protein id:
  misc_feature (114)..(524): Homolog of NCBI NO: 1617588 NR Description: pectin methylesterase [Lycopersicon esculentum]
MITMVVIGVSKEYCDDKHSCQNFLLELKTASSSLSEIRRRDLLIIVLKNSVRKIDMAMIGVMEDTKQHEEMENDKLCLKEDTNLFEEMMESAKDRMIRSVEELLGGEFPYLGSYENIHTWLSGVLTSYITCIDEIGDGAYKRRVEPQLQDLISKAKVALALFISISPRDNTELNSVVPNSPSWLSHVDKKDLYLNAEALKKIADVVVAKDGTGKYNTVNAAIAAAPQHSHKRFIIYIKTGIYDEIVAIENTKPNLTLIGDGQDSTIITGNLSASNVRRTFYTATFDNSNYTKNMFEASNGKGFIGVDMCFRNTVGPAKGPAVALRVSGDMSVIYRCRVEGYQDALYPHIDRQFYRECFITGTVDFICGNAAAVFQFCQIVARQPNMGQSNFITAQSRETKDDKSGFSIQNCNITASSDLDTATVKTYLGRPWRIFSTVAVLQSFIGDLVDPAGWTPWEGETGLSTLHYREYQNRGPGAVTSRRVKWSGFKVMKDPKQATEFTVAKLLDGETWLKESRIPYKSGL

SEQ ID NO: 82554 - protein, 521 aa, Arabidopsis thaliana
  peptide (1)..(521): Ceres Seq. ID no. 12666229
  misc_feature (201)..(507): Pfam Name: Pectinesterase Pfam Description: Pectinesterase
  misc_feature (1)..(521): Homolog of NCBI NO: 22328305 NR Description: pectin methylesterase, putative; protein id:
  misc_feature (1)..(521): Homolog of NCBI NO: 7447391 NR Description: probable pectinesterase (EC 3.1.1.11) - thaliana >gi|3319371|gb|AAC28220.1| Similar to pectinesterase; [Arabidopsis thaliana] >gi|7267148|emb|CAB80816.1| putative
  misc_feature (1)..(521): Homolog of NCBI NO: 6554192 NR Description: T23J18.25 [Arabidopsis thaliana]
  misc_feature (1)..(521): Homolog of NCBI NO: 28393148 NR Description: putative pectin methylesterase [Arabidopsis >gi|28827352|gb|AAO50520.1| putative pectin methylesterase
  misc_feature (1)..(521): Homolog of NCBI NO: 30682309 NR Description: pectin methylesterase, putative [Arabidopsis
  misc_feature (110)..(521): Homolog of NCBI NO: 15232875 NR Description: pectinesterase family; protein id: At3g27980.1
  misc_feature (1)..(91): Homolog of NCBI NO: 15232875 NR Description: pectinesterase family; protein id: At3g27980.1
  misc_feature (30)..(521): Homolog of NCBI NO: 14334992 NR Description: At1g11580/T23J18_33 [Arabidopsis thaliana]
  misc_feature (30)..(521): Homolog of NCBI NO: 15220424 NR Description: pectin methylesterase, putative; protein id:
  misc_feature (111)..(521): Homolog of NCBI NO: 1617588 NR Description: pectin methylesterase [Lycopersicon esculentum]
MVVIGVSKEYCDDKHSCQNFLLELKTASSSLSEIRRRDLLIIVLKNSVRKIDMAMIGVMEDTKQHEEMENDKLCLKEDTNLFEEMMESAKDRMIRSVEELLGGEFPYLGSYENIHTWLSGVLTSYITCIDEIGDGAYKRRVEPQLQDLISKAKVALALFISISPRDNTELNSVVPNSPSWLSHVDKKDLYLNAEALKKIADVVVAKDGTGKYNTVNAAIAAAPQHSHKRFIIYIKTGIYDEIVAIENTKPNLTLIGDGQDSTIITGNLSASNVRRTFYTATFDNSNYTKNMFEASNGKGFIGVDMCFRNTVGPAKGPAVALRVSGDMSVIYRCRVEGYQDALYPHIDRQFYRECFITGTVDFICGNAAAVFQFCQIVARQPNMGQSNFITAQSRETKDDKSGFSIQNCNITASSDLDTATVKTYLGRPWRIFSTVAVLQSFIGDLVDPAGWTPWEGETGLSTLHYREYQNRGPGAVTSRRVKWSGFKVMKDPKQATEFTVAKLLDGETWLKESRIPYKSGL

SEQ ID NO: 82555 - DNA, 1752 bp, Arabidopsis thaliana
  misc_feature (1)..(1752): Ceres Seq. ID no. 12666237
  misc_feature: MA Experiment ID: 20000169 Result: Down-regulated in Transcription
  misc_feature: MA Experiment 20000169 PARAMETER Experiment Name: At_100uM_ABA_P Parameter: Age (day) Value: 14
  misc_feature: MA Experiment 20000169 PARAMETER Experiment Name: At_100uM_ABA_P Parameter: Organism Value: A. thaliana
  misc_feature: MA Experiment 20000169 PARAMETER Experiment Name: At_100uM_ABA_P Parameter: Plant Line Value: WS
  misc_feature: MA Experiment 20000169 PARAMETER Experiment Name: At_100uM_ABA_P Parameter: Timepoint (hr) Value: 6
  misc_feature: MA Experiment 20000169 PARAMETER Experiment Name: At_100uM_ABA_P Parameter: Tissue Value: Aerial
  misc_feature: MA Experiment 20000169 PARAMETER Experiment Name: At_100uM_ABA_P Parameter: Treatment Value: 100uM ABA vs. No Treatment
  misc_feature: MA Experiment ID: 20000227 Result: Down-regulated in Transcription
  misc_feature: MA Experiment 20000227 PARAMETER Experiment Name: At_Root-Tips-vs-Tops_P Parameter: Tissue Value: Root Tips vs. Root Tops
  misc_feature: MA Experiment ID: 20000234 Result: Down-regulated in Transcription
  misc_feature: MA Experiment 20000234 PARAMETER Experiment Name: At_Siliques_P Parameter: Age (day) Value: 21
  misc_feature: MA Experiment 20000234 PARAMETER Experiment Name: At_Siliques_P Parameter: Organism Value: A. thaliana
  misc_feature: MA Experiment 20000234 PARAMETER Experiment Name: At_Siliques_P Parameter: Plant Line Value: WS
  misc_feature: MA Experiment 20000234 PARAMETER Experiment Name: At_Siliques_P Parameter: Tissue Value: Less Than 5mm Siliques vs. Whole Plant
  misc_feature: MA Experiment ID: 20000436 Result: Down-regulated in Transcription
  misc_feature: MA Experiment 20000436 PARAMETER Experiment Name: At_Drought_P Parameter: Age (day) Value: 7
  misc_feature: MA Experiment 20000436 PARAMETER Experiment Name: At_Drought_P Parameter: Organism Value: A. thaliana
  misc_feature: MA Experiment 20000436 PARAMETER Experiment Name: At_Drought_P Parameter: Plant Line Value: WS
  misc_feature: MA Experiment 20000436 PARAMETER Experiment Name: At_Drought_P Parameter: Timepoint (hr) Value: 12
  misc_feature: MA Experiment 20000436 PARAMETER Experiment Name: At_Drought_P Parameter: Tissue Value: Whole Plant
  misc_feature: MA Experiment 20000436 PARAMETER Experiment Name: At_Drought_P Parameter: Treatment Value: Drought vs. No Drought
  misc_feature: MA Experiment ID: 20000438 Result: Up-regulated in Transcription
  misc_feature: MA Experiment 20000438 PARAMETER Experiment Name: At_Shoots__P Parameter: Age (day) Value: 14
  misc_feature: MA Experiment 20000438 PARAMETER Experiment Name: At_Shoots__P Parameter: Tissue Value: Shoots vs. Whole Plant
  misc_feature: MA Experiment ID: 20000495 Result: Down-regulated in Transcription
  misc_feature: MA Experiment 20000495 PARAMETER Experiment Name: At_Guard_Cells_P Parameter: Harvest Date Value: 8/2/2002
  misc_feature: MA Experiment 20000495 PARAMETER Experiment Name: At_Guard_Cells_P Parameter: Organism Value: A. thaliana
  misc_feature: MA Experiment 20000495 PARAMETER Experiment Name: At_Guard_Cells_P Parameter: Tissue Value: Guard Cells vs. Leaves
  misc_feature: MA Experiment ID: 20001451 Result: Down-regulated in Transcription
  misc_feature: MA Experiment 20001451 PARAMETER Experiment Name: At_Far-red-induction_P Parameter: Age (day) Value: 7
  misc_feature: MA Experiment 20001451 PARAMETER Experiment Name: At_Far-red-induction_P Parameter: Light Value: Far-red vs. White
  misc_feature: MA Experiment 20001451 PARAMETER Experiment Name: At_Far-red-induction_P Parameter: Organism Value: A. thaliana
  misc_feature: MA Experiment 20001451 PARAMETER Experiment Name: At_Far-red-induction_P Parameter: Plant Line Value: Columbia
  misc_feature: MA Experiment 20001451 PARAMETER Experiment Name: At_Far-red-induction_P Parameter: Timepoint (hr) Value: 24
  misc_feature: MA Experiment 20001451 PARAMETER Experiment Name: At_Far-red-induction_P Parameter: Tissue Value: Whole Plant
  misc_feature: MA Experiment ID: 20001458 Result: Up-regulated in Transcription
  misc_feature: MA Experiment 20001458 PARAMETER Experiment Name: At_50mM_NH4NO3_L-to-H_P Parameter: Age (day) Value: Undefined
  misc_feature: MA Experiment 20001458 PARAMETER Experiment Name: At_50mM_NH4NO3_L-to-H_P Parameter: Organism Value: Undefined
  misc_feature: MA Experiment 20001458 PARAMETER Experiment Name: At_50mM_NH4NO3_L-to-H_P Parameter: Plant Line Value: Undefined
  misc_feature: MA Experiment 20001458 PARAMETER Experiment Name: At_50mM_NH4NO3_L-to-H_P Parameter: Timepoint (hr) Value: 2
  misc_feature: MA Experiment 20001458 PARAMETER Experiment Name: At_50mM_NH4NO3_L-to-H_P Parameter: Tissue Value: Siliques
  misc_feature: MA Experiment 20001458 PARAMETER Experiment Name: At_50mM_NH4NO3_L-to-H_P Parameter: Treatment Value: 50mM NH4NO3 vs. 100mM Manitol
atggcatcacaattagatttgatcggaggagactacatcgccggaatttcgatcaatcctccgacgaatagccgtgtgacttctgtatacagcgaagtccaagctagtcgtatcgaccacacacttcctcttccttccgtctttaaaacccctttcaagatcatcgatggtcctccaagctcctccgccggacatccagaggaaattgagaaattattccctaatttatttggacaaccatcagctttattggttcctaaccaatctaatgaagtttcatcggatcaaaagcttaagattggtgttgtgttgtctggtggtcaagcacctggaggacacaatgttatttgtggaatctttggctttaaaaacttgatttgtgattgtatttttgttgttggtttgatagattacttgcaagaatatgcaagaggaagtagtctgtttggttttcgtggcggtccagctggaatcatgaaggggaaatatattgagcttacttctgagtttgtgtacccttatagaaaccagggtggatttgatatgatatgtagtggaagagacaagattgaaactccagagcagtttaagcaagctgaagagactgttacaaagatggatttagatggtcttgtggtaattggtggagatgactccaatactaatgcttgtctccttgctgaacactttagagctaaaaacatgaaaactctggttattggatgccctaagacaatcgatggtgatttaaagagcaaagaagtccccacgagtttcgggtttgatactgcttgcaaggtaaaaatgattggaaatgttatgatcgatgcgcgttccacgggaaaatactatcactttgtgcgtcttatgggtcgtgctgcttctcacattacacttgaatgcgctttgcaaacccatccaaacattaccattattggagaagaggtttttgagaagaagcttacgttgaaaaatgttacagataacattgttgatgtgatctataaacgagcagaaaatggttataactacggtgtcattcttgttcctgaaggtctaattgattttatccctgaggtccaacagcttatttccgaactgaatgaagtcttagccgaaggaaacgtcgatgaagaaggccaatggaagaagaatcttaaaaaagagactttagagatttttgagtttcttcctcaaactattcaagaacaactaatgcttgagagagatccacatggaaatgtgcaggttgctaaaatagagacagagaaaatgttgattcaaatggttgaaaccgagctagagaaaaagaagacagagggtacatatgaacgcgagttcatggggaaatcacacttctttgggtatgaaggaagatgcggcttacctacaaatttcgatgcaacttactgctacgcattaggttacggtgctggatcacttctccagagcggaaagaccggattaatttcatcggttggaaacttggctgctcctgttgaagagtggacagttggtggtactgcactgacttcgttgatggatgttgagagaagacatggtaaattcaagcctgttatcaagaaagctatggttgaacttgaaggtgcaccgtttaagaaatttgcatcacagcgagaagaatgggctttgaagaatcgatacattagtcctggtccaattcagtttaagggaccgggatctgatgcgagaaatcacacattaatgctcgaactcggggctcaagcctaa

SEQ ID NO: 82556 - protein, 583 aa, Arabidopsis thaliana
  peptide (1)..(583): Ceres Seq. ID no. 12666238
  misc_feature (99)..(372): Pfam Name: Phosphofructokinase Pfam Description: Phosphofructokinase
  misc_feature (1)..(583): Homolog of NCBI NO: 7447689 NR Description: diphosphate-fructose-6-phosphate
  misc_feature (1)..(583): Homolog of NCBI NO: 30679628 NR Description: phosphofructokinase beta subunit -related
  misc_feature (13)..(582): Homolog of NCBI NO: 3790100 NR Description: pyrophosphate-dependent phosphofructokinase beta
  misc_feature (21)..(583): Homolog of NCBI NO: 2499489 NR Description: Pyrophosphate--fructose 6-phosphate
  misc_feature (25)..(583): Homolog of NCBI NO: 2507174 NR Description: PYROPHOSPHATE--FRUCTOSE 6-PHOSPHATE
  misc_feature (19)..(582): Homolog of NCBI NO: 15221156 NR Description: putative pyrophosphate-fructose-6-phosphate 1- protein id: At1g12000.1, supported by cDNA: gi_17064793,
  misc_feature (19)..(582): Homolog of NCBI NO: 25314952 NR Description: hypothetical protein [imported] - Arabidopsis
  misc_feature (84)..(583): Homolog of NCBI NO: 100462 NR Description: diphosphate-fructose-6-phosphate
  misc_feature (31)..(579): Homolog of NCBI NO: 11528427 NR Description: pyrophosphate-dependent phosphofructokinase
  misc_feature (31)..(578): Homolog of NCBI NO: 29345717 NR Description: phosphofructokinase [Bacteroides thetaiotaomicron >gi|29337610|gb|AAO75414.1| phosphofructokinase [Bacteroides
MASQLDLIGGDYIAGISINPPTNSRVTSVYSEVQASRIDHTLPLPSVFKTPFKIIDGPPSSSAGHPEEIEKLFPNLFGQPSALLVPNQSNEVSSDQKLKIGVVLSGGQAPGGHNVICGIFGFKNLICDCIFVVGLIDYLQEYARGSSLFGFRGGPAGIMKGKYIELTSEFVYPYRNQGGFDMICSGRDKIETPEQFKQAEETVTKMDLDGLVVIGGDDSNTNACLLAEHFRAKNMKTLVIGCPKTIDGDLKSKEVPTSFGFDTACKVKMIGNVMIDARSTGKYYHFVRLMGRAASHITLECALQTHPNITIIGEEVFEKKLTLKNVTDNIVDVIYKRAENGYNYGVILVPEGLIDFIPEVQQLISELNEVLAEGNVDEEGQWKKNLKKETLEIFEFLPQTIQEQLMLERDPHGNVQVAKIETEKMLIQMVETELEKKKTEGTYEREFMGKSHFFGYEGRCGLPTNFDATYCYALGYGAGSLLQSGKTGLISSVGNLAAPVEEWTVGGTALTSLMDVERRHGKFKPVIKKAMVELEGAPFKKFASQREEWALKNRYISPGPIQFKGPGSDARNHTLMLELGAQA

SEQ ID NO: 82557 - protein, 425 aa, Arabidopsis thaliana
  peptide (1)..(425): Ceres Seq. ID no. 12666239
  misc_feature (1)..(214): Pfam Name: Phosphofructokinase Pfam Description: Phosphofructokinase
  misc_feature (1)..(425): Homolog of NCBI NO: 7447689 NR Description: diphosphate-fructose-6-phosphate
  misc_feature (1)..(425): Homolog of NCBI NO: 30679628 NR Description: phosphofructokinase beta subunit -related
  misc_feature (1)..(424): Homolog of NCBI NO: 3790100 NR Description: pyrophosphate-dependent phosphofructokinase beta
  misc_feature (1)..(425): Homolog of NCBI NO: 2499489 NR Description: Pyrophosphate--fructose 6-phosphate
  misc_feature (1)..(425): Homolog of NCBI NO: 2507174 NR Description: PYROPHOSPHATE--FRUCTOSE 6-PHOSPHATE
  misc_feature (1)..(424): Homolog of NCBI NO: 15221156 NR Description: putative pyrophosphate-fructose-6-phosphate 1- protein id: At1g12000.1, supported by cDNA: gi_17064793,
  misc_feature (1)..(424): Homolog of NCBI NO: 25314952 NR Description: hypothetical protein [imported] - Arabidopsis
  misc_feature (1)..(425): Homolog of NCBI NO: 100462 NR Description: diphosphate-fructose-6-phosphate
  misc_feature (1)..(421): Homolog of NCBI NO: 11528427 NR Description: pyrophosphate-dependent phosphofructokinase
  misc_feature (1)..(420): Homolog of NCBI NO: 29345717 NR Description: phosphofructokinase [Bacteroides thetaiotaomicron >gi|29337610|gb|AAO75414.1| phosphofructokinase [Bacteroides
MKGKYIELTSEFVYPYRNQGGFDMICSGRDKIETPEQFKQAEETVTKMDLDGLVVIGGDDSNTNACLLAEHFRAKNMKTLVIGCPKTIDGDLKSKEVPTSFGFDTACKVKMIGNVMIDARSTGKYYHFVRLMGRAASHITLECALQTHPNITIIGEEVFEKKLTLKNVTDNIVDVIYKRAENGYNYGVILVPEGLIDFIPEVQQLISELNEVLAEGNVDEEGQWKKNLKKETLEIFEFLPQTIQEQLMLERDPHGNVQVAKIETEKMLIQMVETELEKKKTEGTYEREFMGKSHFFGYEGRCGLPTNFDATYCYALGYGAGSLLQSGKTGLISSVGNLAAPVEEWTVGGTALTSLMDVERRHGKFKPVIKKAMVELEGAPFKKFASQREEWALKNRYISPGPIQFKGPGSDARNHTLMLELGAQA

SEQ ID NO: 82558 - protein, 402 aa, Arabidopsis thaliana
  peptide (1)..(402): Ceres Seq. ID no. 12666240
  misc_feature (1)..(191): Pfam Name: Phosphofructokinase Pfam Description: Phosphofructokinase
  misc_feature (1)..(402): Homolog of NCBI NO: 7447689 NR Description: diphosphate-fructose-6-phosphate
  misc_feature (1)..(402): Homolog of NCBI NO: 30679628 NR Description: phosphofructokinase beta subunit -related
  misc_feature (1)..(401): Homolog of NCBI NO: 3790100 NR Description: pyrophosphate-dependent phosphofructokinase beta
  misc_feature (1)..(402): Homolog of NCBI NO: 2499489 NR Description: Pyrophosphate--fructose 6-phosphate
  misc_feature (1)..(402): Homolog of NCBI NO: 2507174 NR Description: PYROPHOSPHATE--FRUCTOSE 6-PHOSPHATE
  misc_feature (1)..(401): Homolog of NCBI NO: 15221156 NR Description: putative pyrophosphate-fructose-6-phosphate 1- protein id: At1g12000.1, supported by cDNA: gi_17064793,
  misc_feature (1)..(401): Homolog of NCBI NO: 25314952 NR Description: hypothetical protein [imported] - Arabidopsis
  misc_feature (1)..(402): Homolog of NCBI NO: 100462 NR Description: diphosphate-fructose-6-phosphate
  misc_feature (1)..(398): Homolog of NCBI NO: 11528427 NR Description: pyrophosphate-dependent phosphofructokinase
  misc_feature (1)..(397): Homolog of NCBI NO: 29345717 NR Description: phosphofructokinase [Bacteroides thetaiotaomicron >gi|29337610|gb|AAO75414.1| phosphofructokinase [Bacteroides
MICSGRDKIETPEQFKQAEETVTKMDLDGLVVIGGDDSNTNACLLAEHFRAKNMKTLVIGCPKTIDGDLKSKEVPTSFGFDTACKVKMIGNVMIDARSTGKYYHFVRLMGRAASHITLECALQTHPNITIIGEEVFEKKLTLKNVTDNIVDVIYKRAENGYNYGVILVPEGLIDFIPEVQQLISELNEVLAEGNVDEEGQWKKNLKKETLEIFEFLPQTIQEQLMLERDPHGNVQVAKIETEKMLIQMVETELEKKKTEGTYEREFMGKSHFFGYEGRCGLPTNFDATYCYALGYGAGSLLQSGKTGLISSVGNLAAPVEEWTVGGTALTSLMDVERRHGKFKPVIKKAMVELEGAPFKKFASQREEWALKNRYISPGPIQFKGPGSDARNHTLMLELGAQA

SEQ ID NO: 82559 - DNA, 516 bp, Arabidopsis thaliana
  misc_feature (1)..(516): Ceres Seq. ID no. 12666241
  misc_feature: MA Experiment ID: 20001910 Result: Up-regulated in Transcription
  misc_feature: MA Experiment 20001910 PARAMETER Experiment Name: At_Drought_Reproduction_P Parameter: Age (day) Value: 37
  misc_feature: MA Experiment 20001910 PARAMETER Experiment Name: At_Drought_Reproduction_P Parameter: Organism Value: A. thaliana
  misc_feature: MA Experiment 20001910 PARAMETER Experiment Name: At_Drought_Reproduction_P Parameter: Plant Line Value: WS
  misc_feature: MA Experiment 20001910 PARAMETER Experiment Name: At_Drought_Reproduction_P Parameter: Timepoint (day) Value: 7
  misc_feature: MA Experiment 20001910 PARAMETER Experiment Name: At_Drought_Reproduction_P Parameter: Tissue Value: Flowers
  misc_feature: MA Experiment 20001910 PARAMETER Experiment Name: At_Drought_Reproduction_P Parameter: Treatment Value: Drought vs. No Drought
atgttaaggcaaacaactaaaagagcctttttagggctcgcttctcaaaatcccacaccgttccctgtcgtgtctcgattataccatccaaatgtcatcgaccattatgacaatccccgtaacgttggatcatttgataagaatgatcctaacgttggtacgggattggtcggagctcctcaatgtggagatgttatgaagcttcaggttaagtttgatggttctggtcaaatcattgatgctaaattcaagacctttggttgtggttctgccatagcagcttcttccgtcgctactgaatgggtcaagggaaaatccgtggaggaagtcttgaccataaagaactcgcaaattgcgaagcatctatcgttgccaccagtaaagctacattgcagtatgcttgcagaagacgctatcaaggcagcaattaaaaactacaaggagaagcaagacaaggctaatggcgaaaccgttgaaaccatcgattccacttatttacacggtattggatcgtga

SEQ ID NO: 82560 - protein, 171 aa, Arabidopsis thaliana
  peptide (1)..(171): Ceres Seq. ID no. 12666242
  misc_feature (27)..(153): Pfam Name: NifU-like N terminal domain Pfam Description: NifU-like N terminal domain
  misc_feature (1)..(171): Homolog of NCBI NO: 15233385 NR Description: putative NifU-like metallocluster assembly
  misc_feature (1)..(155): Homolog of NCBI NO: 15235569 NR Description: nifU-like protein; protein id: At4g22220.1, by cDNA: 8156., supported by cDNA: gi_13605506, supported by
  misc_feature (1)..(155): Homolog of NCBI NO: 21595581 NR Description: nifU-like protein [Arabidopsis thaliana]
  misc_feature (1)..(159): Homolog of NCBI NO: 15232028 NR Description: unknown protein; protein id: At3g01020.1 thaliana] >gi|6714486|gb|AAF26172.1|AC008261_29 unknown protein
  misc_feature (26)..(152): Homolog of NCBI NO: 16798388 NR Description: iron-sulfur cluster assembly protein IscU
  misc_feature (25)..(156): Homolog of NCBI NO: 11545707 NR Description: ISCU2 [Homo sapiens]
  misc_feature (25)..(152): Homolog of NCBI NO: 34912076 NR Description: putative nifU-like protein [Oryza sativa
  misc_feature (25)..(156): Homolog of NCBI NO: 20381021 NR Description: RIKEN cDNA 2310020H20 gene [Mus musculus]
  misc_feature (25)..(156): Homolog of NCBI NO: 27666566 NR Description: similar to RIKEN cDNA 2310020H20 gene [Mus
  misc_feature (25)..(156): Homolog of NCBI NO: 21313484 NR Description: RIKEN cDNA 2310020H20 [Mus musculus] unnamed protein product [Mus musculus] unnamed protein product [Mus musculus]
MLRQTTKRAFLGLASQNPTPFPVVSRLYHPNVIDHYDNPRNVGSFDKNDPNVGTGLVGAPQCGDVMKLQVKFDGSGQIIDAKFKTFGCGSAIAASSVATEWVKGKSVEEVLTIKNSQIAKHLSLPPVKLHCSMLAEDAIKAAIKNYKEKQDKANGETVETIDSTYLHGIGS

SEQ ID NO: 82561 - protein, 106 aa, Arabidopsis thaliana
  peptide (1)..(106): Ceres Seq. ID no. 12666243
  misc_feature (1)..(88): Pfam Name: NifU-like N terminal domain Pfam Description: NifU-like N terminal domain
  misc_feature (1)..(106): Homolog of NCBI NO: 15233385 NR Description: putative NifU-like metallocluster assembly
  misc_feature (1)..(90): Homolog of NCBI NO: 15235569 NR Description: nifU-like protein; protein id: At4g22220.1, by cDNA: 8156., supported by cDNA: gi_13605506, supported by
  misc_feature (1)..(90): Homolog of NCBI NO: 21595581 NR Description: nifU-like protein [Arabidopsis thaliana]
  misc_feature (1)..(94): Homolog of NCBI NO: 15232028 NR Description: unknown protein; protein id: At3g01020.1 thaliana] >gi|6714486|gb|AAF26172.1|AC008261_29 unknown protein
  misc_feature (1)..(87): Homolog of NCBI NO: 16798388 NR Description: iron-sulfur cluster assembly protein IscU
  misc_feature (1)..(91): Homolog of NCBI NO: 11545707 NR Description: ISCU2 [Homo sapiens]
  misc_feature (1)..(87): Homolog of NCBI NO: 34912076 NR Description: putative nifU-like protein [Oryza sativa
  misc_feature (1)..(91): Homolog of NCBI NO: 20381021 NR Description: RIKEN cDNA 2310020H20 gene [Mus musculus]
  misc_feature (1)..(91): Homolog of NCBI NO: 21313484 NR Description: RIKEN cDNA 2310020H20 [Mus musculus] unnamed protein product [Mus musculus] unnamed protein product [Mus musculus]
  misc_feature (1)..(91): Homolog of NCBI NO: 27666566 NR Description: similar to RIKEN cDNA 2310020H20 gene [Mus
MKLQVKFDGSGQIIDAKFKTFGCGSAIAASSVATEWVKGKSVEEVLTIKNSQIAKHLSLPPVKLHCSMLAEDAIKAAIKNYKEKQDKANGETVETIDSTYLHGIGS

SEQ ID NO: 82562 - DNA, 1977 bp, Arabidopsis thaliana
  misc_feature (1)..(1977): Ceres Seq. ID no. 12666312
  misc_feature: MA Experiment ID: 20000182 Result: Up-regulated in Transcription
  misc_feature: MA Experiment 20000182 PARAMETER Experiment Name: At_2mM_SA_P Parameter: Age (day) Value: 14
  misc_feature: MA Experiment 20000182 PARAMETER Experiment Name: At_2mM_SA_P Parameter: Organism Value: A. thaliana
  misc_feature: MA Experiment 20000182 PARAMETER Experiment Name: At_2mM_SA_P Parameter: Plant Line Value: WS
  misc_feature: MA Experiment 20000182 PARAMETER Experiment Name: At_2mM_SA_P Parameter: Timepoint (hr) Value: 6
  misc_feature: MA Experiment 20000182 PARAMETER Experiment Name: At_2mM_SA_P Parameter: Tissue Value: Aerial
  misc_feature: MA Experiment 20000182 PARAMETER Experiment Name: At_2mM_SA_P Parameter: Treatment Value: 2mM SA vs. No Treatment
  misc_feature: MA Experiment ID: 20000184 Result: Down-regulated in Transcription
  misc_feature: MA Experiment 20000184 PARAMETER Experiment Name: At_Shoots__P Parameter: Age (day) Value: 7
  misc_feature: MA Experiment 20000184 PARAMETER Experiment Name: At_Shoots__P Parameter: Tissue Value: Shoots vs. Whole Plant
  misc_feature: MA Experiment ID: 20000185 Result: Down-regulated in Transcription
  misc_feature: MA Experiment 20000185 PARAMETER Experiment Name: At_Roots__P Parameter: Age (day) Value: 7 vs. 21
  misc_feature: MA Experiment 20000185 PARAMETER Experiment Name: At_Roots__P Parameter: Organism Value: A. thaliana
  misc_feature: MA Experiment 20000185 PARAMETER Experiment Name: At_Roots__P Parameter: Tissue Value: Roots vs. Whole Plant
  misc_feature: MA Experiment ID: 20000234 Result: Down-regulated in Transcription
  misc_feature: MA Experiment 20000234 PARAMETER Experiment Name: At_Siliques_P Parameter: Age (day) Value: 21
  misc_feature: MA Experiment 20000234 PARAMETER Experiment Name: At_Siliques_P Parameter: Organism Value: A. thaliana
  misc_feature: MA Experiment 20000234 PARAMETER Experiment Name: At_Siliques_P Parameter: Plant Line Value: WS
  misc_feature: MA Experiment 20000234 PARAMETER Experiment Name: At_Siliques_P Parameter: Tissue Value: Less Than 5mm Siliques vs. Whole Plant
  misc_feature: MA Experiment ID: 20000235 Result: Down-regulated in Transcription
  misc_feature: MA Experiment 20000235 PARAMETER Experiment Name: At_Siliques_P Parameter: Age (day) Value: 21
  misc_feature: MA Experiment 20000235 PARAMETER Experiment Name: At_Siliques_P Parameter: Organism Value: A. thaliana
  misc_feature: MA Experiment 20000235 PARAMETER Experiment Name: At_Siliques_P Parameter: Plant Line Value: WS
  misc_feature: MA Experiment 20000235 PARAMETER Experiment Name: At_Siliques_P Parameter: Tissue Value: 5-10mm Siliques vs. Whole Plant
  misc_feature: MA Experiment ID: 20000264 Result: Down-regulated in Transcription
  misc_feature: MA Experiment 20000264 PARAMETER Experiment Name: At_Open_Flower_P Parameter: Age (day) Value: 21
  misc_feature: MA Experiment 20000264 PARAMETER Experiment Name: At_Open_Flower_P Parameter: Plant Line Value: WS
  misc_feature: MA Experiment 20000264 PARAMETER Experiment Name: At_Open_Flower_P Parameter: Tissue Value: Open Flower vs. Whole Plant
  misc_feature: MA Experiment ID: 20000265 Result: Down-regulated in Transcription
  misc_feature: MA Experiment 20000265 PARAMETER Experiment Name: At_Open_Flower_P Parameter: Age (day) Value: 21
  misc_feature: MA Experiment 20000265 PARAMETER Experiment Name: At_Open_Flower_P Parameter: Plant Line Value: WS
  misc_feature: MA Experiment 20000265 PARAMETER Experiment Name: At_Open_Flower_P Parameter: Tissue Value: Closed Flower vs. Whole Plant
  misc_feature: MA Experiment ID: 20000286 Result: Down-regulated in Transcription
  misc_feature: MA Experiment 20000286 PARAMETER Experiment Name: At_Open_Flower_P Parameter: Age (day) Value: 21
  misc_feature: MA Experiment 20000286 PARAMETER Experiment Name: At_Open_Flower_P Parameter: Plant Line Value: WS
  misc_feature: MA Experiment 20000286 PARAMETER Experiment Name: At_Open_Flower_P Parameter: Tissue Value: Half Open vs. Whole Plant
  misc_feature: MA Experiment ID: 20000441 Result: Up-regulated in Transcription
  misc_feature: MA Experiment 20000441 PARAMETER Experiment Name: At_1uM_BR-BRZ__P Parameter: Tissue Value: Shoot Apices
  misc_feature: MA Experiment 20000441 PARAMETER Experiment Name: At_1uM_BR-BRZ__P Parameter: Treatment Value: 1uM BR vs. No Treatment
  misc_feature: MA Experiment ID: 20000445 Result: Up-regulated in Transcription
  misc_feature: MA Experiment 20000445 PARAMETER Experiment Name: At_100uM_NAA__P Parameter: Age (day) Value: 14
  misc_feature: MA Experiment 20000445 PARAMETER Experiment Name: At_100uM_NAA__P Parameter: Organism Value: A. thaliana
  misc_feature: MA Experiment 20000445 PARAMETER Experiment Name: At_100uM_NAA__P Parameter: Plant Line Value: WS
  misc_feature: MA Experiment 20000445 PARAMETER Experiment Name: At_100uM_NAA__P Parameter: Timepoint (hr) Value: 6
  misc_feature: MA Experiment 20000445 PARAMETER Experiment Name: At_100uM_NAA__P Parameter: Tissue Value: Aerial
  misc_feature: MA Experiment 20000445 PARAMETER Experiment Name: At_100uM_NAA__P Parameter: Treatment Value: 100uM NAA vs. No Treatment
  misc_feature: MA Experiment ID: 20000453 Result: Up-regulated in Transcription
  misc_feature: MA Experiment 20000453 PARAMETER Experiment Name: At_100uM_ABA_P Parameter: Age (day) Value: 15
  misc_feature: MA Experiment 20000453 PARAMETER Experiment Name: At_100uM_ABA_P Parameter: Organism Value: A. thaliana
  misc_feature: MA Experiment 20000453 PARAMETER Experiment Name: At_100uM_ABA_P Parameter: Plant Line Value: WS
  misc_feature: MA Experiment 20000453 PARAMETER Experiment Name: At_100uM_ABA_P Parameter: Timepoint (hr) Value: 24
  misc_feature: MA Experiment 20000453 PARAMETER Experiment Name: At_100uM_ABA_P Parameter: Tissue Value: Aerial
  misc_feature: MA Experiment 20000453 PARAMETER Experiment Name: At_100uM_ABA_P Parameter: Treatment Value: 100uM ABA vs. No Treatment
  misc_feature: MA Experiment ID: 20000456 Result: Up-regulated in Transcription
  misc_feature: MA Experiment 20000456 PARAMETER Experiment Name: At_100uM_BA_P Parameter: Age (day) Value: 14
  misc_feature: MA Experiment 20000456 PARAMETER Experiment Name: At_100uM_BA_P Parameter: Organism Value: A. thaliana
  misc_feature: MA Experiment 20000456 PARAMETER Experiment Name: At_100uM_BA_P Parameter: Plant Line Value: WS
  misc_feature: MA Experiment 20000456 PARAMETER Experiment Name: At_100uM_BA_P Parameter: Timepoint (hr) Value: 6
  misc_feature: MA Experiment 20000456 PARAMETER Experiment Name: At_100uM_BA_P Parameter: Tissue Value: Aerial
  misc_feature: MA Experiment 20000456 PARAMETER Experiment Name: At_100uM_BA_P Parameter: Treatment Value: 100uM BA vs. No Treatment
  misc_feature: MA Experiment ID: 20000709 Result: Up-regulated in Transcription
  misc_feature: MA Experiment 20000709 PARAMETER Experiment Name: At_15mM_NH4NO3_L-to-H_P Parameter: Age (hr) Value: 14
  misc_feature: MA Experiment 20000709 PARAMETER Experiment Name: At_15mM_NH4NO3_L-to-H_P Parameter: Organism Value: A. thaliana
  misc_feature: MA Experiment 20000709 PARAMETER Experiment Name: At_15mM_NH4NO3_L-to-H_P Parameter: Plant Line Value: WS
  misc_feature: MA Experiment 20000709 PARAMETER Experiment Name: At_15mM_NH4NO3_L-to-H_P Parameter: Timepoint (hr) Value: 4
  misc_feature: MA Experiment 20000709 PARAMETER Experiment Name: At_15mM_NH4NO3_L-to-H_P Parameter: Tissue Value: Aerial
  misc_feature: MA Experiment 20000709 PARAMETER Experiment Name: At_15mM_NH4NO3_L-to-H_P Parameter: Treatment Value: 15mM NH4NO3 vs. 30mM Mannitol
  misc_feature: MA Experiment ID: 20000794 Result: Down-regulated in Transcription
  misc_feature: MA Experiment 20000794 PARAMETER Experiment Name: At_Petals_P Parameter: Age (day) Value: 23-25 days
  misc_feature: MA Experiment 20000794 PARAMETER Experiment Name: At_Petals_P Parameter: Plant Line Value: WS
  misc_feature: MA Experiment 20000794 PARAMETER Experiment Name: At_Petals_P Parameter: Tissue Value: Petals vs. Whole plant
  misc_feature: MA Experiment ID: 20001557 Result: Down-regulated in Transcription
  misc_feature: MA Experiment 20001557 PARAMETER Experiment Name: At_Drought_Soil_Dry_P Parameter: Age (day) Value: 27
  misc_feature: MA Experiment 20001557 PARAMETER Experiment Name: At_Drought_Soil_Dry_P Parameter: Organism Value: A. thaliana
  misc_feature: MA Experiment 20001557 PARAMETER Experiment Name: At_Drought_Soil_Dry_P Parameter: Plant Line Value: WS
  misc_feature: MA Experiment 20001557 PARAMETER Experiment Name: At_Drought_Soil_Dry_P Parameter: Post Timepoint (hr) Value: 3
  misc_feature: MA Experiment 20001557 PARAMETER Experiment Name: At_Drought_Soil_Dry_P Parameter: Post-Treatment Value: Re-Water vs. No Drought
  misc_feature: MA Experiment 20001557 PARAMETER Experiment Name: At_Drought_Soil_Dry_P Parameter: Timepoint (day) Value: 13
  misc_feature: MA Experiment 20001557 PARAMETER Experiment Name: At_Drought_Soil_Dry_P Parameter: Treatment Value: Drought vs. No Drought
  misc_feature: MA Experiment ID: 20001558 Result: Down-regulated in Transcription
  misc_feature: MA Experiment 20001558 PARAMETER Experiment Name: At_Drought_Soil_Dry_P Parameter: Age (day) Value: 27
  misc_feature: MA Experiment 20001558 PARAMETER Experiment Name: At_Drought_Soil_Dry_P Parameter: Organism Value: A. thaliana
  misc_feature: MA Experiment 20001558 PARAMETER Experiment Name: At_Drought_Soil_Dry_P Parameter: Plant Line Value: WS
  misc_feature: MA Experiment 20001558 PARAMETER Experiment Name: At_Drought_Soil_Dry_P Parameter: Post Timepoint (hr) Value: 6
  misc_feature: MA Experiment 20001558 PARAMETER Experiment Name: At_Drought_Soil_Dry_P Parameter: Post-Treatment Value: Re-Water vs. No Drought
  misc_feature: MA Experiment 20001558 PARAMETER Experiment Name: At_Drought_Soil_Dry_P Parameter: Timepoint (day) Value: 13
  misc_feature: MA Experiment 20001558 PARAMETER Experiment Name: At_Drought_Soil_Dry_P Parameter: Treatment Value: Drought vs. No Drought
  misc_feature: MA Experiment ID: 20001560 Result: Down-regulated in Transcription
  misc_feature: MA Experiment 20001560 PARAMETER Experiment Name: At_Drought_Soil_Dry_P Parameter: Age (day) Value: 28
  misc_feature: MA Experiment 20001560 PARAMETER Experiment Name: At_Drought_Soil_Dry_P Parameter: Organism Value: A. thaliana
  misc_feature: MA Experiment 20001560 PARAMETER Experiment Name: At_Drought_Soil_Dry_P Parameter: Plant Line Value: WS
  misc_feature: MA Experiment 20001560 PARAMETER Experiment Name: At_Drought_Soil_Dry_P Parameter: Post Timepoint (hr) Value: None
  misc_feature: MA Experiment 20001560 PARAMETER Experiment Name: At_Drought_Soil_Dry_P Parameter: Post-Treatment Value: None
  misc_feature: MA Experiment 20001560 PARAMETER Experiment Name: At_Drought_Soil_Dry_P Parameter: Timepoint (day) Value: 14
  misc_feature: MA Experiment 20001560 PARAMETER Experiment Name: At_Drought_Soil_Dry_P Parameter: Treatment Value: Drought vs. No Drought
  misc_feature: MA Experiment ID: 20001905 Result: Up-regulated in Transcription
  misc_feature: MA Experiment 20001905 PARAMETER Experiment Name: At_Drought_Reproduction_P Parameter: Age (day) Value: 40
  misc_feature: MA Experiment 20001905 PARAMETER Experiment Name: At_Drought_Reproduction_P Parameter: Organism Value: A. thaliana
  misc_feature: MA Experiment 20001905 PARAMETER Experiment Name: At_Drought_Reproduction_P Parameter: Plant Line Value: WS
  misc_feature: MA Experiment 20001905 PARAMETER Experiment Name: At_Drought_Reproduction_P Parameter: Timepoint (day) Value: 10
  misc_feature: MA Experiment 20001905 PARAMETER Experiment Name: At_Drought_Reproduction_P Parameter: Tissue Value: Rosettes
  misc_feature: MA Experiment 20001905 PARAMETER Experiment Name: At_Drought_Reproduction_P Parameter: Treatment Value: Drought vs. No Drought
atggaaagatccaatcttttccacatcccttgttttcttctcttatttcttctcttcaacatcaatggcgttcacactaccttcgtctgcggcgacgaagacttctctccaaacacaagctacgttgaaaacctcgaatctctcttgccttctcttgcttcaaacgtcatacgagaacgtggtttctacaacgtttcgctagacggagtttacgctcttgccctatgtcgaaaacactacgaagttcaagcttgtcgtcgctgcgtcgatagagcaagtaggactctgttaacacaatgccgaggcaaaacagaagcatatcactgggattccgaaaacgatgcaaacgtttcttgtctagtacgctactcaaatatccatagatttggcaaactaaagcttgagccaatagggaatgttcctcactcgagtcttgacccctcttccaatctaacccgaatcagccaagagtttgccgccagggctaatcgaacagttgaggttgcgtccacagctgatgagtcttcggtattgaagtattatggagtctcaagtgcagagtttacagacactcctgaggttaatatgttgatgcaatgcacacctgatttatcttccagtgactgtaatcattgtctgagagaaaatgttaggtataatcaagaacataactgggacagagttggaggaacagttgcccgtcctagttgttatttccgatgggatgattacagattcgcaggagctttcgataacctagagagagttcccgcgcctcctcgatctcctcaaactcgacaagattatcgggtcaagaaaggaagaatgtttcaaccatggagcgttgtggttgttgttttccctacgggcataaatcttgccgtgtttgtcgctttcgtgcttgcttatcgccggatgcggaggaggatttatactgaaatcaataagaattctgattctgatggtcaagctacgttaagatttgatcttggcatgatcttaattgcaaccaatgagttctcccttgaaaataagcttggacaaggtgggtttggatctgtctacaaggggatattaccgagcgggcaagagatagcggtaaagagattagctggaggctcaggacaaggagaactagagtttaagaatgaagtcttactcttgacaagactccaacataggaatctagttaagcttcttggattctgtaatgaaggaaatgaagagattcttgtctacgagcatgtccctaattcaagtcttgatcactttatctttgacgaagacaaacgttggcttcttacatgggatgtgaggtacagaatcatagaaggagttgcaagaggacttctttatctccatgaagattctcagttgaggattattcacagagatttgaaggcaagcaatatccttttagacgcggagatgaaccctaaagttgcagactttgggatggcgaggttgtttaacatggatgagactcgaggagagacaagcagagtagttggaacctacggatatatggctccggagtacgtgagacatggacaattctcagctaaatctgatgtttatagcttcggtgttatgcttttggagatgataagtggtgaaaaaaataagaactttgaaacagaaggacttcctgcttttgcatggaagagatggatagaaggagagcttgagagtataatcgatccttacttaaacgagaatccaagaaacgagatcataaagttgattcagattggtttgttgtgtgttcaagagaatgcagcaaagagaccaaccatgaactctgtaataacttggcttgcaagagacggtacttttacaatacctaaacctacagaagctgctttcgtcactctgcctctctcggtgaaacctgaaaataggtccatgagtgagcgtaaagacaaagatccgttttcagtggatgaggtctcgattacagtcttgtatcctcggtga

SEQ ID NO: 82563 - protein, 658 aa, Arabidopsis thaliana
  peptide (1)..(658): Ceres Seq. ID no. 12666313
  misc_feature (14)..(622): Homolog of NCBI NO: 15233558 NR Description: putative receptor-like protein kinase; protein id:
  misc_feature (14)..(638): Homolog of NCBI NO: 15233561 NR Description: receptor-like protein kinase; protein id:
  misc_feature (13)..(626): Homolog of NCBI NO: 15233524 NR Description: putative receptor-like protein kinase; protein id:
  misc_feature (14)..(658): Homolog of NCBI NO: 15233525 NR Description: putative receptor-like protein kinase; protein id:
  misc_feature (12)..(658): Homolog of NCBI NO: 4008012 NR Description: receptor-like protein kinase [Arabidopsis
  misc_feature (9)..(658): Homolog of NCBI NO: 4530126 NR Description: receptor-like protein kinase homolog RK20-1
  misc_feature (1)..(653): Homolog of NCBI NO: 15236444 NR Description: protein kinase - like protein; protein id:
  misc_feature (1)..(646): Homolog of NCBI NO: 30686091 NR Description: serine/threonine kinase - like protein
  misc_feature (1)..(646): Homolog of NCBI NO: 4127461 NR Description: receptor-like protein kinase, RLK3 [Arabidopsis
  misc_feature (11)..(658): Homolog of NCBI NO: 15233389 NR Description: serine/threonine kinase-like protein; protein id:
MERSNLFHIPCFLLLFLLFNINGVHTTFVCGDEDFSPNTSYVENLESLLPSLASNVIRERGFYNVSLDGVYALALCRKHYEVQACRRCVDRASRTLLTQCRGKTEAYHWDSENDANVSCLVRYSNIHRFGKLKLEPIGNVPHSSLDPSSNLTRISQEFAARANRTVEVASTADESSVLKYYGVSSAEFTDTPEVNMLMQCTPDLSSSDCNHCLRENVRYNQEHNWDRVGGTVARPSCYFRWDDYRFAGAFDNLERVPAPPRSPQTRQDYRVKKGRMFQPWSVVVVVFPTGINLAVFVAFVLAYRRMRRRIYTEINKNSDSDGQATLRFDLGMILIATNEFSLENKLGQGGFGSVYKGILPSGQEIAVKRLAGGSGQGELEFKNEVLLLTRLQHRNLVKLLGFCNEGNEEILVYEHVPNSSLDHFIFDEDKRWLLTWDVRYRIIEGVARGLLYLHEDSQLRIIHRDLKASNILLDAEMNPKVADFGMARLFNMDETRGETSRVVGTYGYMAPEYVRHGQFSAKSDVYSFGVMLLEMISGEKNKNFETEGLPAFAWKRWIEGELESIIDPYLNENPRNEIIKLIQIGLLCVQENAAKRPTMNSVITWLARDGTFTIPKPTEAAFVTLPLSVKPENRSMSERKDKDPFSVDEVSITVLYPR

SEQ ID NO: 82564 - protein, 463 aa, Arabidopsis thaliana
  peptide (1)..(463): Ceres Seq. ID no. 12666314
  misc_feature (1)..(427): Homolog of NCBI NO: 15233558 NR Description: putative receptor-like protein kinase; protein id:
  misc_feature (1)..(443): Homolog of NCBI NO: 15233561 NR Description: receptor-like protein kinase; protein id:
  misc_feature (1)..(431): Homolog of NCBI NO: 15233524 NR Description: putative receptor-like protein kinase; protein id:
  misc_feature (1)..(463): Homolog of NCBI NO: 15233525 NR Description: putative receptor-like protein kinase; protein id:
  misc_feature (1)..(463): Homolog of NCBI NO: 4008012 NR Description: receptor-like protein kinase [Arabidopsis
  misc_feature (1)..(463): Homolog of NCBI NO: 4530126 NR Description: receptor-like protein kinase homolog RK20-1
  misc_feature (1)..(458): Homolog of NCBI NO: 15236444 NR Description: protein kinase - like protein; protein id:
  misc_feature (1)..(451): Homolog of NCBI NO: 30686091 NR Description: serine/threonine kinase - like protein
  misc_feature (1)..(451): Homolog of NCBI NO: 4127461 NR Description: receptor-like protein kinase, RLK3 [Arabidopsis
  misc_feature (1)..(463): Homolog of NCBI NO: 15233389 NR Description: serine/threonine kinase-like protein; protein id:
MLMQCTPDLSSSDCNHCLRENVRYNQEHNWDRVGGTVARPSCYFRWDDYRFAGAFDNLERVPAPPRSPQTRQDYRVKKGRMFQPWSVVVVVFPTGINLAVFVAFVLAYRRMRRRIYTEINKNSDSDGQATLRFDLGMILIATNEFSLENKLGQGGFGSVYKGILPSGQEIAVKRLAGGSGQGELEFKNEVLLLTRLQHRNLVKLLGFCNEGNEEILVYEHVPNSSLDHFIFDEDKRWLLTWDVRYRIIEGVARGLLYLHEDSQLRIIHRDLKASNILLDAEMNPKVADFGMARLFNMDETRGETSRVVGTYGYMAPEYVRHGQFSAKSDVYSFGVMLLEMISGEKNKNFETEGLPAFAWKRWIEGELESIIDPYLNENPRNEIIKLIQIGLLCVQENAAKRPTMNSVITWLARDGTFTIPKPTEAAFVTLPLSVKPENRSMSERKDKDPFSVDEVSITVLYPR

SEQ ID NO: 82565 - protein, 461 aa, Arabidopsis thaliana
  peptide (1)..(461): Ceres Seq. ID no. 12666315
  misc_feature (1)..(425): Homolog of NCBI NO: 15233558 NR Description: putative receptor-like protein kinase; protein id:
  misc_feature (1)..(441): Homolog of NCBI NO: 15233561 NR Description: receptor-like protein kinase; protein id:
  misc_feature (1)..(429): Homolog of NCBI NO: 15233524 NR Description: putative receptor-like protein kinase; protein id:
  misc_feature (1)..(461): Homolog of NCBI NO: 15233525 NR Description: putative receptor-like protein kinase; protein id:
  misc_feature (1)..(461): Homolog of NCBI NO: 4008012 NR Description: receptor-like protein kinase [Arabidopsis
  misc_feature (1)..(461): Homolog of NCBI NO: 4530126 NR Description: receptor-like protein kinase homolog RK20-1
  misc_feature (1)..(456): Homolog of NCBI NO: 15236444 NR Description: protein kinase - like protein; protein id:
  misc_feature (1)..(449): Homolog of NCBI NO: 30686091 NR Description: serine/threonine kinase - like protein
  misc_feature (1)..(449): Homolog of NCBI NO: 4127461 NR Description: receptor-like protein kinase, RLK3 [Arabidopsis
  misc_feature (1)..(461): Homolog of NCBI NO: 15233389 NR Description: serine/threonine kinase-like protein; protein id:
MQCTPDLSSSDCNHCLRENVRYNQEHNWDRVGGTVARPSCYFRWDDYRFAGAFDNLERVPAPPRSPQTRQDYRVKKGRMFQPWSVVVVVFPTGINLAVFVAFVLAYRRMRRRIYTEINKNSDSDGQATLRFDLGMILIATNEFSLENKLGQGGFGSVYKGILPSGQEIAVKRLAGGSGQGELEFKNEVLLLTRLQHRNLVKLLGFCNEGNEEILVYEHVPNSSLDHFIFDEDKRWLLTWDVRYRIIEGVARGLLYLHEDSQLRIIHRDLKASNILLDAEMNPKVADFGMARLFNMDETRGETSRVVGTYGYMAPEYVRHGQFSAKSDVYSFGVMLLEMISGEKNKNFETEGLPAFAWKRWIEGELESIIDPYLNENPRNEIIKLIQIGLLCVQENAAKRPTMNSVITWLARDGTFTIPKPTEAAFVTLPLSVKPENRSMSERKDKDPFSVDEVSITVLYPR

SEQ ID NO: 82566 - DNA, 1941 bp, Arabidopsis thaliana
  misc_feature (1)..(1941): Ceres Seq. ID no. 12666316
  misc_feature: MA Experiment ID: 20000184 Result: Down-regulated in Transcription
  misc_feature: MA Experiment 20000184 PARAMETER Experiment Name: At_Shoots__P Parameter: Age (day) Value: 7
  misc_feature: MA Experiment 20000184 PARAMETER Experiment Name: At_Shoots__P Parameter: Tissue Value: Shoots vs. Whole Plant
  misc_feature: MA Experiment ID: 20000234 Result: Down-regulated in Transcription
  misc_feature: MA Experiment 20000234 PARAMETER Experiment Name: At_Siliques_P Parameter: Age (day) Value: 21
  misc_feature: MA Experiment 20000234 PARAMETER Experiment Name: At_Siliques_P Parameter: Organism Value: A. thaliana
  misc_feature: MA Experiment 20000234 PARAMETER Experiment Name: At_Siliques_P Parameter: Plant Line Value: WS
  misc_feature: MA Experiment 20000234 PARAMETER Experiment Name: At_Siliques_P Parameter: Tissue Value: Less Than 5mm Siliques vs. Whole Plant
  misc_feature: MA Experiment ID: 20000235 Result: Down-regulated in Transcription
  misc_feature: MA Experiment 20000235 PARAMETER Experiment Name: At_Siliques_P Parameter: Age (day) Value: 21
  misc_feature: MA Experiment 20000235 PARAMETER Experiment Name: At_Siliques_P Parameter: Organism Value: A. thaliana
  misc_feature: MA Experiment 20000235 PARAMETER Experiment Name: At_Siliques_P Parameter: Plant Line Value: WS
  misc_feature: MA Experiment 20000235 PARAMETER Experiment Name: At_Siliques_P Parameter: Tissue Value: 5-10mm Siliques vs. Whole Plant
  misc_feature: MA Experiment ID: 20000264 Result: Down-regulated in Transcription
  misc_feature: MA Experiment 20000264 PARAMETER Experiment Name: At_Open_Flower_P Parameter: Age (day) Value: 21
  misc_feature: MA Experiment 20000264 PARAMETER Experiment Name: At_Open_Flower_P Parameter: Plant Line Value: WS
  misc_feature: MA Experiment 20000264 PARAMETER Experiment Name: At_Open_Flower_P Parameter: Tissue Value: Open Flower vs. Whole Plant
  misc_feature: MA Experiment ID: 20000709 Result: Down-regulated in Transcription
  misc_feature: MA Experiment 20000709 PARAMETER Experiment Name: At_15mM_NH4NO3_L-to-H_P Parameter: Age (hr) Value: 14
  misc_feature: MA Experiment 20000709 PARAMETER Experiment Name: At_15mM_NH4NO3_L-to-H_P Parameter: Organism Value: A. thaliana
  misc_feature: MA Experiment 20000709 PARAMETER Experiment Name: At_15mM_NH4NO3_L-to-H_P Parameter: Plant Line Value: WS
  misc_feature: MA Experiment 20000709 PARAMETER Experiment Name: At_15mM_NH4NO3_L-to-H_P Parameter: Timepoint (hr) Value: 4
  misc_feature: MA Experiment 20000709 PARAMETER Experiment Name: At_15mM_NH4NO3_L-to-H_P Parameter: Tissue Value: Aerial
  misc_feature: MA Experiment 20000709 PARAMETER Experiment Name: At_15mM_NH4NO3_L-to-H_P Parameter: Treatment Value: 15mM NH4NO3 vs. 30mM Mannitol
  misc_feature: MA Experiment ID: 20000794 Result: Down-regulated in Transcription
  misc_feature: MA Experiment 20000794 PARAMETER Experiment Name: At_Petals_P Parameter: Age (day) Value: 23-25 days
  misc_feature: MA Experiment 20000794 PARAMETER Experiment Name: At_Petals_P Parameter: Plant Line Value: WS
  misc_feature: MA Experiment 20000794 PARAMETER Experiment Name: At_Petals_P Parameter: Tissue Value: Petals vs. Whole plant
  misc_feature: MA Experiment ID: 20001558 Result: Down-regulated in Transcription
  misc_feature: MA Experiment 20001558 PARAMETER Experiment Name: At_Drought_Soil_Dry_P Parameter: Age (day) Value: 27
  misc_feature: MA Experiment 20001558 PARAMETER Experiment Name: At_Drought_Soil_Dry_P Parameter: Organism Value: A. thaliana
  misc_feature: MA Experiment 20001558 PARAMETER Experiment Name: At_Drought_Soil_Dry_P Parameter: Plant Line Value: WS
  misc_feature: MA Experiment 20001558 PARAMETER Experiment Name: At_Drought_Soil_Dry_P Parameter: Post Timepoint (hr) Value: 6
  misc_feature: MA Experiment 20001558 PARAMETER Experiment Name: At_Drought_Soil_Dry_P Parameter: Post-Treatment Value: Re-Water vs. No Drought
  misc_feature: MA Experiment 20001558 PARAMETER Experiment Name: At_Drought_Soil_Dry_P Parameter: Timepoint (day) Value: 13
  misc_feature: MA Experiment 20001558 PARAMETER Experiment Name: At_Drought_Soil_Dry_P Parameter: Treatment Value: Drought vs. No Drought
atgggaaagagttgtgttgtgactagttccttctcgcttctccttctcttccttcaaaccctaaaatatgttcatgccggtttcatttgctacggcgactttttcaatgttaactacggcgtcagtcgaacgtatctcttctcttctcttccttctaacgtcgtttctaacggcggtttctacaacgcatcgtttggcagagattccaaaaacaacagagtccacgttgttgccttatgcagacgaggctacgagaagcaagcttgtaagacatgtctcgaacatgtgattgaagacacaaaatccaagtgtcctcgccaaaaagagtctttctcgtgggtcactgatgaattcgacgacgtttcttgctctctacgttacaccaaccactcaactcttggcaaactcgagctcttaccaaatactattaaccctaaccctaacagtatagattccaaattcaacaacatggccatgttcagccaagaatggattgcaatggttaaccggacactcgaggctgcttccaccgctgagaattcctcagtccttaagtactacagcgcaacaagaacagagttcacacaaatttcagatgtttacgcgttgatgcagtgcgtgcctgatctatcgccaggcaactgcaagagatgtcttagagagtgtgtgaatgactttcagaagcagttttggggaagacaaggaggtggggttagtcggcctagctgttatttccggtgggatctttatccgtactacagagcttttgacaatgttgtaagagttcctgctcctcctcctcaagcttcttctactattatcgattacgggagagacgagaaaagttttcaaggaagcaacatagcaattattgtggtcccttcagtcatcaatctcatcatatttgtggttctaatattctcttggaagagaaagcagtcacacaccataatcaatgatgtttttgattcaaataatggtcaatctatgttacgttttgatcttcgaatgattgtaactgcaaccaataacttctctcttgaaaataagcttggccaaggtggatttggatctgtctacaagggaatattaccaagcgggcaagagatagcggtaaagagattaagaaaaggttcaggacaaggaggtatggagttcaagaacgaggtcttactcttgacaagactccaacataggaatctggttaagcttcttgggttttgtaatgaaaaagatgaagagattcttgtctacgagtttgtccccaattcaagccttgaccacttcatattcgatgaagaaaaacgccgagttctgacatgggatgtgaggtatacaatcatagaaggagttgcaagagggcttctttatctccatgaagattctcagttgaggattatacacagagatttgaaggcaagcaatatccttttagacgcggagatgaaccctaaggttgcagattttgggatggcaaggctgttcgatatggacgagactcgaggacagacaagcagagtagttggaacatatggatatatggctccagaatacgcgacatacggacaattctcgacaaaatctgatgtttatagctttggtgtcatgcttctagagatgataagtggtaaaagcaacaaaaagttggaaaaagaagaagaggaagaagaagaagagcttccagcttttgtgtggaagaggtggattgaaggaagatttgcagagatcattgatcctttggctgctccgagtaacaatatctcaataaacgaagtaatgaagctcattcacataggtttgttgtgtgttcaagaggatatttccaaaagacctagcattaattcaatcctcttttggcttgagagacacgctactatcacaatgcctgtgcccacgcctgttgcttatcttacgcgaccatcgttatcacttggtcattaa

SEQ ID NO: 82567 - protein, 646 aa, Arabidopsis thaliana
  peptide (1)..(646): Ceres Seq. ID no. 12666317
  misc_feature (1)..(645): Homolog of NCBI NO: 15233558 NR Description: putative receptor-like protein kinase; protein id:
  misc_feature (1)..(646): Homolog of NCBI NO: 15233525 NR Description: putative receptor-like protein kinase; protein id:
  misc_feature (13)..(640): Homolog of NCBI NO: 15233523 NR Description: putative receptor-like protein kinase; protein At4g04490.1 [Arabidopsis thaliana]
  misc_feature (1)..(636): Homolog of NCBI NO: 15233561 NR Description: receptor-like protein kinase; protein id:
  misc_feature (36)..(639): Homolog of NCBI NO: 30686091 NR Description: serine/threonine kinase - like protein
  misc_feature (36)..(639): Homolog of NCBI NO: 4127461 NR Description: receptor-like protein kinase, RLK3 [Arabidopsis
  misc_feature (11)..(631): Homolog of NCBI NO: 7488201 NR Description: probable serine/threonine-specific protein kinase
  misc_feature (11)..(631): Homolog of NCBI NO: 15233396 NR Description: serine/threonine kinase-like protein (fragment);
  misc_feature (14)..(642): Homolog of NCBI NO: 15233389 NR Description: serine/threonine kinase-like protein; protein id:
  misc_feature (36)..(639): Homolog of NCBI NO: 15234659 NR Description: receptor protein kinase - like protein; protein At4g05200.1 [Arabidopsis thaliana] >gi|25387047|pir||D85065
MGKSCVVTSSFSLLLLFLQTLKYVHAGFICYGDFFNVNYGVSRTYLFSSLPSNVVSNGGFYNASFGRDSKNNRVHVVALCRRGYEKQACKTCLEHVIEDTKSKCPRQKESFSWVTDEFDDVSCSLRYTNHSTLGKLELLPNTINPNPNSIDSKFNNMAMFSQEWIAMVNRTLEAASTAENSSVLKYYSATRTEFTQISDVYALMQCVPDLSPGNCKRCLRECVNDFQKQFWGRQGGGVSRPSCYFRWDLYPYYRAFDNVVRVPAPPPQASSTIIDYGRDEKSFQGSNIAIIVVPSVINLIIFVVLIFSWKRKQSHTIINDVFDSNNGQSMLRFDLRMIVTATNNFSLENKLGQGGFGSVYKGILPSGQEIAVKRLRKGSGQGGMEFKNEVLLLTRLQHRNLVKLLGFCNEKDEEILVYEFVPNSSLDHFIFDEEKRRVLTWDVRYTIIEGVARGLLYLHEDSQLRIIHRDLKASNILLDAEMNPKVADFGMARLFDMDETRGQTSRVVGTYGYMAPEYATYGQFSTKSDVYSFGVMLLEMISGKSNKKLEKEEEEEEEELPAFVWKRWIEGRFAEIIDPLAAPSNNISINEVMKLIHIGLLCVQEDISKRPSINSILFWLERHATITMPVPTPVAYLTRPSLSLGH

SEQ ID NO: 82568 - protein, 490 aa, Arabidopsis thaliana
  peptide (1)..(490): Ceres Seq. ID no. 12666318
  misc_feature (1)..(489): Homolog of NCBI NO: 15233558 NR Description: putative receptor-like protein kinase; protein id:
  misc_feature (1)..(490): Homolog of NCBI NO: 15233525 NR Description: putative receptor-like protein kinase; protein id:
  misc_feature (1)..(484): Homolog of NCBI NO: 15233523 NR Description: putative receptor-like protein kinase; protein At4g04490.1 [Arabidopsis thaliana]
  misc_feature (1)..(480): Homolog of NCBI NO: 15233561 NR Description: receptor-like protein kinase; protein id:
  misc_feature (1)..(483): Homolog of NCBI NO: 30686091 NR Description: serine/threonine kinase - like protein
  misc_feature (1)..(483): Homolog of NCBI NO: 4127461 NR Description: receptor-like protein kinase, RLK3 [Arabidopsis
  misc_feature (1)..(475): Homolog of NCBI NO: 7488201 NR Description: probable serine/threonine-specific protein kinase
  misc_feature (1)..(475): Homolog of NCBI NO: 15233396 NR Description: serine/threonine kinase-like protein (fragment);
  misc_feature (1)..(486): Homolog of NCBI NO: 15233389 NR Description: serine/threonine kinase-like protein; protein id:
  misc_feature (1)..(483): Homolog of NCBI NO: 15234659 NR Description: receptor protein kinase - like protein; protein At4g05200.1 [Arabidopsis thaliana] >gi|25387047|pir||D85065
MAMFSQEWIAMVNRTLEAASTAENSSVLKYYSATRTEFTQISDVYALMQCVPDLSPGNCKRCLRECVNDFQKQFWGRQGGGVSRPSCYFRWDLYPYYRAFDNVVRVPAPPPQASSTIIDYGRDEKSFQGSNIAIIVVPSVINLIIFVVLIFSWKRKQSHTIINDVFDSNNGQSMLRFDLRMIVTATNNFSLENKLGQGGFGSVYKGILPSGQEIAVKRLRKGSGQGGMEFKNEVLLLTRLQHRNLVKLLGFCNEKDEEILVYEFVPNSSLDHFIFDEEKRRVLTWDVRYTIIEGVARGLLYLHEDSQLRIIHRDLKASNILLDAEMNPKVADFGMARLFDMDETRGQTSRVVGTYGYMAPEYATYGQFSTKSDVYSFGVMLLEMISGKSNKKLEKEEEEEEEELPAFVWKRWIEGRFAEIIDPLAAPSNNISINEVMKLIHIGLLCVQEDISKRPSINSILFWLERHATITMPVPTPVAYLTRPSLSLGH

SEQ ID NO: 82569 - protein, 488 aa, Arabidopsis thaliana
  peptide (1)..(488): Ceres Seq. ID no. 12666319
  misc_feature (1)..(487): Homolog of NCBI NO: 15233558 NR Description: putative receptor-like protein kinase; protein id:
  misc_feature (1)..(488): Homolog of NCBI NO: 15233525 NR Description: putative receptor-like protein kinase; protein id:
  misc_feature (1)..(482): Homolog of NCBI NO: 15233523 NR Description: putative receptor-like protein kinase; protein At4g04490.1 [Arabidopsis thaliana]
  misc_feature (1)..(478): Homolog of NCBI NO: 15233561 NR Description: receptor-like protein kinase; protein id:
  misc_feature (1)..(481): Homolog of NCBI NO: 30686091 NR Description: serine/threonine kinase - like protein
  misc_feature (1)..(481): Homolog of NCBI NO: 4127461 NR Description: receptor-like protein kinase, RLK3 [Arabidopsis
  misc_feature (1)..(473): Homolog of NCBI NO: 7488201 NR Description: probable serine/threonine-specific protein kinase
  misc_feature (1)..(473): Homolog of NCBI NO: 15233396 NR Description: serine/threonine kinase-like protein (fragment);
  misc_feature (1)..(484): Homolog of NCBI NO: 15233389 NR Description: serine/threonine kinase-like protein; protein id:
  misc_feature (1)..(481): Homolog of NCBI NO: 15234659 NR Description: receptor protein kinase - like protein; protein At4g05200.1 [Arabidopsis thaliana] >gi|25387047|pir||D85065
MFSQEWIAMVNRTLEAASTAENSSVLKYYSATRTEFTQISDVYALMQCVPDLSPGNCKRCLRECVNDFQKQFWGRQGGGVSRPSCYFRWDLYPYYRAFDNVVRVPAPPPQASSTIIDYGRDEKSFQGSNIAIIVVPSVINLIIFVVLIFSWKRKQSHTIINDVFDSNNGQSMLRFDLRMIVTATNNFSLENKLGQGGFGSVYKGILPSGQEIAVKRLRKGSGQGGMEFKNEVLLLTRLQHRNLVKLLGFCNEKDEEILVYEFVPNSSLDHFIFDEEKRRVLTWDVRYTIIEGVARGLLYLHEDSQLRIIHRDLKASNILLDAEMNPKVADFGMARLFDMDETRGQTSRVVGTYGYMAPEYATYGQFSTKSDVYSFGVMLLEMISGKSNKKLEKEEEEEEEELPAFVWKRWIEGRFAEIIDPLAAPSNNISINEVMKLIHIGLLCVQEDISKRPSINSILFWLERHATITMPVPTPVAYLTRPSLSLGH

SEQ ID NO: 82570 - DNA, 1980 bp, Arabidopsis thaliana
  misc_feature (1)..(1980): Ceres Seq. ID no. 12666330
  misc_feature: MA Experiment ID: 20000315 Result: Down-regulated in Transcription
  misc_feature: MA Experiment 20000315 PARAMETER Experiment Name: At_14day_Shoots-Roots_Sub_P Parameter: Age (day) Value: 14
  misc_feature: MA Experiment 20000315 PARAMETER Experiment Name: At_14day_Shoots-Roots_Sub_P Parameter: Organism Value: A. thaliana
  misc_feature: MA Experiment 20000315 PARAMETER Experiment Name: At_14day_Shoots-Roots_Sub_P Parameter: Plant Line Value: WS
  misc_feature: MA Experiment 20000315 PARAMETER Experiment Name: At_14day_Shoots-Roots_Sub_P Parameter: Tissue Value: Shoots vs. Whole Plant
  misc_feature: MA Experiment ID: 20000328 Result: Down-regulated in Transcription
  misc_feature: MA Experiment 20000328 PARAMETER Experiment Name: At_42deg_Heat_Sub_P Parameter: Age (day) Value: 14
  misc_feature: MA Experiment 20000328 PARAMETER Experiment Name: At_42deg_Heat_Sub_P Parameter: Organism Value: A. thaliana
  misc_feature: MA Experiment 20000328 PARAMETER Experiment Name: At_42deg_Heat_Sub_P Parameter: Plant Line Value: WS
  misc_feature: MA Experiment 20000328 PARAMETER Experiment Name: At_42deg_Heat_Sub_P Parameter: Temperature (deg C) Value: 42 vs. 22
  misc_feature: MA Experiment 20000328 PARAMETER Experiment Name: At_42deg_Heat_Sub_P Parameter: Timepoint (hr) Value: 6
  misc_feature: MA Experiment 20000328 PARAMETER Experiment Name: At_42deg_Heat_Sub_P Parameter: Tissue Value: Aerial
  misc_feature: MA Experiment ID: 20000352 Result: Down-regulated in Transcription
  misc_feature: MA Experiment 20000352 PARAMETER Experiment Name: At_Drought_Sub_P Parameter: Age (day) Value: 7
  misc_feature: MA Experiment 20000352 PARAMETER Experiment Name: At_Drought_Sub_P Parameter: Organism Value: A. thaliana
  misc_feature: MA Experiment 20000352 PARAMETER Experiment Name: At_Drought_Sub_P Parameter: Plant Line Value: WS
  misc_feature: MA Experiment 20000352 PARAMETER Experiment Name: At_Drought_Sub_P Parameter: Timepoint (hr) Value: 6
  misc_feature: MA Experiment 20000352 PARAMETER Experiment Name: At_Drought_Sub_P Parameter: Tissue Value: Whole Plant
  misc_feature: MA Experiment 20000352 PARAMETER Experiment Name: At_Drought_Sub_P Parameter: Treatment Value: Drought vs. No Drought
  misc_feature: MA Experiment ID: 20000440 Result: Down-regulated in Transcription
  misc_feature: MA Experiment 20000440 PARAMETER Experiment Name: At_Closed-Flower__Sub_P Parameter: Tissue Value: Closed Flower vs. Whole Plant
atggggaaatactctgttttgatgatctttatcgcttcttctcttcttattgtccttcaaaacgtggaaatcgttaacgccgtcggatgtaccggaagcttcttcaacggtaatagcagctacgctcagaatcgccgcgatctcttctctactcttcctaataaagtcgtcaccaacggtggattctacaactcttcactcggcaaaagtcccaacatagttcatgctgttgctctctgcggaagaggatacgagcaacaagcttgtatcaggtgtgtcgacagtgcgatacagggtatactaacgacaacgagttgtctaaaccgcgtggattcattcacgtgggacaaagacgaggaagacaatgtttcttgtcttgtaagtacctcaaaccactcaacttttgggaacctcgagcttagaccttctgttagataccaaagtccgaatagtatcgagccatcgaaaaacatgactcttttcgaacaagaatggaatgcaatggctaatcggaccgtcgagtctgccacagaagctgaaacttcctcggtacttaagtactatagtgccgaaaaagccgagttcacagagtttccaaatgtttacatgctgatgcaatgcacacccgacataacttcccaagattgcaaaacatgtctgggagaatgcgtgacgcttttcaaagaacaggtttggggaagacaaggaggcgaggtttatcgtccgagctgttttttcaggtgggatctatatgctttccatggtgcttttgataatgtaacaagagttcctgcgcctcctcgacctcaagctcagggaaacgagagctctataacaaaaaagaaaggaagaagcattggatatggtggaattattgcaatagttgtggttcttactttcattaatattttggtgtttattggctatatcaaagtctatggacgtaggaaagaatcatacaacaaaatcaatgttggaagtgcagagtactctgattctgatggtcaattcatgttacggtttgatcttggtatggtcttagcggctaccgatgaattctcatcggaaaatacgcttggccaaggtggatttggtacggtctataaggggacattactaaacgggcaagaggtagcggtgaagaggttaacaaaaggttcaggacaaggagatatagagttcaagaatgaggtttcgctattgacaagactccagcataggaatctagttaagcttcttggattttgtaatgaaggagatgaacagattcttgtttacgagttcgttcccaattcaagtcttgatcactttatcttcgatgatgagaagcgttcacttcttacatgggagatgagatacagaattatagaaggcattgctcgaggtcttctttatcttcatgaagactcgcagctaaagattattcaccgagacttgaaggcaagcaacatacttttagacgcagagatgaaccctaaagttgcagatttcgggacagcgaggttgttcgactccgatgagactcgagctgaaacaaaaagaatagctggaacccgtggatatatggctcctgaatacttgaatcatggacaaatctcagctaaatctgacgtttatagcttcggtgttatgcttctagagatgattagtggtgaaagaaacaatagcttcgaaggagaaggacttgcagcttttgcatggaaaagatgggttgaaggaaagcctgagattataattgatccgttcttaatagagaaaccaagaaatgagatcataaagttgatccaaattggtttgttgtgtgttcaagagaatccaacaaagagaccaacaatgagctctgtaataatttggcttggtagtgagacaaatatcattcctttacctaaagctcctgctttcactggaagtcgatcccaatctgaaattggtgcaatgtcaatgagcgacgatgtcttcacggagttaagttgtcgttga

SEQ ID NO: 82571 - protein, 659 aa, Arabidopsis thaliana
  peptide (1)..(659): Ceres Seq. ID no. 12666331
  misc_feature (1)..(659): Homolog of NCBI NO: 15233561 NR Description: receptor-like protein kinase; protein id:
  misc_feature (9)..(659): Homolog of NCBI NO: 15233525 NR Description: putative receptor-like protein kinase; protein id:
  misc_feature (15)..(634): Homolog of NCBI NO: 15233523 NR Description: putative receptor-like protein kinase; protein At4g04490.1 [Arabidopsis thaliana]
  misc_feature (1)..(644): Homolog of NCBI NO: 15233524 NR Description: putative receptor-like protein kinase; protein id:
  misc_feature (10)..(634): Homolog of NCBI NO: 7488201 NR Description: probable serine/threonine-specific protein kinase
  misc_feature (10)..(634): Homolog of NCBI NO: 15233396 NR Description: serine/threonine kinase-like protein (fragment);
  misc_feature (1)..(634): Homolog of NCBI NO: 4008012 NR Description: receptor-like protein kinase [Arabidopsis
  misc_feature (1)..(634): Homolog of NCBI NO: 15236444 NR Description: protein kinase - like protein; protein id:
  misc_feature (4)..(657): Homolog of NCBI NO: 30686091 NR Description: serine/threonine kinase - like protein
  misc_feature (4)..(657): Homolog of NCBI NO: 4127461 NR Description: receptor-like protein kinase, RLK3 [Arabidopsis
MGKYSVLMIFIASSLLIVLQNVEIVNAVGCTGSFFNGNSSYAQNRRDLFSTLPNKVVTNGGFYNSSLGKSPNIVHAVALCGRGYEQQACIRCVDSAIQGILTTTSCLNRVDSFTWDKDEEDNVSCLVSTSNHSTFGNLELRPSVRYQSPNSIEPSKNMTLFEQEWNAMANRTVESATEAETSSVLKYYSAEKAEFTEFPNVYMLMQCTPDITSQDCKTCLGECVTLFKEQVWGRQGGEVYRPSCFFRWDLYAFHGAFDNVTRVPAPPRPQAQGNESSITKKKGRSIGYGGIIAIVVVLTFINILVFIGYIKVYGRRKESYNKINVGSAEYSDSDGQFMLRFDLGMVLAATDEFSSENTLGQGGFGTVYKGTLLNGQEVAVKRLTKGSGQGDIEFKNEVSLLTRLQHRNLVKLLGFCNEGDEQILVYEFVPNSSLDHFIFDDEKRSLLTWEMRYRIIEGIARGLLYLHEDSQLKIIHRDLKASNILLDAEMNPKVADFGTARLFDSDETRAETKRIAGTRGYMAPEYLNHGQISAKSDVYSFGVMLLEMISGERNNSFEGEGLAAFAWKRWVEGKPEIIIDPFLIEKPRNEIIKLIQIGLLCVQENPTKRPTMSSVIIWLGSETNIIPLPKAPAFTGSRSQSEIGAMSMSDDVFTELSCR

SEQ ID NO: 82572 - protein, 652 aa, Arabidopsis thaliana
  peptide (1)..(652): Ceres Seq. ID no. 12666332
  misc_feature (1)..(652): Homolog of NCBI NO: 15233561 NR Description: receptor-like protein kinase; protein id:
  misc_feature (2)..(652): Homolog of NCBI NO: 15233525 NR Description: putative receptor-like protein kinase; protein id:
  misc_feature (8)..(627): Homolog of NCBI NO: 15233523 NR Description: putative receptor-like protein kinase; protein At4g04490.1 [Arabidopsis thaliana]
  misc_feature (1)..(637): Homolog of NCBI NO: 15233524 NR Description: putative receptor-like protein kinase; protein id:
  misc_feature (3)..(627): Homolog of NCBI NO: 7488201 NR Description: probable serine/threonine-specific protein kinase
  misc_feature (3)..(627): Homolog of NCBI NO: 15233396 NR Description: serine/threonine kinase-like protein (fragment);
  misc_feature (1)..(627): Homolog of NCBI NO: 4008012 NR Description: receptor-like protein kinase [Arabidopsis
  misc_feature (1)..(627): Homolog of NCBI NO: 15236444 NR Description: protein kinase - like protein; protein id:
  misc_feature (1)..(650): Homolog of NCBI NO: 30686091 NR Description: serine/threonine kinase - like protein
  misc_feature (1)..(650): Homolog of NCBI NO: 4127461 NR Description: receptor-like protein kinase, RLK3 [Arabidopsis
MIFIASSLLIVLQNVEIVNAVGCTGSFFNGNSSYAQNRRDLFSTLPNKVVTNGGFYNSSLGKSPNIVHAVALCGRGYEQQACIRCVDSAIQGILTTTSCLNRVDSFTWDKDEEDNVSCLVSTSNHSTFGNLELRPSVRYQSPNSIEPSKNMTLFEQEWNAMANRTVESATEAETSSVLKYYSAEKAEFTEFPNVYMLMQCTPDITSQDCKTCLGECVTLFKEQVWGRQGGEVYRPSCFFRWDLYAFHGAFDNVTRVPAPPRPQAQGNESSITKKKGRSIGYGGIIAIVVVLTFINILVFIGYIKVYGRRKESYNKINVGSAEYSDSDGQFMLRFDLGMVLAATDEFSSENTLGQGGFGTVYKGTLLNGQEVAVKRLTKGSGQGDIEFKNEVSLLTRLQHRNLVKLLGFCNEGDEQILVYEFVPNSSLDHFIFDDEKRSLLTWEMRYRIIEGIARGLLYLHEDSQLKIIHRDLKASNILLDAEMNPKVADFGTARLFDSDETRAETKRIAGTRGYMAPEYLNHGQISAKSDVYSFGVMLLEMISGERNNSFEGEGLAAFAWKRWVEGKPEIIIDPFLIEKPRNEIIKLIQIGLLCVQENPTKRPTMSSVIIWLGSETNIIPLPKAPAFTGSRSQSEIGAMSMSDDVFTELSCR

SEQ ID NO: 82573 - protein, 502 aa, Arabidopsis thaliana
  peptide (1)..(502): Ceres Seq. ID no. 12666333
  misc_feature (1)..(502): Homolog of NCBI NO: 15233561 NR Description: receptor-like protein kinase; protein id:
  misc_feature (1)..(502): Homolog of NCBI NO: 15233525 NR Description: putative receptor-like protein kinase; protein id:
  misc_feature (1)..(477): Homolog of NCBI NO: 15233523 NR Description: putative receptor-like protein kinase; protein At4g04490.1 [Arabidopsis thaliana]
  misc_feature (1)..(487): Homolog of NCBI NO: 15233524 NR Description: putative receptor-like protein kinase; protein id:
  misc_feature (1)..(477): Homolog of NCBI NO: 7488201 NR Description: probable serine/threonine-specific protein kinase
  misc_feature (1)..(477): Homolog of NCBI NO: 15233396 NR Description: serine/threonine kinase-like protein (fragment);
  misc_feature (1)..(477): Homolog of NCBI NO: 4008012 NR Description: receptor-like protein kinase [Arabidopsis
  misc_feature (1)..(477): Homolog of NCBI NO: 15236444 NR Description: protein kinase - like protein; protein id:
  misc_feature (1)..(500): Homolog of NCBI NO: 30686091 NR Description: serine/threonine kinase - like protein
  misc_feature (1)..(500): Homolog of NCBI NO: 4127461 NR Description: receptor-like protein kinase, RLK3 [Arabidopsis
MTLFEQEWNAMANRTVESATEAETSSVLKYYSAEKAEFTEFPNVYMLMQCTPDITSQDCKTCLGECVTLFKEQVWGRQGGEVYRPSCFFRWDLYAFHGAFDNVTRVPAPPRPQAQGNESSITKKKGRSIGYGGIIAIVVVLTFINILVFIGYIKVYGRRKESYNKINVGSAEYSDSDGQFMLRFDLGMVLAATDEFSSENTLGQGGFGTVYKGTLLNGQEVAVKRLTKGSGQGDIEFKNEVSLLTRLQHRNLVKLLGFCNEGDEQILVYEFVPNSSLDHFIFDDEKRSLLTWEMRYRIIEGIARGLLYLHEDSQLKIIHRDLKASNILLDAEMNPKVADFGTARLFDSDETRAETKRIAGTRGYMAPEYLNHGQISAKSDVYSFGVMLLEMISGERNNSFEGEGLAAFAWKRWVEGKPEIIIDPFLIEKPRNEIIKLIQIGLLCVQENPTKRPTMSSVIIWLGSETNIIPLPKAPAFTGSRSQSEIGAMSMSDDVFTELSCR

SEQ ID NO: 82574 - DNA, 1044 bp, Arabidopsis thaliana
  misc_feature (1)..(1044): Ceres Seq. ID no. 12666356
  misc_feature: MA Experiment ID: 20000179 Result: Up-regulated in Transcription
  misc_feature: MA Experiment 20000179 PARAMETER Experiment Name: At_Germinating_Seeds_P Parameter: Age (hr) Value: 6 vs. 0
  misc_feature: MA Experiment 20000179 PARAMETER Experiment Name: At_Germinating_Seeds_P Parameter: Tissue Value: Germinating Seeds
atgggttgcttcagcagtaaggagctacaacaatcgaaaagaaccattcttgagaaacctttagttgacatcacaaagatttatatcctcggggaggaattgggtagaggtaatttcggtctaacccgaaagtgcgttgagaaatctacaggtaagacattcgcctgcaaaaccattctcaagacaaagctaaaggacgaagaatgtgaagaagacgtgaagagagagattcggattatgaagcaattgtctggagaaccaaacattgtcgagttcaagaatgcttacgaggacaaagattctgtacatattgttatggaatattgtggtggtggagagttatacgacaagatcctagctttgtacgatgttgggaagtcttactcggagaaagaagctgctggaatcattaggtcgattgtgaatgttgtgaagaattgccattacatgggtgtgatgcatcgtgatctaaagcctgagaatttcttgcttacgagtaacgatgacaatgctacggtcaaagttattgactttgggtgttctgtgttcattgaagaaggaaaagtataccaggatttagctgggagtgattactacattgctcctgaagtgttacagggaaattacggtaaagaagcggacatttggagtgcagggattatattatacatcctactctgtggcaaatctccctttgtgaaagaacctgagggacagatgttcaatgagattaagagtttggaaatcgactacagcgaggaaccatggcctcttagagattcaagggcaatacatcttgtcaagaggatgcttgatagaaaccccaaggaacgaatctctgctgcagaggttcttggtaagttcctttctttctcttttcaagattgttctagagccaacacaaatatatatatctggatccaaaagaagcttcaaggatccagaattgtgctcactatgtttgtggagggcttgtttcctcaaaagaaattccattgtttagactatgtgaatattgaaatcttgttcttgttttgtctgtaa

SEQ ID NO: 82575 - protein, 347 aa, Arabidopsis thaliana
  peptide (1)..(347): Ceres Seq. ID no. 12666357
  misc_feature (1)..(347): Homolog of NCBI NO: 15234430 NR Description: putative calcium dependent protein kinase; id: At4g04700.1 [Arabidopsis thaliana]
  misc_feature (1)..(286): Homolog of NCBI NO: 5706728 NR Description: contains similarity to eukaryotic protein kinase
  misc_feature (1)..(186): Homolog of NCBI NO: 22328350 NR Description: similar to calcium-dependent protein kinase -
  misc_feature (169)..(286): Homolog of NCBI NO: 22328350 NR Description: similar to calcium-dependent protein kinase -
  misc_feature (5)..(186): Homolog of NCBI NO: 5732059 NR Description: similar to Pfam families PF00069 (Eukaryotic
  misc_feature (228)..(286): Homolog of NCBI NO: 5732059 NR Description: similar to Pfam families PF00069 (Eukaryotic
  misc_feature (15)..(285): Homolog of NCBI NO: 15234656 NR Description: calcium-dependent protein kinase - like protein; id: At4g21940.1, supported by cDNA: gi_17104578 [Arabidopsis
  misc_feature (15)..(285): Homolog of NCBI NO: 15234435 NR Description: putative calcium dependent protein kinase; id: At4g04720.1, supported by cDNA: gi_15292914 [Arabidopsis >gi|25287682|pir||D85059 probable calcium dependent protein
  misc_feature (15)..(285): Homolog of NCBI NO: 15292915 NR Description: putative calcium dependent protein kinase
  misc_feature (16)..(285): Homolog of NCBI NO: 19171502 NR Description: calcium-dependent protein kinase [Lycopersicon
MGCFSSKELQQSKRTILEKPLVDITKIYILGEELGRGNFGLTRKCVEKSTGKTFACKTILKTKLKDEECEEDVKREIRIMKQLSGEPNIVEFKNAYEDKDSVHIVMEYCGGGELYDKILALYDVGKSYSEKEAAGIIRSIVNVVKNCHYMGVMHRDLKPENFLLTSNDDNATVKVIDFGCSVFIEEGKVYQDLAGSDYYIAPEVLQGNYGKEADIWSAGIILYILLCGKSPFVKEPEGQMFNEIKSLEIDYSEEPWPLRDSRAIHLVKRMLDRNPKERISAAEVLGKFLSFSFQDCSRANTNIYIWIQKKLQGSRIVLTMFVEGLFPQKKFHCLDYVNIEILFLFCL

SEQ ID NO: 82576 - protein, 268 aa, Arabidopsis thaliana
  peptide (1)..(268): Ceres Seq. ID no. 12666358
  misc_feature (1)..(268): Homolog of NCBI NO: 15234430 NR Description: putative calcium dependent protein kinase; id: At4g04700.1 [Arabidopsis thaliana]
  misc_feature (1)..(207): Homolog of NCBI NO: 5706728 NR Description: contains similarity to eukaryotic protein kinase
  misc_feature (1)..(107): Homolog of NCBI NO: 22328350 NR Description: similar to calcium-dependent protein kinase -
  misc_feature (90)..(207): Homolog of NCBI NO: 22328350 NR Description: similar to calcium-dependent protein kinase -
  misc_feature (1)..(107): Homolog of NCBI NO: 5732059 NR Description: similar to Pfam families PF00069 (Eukaryotic
  misc_feature (149)..(207): Homolog of NCBI NO: 5732059 NR Description: similar to Pfam families PF00069 (Eukaryotic
  misc_feature (1)..(206): Homolog of NCBI NO: 15234656 NR Description: calcium-dependent protein kinase - like protein; id: At4g21940.1, supported by cDNA: gi_17104578 [Arabidopsis
  misc_feature (1)..(206): Homolog of NCBI NO: 15234435 NR Description: putative calcium dependent protein kinase; id: At4g04720.1, supported by cDNA: gi_15292914 [Arabidopsis >gi|25287682|pir||D85059 probable calcium dependent protein
  misc_feature (1)..(206): Homolog of NCBI NO: 15292915 NR Description: putative calcium dependent protein kinase
  misc_feature (1)..(206): Homolog of NCBI NO: 19171502 NR Description: calcium-dependent protein kinase [Lycopersicon
MKQLSGEPNIVEFKNAYEDKDSVHIVMEYCGGGELYDKILALYDVGKSYSEKEAAGIIRSIVNVVKNCHYMGVMHRDLKPENFLLTSNDDNATVKVIDFGCSVFIEEGKVYQDLAGSDYYIAPEVLQGNYGKEADIWSAGIILYILLCGKSPFVKEPEGQMFNEIKSLEIDYSEEPWPLRDSRAIHLVKRMLDRNPKERISAAEVLGKFLSFSFQDCSRANTNIYIWIQKKLQGSRIVLTMFVEGLFPQKKFHCLDYVNIEILFLFCL

SEQ ID NO: 82577 - protein, 242 aa, Arabidopsis thaliana
  peptide (1)..(242): Ceres Seq. ID no. 12666359
  misc_feature (1)..(242): Homolog of NCBI NO: 15234430 NR Description: putative calcium dependent protein kinase; id: At4g04700.1 [Arabidopsis thaliana]
  misc_feature (1)..(181): Homolog of NCBI NO: 5706728 NR Description: contains similarity to eukaryotic protein kinase
  misc_feature (1)..(81): Homolog of NCBI NO: 22328350 NR Description: similar to calcium-dependent protein kinase -
  misc_feature (64)..(181): Homolog of NCBI NO: 22328350 NR Description: similar to calcium-dependent protein kinase -
  misc_feature (1)..(81): Homolog of NCBI NO: 5732059 NR Description: similar to Pfam families PF00069 (Eukaryotic
  misc_feature (123)..(181): Homolog of NCBI NO: 5732059 NR Description: similar to Pfam families PF00069 (Eukaryotic
  misc_feature (1)..(180): Homolog of NCBI NO: 15234656 NR Description: calcium-dependent protein kinase - like protein; id: At4g21940.1, supported by cDNA: gi_17104578 [Arabidopsis
  misc_feature (1)..(180): Homolog of NCBI NO: 15234435 NR Description: putative calcium dependent protein kinase; id: At4g04720.1, supported by cDNA: gi_15292914 [Arabidopsis >gi|25287682|pir||D85059 probable calcium dependent protein
  misc_feature (1)..(180): Homolog of NCBI NO: 15292915 NR Description: putative calcium dependent protein kinase
  misc_feature (1)..(180): Homolog of NCBI NO: 19171502 NR Description: calcium-dependent protein kinase [Lycopersicon
MEYCGGGELYDKILALYDVGKSYSEKEAAGIIRSIVNVVKNCHYMGVMHRDLKPENFLLTSNDDNATVKVIDFGCSVFIEEGKVYQDLAGSDYYIAPEVLQGNYGKEADIWSAGIILYILLCGKSPFVKEPEGQMFNEIKSLEIDYSEEPWPLRDSRAIHLVKRMLDRNPKERISAAEVLGKFLSFSFQDCSRANTNIYIWIQKKLQGSRIVLTMFVEGLFPQKKFHCLDYVNIEILFLFCL

SEQ ID NO: 82578 - DNA, 1374 bp, Arabidopsis thaliana
  misc_feature (1)..(1374): Ceres Seq. ID no. 12666370
  misc_feature: MA Experiment ID: 20000440 Result: Up-regulated in Transcription
  misc_feature: MA Experiment 20000440 PARAMETER Experiment Name: At_Closed-Flower__Sub_P Parameter: Tissue Value: Closed Flower vs. Whole Plant
atggcagaagaaggtttattattaccagcttcttctacttcttcttcttcttcacttttgtctgaaatatcaaatgcatgcacgagaccttttgttcttgctttcattgtcggttcttgcggcgcctttgcctttggatgcatttattcactatttggatcgatattgacggtggggttaatccttggagcattaatctgtgggaagttaacagatttagttggtcgtgtcaaaactatatggatcacaaacatcctctttgtaatcggatggttcgctattgcatttgccaagggtgtttggctgcttgatctcggaaggttactacaagggatctcgatcggaattagcgtatatttgggaccagtttacatcaccgagatagcaccaagaaacttgcgaggagctgcttcttccttcgcgcagttattcgccggtgttggtatatcggtcttttatgcacttggaaccatcgttgcctggcgcaatttagccattttgggatgtataccttctctaatggttctgcctcttcttttcttcatccccgaatctcctagatggctagctaaagtaggaagagaaatggaagttgaagcagttttgttaagcctgcgaggagaaaaatctgatgtatcagatgaagcagcagagatattagaatatacagaacatgttaaacaacaacaagacatcgatgaccgcggtttcttcaagctatttcagcgaaaatatgcattctcacttactattggagttgttcttatagctttgcctcagcttggaggtcttaacggttattctttttacactgactccattttcatctctaccggtgtatcgagtgactttggattcatatctacatcagttgttcagatgtttggaggcattttaggtactgtgcttgttgatgtatctggaagacgtacactcctattggtttctcaagctggaatgttcttgggttgtcttaccacagccatttcattcttcttgaaggagaatcattgctgggaaacaggaactcctgtcttggctctctttagtgttatggtgtattttggatcatacggttctggtatgggatcaataccatggatcatagcatcagagatttatccagtagatgttaagggagcagcgggaacaatgtgtaacttggtcagctctataagcgcatggcttgttgcttattccttcagttacttgcttcaatggagctccacaggaacatttctgatgtttgccacagtggctggccttggatttgtgttcatagccaagcttgttccagagaccaaaggcaaatctctagaagagattcaatctcttttcactgattctcctcctcaagattctacaattttctaa

SEQ ID NO: 82579 - protein, 457 aa, Arabidopsis thaliana
  peptide (1)..(457): Ceres Seq. ID no. 12666371
  misc_feature (6)..(446): Pfam Name: Sugar (and other) transporter Pfam Description: Sugar (and other) transporter
  misc_feature (1)..(457): Homolog of NCBI NO: 15234445 NR Description: putative sugar transporter; protein id: [Arabidopsis thaliana] >gi|25308951|pir||H85059 probable sugar
  misc_feature (1)..(457): Homolog of NCBI NO: 15234444 NR Description: putative sugar transporter; protein id: [Arabidopsis thaliana] >gi|25308950|pir||G85059 probable sugar
  misc_feature (85)..(220): Homolog of NCBI NO: 4115950 NR Description: contains similarity to sugar (and other)
  misc_feature (349)..(457): Homolog of NCBI NO: 4115950 NR Description: contains similarity to sugar (and other)
  misc_feature (279)..(334): Homolog of NCBI NO: 4115950 NR Description: contains similarity to sugar (and other)
  misc_feature (246)..(280): Homolog of NCBI NO: 4115950 NR Description: contains similarity to sugar (and other)
  misc_feature (84)..(280): Homolog of NCBI NO: 4115940 NR Description: contains similarity to sugar (and other)
  misc_feature (351)..(457): Homolog of NCBI NO: 4115940 NR Description: contains similarity to sugar (and other)
  misc_feature (1)..(48): Homolog of NCBI NO: 4115940 NR Description: contains similarity to sugar (and other)
  misc_feature (49)..(445): Homolog of NCBI NO: 18407508 NR Description: putative sugar transporter; protein id: supported by cDNA: 114959. [Arabidopsis thaliana]
MAEEGLLLPASSTSSSSSLLSEISNACTRPFVLAFIVGSCGAFAFGCIYSLFGSILTVGLILGALICGKLTDLVGRVKTIWITNILFVIGWFAIAFAKGVWLLDLGRLLQGISIGISVYLGPVYITEIAPRNLRGAASSFAQLFAGVGISVFYALGTIVAWRNLAILGCIPSLMVLPLLFFIPESPRWLAKVGREMEVEAVLLSLRGEKSDVSDEAAEILEYTEHVKQQQDIDDRGFFKLFQRKYAFSLTIGVVLIALPQLGGLNGYSFYTDSIFISTGVSSDFGFISTSVVQMFGGILGTVLVDVSGRRTLLLVSQAGMFLGCLTTAISFFLKENHCWETGTPVLALFSVMVYFGSYGSGMGSIPWIIASEIYPVDVKGAAGTMCNLVSSISAWLVAYSFSYLLQWSSTGTFLMFATVAGLGFVFIAKLVPETKGKSLEEIQSLFTDSPPQDSTIF

SEQ ID NO: 82580 - protein, 284 aa, Arabidopsis thaliana
  peptide (1)..(284): Ceres Seq. ID no. 12666372
  misc_feature (1)..(273): Pfam Name: Sugar (and other) transporter Pfam Description: Sugar (and other) transporter
  misc_feature (1)..(284): Homolog of NCBI NO: 15234445 NR Description: putative sugar transporter; protein id: [Arabidopsis thaliana] >gi|25308951|pir||H85059 probable sugar
  misc_feature (1)..(284): Homolog of NCBI NO: 15234444 NR Description: putative sugar transporter; protein id: [Arabidopsis thaliana] >gi|25308950|pir||G85059 probable sugar
  misc_feature (1)..(47): Homolog of NCBI NO: 4115950 NR Description: contains similarity to sugar (and other)
  misc_feature (176)..(284): Homolog of NCBI NO: 4115950 NR Description: contains similarity to sugar (and other)
  misc_feature (106)..(161): Homolog of NCBI NO: 4115950 NR Description: contains similarity to sugar (and other)
  misc_feature (73)..(107): Homolog of NCBI NO: 4115950 NR Description: contains similarity to sugar (and other)
  misc_feature (1)..(107): Homolog of NCBI NO: 4115940 NR Description: contains similarity to sugar (and other)
  misc_feature (178)..(284): Homolog of NCBI NO: 4115940 NR Description: contains similarity to sugar (and other)
  misc_feature (1)..(272): Homolog of NCBI NO: 18407508 NR Description: putative sugar transporter; protein id: supported by cDNA: 114959. [Arabidopsis thaliana]
  misc_feature (1)..(272): Homolog of NCBI NO: 21536914 NR Description: putative sugar transporter [Arabidopsis thaliana]
MVLPLLFFIPESPRWLAKVGREMEVEAVLLSLRGEKSDVSDEAAEILEYTEHVKQQQDIDDRGFFKLFQRKYAFSLTIGVVLIALPQLGGLNGYSFYTDSIFISTGVSSDFGFISTSVVQMFGGILGTVLVDVSGRRTLLLVSQAGMFLGCLTTAISFFLKENHCWETGTPVLALFSVMVYFGSYGSGMGSIPWIIASEIYPVDVKGAAGTMCNLVSSISAWLVAYSFSYLLQWSSTGTFLMFATVAGLGFVFIAKLVPETKGKSLEEIQSLFTDSPPQDSTIF

SEQ ID NO: 82581 - protein, 262 aa, Arabidopsis thaliana
  peptide (1)..(262): Ceres Seq. ID no. 12666373
  misc_feature (1)..(251): Pfam Name: Sugar (and other) transporter Pfam Description: Sugar (and other) transporter
  misc_feature (1)..(262): Homolog of NCBI NO: 15234445 NR Description: putative sugar transporter; protein id: [Arabidopsis thaliana] >gi|25308951|pir||H85059 probable sugar
  misc_feature (1)..(262): Homolog of NCBI NO: 15234444 NR Description: putative sugar transporter; protein id: [Arabidopsis thaliana] >gi|25308950|pir||G85059 probable sugar
  misc_feature (1)..(25): Homolog of NCBI NO: 4115950 NR Description: contains similarity to sugar (and other)
  misc_feature (154)..(262): Homolog of NCBI NO: 4115950 NR Description: contains similarity to sugar (and other)
  misc_feature (84)..(139): Homolog of NCBI NO: 4115950 NR Description: contains similarity to sugar (and other)
  misc_feature (51)..(85): Homolog of NCBI NO: 4115950 NR Description: contains similarity to sugar (and other)
  misc_feature (1)..(85): Homolog of NCBI NO: 4115940 NR Description: contains similarity to sugar (and other)
  misc_feature (156)..(262): Homolog of NCBI NO: 4115940 NR Description: contains similarity to sugar (and other)
  misc_feature (1)..(250): Homolog of NCBI NO: 18407508 NR Description: putative sugar transporter; protein id: supported by cDNA: 114959. [Arabidopsis thaliana]
  misc_feature (1)..(250): Homolog of NCBI NO: 21536914 NR Description: putative sugar transporter [Arabidopsis thaliana]
MEVEAVLLSLRGEKSDVSDEAAEILEYTEHVKQQQDIDDRGFFKLFQRKYAFSLTIGVVLIALPQLGGLNGYSFYTDSIFISTGVSSDFGFISTSVVQMFGGILGTVLVDVSGRRTLLLVSQAGMFLGCLTTAISFFLKENHCWETGTPVLALFSVMVYFGSYGSGMGSIPWIIASEIYPVDVKGAAGTMCNLVSSISAWLVAYSFSYLLQWSSTGTFLMFATVAGLGFVFIAKLVPETKGKSLEEIQSLFTDSPPQDSTIF

SEQ ID NO: 82582 - DNA, 2496 bp, Arabidopsis thaliana
  misc_feature (1)..(2496): Ceres Seq. ID no. 12666378
  misc_feature: MA Experiment ID: 20001451 Result: Down-regulated in Transcription
  misc_feature: MA Experiment 20001451 PARAMETER Experiment Name: At_Far-red-induction_P Parameter: Age (day) Value: 7
  misc_feature: MA Experiment 20001451 PARAMETER Experiment Name: At_Far-red-induction_P Parameter: Light Value: Far-red vs. White
  misc_feature: MA Experiment 20001451 PARAMETER Experiment Name: At_Far-red-induction_P Parameter: Organism Value: A. thaliana
  misc_feature: MA Experiment 20001451 PARAMETER Experiment Name: At_Far-red-induction_P Parameter: Plant Line Value: Columbia
  misc_feature: MA Experiment 20001451 PARAMETER Experiment Name: At_Far-red-induction_P Parameter: Timepoint (hr) Value: 24
  misc_feature: MA Experiment 20001451 PARAMETER Experiment Name: At_Far-red-induction_P Parameter: Tissue Value: Whole Plant
atggactcagagaaaatcctcaatccaagacttgtttcgattaatagcaccagccgcaaaggtatgtccgttgagttgccgcagaaaccgccgccaccgccgtcgttgttagaccggtttaaagctttgcttaatcagcgtgaagatgagttcggtggtggtgaagaggttttgcctccgagtatggatgagattgttcagctttatgaggttgttttgggtgagcttactttcaattctaagcctattatcactgatctcactattatcgctggtgaacaacgggaacatggtgaaggaatcgctaatgctatttgcactcgaatccttgagagattagtgtttggtttgtggtttagtgaaatggctgcttctgagttacctgtgggtgtatatatgcaggctcctgttgagcaaaagttgccatctctgtatcttttagacagcattgttaagaacattgggcgggattatggtcgctatttctcatcccgtctacccgaggtcttctgccttgcatataggcaagcacatccgagtttacatccgtcaatgcgtcacctgtttgggacttggtcgagtgtttttccaccacctgtactacgcaagattgatatgcaattgcaactttcatctgcagcaaaccaatcttccgtaggggcttctgagcctagtcaaccaacgagaggtatacatgttaatccaaaatatcttcgcaggctggagccctcagccgccgaaaataatttgagaggaattaattccagtgcaagagtttatggccaaaattcactcggtgggtataatgatttcgaagatcagttagagagcccatcttcactgtctagtacaccagatggttttaccaggaggtctaatgatggagctaatccttctaatcaagcttttaactatggaatgggtcgagctactagcagagatgatgaacatatggaatggcgaagaaaggaaaacttaggccaaggaaatgatcacgaaagacctagagcgttgatagatgcatatggagttgacaccagcaaacacgtaacgatcaataaaccaattcgcgatatgaatggcatgcacagtaagatggttacaccatggcagaacactgaggaagaagagtttgattgggaagatatgagccctaccctagatcgtagcagagctggtgaatttttgcgatcatctgtaccagcattaggaagtgtaagggcaagacccagagtaggaaacacaagtgattttcatttagattctgacattaagaatggtgtaagtcatcagctacgagaaaattggagtttgtcacaaaattatccacatacatccaaccgtgttgatacaagagcaggaaaagacttgaaagtattggcttcatctgtagggttagtttcatcaaacagtgaattcggggctcctccatttgatagcattcaagatgttaactcacgttttggccgggctcttcctgatgggacatggccccatttgagtgctagaggacccaactctctccctgtaccttctgctcatttgcatcatttggcaaatcccggtaatgcgatgtcaaatcgcttgcaaggtaagcctttatataggcccgaaaaccaggtctctcagagtcatcttaatgatatgactcaacagaatcagatgctagttaattatttgccatcctcatctgctatggctccaaggccaatgcaatcgttgttaacccacgtaagtcatgggtaccctccacatgggtcaaccattagaccatctttatcaatccaaggtggggaagccatgcatcctctttcttcaggagttttatctcagataggagcctctaatcaaccaccaggtggcgcattctctggtctgattggctctctcatggctcaaggtttgatctcattgaacaatcagcctgctggtcagggaccattggggttggagtttgatgcagacatgctcaagatacgtaatgagtctgcaatcagtgctttatatggggatctcccgaggcaatgcacaacctgtggtctacgcttcaagtgccaagaagagcacagtaagcacatggattggcatgtaaccaagaacaggatgtccaagaaccataagcagaacccttctcggaaatggtttgtaagtgctagcatgtggctcagtggtgcagaagcacttggagctgaagcagtaccagggttcttgcccacggagccaacaacagaaaagaaggatgacgaagatatggcagttcctgcagatgaagaccaaacttcatgtgcattatgtggtgagccatttgaagacttttatagtgatgaaaccgaggaatggatgtacaaaggtgcggtatacatgaatgctcctgaagaatcaacaacagatatggacaagtctcagttaggtcctatagtgcatgcaaagtgcaggccagagtccaatgggggtgatatggaagagggtagtcagaggaaaaagatgcggagttag

SEQ ID NO: 82583 - protein, 831 aa, Arabidopsis thaliana
  peptide (1)..(831): Ceres Seq. ID no. 12666379
  misc_feature (520)..(811): Homolog of NCBI NO: 38637067 NR Description: putative S-locus protein 4 [Oryza sativa
  misc_feature (134)..(238): Homolog of NCBI NO: 38637067 NR Description: putative S-locus protein 4 [Oryza sativa
  misc_feature (336)..(424): Homolog of NCBI NO: 38637067 NR Description: putative S-locus protein 4 [Oryza sativa
  misc_feature (36)..(111): Homolog of NCBI NO: 38637067 NR Description: putative S-locus protein 4 [Oryza sativa
  misc_feature (567)..(823): Homolog of NCBI NO: 18404146 NR Description: hypothetical protein; protein id: At2g36480.1 thaliana] >gi|20197927|gb|AAD24632.2| hypothetical protein
  misc_feature (133)..(283): Homolog of NCBI NO: 18404146 NR Description: hypothetical protein; protein id: At2g36480.1 thaliana] >gi|20197927|gb|AAD24632.2| hypothetical protein
  misc_feature (567)..(829): Homolog of NCBI NO: 25408479 NR Description: hypothetical protein At2g36480 [imported] -
  misc_feature (64)..(283): Homolog of NCBI NO: 25408479 NR Description: hypothetical protein At2g36480 [imported] -
  misc_feature (639)..(818): Homolog of NCBI NO: 18642418 NR Description: putative PCF11 protein [Brassica napus]
  misc_feature (635)..(818): Homolog of NCBI NO: 6069478 NR Description: S-locus protein 4 [Brassica rapa]
MDSEKILNPRLVSINSTSRKGMSVELPQKPPPPPSLLDRFKALLNQREDEFGGGEEVLPPSMDEIVQLYEVVLGELTFNSKPIITDLTIIAGEQREHGEGIANAICTRILERLVFGLWFSEMAASELPVGVYMQAPVEQKLPSLYLLDSIVKNIGRDYGRYFSSRLPEVFCLAYRQAHPSLHPSMRHLFGTWSSVFPPPVLRKIDMQLQLSSAANQSSVGASEPSQPTRGIHVNPKYLRRLEPSAAENNLRGINSSARVYGQNSLGGYNDFEDQLESPSSLSSTPDGFTRRSNDGANPSNQAFNYGMGRATSRDDEHMEWRRKENLGQGNDHERPRALIDAYGVDTSKHVTINKPIRDMNGMHSKMVTPWQNTEEEEFDWEDMSPTLDRSRAGEFLRSSVPALGSVRARPRVGNTSDFHLDSDIKNGVSHQLRENWSLSQNYPHTSNRVDTRAGKDLKVLASSVGLVSSNSEFGAPPFDSIQDVNSRFGRALPDGTWPHLSARGPNSLPVPSAHLHHLANPGNAMSNRLQGKPLYRPENQVSQSHLNDMTQQNQMLVNYLPSSSAMAPRPMQSLLTHVSHGYPPHGSTIRPSLSIQGGEAMHPLSSGVLSQIGASNQPPGGAFSGLIGSLMAQGLISLNNQPAGQGPLGLEFDADMLKIRNESAISALYGDLPRQCTTCGLRFKCQEEHSKHMDWHVTKNRMSKNHKQNPSRKWFVSASMWLSGAEALGAEAVPGFLPTEPTTEKKDDEDMAVPADEDQTSCALCGEPFEDFYSDETEEWMYKGAVYMNAPEESTTDMDKSQLGPIVHAKCRPESNGGDMEEGSQRKKMRS

SEQ ID NO: 82584 - protein, 810 aa, Arabidopsis thaliana
  peptide (1)..(810): Ceres Seq. ID no. 12666380
  misc_feature (499)..(790): Homolog of NCBI NO: 38637067 NR Description: putative S-locus protein 4 [Oryza sativa
  misc_feature (113)..(217): Homolog of NCBI NO: 38637067 NR Description: putative S-locus protein 4 [Oryza sativa
  misc_feature (315)..(403): Homolog of NCBI NO: 38637067 NR Description: putative S-locus protein 4 [Oryza sativa
  misc_feature (15)..(90): Homolog of NCBI NO: 38637067 NR Description: putative S-locus protein 4 [Oryza sativa
  misc_feature (546)..(802): Homolog of NCBI NO: 18404146 NR Description: hypothetical protein; protein id: At2g36480.1 thaliana] >gi|20197927|gb|AAD24632.2| hypothetical protein
  misc_feature (112)..(262): Homolog of NCBI NO: 18404146 NR Description: hypothetical protein; protein id: At2g36480.1 thaliana] >gi|20197927|gb|AAD24632.2| hypothetical protein
  misc_feature (546)..(808): Homolog of NCBI NO: 25408479 NR Description: hypothetical protein At2g36480 [imported] -
  misc_feature (43)..(262): Homolog of NCBI NO: 25408479 NR Description: hypothetical protein At2g36480 [imported] -
  misc_feature (618)..(797): Homolog of NCBI NO: 18642418 NR Description: putative PCF11 protein [Brassica napus]
  misc_feature (614)..(797): Homolog of NCBI NO: 6069478 NR Description: S-locus protein 4 [Brassica rapa]
MSVELPQKPPPPPSLLDRFKALLNQREDEFGGGEEVLPPSMDEIVQLYEVVLGELTFNSKPIITDLTIIAGEQREHGEGIANAICTRILERLVFGLWFSEMAASELPVGVYMQAPVEQKLPSLYLLDSIVKNIGRDYGRYFSSRLPEVFCLAYRQAHPSLHPSMRHLFGTWSSVFPPPVLRKIDMQLQLSSAANQSSVGASEPSQPTRGIHVNPKYLRRLEPSAAENNLRGINSSARVYGQNSLGGYNDFEDQLESPSSLSSTPDGFTRRSNDGANPSNQAFNYGMGRATSRDDEHMEWRRKENLGQGNDHERPRALIDAYGVDTSKHVTINKPIRDMNGMHSKMVTPWQNTEEEEFDWEDMSPTLDRSRAGEFLRSSVPALGSVRARPRVGNTSDFHLDSDIKNGVSHQLRENWSLSQNYPHTSNRVDTRAGKDLKVLASSVGLVSSNSEFGAPPFDSIQDVNSRFGRALPDGTWPHLSARGPNSLPVPSAHLHHLANPGNAMSNRLQGKPLYRPENQVSQSHLNDMTQQNQMLVNYLPSSSAMAPRPMQSLLTHVSHGYPPHGSTIRPSLSIQGGEAMHPLSSGVLSQIGASNQPPGGAFSGLIGSLMAQGLISLNNQPAGQGPLGLEFDADMLKIRNESAISALYGDLPRQCTTCGLRFKCQEEHSKHMDWHVTKNRMSKNHKQNPSRKWFVSASMWLSGAEALGAEAVPGFLPTEPTTEKKDDEDMAVPADEDQTSCALCGEPFEDFYSDETEEWMYKGAVYMNAPEESTTDMDKSQLGPIVHAKCRPESNGGDMEEGSQRKKMRS

SEQ ID NO: 82585 - protein, 770 aa, Arabidopsis thaliana
  peptide (1)..(770): Ceres Seq. ID no. 12666381
  misc_feature (459)..(750): Homolog of NCBI NO: 38637067 NR Description: putative S-locus protein 4 [Oryza sativa
  misc_feature (73)..(177): Homolog of NCBI NO: 38637067 NR Description: putative S-locus protein 4 [Oryza sativa
  misc_feature (275)..(363): Homolog of NCBI NO: 38637067 NR Description: putative S-locus protein 4 [Oryza sativa
  misc_feature (1)..(50): Homolog of NCBI NO: 38637067 NR Description: putative S-locus protein 4 [Oryza sativa
  misc_feature (506)..(762): Homolog of NCBI NO: 18404146 NR Description: hypothetical protein; protein id: At2g36480.1 thaliana] >gi|20197927|gb|AAD24632.2| hypothetical protein
  misc_feature (72)..(222): Homolog of NCBI NO: 18404146 NR Description: hypothetical protein; protein id: At2g36480.1 thaliana] >gi|20197927|gb|AAD24632.2| hypothetical protein
  misc_feature (506)..(768): Homolog of NCBI NO: 25408479 NR Description: hypothetical protein At2g36480 [imported] -
  misc_feature (3)..(222): Homolog of NCBI NO: 25408479 NR Description: hypothetical protein At2g36480 [imported] -
  misc_feature (578)..(757): Homolog of NCBI NO: 18642418 NR Description: putative PCF11 protein [Brassica napus]
  misc_feature (574)..(757): Homolog of NCBI NO: 6069478 NR Description: S-locus protein 4 [Brassica rapa]
MDEIVQLYEVVLGELTFNSKPIITDLTIIAGEQREHGEGIANAICTRILERLVFGLWFSEMAASELPVGVYMQAPVEQKLPSLYLLDSIVKNIGRDYGRYFSSRLPEVFCLAYRQAHPSLHPSMRHLFGTWSSVFPPPVLRKIDMQLQLSSAANQSSVGASEPSQPTRGIHVNPKYLRRLEPSAAENNLRGINSSARVYGQNSLGGYNDFEDQLESPSSLSSTPDGFTRRSNDGANPSNQAFNYGMGRATSRDDEHMEWRRKENLGQGNDHERPRALIDAYGVDTSKHVTINKPIRDMNGMHSKMVTPWQNTEEEEFDWEDMSPTLDRSRAGEFLRSSVPALGSVRARPRVGNTSDFHLDSDIKNGVSHQLRENWSLSQNYPHTSNRVDTRAGKDLKVLASSVGLVSSNSEFGAPPFDSIQDVNSRFGRALPDGTWPHLSARGPNSLPVPSAHLHHLANPGNAMSNRLQGKPLYRPENQVSQSHLNDMTQQNQMLVNYLPSSSAMAPRPMQSLLTHVSHGYPPHGSTIRPSLSIQGGEAMHPLSSGVLSQIGASNQPPGGAFSGLIGSLMAQGLISLNNQPAGQGPLGLEFDADMLKIRNESAISALYGDLPRQCTTCGLRFKCQEEHSKHMDWHVTKNRMSKNHKQNPSRKWFVSASMWLSGAEALGAEAVPGFLPTEPTTEKKDDEDMAVPADEDQTSCALCGEPFEDFYSDETEEWMYKGAVYMNAPEESTTDMDKSQLGPIVHAKCRPESNGGDMEEGSQRKKMRS

SEQ ID NO: 82586 - DNA, 1175 bp, Arabidopsis thaliana
  misc_feature (1)..(1175): Ceres Seq. ID no. 12666405
  misc_feature: MA Experiment ID: 20000347 Result: Up-regulated in Transcription
  misc_feature: MA Experiment 20000347 PARAMETER Experiment Name: At_2mM_SA_Sub_P Parameter: Age (day) Value: 14
  misc_feature: MA Experiment 20000347 PARAMETER Experiment Name: At_2mM_SA_Sub_P Parameter: Organism Value: A. thaliana
  misc_feature: MA Experiment 20000347 PARAMETER Experiment Name: At_2mM_SA_Sub_P Parameter: Plant Line Value: WS
  misc_feature: MA Experiment 20000347 PARAMETER Experiment Name: At_2mM_SA_Sub_P Parameter: Timepoint (hr) Value: 6
  misc_feature: MA Experiment 20000347 PARAMETER Experiment Name: At_2mM_SA_Sub_P Parameter: Tissue Value: Aerial
  misc_feature: MA Experiment 20000347 PARAMETER Experiment Name: At_2mM_SA_Sub_P Parameter: Treatment Value: 2mM SA vs. No Treatment
  misc_feature: MA Experiment ID: 20000348 Result: Up-regulated in Transcription
  misc_feature: MA Experiment 20000348 PARAMETER Experiment Name: At_100uM_ABA_Sub_P Parameter: Age (day) Value: 14
  misc_feature: MA Experiment 20000348 PARAMETER Experiment Name: At_100uM_ABA_Sub_P Parameter: Organism Value: A. thaliana
  misc_feature: MA Experiment 20000348 PARAMETER Experiment Name: At_100uM_ABA_Sub_P Parameter: Plant Line Value: WS
  misc_feature: MA Experiment 20000348 PARAMETER Experiment Name: At_100uM_ABA_Sub_P Parameter: Timepoint (hr) Value: 1
  misc_feature: MA Experiment 20000348 PARAMETER Experiment Name: At_100uM_ABA_Sub_P Parameter: Tissue Value: Aerial
  misc_feature: MA Experiment 20000348 PARAMETER Experiment Name: At_100uM_ABA_Sub_P Parameter: Treatment Value: 100uM ABA vs. No Treatment
  misc_feature: MA Experiment ID: 20000349 Result: Up-regulated in Transcription
  misc_feature: MA Experiment 20000349 PARAMETER Experiment Name: At_100uM_ABA_Sub_P Parameter: Age (day) Value: 14
  misc_feature: MA Experiment 20000349 PARAMETER Experiment Name: At_100uM_ABA_Sub_P Parameter: Organism Value: A. thaliana
  misc_feature: MA Experiment 20000349 PARAMETER Experiment Name: At_100uM_ABA_Sub_P Parameter: Plant Line Value: WS
  misc_feature: MA Experiment 20000349 PARAMETER Experiment Name: At_100uM_ABA_Sub_P Parameter: Timepoint (hr) Value: 6
  misc_feature: MA Experiment 20000349 PARAMETER Experiment Name: At_100uM_ABA_Sub_P Parameter: Tissue Value: Aerial
  misc_feature: MA Experiment 20000349 PARAMETER Experiment Name: At_100uM_ABA_Sub_P Parameter: Treatment Value: 100uM ABA vs. No Treatment
  misc_feature: MA Experiment ID: 20000352 Result: Up-regulated in Transcription
  misc_feature: MA Experiment 20000352 PARAMETER Experiment Name: At_Drought_Sub_P Parameter: Age (day) Value: 7
  misc_feature: MA Experiment 20000352 PARAMETER Experiment Name: At_Drought_Sub_P Parameter: Organism Value: A. thaliana
  misc_feature: MA Experiment 20000352 PARAMETER Experiment Name: At_Drought_Sub_P Parameter: Plant Line Value: WS
  misc_feature: MA Experiment 20000352 PARAMETER Experiment Name: At_Drought_Sub_P Parameter: Timepoint (hr) Value: 6
  misc_feature: MA Experiment 20000352 PARAMETER Experiment Name: At_Drought_Sub_P Parameter: Tissue Value: Whole Plant
  misc_feature: MA Experiment 20000352 PARAMETER Experiment Name: At_Drought_Sub_P Parameter: Treatment Value: Drought vs. No Drought
acgtctctctctttctctctactctctgtttcctcataattcaatcactatatttttttaaaaacatttgacttcatcgatcggttaacaattaatcaaaaagatgggacgatcaccatgttgtgagaagaagaatggtctcaagaaaggaccatggactcctgaggaggatcaaaagctcattgattatatcaatatacatggttatggaaattggagaactcttcccaagaatgctgggttacaaagatgtggtaagagttgtcgtctccggtggaccaactatctccgaccagatattaagcgtggaagattctcttttgaagaagaagaaaccattattcaacttcacagcatcatgggaaacaagtggtctgcgattgcggctcgtttgcctggaagaacagacaacgagatcaaaaactattggaacactcacatcagaaaaagacttctaaagatgggaatcgacccggttacacacactccacgtcttgatcttctcgatatctcctccattctcagctcatctatctacaactcttcgcatcatcatcatcatcatcatcaacaacatatgaacatgtcgaggctcatgatgagtgatggtaatcatcaaccattggttaaccccgagatactcaaactcgcaacctctctcttttcaaaccaaaaccaccccaacaacacacacgagaacaacacggttaaccaaaccgaagtaaaccaataccaaaccggttacaacatgcctggtaatgaagaattacaatcttggttccctatcatggatcaattcacgaatttccaagacctcatgccaatgaagacgacggtccaaaattcattgtcatacgatgatgattgttcgaagtccaattttgtattagaaccttattactccgactttgcttcagtcttgaccacaccttcttcaagcccgactccgttaaactcaagttcctcaacttacatcaatagtagcacttgcagcaccgaggatgaaaaagagagttattacagtgataatatcactaattattcgtttgatgttaatggttttctccaattccaataaacaaaacgccattggaatagagttatgtaaacatgcaatcattgtatttgttatatagattttgttacatatccaaaatccaaaatactatagtttt

SEQ ID NO: 82587 - protein, 324 aa, Arabidopsis thaliana
  peptide (1)..(324): Ceres Seq. ID no. 12666406
  misc_feature (15)..(62): Pfam Name: Myb-like DNA-binding domain Pfam Description: Myb-like DNA-binding domain
  misc_feature (1)..(324): Homolog of NCBI NO: 15234593 NR Description: myb DNA-binding protein; protein id: At4g05100.1,
  misc_feature (66)..(324): Homolog of NCBI NO: 11358559 NR Description: myb-related transcription factor MYB74 [imported] Arabidopsis thaliana (fragment) >gi|3941506|gb|AAC83629.1|
  misc_feature (1)..(320): Homolog of NCBI NO: 18415694 NR Description: myb family protein; protein id: At4g21440.1, by cDNA: 33333., supported by cDNA: gi_17065085 [Arabidopsis >gi|7242487|emb|CAB77384.1| putative transcription factor
  misc_feature (1)..(320): Homolog of NCBI NO: 21592858 NR Description: myb-related protein M4 [Arabidopsis thaliana]
  misc_feature (1)..(320): Homolog of NCBI NO: 17065086 NR Description: myb-related protein M4 [Arabidopsis thaliana]
  misc_feature (1)..(211): Homolog of NCBI NO: 22795039 NR Description: putative MYB transcription factor [Populus x
  misc_feature (269)..(321): Homolog of NCBI NO: 22795039 NR Description: putative MYB transcription factor [Populus x
  misc_feature (1)..(320): Homolog of NCBI NO: 7428545 NR Description: myb-related protein M4 - Arabidopsis thaliana
  misc_feature (1)..(307): Homolog of NCBI NO: 30575840 NR Description: MYB1 [Boea crassifolia]
  misc_feature (1)..(240): Homolog of NCBI NO: 15234385 NR Description: myb family transcription factor; protein id: [Arabidopsis thaliana] >gi|25294094|pir||B85327 probable
MGRSPCCEKKNGLKKGPWTPEEDQKLIDYINIHGYGNWRTLPKNAGLQRCGKSCRLRWTNYLRPDIKRGRFSFEEEETIIQLHSIMGNKWSAIAARLPGRTDNEIKNYWNTHIRKRLLKMGIDPVTHTPRLDLLDISSILSSSIYNSSHHHHHHHQQHMNMSRLMMSDGNHQPLVNPEILKLATSLFSNQNHPNNTHENNTVNQTEVNQYQTGYNMPGNEELQSWFPIMDQFTNFQDLMPMKTTVQNSLSYDDDCSKSNFVLEPYYSDFASVLTTPSSSPTPLNSSSSTYINSSTCSTEDEKESYYSDNITNYSFDVNGFLQFQ

SEQ ID NO: 82588 - protein, 239 aa, Arabidopsis thaliana
  peptide (1)..(239): Ceres Seq. ID no. 12666407
  misc_feature (1)..(239): Homolog of NCBI NO: 15234593 NR Description: myb DNA-binding protein; protein id: At4g05100.1,
  misc_feature (1)..(239): Homolog of NCBI NO: 11358559 NR Description: myb-related transcription factor MYB74 [imported] Arabidopsis thaliana (fragment) >gi|3941506|gb|AAC83629.1|
  misc_feature (1)..(235): Homolog of NCBI NO: 18415694 NR Description: myb family protein; protein id: At4g21440.1, by cDNA: 33333., supported by cDNA: gi_17065085 [Arabidopsis >gi|7242487|emb|CAB77384.1| putative transcription factor
  misc_feature (1)..(235): Homolog of NCBI NO: 21592858 NR Description: myb-related protein M4 [Arabidopsis thaliana]
  misc_feature (1)..(235): Homolog of NCBI NO: 17065086 NR Description: myb-related protein M4 [Arabidopsis thaliana]
  misc_feature (1)..(126): Homolog of NCBI NO: 22795039 NR Description: putative MYB transcription factor [Populus x
  misc_feature (184)..(236): Homolog of NCBI NO: 22795039 NR Description: putative MYB transcription factor [Populus x
  misc_feature (1)..(235): Homolog of NCBI NO: 7428545 NR Description: myb-related protein M4 - Arabidopsis thaliana
  misc_feature (1)..(222): Homolog of NCBI NO: 30575840 NR Description: MYB1 [Boea crassifolia]
  misc_feature (1)..(155): Homolog of NCBI NO: 15234385 NR Description: myb family transcription factor; protein id: [Arabidopsis thaliana] >gi|25294094|pir||B85327 probable
MGNKWSAIAARLPGRTDNEIKNYWNTHIRKRLLKMGIDPVTHTPRLDLLDISSILSSSIYNSSHHHHHHHQQHMNMSRLMMSDGNHQPLVNPEILKLATSLFSNQNHPNNTHENNTVNQTEVNQYQTGYNMPGNEELQSWFPIMDQFTNFQDLMPMKTTVQNSLSYDDDCSKSNFVLEPYYSDFASVLTTPSSSPTPLNSSSSTYINSSTCSTEDEKESYYSDNITNYSFDVNGFLQFQ

SEQ ID NO: 82589 - protein, 205 aa, Arabidopsis thaliana
  peptide (1)..(205): Ceres Seq. ID no. 12666408
  misc_feature (1)..(205): Homolog of NCBI NO: 15234593 NR Description: myb DNA-binding protein; protein id: At4g05100.1,
  misc_feature (1)..(205): Homolog of NCBI NO: 11358559 NR Description: myb-related transcription factor MYB74 [imported] Arabidopsis thaliana (fragment) >gi|3941506|gb|AAC83629.1|
  misc_feature (1)..(201): Homolog of NCBI NO: 18415694 NR Description: myb family protein; protein id: At4g21440.1, by cDNA: 33333., supported by cDNA: gi_17065085 [Arabidopsis >gi|7242487|emb|CAB77384.1| putative transcription factor
  misc_feature (1)..(201): Homolog of NCBI NO: 21592858 NR Description: myb-related protein M4 [Arabidopsis thaliana]
  misc_feature (1)..(201): Homolog of NCBI NO: 17065086 NR Description: myb-related protein M4 [Arabidopsis thaliana]
  misc_feature (1)..(92): Homolog of NCBI NO: 22795039 NR Description: putative MYB transcription factor [Populus x
  misc_feature (150)..(202): Homolog of NCBI NO: 22795039 NR Description: putative MYB transcription factor [Populus x
  misc_feature (1)..(201): Homolog of NCBI NO: 7428545 NR Description: myb-related protein M4 - Arabidopsis thaliana
  misc_feature (1)..(188): Homolog of NCBI NO: 30575840 NR Description: MYB1 [Boea crassifolia]
  misc_feature (1)..(121): Homolog of NCBI NO: 15234385 NR Description: myb family transcription factor; protein id: [Arabidopsis thaliana] >gi|25294094|pir||B85327 probable
MGIDPVTHTPRLDLLDISSILSSSIYNSSHHHHHHHQQHMNMSRLMMSDGNHQPLVNPEILKLATSLFSNQNHPNNTHENNTVNQTEVNQYQTGYNMPGNEELQSWFPIMDQFTNFQDLMPMKTTVQNSLSYDDDCSKSNFVLEPYYSDFASVLTTPSSSPTPLNSSSSTYINSSTCSTEDEKESYYSDNITNYSFDVNGFLQFQ

SEQ ID NO: 82590 - DNA, 891 bp, Arabidopsis thaliana
  misc_feature (1)..(891): Ceres Seq. ID no. 12666412
  misc_feature: MA Experiment ID: 20000314 Result: Up-regulated in Transcription
  misc_feature: MA Experiment 20000314 PARAMETER Experiment Name: At_14day_Shoots-Roots_Sub_P Parameter: Age (day) Value: 14
  misc_feature: MA Experiment 20000314 PARAMETER Experiment Name: At_14day_Shoots-Roots_Sub_P Parameter: Organism Value: A. thaliana
  misc_feature: MA Experiment 20000314 PARAMETER Experiment Name: At_14day_Shoots-Roots_Sub_P Parameter: Plant Line Value: WS
  misc_feature: MA Experiment 20000314 PARAMETER Experiment Name: At_14day_Shoots-Roots_Sub_P Parameter: Tissue Value: Roots vs. Whole Plant
  misc_feature: MA Experiment ID: 20000352 Result: Down-regulated in Transcription
  misc_feature: MA Experiment 20000352 PARAMETER Experiment Name: At_Drought_Sub_P Parameter: Age (day) Value: 7
  misc_feature: MA Experiment 20000352 PARAMETER Experiment Name: At_Drought_Sub_P Parameter: Organism Value: A. thaliana
  misc_feature: MA Experiment 20000352 PARAMETER Experiment Name: At_Drought_Sub_P Parameter: Plant Line Value: WS
  misc_feature: MA Experiment 20000352 PARAMETER Experiment Name: At_Drought_Sub_P Parameter: Timepoint (hr) Value: 6
  misc_feature: MA Experiment 20000352 PARAMETER Experiment Name: At_Drought_Sub_P Parameter: Tissue Value: Whole Plant
  misc_feature: MA Experiment 20000352 PARAMETER Experiment Name: At_Drought_Sub_P Parameter: Treatment Value: Drought vs. No Drought
atgacggaagagtttgagatcgcaggaatctccaccggagcttggtggagctcgccaacaaacaccgccgcagtattctctggctactcgctgccatgttccactgagattagccctgatgtcacaaatttcggatggcaaaacttcgataacaagattaacgatcataatgatggttgtatgaacatgcataatagtttcttcgaaggactattaatcgatcctaacgatcaattactaccggatccatggtccaaaagtacaattcctaacgctaaatctgagctccttgaaaacttcccattcttagataacatgttcttggtcgattcagaagctgaatctttgttggatcatgaaatcagaaaccataagtcgtctaaggagcaaattacacaagactacaagaatcttacttcaaaggcacaattagaagagaacagcgatgagtattcaccgcgattactaaaaagaccgagactcgagacactatctccattgccaagcttcaaagttcgtaaagaaaaactcggagatagaatcactgcgcttcagcaactggtttctccatttggcaagacagatacagcttctgttctcaacgaagctgtagagtacataaagtttcttcaagaacaagtcactgtattgagtaatccagaacagaacaccataggatctgttcaacaacagcagtgttcaaacaagaaatctatcaatactcaaggagaagtagaagaagacgaatgtagtccaagaagatatgtagatctttcgagccgtggactatgtctaatgccgatctcagcttcatatcccgtggctgcagctgcggcttcggctgcagagatgaacgtacatctggtttctggcatcttccattctttgtaa

SEQ ID NO: 82591 - protein, 296 aa, Arabidopsis thaliana
  peptide (1)..(296): Ceres Seq. ID no. 12666413
  misc_feature (173)..(211): Pfam Name: Helix-loop-helix DNA-binding domain Pfam Description: Helix-loop-helix DNA-binding domain
  misc_feature (1)..(296): Homolog of NCBI NO: 15234636 NR Description: putative protein; protein id: At4g05170.1
  misc_feature (54)..(272): Homolog of NCBI NO: 22328848 NR Description: hypothetical protein; protein id: At4g21340.1, by cDNA: gi_17529153 [Arabidopsis thaliana] unknown protein [Arabidopsis thaliana]
  misc_feature (136)..(275): Homolog of NCBI NO: 18407276 NR Description: expressed protein; protein id: At1g61660.1, by cDNA: 159557., supported by cDNA: gi_14190498 [Arabidopsis >gi|14190499|gb|AAK55730.1|AF380649_1 At1g61660/T13M11_21
  misc_feature (136)..(275): Homolog of NCBI NO: 21553730 NR Description: unknown [Arabidopsis thaliana]
  misc_feature (139)..(274): Homolog of NCBI NO: 15232315 NR Description: hypothetical protein; protein id: At3g20640.1 thaliana] >gi|26451163|dbj|BAC42685.1| putative bHLH
  misc_feature (139)..(274): Homolog of NCBI NO: 9294343 NR Description: gene_id:F3H11.2~unknown protein [Arabidopsis
  misc_feature (136)..(232): Homolog of NCBI NO: 30696595 NR Description: expressed protein [Arabidopsis thaliana]
  misc_feature (157)..(269): Homolog of NCBI NO: 15217667 NR Description: hypothetical protein; protein id: At1g27660.1
  misc_feature (152)..(214): Homolog of NCBI NO: 34910130 NR Description: B1070A12.8 [Oryza sativa (japonica
  misc_feature (157)..(271): Homolog of NCBI NO: 22093671 NR Description: similar to bHLH (Basic-helix-loop-helix)
MTEEFEIAGISTGAWWSSPTNTAAVFSGYSLPCSTEISPDVTNFGWQNFDNKINDHNDGCMNMHNSFFEGLLIDPNDQLLPDPWSKSTIPNAKSELLENFPFLDNMFLVDSEAESLLDHEIRNHKSSKEQITQDYKNLTSKAQLEENSDEYSPRLLKRPRLETLSPLPSFKVRKEKLGDRITALQQLVSPFGKTDTASVLNEAVEYIKFLQEQVTVLSNPEQNTIGSVQQQQCSNKKSINTQGEVEEDECSPRRYVDLSSRGLCLMPISASYPVAAAAASAAEMNVHLVSGIFHSL

SEQ ID NO: 82592 - protein, 236 aa, Arabidopsis thaliana
  peptide (1)..(236): Ceres Seq. ID no. 12666414
  misc_feature (113)..(151): Pfam Name: Helix-loop-helix DNA-binding domain Pfam Description: Helix-loop-helix DNA-binding domain
  misc_feature (1)..(236): Homolog of NCBI NO: 15234636 NR Description: putative protein; protein id: At4g05170.1
  misc_feature (1)..(212): Homolog of NCBI NO: 22328848 NR Description: hypothetical protein; protein id: At4g21340.1, by cDNA: gi_17529153 [Arabidopsis thaliana] unknown protein [Arabidopsis thaliana]
  misc_feature (76)..(215): Homolog of NCBI NO: 18407276 NR Description: expressed protein; protein id: At1g61660.1, by cDNA: 159557., supported by cDNA: gi_14190498 [Arabidopsis >gi|14190499|gb|AAK55730.1|AF380649_1 At1g61660/T13M11_21
  misc_feature (76)..(215): Homolog of NCBI NO: 21553730 NR Description: unknown [Arabidopsis thaliana]
  misc_feature (79)..(214): Homolog of NCBI NO: 15232315 NR Description: hypothetical protein; protein id: At3g20640.1 thaliana] >gi|26451163|dbj|BAC42685.1| putative bHLH
  misc_feature (79)..(214): Homolog of NCBI NO: 9294343 NR Description: gene_id:F3H11.2~unknown protein [Arabidopsis
  misc_feature (76)..(172): Homolog of NCBI NO: 30696595 NR Description: expressed protein [Arabidopsis thaliana]
  misc_feature (97)..(209): Homolog of NCBI NO: 15217667 NR Description: hypothetical protein; protein id: At1g27660.1
  misc_feature (92)..(154): Homolog of NCBI NO: 34910130 NR Description: B1070A12.8 [Oryza sativa (japonica
  misc_feature (97)..(211): Homolog of NCBI NO: 22093671 NR Description: similar to bHLH (Basic-helix-loop-helix)
MNMHNSFFEGLLIDPNDQLLPDPWSKSTIPNAKSELLENFPFLDNMFLVDSEAESLLDHEIRNHKSSKEQITQDYKNLTSKAQLEENSDEYSPRLLKRPRLETLSPLPSFKVRKEKLGDRITALQQLVSPFGKTDTASVLNEAVEYIKFLQEQVTVLSNPEQNTIGSVQQQQCSNKKSINTQGEVEEDECSPRRYVDLSSRGLCLMPISASYPVAAAAASAAEMNVHLVSGIFHSL

SEQ ID NO: 82593 - protein, 234 aa, Arabidopsis thaliana
  peptide (1)..(234): Ceres Seq. ID no. 12666415
  misc_feature (111)..(149): Pfam Name: Helix-loop-helix DNA-binding domain Pfam Description: Helix-loop-helix DNA-binding domain
  misc_feature (1)..(234): Homolog of NCBI NO: 15234636 NR Description: putative protein; protein id: At4g05170.1
  misc_feature (1)..(210): Homolog of NCBI NO: 22328848 NR Description: hypothetical protein; protein id: At4g21340.1, by cDNA: gi_17529153 [Arabidopsis thaliana] unknown protein [Arabidopsis thaliana]
  misc_feature (74)..(213): Homolog of NCBI NO: 18407276 NR Description: expressed protein; protein id: At1g61660.1, by cDNA: 159557., supported by cDNA: gi_14190498 [Arabidopsis >gi|14190499|gb|AAK55730.1|AF380649_1 At1g61660/T13M11_21
  misc_feature (74)..(213): Homolog of NCBI NO: 21553730 NR Description: unknown [Arabidopsis thaliana]
  misc_feature (77)..(212): Homolog of NCBI NO: 15232315 NR Description: hypothetical protein; protein id: At3g20640.1 thaliana] >gi|26451163|dbj|BAC42685.1| putative bHLH
  misc_feature (77)..(212): Homolog of NCBI NO: 9294343 NR Description: gene_id:F3H11.2~unknown protein [Arabidopsis
  misc_feature (74)..(170): Homolog of NCBI NO: 30696595 NR Description: expressed protein [Arabidopsis thaliana]
  misc_feature (95)..(207): Homolog of NCBI NO: 15217667 NR Description: hypothetical protein; protein id: At1g27660.1
  misc_feature (90)..(152): Homolog of NCBI NO: 34910130 NR Description: B1070A12.8 [Oryza sativa (japonica
  misc_feature (95)..(209): Homolog of NCBI NO: 22093671 NR Description: similar to bHLH (Basic-helix-loop-helix)
MHNSFFEGLLIDPNDQLLPDPWSKSTIPNAKSELLENFPFLDNMFLVDSEAESLLDHEIRNHKSSKEQITQDYKNLTSKAQLEENSDEYSPRLLKRPRLETLSPLPSFKVRKEKLGDRITALQQLVSPFGKTDTASVLNEAVEYIKFLQEQVTVLSNPEQNTIGSVQQQQCSNKKSINTQGEVEEDECSPRRYVDLSSRGLCLMPISASYPVAAAAASAAEMNVHLVSGIFHSL

SEQ ID NO: 82594 - DNA, 2865 bp, Arabidopsis thaliana
  misc_feature (1)..(2865): Ceres Seq. ID no. 12666435
  misc_feature: MA Experiment ID: 20000173 Result: Down-regulated in Transcription
  misc_feature: MA Experiment 20000173 PARAMETER Experiment Name: At_42deg_Heat_P Parameter: Age (day) Value: 14
  misc_feature: MA Experiment 20000173 PARAMETER Experiment Name: At_42deg_Heat_P Parameter: Organism Value: A. thaliana
  misc_feature: MA Experiment 20000173 PARAMETER Experiment Name: At_42deg_Heat_P Parameter: Plant Line Value: WS
  misc_feature: MA Experiment 20000173 PARAMETER Experiment Name: At_42deg_Heat_P Parameter: Temperature (deg C) Value: 42 vs. 22
  misc_feature: MA Experiment 20000173 PARAMETER Experiment Name: At_42deg_Heat_P Parameter: Timepoint (hr) Value: 6
  misc_feature: MA Experiment 20000173 PARAMETER Experiment Name: At_42deg_Heat_P Parameter: Tissue Value: Aerial
  misc_feature: MA Experiment ID: 20000179 Result: Down-regulated in Transcription
  misc_feature: MA Experiment 20000179 PARAMETER Experiment Name: At_Germinating_Seeds_P Parameter: Age (hr) Value: 6 vs. 0
  misc_feature: MA Experiment 20000179 PARAMETER Experiment Name: At_Germinating_Seeds_P Parameter: Tissue Value: Germinating Seeds
  misc_feature: MA Experiment ID: 20000180 Result: Down-regulated in Transcription
  misc_feature: MA Experiment 20000180 PARAMETER Experiment Name: At_Germinating_Seeds_P Parameter: Age (hr) Value: 24 vs. 0
  misc_feature: MA Experiment 20000180 PARAMETER Experiment Name: At_Germinating_Seeds_P Parameter: Tissue Value: Germinating Seeds
  misc_feature: MA Experiment ID: 20000182 Result: Down-regulated in Transcription
  misc_feature: MA Experiment 20000182 PARAMETER Experiment Name: At_2mM_SA_P Parameter: Age (day) Value: 14
  misc_feature: MA Experiment 20000182 PARAMETER Experiment Name: At_2mM_SA_P Parameter: Organism Value: A. thaliana
  misc_feature: MA Experiment 20000182 PARAMETER Experiment Name: At_2mM_SA_P Parameter: Plant Line Value: WS
  misc_feature: MA Experiment 20000182 PARAMETER Experiment Name: At_2mM_SA_P Parameter: Timepoint (hr) Value: 6
  misc_feature: MA Experiment 20000182 PARAMETER Experiment Name: At_2mM_SA_P Parameter: Tissue Value: Aerial
  misc_feature: MA Experiment 20000182 PARAMETER Experiment Name: At_2mM_SA_P Parameter: Treatment Value: 2mM SA vs. No Treatment
  misc_feature: MA Experiment ID: 20000185 Result: Down-regulated in Transcription
  misc_feature: MA Experiment 20000185 PARAMETER Experiment Name: At_Roots__P Parameter: Age (day) Value: 7 vs. 21
  misc_feature: MA Experiment 20000185 PARAMETER Experiment Name: At_Roots__P Parameter: Organism Value: A. thaliana
  misc_feature: MA Experiment 20000185 PARAMETER Experiment Name: At_Roots__P Parameter: Tissue Value: Roots vs. Whole Plant
  misc_feature: MA Experiment ID: 20000437 Result: Down-regulated in Transcription
  misc_feature: MA Experiment 20000437 PARAMETER Experiment Name: At_Drought_P Parameter: Age (day) Value: 8
  misc_feature: MA Experiment 20000437 PARAMETER Experiment Name: At_Drought_P Parameter: Organism Value: A. thaliana
  misc_feature: MA Experiment 20000437 PARAMETER Experiment Name: At_Drought_P Parameter: Plant Line Value: WS
  misc_feature: MA Experiment 20000437 PARAMETER Experiment Name: At_Drought_P Parameter: Timepoint (hr) Value: 24
  misc_feature: MA Experiment 20000437 PARAMETER Experiment Name: At_Drought_P Parameter: Tissue Value: Whole Plant
  misc_feature: MA Experiment 20000437 PARAMETER Experiment Name: At_Drought_P Parameter: Treatment Value: Drought vs. No Drought
  misc_feature: MA Experiment ID: 20000439 Result: Down-regulated in Transcription
  misc_feature: MA Experiment 20000439 PARAMETER Experiment Name: At_Roots__P Parameter: Age (day) Value: 14 vs. 21
  misc_feature: MA Experiment 20000439 PARAMETER Experiment Name: At_Roots__P Parameter: Organism Value: A. thaliana
  misc_feature: MA Experiment 20000439 PARAMETER Experiment Name: At_Roots__P Parameter: Tissue Value: Roots vs. Whole Plant
  misc_feature: MA Experiment ID: 20000495 Result: Down-regulated in Transcription
  misc_feature: MA Experiment 20000495 PARAMETER Experiment Name: At_Guard_Cells_P Parameter: Harvest Date Value: 8/2/2002
  misc_feature: MA Experiment 20000495 PARAMETER Experiment Name: At_Guard_Cells_P Parameter: Organism Value: A. thaliana
  misc_feature: MA Experiment 20000495 PARAMETER Experiment Name: At_Guard_Cells_P Parameter: Tissue Value: Guard Cells vs. Leaves
  misc_feature: MA Experiment ID: 20000496 Result: Down-regulated in Transcription
  misc_feature: MA Experiment 20000496 PARAMETER Experiment Name: At_Guard_Cells_P Parameter: Harvest Date Value: 7/19/2002
  misc_feature: MA Experiment 20000496 PARAMETER Experiment Name: At_Guard_Cells_P Parameter: Organism Value: Canola
  misc_feature: MA Experiment 20000496 PARAMETER Experiment Name: At_Guard_Cells_P Parameter: Tissue Value: Guard Cells vs. Leaves
  misc_feature: MA Experiment ID: 20001450 Result: Down-regulated in Transcription
  misc_feature: MA Experiment 20001450 PARAMETER Experiment Name: At_Far-red-induction_P Parameter: Age (day) Value: 7
  misc_feature: MA Experiment 20001450 PARAMETER Experiment Name: At_Far-red-induction_P Parameter: Light Value: Far-red vs. White
  misc_feature: MA Experiment 20001450 PARAMETER Experiment Name: At_Far-red-induction_P Parameter: Organism Value: A. thaliana
  misc_feature: MA Experiment 20001450 PARAMETER Experiment Name: At_Far-red-induction_P Parameter: Plant Line Value: Columbia
  misc_feature: MA Experiment 20001450 PARAMETER Experiment Name: At_Far-red-induction_P Parameter: Timepoint (hr) Value: 8
  misc_feature: MA Experiment 20001450 PARAMETER Experiment Name: At_Far-red-induction_P Parameter: Tissue Value: Whole Plant
  misc_feature: MA Experiment ID: 20001451 Result: Down-regulated in Transcription
  misc_feature: MA Experiment 20001451 PARAMETER Experiment Name: At_Far-red-induction_P Parameter: Age (day) Value: 7
  misc_feature: MA Experiment 20001451 PARAMETER Experiment Name: At_Far-red-induction_P Parameter: Light Value: Far-red vs. White
  misc_feature: MA Experiment 20001451 PARAMETER Experiment Name: At_Far-red-induction_P Parameter: Organism Value: A. thaliana
  misc_feature: MA Experiment 20001451 PARAMETER Experiment Name: At_Far-red-induction_P Parameter: Plant Line Value: Columbia
  misc_feature: MA Experiment 20001451 PARAMETER Experiment Name: At_Far-red-induction_P Parameter: Timepoint (hr) Value: 24
  misc_feature: MA Experiment 20001451 PARAMETER Experiment Name: At_Far-red-induction_P Parameter: Tissue Value: Whole Plant
atgggttttgtaggttttgttaccagaacctctgcaggtgtttctccttctatcttacttcccagatcaactcagtctcctcagattattgctaagagctcatcagtatcagtacagccagtgtctgaggatgctaaggaggattatcagtccaaagatgttagtggagattcaatacggcggcgttttcttgaattctttgcttctcgtggtcataaggtgcttccaagttcgtctcttgtaccagaagatcctaccgtcttgctaacaattgcaggaatgcttcagtttaagcctattttccttggaaaggtacctagagaggttccttgtgcaaccactgcgcaaaggtgtatacgtacgaatgatttggagaatgttgggaaaacggctaggcaccatactttctttgagatgcttgggaactttagctttggtgattacttcaagaaagaagcgataaaatgggcatgggagctttcaactattgagtttgggctaccagctaatagagtttgggttagtatatatgaagacgatgatgaagcttttgaaatctggaagaatgaagttggtgtttctgttgagcggataaagagaatgggtgaagctgacaacttttggactagtggaccaactggtccttgtggtccatgctctgagttgtactatgacttctatcctgagagaggttatgatgaagatgttgatcttggggatgataccagatttattgagttctataatttggttttcatgcagtataacaagacggaagatggattgcttgagcccttgaaacagaagaatatagatactggtcttggtttggaacgtatagctcaaatccttcagaaggttccaaacaactacgagacagatttgatatatccaatcattgcaaagatctcagagttggcgaatatctcatatgactctgcaaatgacaaggcaaagacaagtttaaaagtgattgcagatcacatgcgggcagttgtctatctcatatcagatggtgtttctccttcaaatattggcagaggttatgtggttaggaggctaataagaagagcagttcggaaggggaagtctctcggaataaatggggatatgaatggtaatctaaagggagcgtttttgccagcggttgctgaaaaggtgatagagttgagcacttatattgattcagatgtaaaactaaaggcctcacgcatcattgaggagattaggcaagaagaacttcactttaagaaaactctggaaagaggagaaaagttacttgaccaaaagcttaacgatgcattgtcaattgctgataaaactaaggatacgccttatctggatggaaaagatgcgtttcttctttatgacacatttggctttcctgtggagataactgcagaagttgctgaagaacgtggagtcagtatagatatgaatggttttgaagtggaaatggagaatcaaagacgtcaatctcaagctgctcacaatgttgtaaaactgacagttgaagacgatgctgacatgacgaaaaatattgcagacactgagttccttggatatgacagtctctctgctcgtgctgttgtgaaaagtcttttggtgaatgggaagcctgtgataagggtttctgaaggcagtgaagtagaggttctgctggacagaactccgttctatgctgaatcaggaggtcaaattgcagatcatggttttctttatgttagcagtgatgggaaccaagagaaagctgttgttgaggtaagtgatgtgcagaagtctcttaaaatttttgttcacaagggcactgtaaaaagtggagctctagaagttggcaaggaggtggaagcagcagtagatgcagacttgaggcaacgagcgaaggttcaccataccgccactcatttgctccaatcggcacttaaaaaagtagtaggacaagaaacatcacaggctggttcattagtagcttttgaccgcctcagattcgatttcaattttaatcggtccctgcatgataatgagcttgaggaaatcgaatgcctgatcaataggtggattggggatgctacacgtcttgaaacaaaagtccttcctcttgctgatgcaaaacgtgctggagccatcgcaatgtttggggaaaaatatgatgaaaacgaggttcgtgtagtagaagttcctggtgtctccatggaactttgtggtggcactcatgttggcaatactgcagaaatacgagccttcaagattatctcagaacagggcattgcatctggaatccggcgtatagaagcggttgcaggtgaagcattcattgaatacataaactcacgggattctcaaatgacacgtctatgctcgactctcaaggtgaaagcagaggatgttacaaacagagtggagaatcttctagaggaactacgtgctgctagaaaagaagcctccgacttgcgttcaaaagcagctgtctataaagcatctgtcatatcgaacaaagcatttactgtaggaacttcacagactataagagtgctcgttgagtcgatggatgacaccgatgctgactcattaaagagtgcagctgagcatttgataagcacattggaagatccagtcgctgtggtactaggatcatctccagaaaaagacaaggttagtttagttgctgcatttagtcctggagtagtctccctaggtgttcaagcagggaaattcattggccccatagctaagctgtgtggcggaggaggtggtggaaagcccaattttgctcaggcaggcggcagaaagcctgaaaatctcccaagtgccttagagaaagctcgggaagatctcgtggcaactctatccgaaaagctagggtga

SEQ ID NO: 82595 - protein, 954 aa, Arabidopsis thaliana
  peptide (1)..(954): Ceres Seq. ID no. 12666436
  misc_feature (869)..(943): Pfam Name: DHHA1 domain Pfam Description: DHHA1 domain
  misc_feature (368)..(949): Homolog of NCBI NO: 16331117 NR Description: alanyl-tRNA synthetase [Synechocystis sp. PCC
  misc_feature (54)..(446): Homolog of NCBI NO: 16331117 NR Description: alanyl-tRNA synthetase [Synechocystis sp. PCC
  misc_feature (447)..(949): Homolog of NCBI NO: 37521917 NR Description: alanyl-tRNA synthetase [Gloeobacter violaceus]
  misc_feature (54)..(431): Homolog of NCBI NO: 37521917 NR Description: alanyl-tRNA synthetase [Gloeobacter violaceus]
  misc_feature (54)..(850): Homolog of NCBI NO: 22299646 NR Description: alanyl-tRNA synthetase [Thermosynechococcus
  misc_feature (409)..(940): Homolog of NCBI NO: 24374938 NR Description: alanyl-tRNA synthetase [Shewanella oneidensis
  misc_feature (58)..(498): Homolog of NCBI NO: 24374938 NR Description: alanyl-tRNA synthetase [Shewanella oneidensis
  misc_feature (372)..(941): Homolog of NCBI NO: 15603152 NR Description: AlaS [Pasteurella multocida]
  misc_feature (59)..(431): Homolog of NCBI NO: 15603152 NR Description: AlaS [Pasteurella multocida]
  misc_feature (52)..(938): Homolog of NCBI NO: 15613830 NR Description: alanyl-tRNA synthetase [Bacillus halodurans]
MGFVGFVTRTSAGVSPSILLPRSTQSPQIIAKSSSVSVQPVSEDAKEDYQSKDVSGDSIRRRFLEFFASRGHKVLPSSSLVPEDPTVLLTIAGMLQFKPIFLGKVPREVPCATTAQRCIRTNDLENVGKTARHHTFFEMLGNFSFGDYFKKEAIKWAWELSTIEFGLPANRVWVSIYEDDDEAFEIWKNEVGVSVERIKRMGEADNFWTSGPTGPCGPCSELYYDFYPERGYDEDVDLGDDTRFIEFYNLVFMQYNKTEDGLLEPLKQKNIDTGLGLERIAQILQKVPNNYETDLIYPIIAKISELANISYDSANDKAKTSLKVIADHMRAVVYLISDGVSPSNIGRGYVVRRLIRRAVRKGKSLGINGDMNGNLKGAFLPAVAEKVIELSTYIDSDVKLKASRIIEEIRQEELHFKKTLERGEKLLDQKLNDALSIADKTKDTPYLDGKDAFLLYDTFGFPVEITAEVAEERGVSIDMNGFEVEMENQRRQSQAAHNVVKLTVEDDADMTKNIADTEFLGYDSLSARAVVKSLLVNGKPVIRVSEGSEVEVLLDRTPFYAESGGQIADHGFLYVSSDGNQEKAVVEVSDVQKSLKIFVHKGTVKSGALEVGKEVEAAVDADLRQRAKVHHTATHLLQSALKKVVGQETSQAGSLVAFDRLRFDFNFNRSLHDNELEEIECLINRWIGDATRLETKVLPLADAKRAGAIAMFGEKYDENEVRVVEVPGVSMELCGGTHVGNTAEIRAFKIISEQGIASGIRRIEAVAGEAFIEYINSRDSQMTRLCSTLKVKAEDVTNRVENLLEELRAARKEASDLRSKAAVYKASVISNKAFTVGTSQTIRVLVESMDDTDADSLKSAAEHLISTLEDPVAVVLGSSPEKDKVSLVAAFSPGVVSLGVQAGKFIGPIAKLCGGGGGGKPNFAQAGGRKPENLPSALEKAREDLVATLSEKLG

SEQ ID NO: 82596 - protein, 861 aa, Arabidopsis thaliana
  peptide (1)..(861): Ceres Seq. ID no. 12666437
  misc_feature (776)..(850): Pfam Name: DHHA1 domain Pfam Description: DHHA1 domain
  misc_feature (275)..(856): Homolog of NCBI NO: 16331117 NR Description: alanyl-tRNA synthetase [Synechocystis sp. PCC
  misc_feature (1)..(353): Homolog of NCBI NO: 16331117 NR Description: alanyl-tRNA synthetase [Synechocystis sp. PCC
  misc_feature (354)..(856): Homolog of NCBI NO: 37521917 NR Description: alanyl-tRNA synthetase [Gloeobacter violaceus]
  misc_feature (1)..(338): Homolog of NCBI NO: 37521917 NR Description: alanyl-tRNA synthetase [Gloeobacter violaceus]
  misc_feature (1)..(757): Homolog of NCBI NO: 22299646 NR Description: alanyl-tRNA synthetase [Thermosynechococcus
  misc_feature (316)..(847): Homolog of NCBI NO: 24374938 NR Description: alanyl-tRNA synthetase [Shewanella oneidensis
  misc_feature (1)..(405): Homolog of NCBI NO: 24374938 NR Description: alanyl-tRNA synthetase [Shewanella oneidensis
  misc_feature (279)..(848): Homolog of NCBI NO: 15603152 NR Description: AlaS [Pasteurella multocida]
  misc_feature (1)..(338): Homolog of NCBI NO: 15603152 NR Description: AlaS [Pasteurella multocida]
  misc_feature (1)..(845): Homolog of NCBI NO: 15613830 NR Description: alanyl-tRNA synthetase [Bacillus halodurans]
MLQFKPIFLGKVPREVPCATTAQRCIRTNDLENVGKTARHHTFFEMLGNFSFGDYFKKEAIKWAWELSTIEFGLPANRVWVSIYEDDDEAFEIWKNEVGVSVERIKRMGEADNFWTSGPTGPCGPCSELYYDFYPERGYDEDVDLGDDTRFIEFYNLVFMQYNKTEDGLLEPLKQKNIDTGLGLERIAQILQKVPNNYETDLIYPIIAKISELANISYDSANDKAKTSLKVIADHMRAVVYLISDGVSPSNIGRGYVVRRLIRRAVRKGKSLGINGDMNGNLKGAFLPAVAEKVIELSTYIDSDVKLKASRIIEEIRQEELHFKKTLERGEKLLDQKLNDALSIADKTKDTPYLDGKDAFLLYDTFGFPVEITAEVAEERGVSIDMNGFEVEMENQRRQSQAAHNVVKLTVEDDADMTKNIADTEFLGYDSLSARAVVKSLLVNGKPVIRVSEGSEVEVLLDRTPFYAESGGQIADHGFLYVSSDGNQEKAVVEVSDVQKSLKIFVHKGTVKSGALEVGKEVEAAVDADLRQRAKVHHTATHLLQSALKKVVGQETSQAGSLVAFDRLRFDFNFNRSLHDNELEEIECLINRWIGDATRLETKVLPLADAKRAGAIAMFGEKYDENEVRVVEVPGVSMELCGGTHVGNTAEIRAFKIISEQGIASGIRRIEAVAGEAFIEYINSRDSQMTRLCSTLKVKAEDVTNRVENLLEELRAARKEASDLRSKAAVYKASVISNKAFTVGTSQTIRVLVESMDDTDADSLKSAAEHLISTLEDPVAVVLGSSPEKDKVSLVAAFSPGVVSLGVQAGKFIGPIAKLCGGGGGGKPNFAQAGGRKPENLPSALEKAREDLVATLSEKLG

SEQ ID NO: 82597 - protein, 816 aa, Arabidopsis thaliana
  peptide (1)..(816): Ceres Seq. ID no. 12666438
  misc_feature (731)..(805): Pfam Name: DHHA1 domain Pfam Description: DHHA1 domain
  misc_feature (230)..(811): Homolog of NCBI NO: 16331117 NR Description: alanyl-tRNA synthetase [Synechocystis sp. PCC
  misc_feature (1)..(308): Homolog of NCBI NO: 16331117 NR Description: alanyl-tRNA synthetase [Synechocystis sp. PCC
  misc_feature (309)..(811): Homolog of NCBI NO: 37521917 NR Description: alanyl-tRNA synthetase [Gloeobacter violaceus]
  misc_feature (1)..(293): Homolog of NCBI NO: 37521917 NR Description: alanyl-tRNA synthetase [Gloeobacter violaceus]
  misc_feature (1)..(712): Homolog of NCBI NO: 22299646 NR Description: alanyl-tRNA synthetase [Thermosynechococcus
  misc_feature (271)..(802): Homolog of NCBI NO: 24374938 NR Description: alanyl-tRNA synthetase [Shewanella oneidensis
  misc_feature (1)..(360): Homolog of NCBI NO: 24374938 NR Description: alanyl-tRNA synthetase [Shewanella oneidensis
  misc_feature (234)..(803): Homolog of NCBI NO: 15603152 NR Description: AlaS [Pasteurella multocida]
  misc_feature (1)..(293): Homolog of NCBI NO: 15603152 NR Description: AlaS [Pasteurella multocida]
  misc_feature (1)..(800): Homolog of NCBI NO: 15613830 NR Description: alanyl-tRNA synthetase [Bacillus halodurans]
MLGNFSFGDYFKKEAIKWAWELSTIEFGLPANRVWVSIYEDDDEAFEIWKNEVGVSVERIKRMGEADNFWTSGPTGPCGPCSELYYDFYPERGYDEDVDLGDDTRFIEFYNLVFMQYNKTEDGLLEPLKQKNIDTGLGLERIAQILQKVPNNYETDLIYPIIAKISELANISYDSANDKAKTSLKVIADHMRAVVYLISDGVSPSNIGRGYVVRRLIRRAVRKGKSLGINGDMNGNLKGAFLPAVAEKVIELSTYIDSDVKLKASRIIEEIRQEELHFKKTLERGEKLLDQKLNDALSIADKTKDTPYLDGKDAFLLYDTFGFPVEITAEVAEERGVSIDMNGFEVEMENQRRQSQAAHNVVKLTVEDDADMTKNIADTEFLGYDSLSARAVVKSLLVNGKPVIRVSEGSEVEVLLDRTPFYAESGGQIADHGFLYVSSDGNQEKAVVEVSDVQKSLKIFVHKGTVKSGALEVGKEVEAAVDADLRQRAKVHHTATHLLQSALKKVVGQETSQAGSLVAFDRLRFDFNFNRSLHDNELEEIECLINRWIGDATRLETKVLPLADAKRAGAIAMFGEKYDENEVRVVEVPGVSMELCGGTHVGNTAEIRAFKIISEQGIASGIRRIEAVAGEAFIEYINSRDSQMTRLCSTLKVKAEDVTNRVENLLEELRAARKEASDLRSKAAVYKASVISNKAFTVGTSQTIRVLVESMDDTDADSLKSAAEHLISTLEDPVAVVLGSSPEKDKVSLVAAFSPGVVSLGVQAGKFIGPIAKLCGGGGGGKPNFAQAGGRKPENLPSALEKAREDLVATLSEKLG

SEQ ID NO: 82598 - DNA, 1014 bp, Arabidopsis thaliana
  misc_feature (1)..(1014): Ceres Seq. ID no. 12666439
  misc_feature: MA Experiment ID: 20000180 Result: Down-regulated in Transcription
  misc_feature: MA Experiment 20000180 PARAMETER Experiment Name: At_Germinating_Seeds_P Parameter: Age (hr) Value: 24 vs. 0
  misc_feature: MA Experiment 20000180 PARAMETER Experiment Name: At_Germinating_Seeds_P Parameter: Tissue Value: Germinating Seeds
  misc_feature: MA Experiment ID: 20001906 Result: Up-regulated in Transcription
  misc_feature: MA Experiment 20001906 PARAMETER Experiment Name: At_Drought_Reproduction_P Parameter: Age (day) Value: 35
  misc_feature: MA Experiment 20001906 PARAMETER Experiment Name: At_Drought_Reproduction_P Parameter: Organism Value: A. thaliana
  misc_feature: MA Experiment 20001906 PARAMETER Experiment Name: At_Drought_Reproduction_P Parameter: Plant Line Value: WS
  misc_feature: MA Experiment 20001906 PARAMETER Experiment Name: At_Drought_Reproduction_P Parameter: Timepoint (day) Value: 5
  misc_feature: MA Experiment 20001906 PARAMETER Experiment Name: At_Drought_Reproduction_P Parameter: Tissue Value: Siliques
  misc_feature: MA Experiment 20001906 PARAMETER Experiment Name: At_Drought_Reproduction_P Parameter: Treatment Value: Drought vs. No Drought
  misc_feature: MA Experiment ID: 20001908 Result: Up-regulated in Transcription
  misc_feature: MA Experiment 20001908 PARAMETER Experiment Name: At_Drought_Reproduction_P Parameter: Age (day) Value: 40
  misc_feature: MA Experiment 20001908 PARAMETER Experiment Name: At_Drought_Reproduction_P Parameter: Organism Value: A. thaliana
  misc_feature: MA Experiment 20001908 PARAMETER Experiment Name: At_Drought_Reproduction_P Parameter: Plant Line Value: WS
  misc_feature: MA Experiment 20001908 PARAMETER Experiment Name: At_Drought_Reproduction_P Parameter: Timepoint (day) Value: 10
  misc_feature: MA Experiment 20001908 PARAMETER Experiment Name: At_Drought_Reproduction_P Parameter: Tissue Value: Siliques
  misc_feature: MA Experiment 20001908 PARAMETER Experiment Name: At_Drought_Reproduction_P Parameter: Treatment Value: Drought vs. No Drought
atggtggtgatgaaggcacagccactggttccagcaattttcatatttggtgattcggtggttgatgtgggaaacaacaatgatatctacacaatcgtcaaagctaatttccctccttatggaagagatttcacaacccatacacccaccggacgcttctgcaatggaaagttagctactgacttcaccgctgagaatcttgggttcaaatcatacccacaagcttatctaagcaaaaaggcaaaaggcaagaaccttttgattggagctaatttcgcctctgcagcctctggttattacgatggcacagccaagctctacagtgcaatatcgttgccgcaacagctagaacattacaaagactacattagtcgaatccaagaaatcgcaacctcaaacaacaattcaaacgccagtgccataatctccaatggcatctatatcgtcagcgcagggagcagcgacttcatacaaaactactatatcaaccctctcctctacagagaccaatcacctgatgagttctctgatctccttatcctctcctactccagttttattcagaatttatattcgttaggagcaagaaggatcggagtgactacacttccgcccctcggttgtttaccggcggccataactgtagtgggtccacatgagggtggatgctcggagaagcttaacaacgacgcaatctccttcaacaacaaactcaatacgacgtcacaggatctcaagagaaacctcattggactcaatttagtcgtctttgatatctatcagcctctctatgatcttgccaccaggccatcagaatttggatttgcagaggcaagaagagcttgttgtggaacagggttactagagacatcaatactgtgcaacccaaaatcagtaggaacatgtaacaatgcaactgagtatgtcttttgggacggatttcatccaacggaagctgctaacaagattctcgctgacaatctcttggtctctggcatctctctcatctcctga

SEQ ID NO: 82599 - protein, 337 aa, Arabidopsis thaliana
  peptide (1)..(337): Ceres Seq. ID no. 12666440
  misc_feature (13)..(328): Pfam Name: GDSL-like Lipase/Acylhydrolase Pfam Description: GDSL-like Lipase/Acylhydrolase
  misc_feature (1)..(337): Homolog of NCBI NO: 15237137 NR Description: GDSL-motif lipase/hydrolase-like protein; protein
  misc_feature (7)..(337): Homolog of NCBI NO: 15237531 NR Description: putative protein; protein id: At5g03820.1
  misc_feature (7)..(337): Homolog of NCBI NO: 9758010 NR Description: proline-rich protein APG-like [Arabidopsis
  misc_feature (17)..(337): Homolog of NCBI NO: 15237528 NR Description: putative protein; protein id: At5g03810.1
  misc_feature (9)..(337): Homolog of NCBI NO: 30693763 NR Description: GDSL-motif lipase/hydrolase protein [Arabidopsis
  misc_feature (9)..(337): Homolog of NCBI NO: 13174242 NR Description: putative proline-rich protein [Oryza sativa]
  misc_feature (9)..(336): Homolog of NCBI NO: 15228189 NR Description: putative APG protein; protein id: At3g16370.1,
  misc_feature (16)..(336): Homolog of NCBI NO: 2062167 NR Description: Proline-rich protein APG isolog [Arabidopsis
  misc_feature (9)..(337): Homolog of NCBI NO: 10638955 NR Description: putative proline-rich protein APG isolog [Cicer
  misc_feature (9)..(275): Homolog of NCBI NO: 11280580 NR Description: hypothetical protein T4D2.30 - Arabidopsis >gi|6630730|emb|CAB64213.1| putative protein [Arabidopsis
MVVMKAQPLVPAIFIFGDSVVDVGNNNDIYTIVKANFPPYGRDFTTHTPTGRFCNGKLATDFTAENLGFKSYPQAYLSKKAKGKNLLIGANFASAASGYYDGTAKLYSAISLPQQLEHYKDYISRIQEIATSNNNSNASAIISNGIYIVSAGSSDFIQNYYINPLLYRDQSPDEFSDLLILSYSSFIQNLYSLGARRIGVTTLPPLGCLPAAITVVGPHEGGCSEKLNNDAISFNNKLNTTSQDLKRNLIGLNLVVFDIYQPLYDLATRPSEFGFAEARRACCGTGLLETSILCNPKSVGTCNNATEYVFWDGFHPTEAANKILADNLLVSGISLIS

SEQ ID NO: 82600 - protein, 334 aa, Arabidopsis thaliana
  peptide (1)..(334): Ceres Seq. ID no. 12666441
  misc_feature (10)..(325): Pfam Name: GDSL-like Lipase/Acylhydrolase Pfam Description: GDSL-like Lipase/Acylhydrolase
  misc_feature (1)..(334): Homolog of NCBI NO: 15237137 NR Description: GDSL-motif lipase/hydrolase-like protein; protein
  misc_feature (4)..(334): Homolog of NCBI NO: 15237531 NR Description: putative protein; protein id: At5g03820.1
  misc_feature (4)..(334): Homolog of NCBI NO: 9758010 NR Description: proline-rich protein APG-like [Arabidopsis
  misc_feature (14)..(334): Homolog of NCBI NO: 15237528 NR Description: putative protein; protein id: At5g03810.1
  misc_feature (6)..(334): Homolog of NCBI NO: 30693763 NR Description: GDSL-motif lipase/hydrolase protein [Arabidopsis
  misc_feature (6)..(334): Homolog of NCBI NO: 13174242 NR Description: putative proline-rich protein [Oryza sativa]
  misc_feature (6)..(333): Homolog of NCBI NO: 15228189 NR Description: putative APG protein; protein id: At3g16370.1,
  misc_feature (13)..(333): Homolog of NCBI NO: 2062167 NR Description: Proline-rich protein APG isolog [Arabidopsis
  misc_feature (6)..(334): Homolog of NCBI NO: 10638955 NR Description: putative proline-rich protein APG isolog [Cicer
  misc_feature (6)..(272): Homolog of NCBI NO: 11280580 NR Description: hypothetical protein T4D2.30 - Arabidopsis >gi|6630730|emb|CAB64213.1| putative protein [Arabidopsis
MKAQPLVPAIFIFGDSVVDVGNNNDIYTIVKANFPPYGRDFTTHTPTGRFCNGKLATDFTAENLGFKSYPQAYLSKKAKGKNLLIGANFASAASGYYDGTAKLYSAISLPQQLEHYKDYISRIQEIATSNNNSNASAIISNGIYIVSAGSSDFIQNYYINPLLYRDQSPDEFSDLLILSYSSFIQNLYSLGARRIGVTTLPPLGCLPAAITVVGPHEGGCSEKLNNDAISFNNKLNTTSQDLKRNLIGLNLVVFDIYQPLYDLATRPSEFGFAEARRACCGTGLLETSILCNPKSVGTCNNATEYVFWDGFHPTEAANKILADNLLVSGISLIS

SEQ ID NO: 82601 - DNA, 1518 bp, Arabidopsis thaliana
  misc_feature (1)..(1518): Ceres Seq. ID no. 12666468
  misc_feature: MA Experiment ID: 20000306 Result: Up-regulated in Transcription
  misc_feature: MA Experiment 20000306 PARAMETER Experiment Name: At_Germinating_Seeds_Sub_P Parameter: Age (hr) Value: 6 vs. 0
  misc_feature: MA Experiment 20000306 PARAMETER Experiment Name: At_Germinating_Seeds_Sub_P Parameter: Organism Value: A. thaliana
  misc_feature: MA Experiment 20000306 PARAMETER Experiment Name: At_Germinating_Seeds_Sub_P Parameter: Plant Line Value: WS
  misc_feature: MA Experiment 20000306 PARAMETER Experiment Name: At_Germinating_Seeds_Sub_P Parameter: Tissue Value: Germinating Seeds
  misc_feature: MA Experiment ID: 20000315 Result: Down-regulated in Transcription
  misc_feature: MA Experiment 20000315 PARAMETER Experiment Name: At_14day_Shoots-Roots_Sub_P Parameter: Age (day) Value: 14
  misc_feature: MA Experiment 20000315 PARAMETER Experiment Name: At_14day_Shoots-Roots_Sub_P Parameter: Organism Value: A. thaliana
  misc_feature: MA Experiment 20000315 PARAMETER Experiment Name: At_14day_Shoots-Roots_Sub_P Parameter: Plant Line Value: WS
  misc_feature: MA Experiment 20000315 PARAMETER Experiment Name: At_14day_Shoots-Roots_Sub_P Parameter: Tissue Value: Shoots vs. Whole Plant
  misc_feature: MA Experiment ID: 20000440 Result: Up-regulated in Transcription
  misc_feature: MA Experiment 20000440 PARAMETER Experiment Name: At_Closed-Flower__Sub_P Parameter: Tissue Value: Closed Flower vs. Whole Plant
atggaggccaaaacattttttctcttcatgcttttcatcttttctcagtcttggctctcaacttctaaaaggatcctaaacaatccctctgttttctcatcgtctttgaatttttcgagtggtaatgcagagagacttataaaatcattcaatctaatgcctaagtatgacgttaatgtcatcccaaaaggaagccttgatgctccaagactcattgagagacaaattgattttctggcgacagccggttccaaaaacgcttccgttggtccttctgttcaagagtttggccactacgctggttattacagccttcctcattcaaaatcagccaagatgttctatttcttttttgaatcacggaacaaaacaaccgatccggttgtgatctggttaaccggtggaccgggctgcagtagtagtgtggctatgttttatgaaaacggtccgttcaagatctcaaaggatttgtctctctattggaacgattttggctgggacaaggtatccaatataatctacgtggatcagccagtcgggactggtttcagttacacatctgacgaaagcgatatccggaatgacgaggatggtgtcagtaatgacctttatgatttcttacaggctttctttaaagagcatccaaaattcgtaaagaatgatttctttattaccggtgaatcttacgctggtcactacattccggctttggcttcacgtgttcatagtggcaacaaaaagaaagaagggattccaatcaaccttaagggttttgcgattggtaacggtttaaccaacccggagatccaatatggtgcgtatggggattatgcactgcaaatgaagttgatttcagagtctgaccacgagagcctcaagcaagattacgttgagtgtcaaaatataaccaaaaaatgcagtcttggtggtggtttagtttgtgattctgctgttgaagtttgcaccagtatcttcaacaagatagtggcaaaaaaaagtggcctaaattattatgacattaggaagaaatgtgtggggagcttgtgttatgacttttcgaggatggaaatattcttgaacaaagaaaatgtacggaaagccttaggagttggagatatcaagtttgtgtcttgtagtagtacagtttatgatgcaatgatagaggactggatgcagaatcttgaggtcaagatcccgtctcttgtcaatgatggaatcaatcttctagtttatgctggagaatatgatctcatttgcaattggcttggaaactcgaggtgggtagaccaaatgaattggtcaggccaaaagggttttggatcagcaaaaaacgtatcattcttagtagatggtaaagaagccggtttactgaaaaatcacggtcctctcacttttcttaaggtttataacgctggacacatggttccgatggatcaaccaaaggcttctttgcaaatgcttcagaattggatgcaaggaaagcttaggactactcctgtactaggatttagtcaatga

SEQ ID NO: 82602 - protein, 505 aa, Arabidopsis thaliana
  peptide (1)..(505): Ceres Seq. ID no. 12666469
  misc_feature (91)..(493): Pfam Name: Serine carboxypeptidase Pfam Description: Serine carboxypeptidase
  misc_feature (1)..(505): Homolog of NCBI NO: 15237178 NR Description: serine carboxypeptidase; protein id: At5g22980.1 thaliana] >gi|10177245|dbj|BAB10619.1| serine carboxypeptidase
  misc_feature (1)..(497): Homolog of NCBI NO: 15230577 NR Description: carboxypeptidase precursor-like protein; protein At3g45010.1, supported by cDNA: gi_15215795, supported by cDNA: supported by cDNA: gi_20334785 [Arabidopsis thaliana] thaliana]
  misc_feature (1)..(497): Homolog of NCBI NO: 16323071 NR Description: AT3g45010/F14D17_80 [Arabidopsis thaliana]
  misc_feature (1)..(495): Homolog of NCBI NO: 166674 NR Description: carboxypeptidase Y-like protein
  misc_feature (1)..(495): Homolog of NCBI NO: 15228281 NR Description: putative serine carboxypeptidase precursor; id: At3g10410.1, supported by cDNA: gi_20147198 [Arabidopsis >gi|20455475|sp|P32826|CBPX_ARATH Serine carboxypeptidase
  misc_feature (10)..(495): Homolog of NCBI NO: 18447763 NR Description: putative serine carboxypeptidase precursor
  misc_feature (6)..(495): Homolog of NCBI NO: 21901929 NR Description: carboxypeptidase type III [Theobroma cacao]
  misc_feature (8)..(499): Homolog of NCBI NO: 6960455 NR Description: serine carboxypeptidase precursor [Matricaria
  misc_feature (38)..(496): Homolog of NCBI NO: 584893 NR Description: Serine carboxypeptidase III precursor
  misc_feature (37)..(496): Homolog of NCBI NO: 2851577 NR Description: Serine carboxypeptidase III precursor (CP-MIII)
MEAKTFFLFMLFIFSQSWLSTSKRILNNPSVFSSSLNFSSGNAERLIKSFNLMPKYDVNVIPKGSLDAPRLIERQIDFLATAGSKNASVGPSVQEFGHYAGYYSLPHSKSAKMFYFFFESRNKTTDPVVIWLTGGPGCSSSVAMFYENGPFKISKDLSLYWNDFGWDKVSNIIYVDQPVGTGFSYTSDESDIRNDEDGVSNDLYDFLQAFFKEHPKFVKNDFFITGESYAGHYIPALASRVHSGNKKKEGIPINLKGFAIGNGLTNPEIQYGAYGDYALQMKLISESDHESLKQDYVECQNITKKCSLGGGLVCDSAVEVCTSIFNKIVAKKSGLNYYDIRKKCVGSLCYDFSRMEIFLNKENVRKALGVGDIKFVSCSSTVYDAMIEDWMQNLEVKIPSLVNDGINLLVYAGEYDLICNWLGNSRWVDQMNWSGQKGFGSAKNVSFLVDGKEAGLLKNHGPLTFLKVYNAGHMVPMDQPKASLQMLQNWMQGKLRTTPVLGFSQ

SEQ ID NO: 82603 - protein, 496 aa, Arabidopsis thaliana
  peptide (1)..(496): Ceres Seq. ID no. 12666470
  misc_feature (82)..(484): Pfam Name: Serine carboxypeptidase Pfam Description: Serine carboxypeptidase
  misc_feature (1)..(496): Homolog of NCBI NO: 15237178 NR Description: serine carboxypeptidase; protein id: At5g22980.1 thaliana] >gi|10177245|dbj|BAB10619.1| serine carboxypeptidase
  misc_feature (1)..(488): Homolog of NCBI NO: 15230577 NR Description: carboxypeptidase precursor-like protein; protein At3g45010.1, supported by cDNA: gi_15215795, supported by cDNA: supported by cDNA: gi_20334785 [Arabidopsis thaliana] thaliana]
  misc_feature (1)..(488): Homolog of NCBI NO: 16323071 NR Description: AT3g45010/F14D17_80 [Arabidopsis thaliana]
  misc_feature (1)..(486): Homolog of NCBI NO: 166674 NR Description: carboxypeptidase Y-like protein
  misc_feature (1)..(486): Homolog of NCBI NO: 15228281 NR Description: putative serine carboxypeptidase precursor; id: At3g10410.1, supported by cDNA: gi_20147198 [Arabidopsis >gi|20455475|sp|P32826|CBPX_ARATH Serine carboxypeptidase
  misc_feature (1)..(486): Homolog of NCBI NO: 18447763 NR Description: putative serine carboxypeptidase precursor
  misc_feature (1)..(486): Homolog of NCBI NO: 21901929 NR Description: carboxypeptidase type III [Theobroma cacao]
  misc_feature (1)..(490): Homolog of NCBI NO: 6960455 NR Description: serine carboxypeptidase precursor [Matricaria
  misc_feature (29)..(487): Homolog of NCBI NO: 584893 NR Description: Serine carboxypeptidase III precursor
  misc_feature (28)..(487): Homolog of NCBI NO: 2851577 NR Description: Serine carboxypeptidase III precursor (CP-MIII)
MLFIFSQSWLSTSKRILNNPSVFSSSLNFSSGNAERLIKSFNLMPKYDVNVIPKGSLDAPRLIERQIDFLATAGSKNASVGPSVQEFGHYAGYYSLPHSKSAKMFYFFFESRNKTTDPVVIWLTGGPGCSSSVAMFYENGPFKISKDLSLYWNDFGWDKVSNIIYVDQPVGTGFSYTSDESDIRNDEDGVSNDLYDFLQAFFKEHPKFVKNDFFITGESYAGHYIPALASRVHSGNKKKEGIPINLKGFAIGNGLTNPEIQYGAYGDYALQMKLISESDHESLKQDYVECQNITKKCSLGGGLVCDSAVEVCTSIFNKIVAKKSGLNYYDIRKKCVGSLCYDFSRMEIFLNKENVRKALGVGDIKFVSCSSTVYDAMIEDWMQNLEVKIPSLVNDGINLLVYAGEYDLICNWLGNSRWVDQMNWSGQKGFGSAKNVSFLVDGKEAGLLKNHGPLTFLKVYNAGHMVPMDQPKASLQMLQNWMQGKLRTTPVLGFSQ

SEQ ID NO: 82604 - protein, 453 aa, Arabidopsis thaliana
  peptide (1)..(453): Ceres Seq. ID no. 12666471
  misc_feature (39)..(441): Pfam Name: Serine carboxypeptidase Pfam Description: Serine carboxypeptidase
  misc_feature (1)..(453): Homolog of NCBI NO: 15237178 NR Description: serine carboxypeptidase; protein id: At5g22980.1 thaliana] >gi|10177245|dbj|BAB10619.1| serine carboxypeptidase
  misc_feature (1)..(445): Homolog of NCBI NO: 15230577 NR Description: carboxypeptidase precursor-like protein; protein At3g45010.1, supported by cDNA: gi_15215795, supported by cDNA: supported by cDNA: gi_20334785 [Arabidopsis thaliana] thaliana]
  misc_feature (1)..(445): Homolog of NCBI NO: 16323071 NR Description: AT3g45010/F14D17_80 [Arabidopsis thaliana]
  misc_feature (1)..(443): Homolog of NCBI NO: 166674 NR Description: carboxypeptidase Y-like protein
  misc_feature (1)..(443): Homolog of NCBI NO: 15228281 NR Description: putative serine carboxypeptidase precursor; id: At3g10410.1, supported by cDNA: gi_20147198 [Arabidopsis >gi|20455475|sp|P32826|CBPX_ARATH Serine carboxypeptidase
  misc_feature (1)..(443): Homolog of NCBI NO: 18447763 NR Description: putative serine carboxypeptidase precursor
  misc_feature (1)..(443): Homolog of NCBI NO: 21901929 NR Description: carboxypeptidase type III [Theobroma cacao]
  misc_feature (1)..(447): Homolog of NCBI NO: 6960455 NR Description: serine carboxypeptidase precursor [Matricaria
  misc_feature (1)..(444): Homolog of NCBI NO: 584893 NR Description: Serine carboxypeptidase III precursor
  misc_feature (1)..(444): Homolog of NCBI NO: 2851577 NR Description: Serine carboxypeptidase III precursor (CP-MIII)
MPKYDVNVIPKGSLDAPRLIERQIDFLATAGSKNASVGPSVQEFGHYAGYYSLPHSKSAKMFYFFFESRNKTTDPVVIWLTGGPGCSSSVAMFYENGPFKISKDLSLYWNDFGWDKVSNIIYVDQPVGTGFSYTSDESDIRNDEDGVSNDLYDFLQAFFKEHPKFVKNDFFITGESYAGHYIPALASRVHSGNKKKEGIPINLKGFAIGNGLTNPEIQYGAYGDYALQMKLISESDHESLKQDYVECQNITKKCSLGGGLVCDSAVEVCTSIFNKIVAKKSGLNYYDIRKKCVGSLCYDFSRMEIFLNKENVRKALGVGDIKFVSCSSTVYDAMIEDWMQNLEVKIPSLVNDGINLLVYAGEYDLICNWLGNSRWVDQMNWSGQKGFGSAKNVSFLVDGKEAGLLKNHGPLTFLKVYNAGHMVPMDQPKASLQMLQNWMQGKLRTTPVLGFSQ

SEQ ID NO: 82605 - DNA, 834 bp, Arabidopsis thaliana
  misc_feature (1)..(834): Ceres Seq. ID no. 12666488
  misc_feature: MA Experiment ID: 20000234 Result: Down-regulated in Transcription
  misc_feature: MA Experiment 20000234 PARAMETER Experiment Name: At_Siliques_P Parameter: Age (day) Value: 21
  misc_feature: MA Experiment 20000234 PARAMETER Experiment Name: At_Siliques_P Parameter: Organism Value: A. thaliana
  misc_feature: MA Experiment 20000234 PARAMETER Experiment Name: At_Siliques_P Parameter: Plant Line Value: WS
  misc_feature: MA Experiment 20000234 PARAMETER Experiment Name: At_Siliques_P Parameter: Tissue Value: Less Than 5mm Siliques vs. Whole Plant
  misc_feature: MA Experiment ID: 20000264 Result: Down-regulated in Transcription
  misc_feature: MA Experiment 20000264 PARAMETER Experiment Name: At_Open_Flower_P Parameter: Age (day) Value: 21
  misc_feature: MA Experiment 20000264 PARAMETER Experiment Name: At_Open_Flower_P Parameter: Plant Line Value: WS
  misc_feature: MA Experiment 20000264 PARAMETER Experiment Name: At_Open_Flower_P Parameter: Tissue Value: Open Flower vs. Whole Plant
  misc_feature: MA Experiment ID: 20000437 Result: Down-regulated in Transcription
  misc_feature: MA Experiment 20000437 PARAMETER Experiment Name: At_Drought_P Parameter: Age (day) Value: 8
  misc_feature: MA Experiment 20000437 PARAMETER Experiment Name: At_Drought_P Parameter: Organism Value: A. thaliana
  misc_feature: MA Experiment 20000437 PARAMETER Experiment Name: At_Drought_P Parameter: Plant Line Value: WS
  misc_feature: MA Experiment 20000437 PARAMETER Experiment Name: At_Drought_P Parameter: Timepoint (hr) Value: 24
  misc_feature: MA Experiment 20000437 PARAMETER Experiment Name: At_Drought_P Parameter: Tissue Value: Whole Plant
  misc_feature: MA Experiment 20000437 PARAMETER Experiment Name: At_Drought_P Parameter: Treatment Value: Drought vs. No Drought
  misc_feature: MA Experiment ID: 20000794 Result: Down-regulated in Transcription
  misc_feature: MA Experiment 20000794 PARAMETER Experiment Name: At_Petals_P Parameter: Age (day) Value: 23-25 days
  misc_feature: MA Experiment 20000794 PARAMETER Experiment Name: At_Petals_P Parameter: Plant Line Value: WS
  misc_feature: MA Experiment 20000794 PARAMETER Experiment Name: At_Petals_P Parameter: Tissue Value: Petals vs. Whole plant
  misc_feature: MA Experiment ID: 20001451 Result: Down-regulated in Transcription
  misc_feature: MA Experiment 20001451 PARAMETER Experiment Name: At_Far-red-induction_P Parameter: Age (day) Value: 7
  misc_feature: MA Experiment 20001451 PARAMETER Experiment Name: At_Far-red-induction_P Parameter: Light Value: Far-red vs. White
  misc_feature: MA Experiment 20001451 PARAMETER Experiment Name: At_Far-red-induction_P Parameter: Organism Value: A. thaliana
  misc_feature: MA Experiment 20001451 PARAMETER Experiment Name: At_Far-red-induction_P Parameter: Plant Line Value: Columbia
  misc_feature: MA Experiment 20001451 PARAMETER Experiment Name: At_Far-red-induction_P Parameter: Timepoint (hr) Value: 24
  misc_feature: MA Experiment 20001451 PARAMETER Experiment Name: At_Far-red-induction_P Parameter: Tissue Value: Whole Plant
atggctaaagactttgcctccaagagacacaatagtttccactggacaagaaaagtcggatcagacgaaaacgacgacgtttcttctcataaacctcttcctcatcacaacaacactaaaccttcttcttcttcatcttcatcttcctctaatgtaatcactcacaaaaaaaagcttcaatctttcgccgtttctcgtctccggtcagttatcgctactctaagcagagcacgacccggtaaccaaaactccgggctcgggtcacgggtcgtgggtacacttttcgggtctcgtcgtggtcacgtgcatttctctatccagaaagatcctaattctccaccggcgtttttaatcgaactcgctactccgattagtgggttagtcaaagaaatggcttcaggactcgttagaatcgctttggagtgtgataaggggaaagaggaagaagaaggagaagaaaaaaacggaactttacgtcacggcggaggagacaagacgaagacgacgacgacggcggcggtttcacggcggttggtggaggagccgatgtggagaacttattgtaacgggaaaaagtgtggatttgctacgaggagagagtgtggtgagaaggagaaaaaggttttgaaagctcttgagatggtttcaatgggcgccggagtcttaccagagacggaggagataggcggtggtggcggcggcggaggagatataatgtatatgagggcgaaattcgagagaattgttgggtcgcgtgattcagaagccttctacatgatgaatcctgatagtaatggagctcctgagcttagtatctatctactcagaatctga

SEQ ID NO: 82606 - protein, 277 aa, Arabidopsis thaliana
  peptide (1)..(277): Ceres Seq. ID no. 12666489
  misc_feature (89)..(277): Pfam Name: Protein of unknown function, DUF617 Pfam Description: Protein of unknown function, DUF617
  misc_feature (1)..(277): Homolog of NCBI NO: 15237221 NR Description: putative protein; protein id: At5g23100.1 thaliana] >gi|9759368|dbj|BAB09827.1|
  misc_feature (7)..(141): Homolog of NCBI NO: 11994755 NR Description: gb|AAB84348.1~gene_id:T5M7.9~similar to unknown
  misc_feature (7)..(141): Homolog of NCBI NO: 15230862 NR Description: hypothetical protein; protein id: At3g25640.1 thaliana] >gi|27754407|gb|AAO22652.1| unknown protein
  misc_feature (176)..(277): Homolog of NCBI NO: 11994755 NR Description: gb|AAB84348.1~gene_id:T5M7.9~similar to unknown
  misc_feature (176)..(277): Homolog of NCBI NO: 15230862 NR Description: hypothetical protein; protein id: At3g25640.1 thaliana] >gi|27754407|gb|AAO22652.1| unknown protein
  misc_feature (63)..(277): Homolog of NCBI NO: 34911646 NR Description: P0039G05.26 [Oryza sativa (japonica
  misc_feature (177)..(277): Homolog of NCBI NO: 21593037 NR Description: unknown [Arabidopsis thaliana]
  misc_feature (83)..(144): Homolog of NCBI NO: 21593037 NR Description: unknown [Arabidopsis thaliana]
  misc_feature (177)..(277): Homolog of NCBI NO: 18405770 NR Description: expressed protein; protein id: At2g41660.1, by cDNA: 35456., supported by cDNA: gi_13569547 [Arabidopsis
  misc_feature (83)..(144): Homolog of NCBI NO: 18405770 NR Description: expressed protein; protein id: At2g41660.1, by cDNA: 35456., supported by cDNA: gi_13569547 [Arabidopsis
MAKDFASKRHNSFHWTRKVGSDENDDVSSHKPLPHHNNTKPSSSSSSSSSNVITHKKKLQSFAVSRLRSVIATLSRARPGNQNSGLGSRVVGTLFGSRRGHVHFSIQKDPNSPPAFLIELATPISGLVKEMASGLVRIALECDKGKEEEEGEEKNGTLRHGGGDKTKTTTTAAVSRRLVEEPMWRTYCNGKKCGFATRRECGEKEKKVLKALEMVSMGAGVLPETEEIGGGGGGGGDIMYMRAKFERIVGSRDSEAFYMMNPDSNGAPELSIYLLRI

SEQ ID NO: 82607 - protein, 147 aa, Arabidopsis thaliana
  peptide (1)..(147): Ceres Seq. ID no. 12666490
  misc_feature (1)..(147): Pfam Name: Protein of unknown function, DUF617 Pfam Description: Protein of unknown function, DUF617
  misc_feature (1)..(147): Homolog of NCBI NO: 15237221 NR Description: putative protein; protein id: At5g23100.1 thaliana] >gi|9759368|dbj|BAB09827.1|
  misc_feature (1)..(11): Homolog of NCBI NO: 11994755 NR Description: gb|AAB84348.1~gene_id:T5M7.9~similar to unknown
  misc_feature (1)..(11): Homolog of NCBI NO: 15230862 NR Description: hypothetical protein; protein id: At3g25640.1 thaliana] >gi|27754407|gb|AAO22652.1| unknown protein
  misc_feature (46)..(147): Homolog of NCBI NO: 11994755 NR Description: gb|AAB84348.1~gene_id:T5M7.9~similar to unknown
  misc_feature (46)..(147): Homolog of NCBI NO: 15230862 NR Description: hypothetical protein; protein id: At3g25640.1 thaliana] >gi|27754407|gb|AAO22652.1| unknown protein
  misc_feature (1)..(147): Homolog of NCBI NO: 34911646 NR Description: P0039G05.26 [Oryza sativa (japonica
  misc_feature (47)..(147): Homolog of NCBI NO: 21593037 NR Description: unknown [Arabidopsis thaliana]
  misc_feature (1)..(14): Homolog of NCBI NO: 21593037 NR Description: unknown [Arabidopsis thaliana]
  misc_feature (47)..(147): Homolog of NCBI NO: 18405770 NR Description: expressed protein; protein id: At2g41660.1, by cDNA: 35456., supported by cDNA: gi_13569547 [Arabidopsis
  misc_feature (1)..(14): Homolog of NCBI NO: 18405770 NR Description: expressed protein; protein id: At2g41660.1, by cDNA: 35456., supported by cDNA: gi_13569547 [Arabidopsis
MASGLVRIALECDKGKEEEEGEEKNGTLRHGGGDKTKTTTTAAVSRRLVEEPMWRTYCNGKKCGFATRRECGEKEKKVLKALEMVSMGAGVLPETEEIGGGGGGGGDIMYMRAKFERIVGSRDSEAFYMMNPDSNGAPELSIYLLRI

SEQ ID NO: 82608 - DNA, 2092 bp, Arabidopsis thaliana
  misc_feature (1)..(2092): Ceres Seq. ID no. 12666501
  misc_feature: MA Experiment ID: 20000171 Result: Up-regulated in Transcription
  misc_feature: MA Experiment 20000171 PARAMETER Experiment Name: At_42deg_Heat_P Parameter: Age (day) Value: 14
  misc_feature: MA Experiment 20000171 PARAMETER Experiment Name: At_42deg_Heat_P Parameter: Organism Value: A. thaliana
  misc_feature: MA Experiment 20000171 PARAMETER Experiment Name: At_42deg_Heat_P Parameter: Plant Line Value: WS
  misc_feature: MA Experiment 20000171 PARAMETER Experiment Name: At_42deg_Heat_P Parameter: Temperature (deg C) Value: 42 vs. 22
  misc_feature: MA Experiment 20000171 PARAMETER Experiment Name: At_42deg_Heat_P Parameter: Timepoint (hr) Value: 1
  misc_feature: MA Experiment 20000171 PARAMETER Experiment Name: At_42deg_Heat_P Parameter: Tissue Value: Aerial
  misc_feature: MA Experiment ID: 20000185 Result: Up-regulated in Transcription
  misc_feature: MA Experiment 20000185 PARAMETER Experiment Name: At_Roots__P Parameter: Age (day) Value: 7 vs. 21
  misc_feature: MA Experiment 20000185 PARAMETER Experiment Name: At_Roots__P Parameter: Organism Value: A. thaliana
  misc_feature: MA Experiment 20000185 PARAMETER Experiment Name: At_Roots__P Parameter: Tissue Value: Roots vs. Whole Plant
  misc_feature: MA Experiment ID: 20000439 Result: Up-regulated in Transcription
  misc_feature: MA Experiment 20000439 PARAMETER Experiment Name: At_Roots__P Parameter: Age (day) Value: 14 vs. 21
  misc_feature: MA Experiment 20000439 PARAMETER Experiment Name: At_Roots__P Parameter: Organism Value: A. thaliana
  misc_feature: MA Experiment 20000439 PARAMETER Experiment Name: At_Roots__P Parameter: Tissue Value: Roots vs. Whole Plant
  misc_feature: MA Experiment ID: 20001248 Result: Down-regulated in Transcription
  misc_feature: MA Experiment 20001248 PARAMETER Experiment Name: At_Far-red-induction_P Parameter: Age (day) Value: 7
  misc_feature: MA Experiment 20001248 PARAMETER Experiment Name: At_Far-red-induction_P Parameter: Light Value: Far-red vs. White
  misc_feature: MA Experiment 20001248 PARAMETER Experiment Name: At_Far-red-induction_P Parameter: Organism Value: A. thaliana
  misc_feature: MA Experiment 20001248 PARAMETER Experiment Name: At_Far-red-induction_P Parameter: Plant Line Value: Columbia
  misc_feature: MA Experiment 20001248 PARAMETER Experiment Name: At_Far-red-induction_P Parameter: Timepoint (hr) Value: 4
  misc_feature: MA Experiment 20001248 PARAMETER Experiment Name: At_Far-red-induction_P Parameter: Tissue Value: Whole Plant
  misc_feature: MA Experiment ID: 20001555 Result: Up-regulated in Transcription
  misc_feature: MA Experiment 20001555 PARAMETER Experiment Name: At_Drought_Soil_Dry_P Parameter: Age (day) Value: 24
  misc_feature: MA Experiment 20001555 PARAMETER Experiment Name: At_Drought_Soil_Dry_P Parameter: Organism Value: A. thaliana
  misc_feature: MA Experiment 20001555 PARAMETER Experiment Name: At_Drought_Soil_Dry_P Parameter: Plant Line Value: WS
  misc_feature: MA Experiment 20001555 PARAMETER Experiment Name: At_Drought_Soil_Dry_P Parameter: Post Timepoint (hr) Value: None
  misc_feature: MA Experiment 20001555 PARAMETER Experiment Name: At_Drought_Soil_Dry_P Parameter: Post-Treatment Value: None
  misc_feature: MA Experiment 20001555 PARAMETER Experiment Name: At_Drought_Soil_Dry_P Parameter: Timepoint (day) Value: 10
  misc_feature: MA Experiment 20001555 PARAMETER Experiment Name: At_Drought_Soil_Dry_P Parameter: Treatment Value: Drought vs. No Drought
  misc_feature: MA Experiment ID: 20001556 Result: Up-regulated in Transcription
  misc_feature: MA Experiment 20001556 PARAMETER Experiment Name: At_Drought_Soil_Dry_P Parameter: Age (day) Value: 26
  misc_feature: MA Experiment 20001556 PARAMETER Experiment Name: At_Drought_Soil_Dry_P Parameter: Organism Value: A. thaliana
  misc_feature: MA Experiment 20001556 PARAMETER Experiment Name: At_Drought_Soil_Dry_P Parameter: Plant Line Value: WS
  misc_feature: MA Experiment 20001556 PARAMETER Experiment Name: At_Drought_Soil_Dry_P Parameter: Post Timepoint (hr) Value: None
  misc_feature: MA Experiment 20001556 PARAMETER Experiment Name: At_Drought_Soil_Dry_P Parameter: Post-Treatment Value: None
  misc_feature: MA Experiment 20001556 PARAMETER Experiment Name: At_Drought_Soil_Dry_P Parameter: Timepoint (day) Value: 12
  misc_feature: MA Experiment 20001556 PARAMETER Experiment Name: At_Drought_Soil_Dry_P Parameter: Treatment Value: Drought vs. No Drought
  misc_feature: MA Experiment ID: 20001761 Result: Down-regulated in Transcription
  misc_feature: MA Experiment 20001761 PARAMETER Experiment Name: At_50mM_NH4NO3_L-to-H_P Parameter: Timepoint (hr) Value: 4
  misc_feature: MA Experiment 20001761 PARAMETER Experiment Name: At_50mM_NH4NO3_L-to-H_P Parameter: Tissue Value: Siliques
  misc_feature: MA Experiment 20001761 PARAMETER Experiment Name: At_50mM_NH4NO3_L-to-H_P Parameter: Treatment Value: 50mM NH4NO3 vs 100mM Mannitol
  misc_feature: MA Experiment ID: 20001904 Result: Up-regulated in Transcription
  misc_feature: MA Experiment 20001904 PARAMETER Experiment Name: At_Drought_Reproduction_P Parameter: Age (day) Value: 37
  misc_feature: MA Experiment 20001904 PARAMETER Experiment Name: At_Drought_Reproduction_P Parameter: Organism Value: A. thaliana
  misc_feature: MA Experiment 20001904 PARAMETER Experiment Name: At_Drought_Reproduction_P Parameter: Plant Line Value: WS
  misc_feature: MA Experiment 20001904 PARAMETER Experiment Name: At_Drought_Reproduction_P Parameter: Timepoint (day) Value: 7
  misc_feature: MA Experiment 20001904 PARAMETER Experiment Name: At_Drought_Reproduction_P Parameter: Tissue Value: Rosettes
  misc_feature: MA Experiment 20001904 PARAMETER Experiment Name: At_Drought_Reproduction_P Parameter: Treatment Value: Drought vs. No Drought
  misc_feature: MA Experiment ID: 20001905 Result: Up-regulated in Transcription
  misc_feature: MA Experiment 20001905 PARAMETER Experiment Name: At_Drought_Reproduction_P Parameter: Age (day) Value: 40
  misc_feature: MA Experiment 20001905 PARAMETER Experiment Name: At_Drought_Reproduction_P Parameter: Organism Value: A. thaliana
  misc_feature: MA Experiment 20001905 PARAMETER Experiment Name: At_Drought_Reproduction_P Parameter: Plant Line Value: WS
  misc_feature: MA Experiment 20001905 PARAMETER Experiment Name: At_Drought_Reproduction_P Parameter: Timepoint (day) Value: 10
  misc_feature: MA Experiment 20001905 PARAMETER Experiment Name: At_Drought_Reproduction_P Parameter: Tissue Value: Rosettes
  misc_feature: MA Experiment 20001905 PARAMETER Experiment Name: At_Drought_Reproduction_P Parameter: Treatment Value: Drought vs. No Drought
  misc_feature: MA Experiment ID: 20001906 Result: Up-regulated in Transcription
  misc_feature: MA Experiment 20001906 PARAMETER Experiment Name: At_Drought_Reproduction_P Parameter: Age (day) Value: 35
  misc_feature: MA Experiment 20001906 PARAMETER Experiment Name: At_Drought_Reproduction_P Parameter: Organism Value: A. thaliana
  misc_feature: MA Experiment 20001906 PARAMETER Experiment Name: At_Drought_Reproduction_P Parameter: Plant Line Value: WS
  misc_feature: MA Experiment 20001906 PARAMETER Experiment Name: At_Drought_Reproduction_P Parameter: Timepoint (day) Value: 5
  misc_feature: MA Experiment 20001906 PARAMETER Experiment Name: At_Drought_Reproduction_P Parameter: Tissue Value: Siliques
  misc_feature: MA Experiment 20001906 PARAMETER Experiment Name: At_Drought_Reproduction_P Parameter: Treatment Value: Drought vs. No Drought
  misc_feature: MA Experiment ID: 20001908 Result: Up-regulated in Transcription
  misc_feature: MA Experiment 20001908 PARAMETER Experiment Name: At_Drought_Reproduction_P Parameter: Age (day) Value: 40
  misc_feature: MA Experiment 20001908 PARAMETER Experiment Name: At_Drought_Reproduction_P Parameter: Organism Value: A. thaliana
  misc_feature: MA Experiment 20001908 PARAMETER Experiment Name: At_Drought_Reproduction_P Parameter: Plant Line Value: WS
  misc_feature: MA Experiment 20001908 PARAMETER Experiment Name: At_Drought_Reproduction_P Parameter: Timepoint (day) Value: 10
  misc_feature: MA Experiment 20001908 PARAMETER Experiment Name: At_Drought_Reproduction_P Parameter: Tissue Value: Siliques
  misc_feature: MA Experiment 20001908 PARAMETER Experiment Name: At_Drought_Reproduction_P Parameter: Treatment Value: Drought vs. No Drought
tttttgtctgctcaccaaatcaaaccaatttctcctgatagccaaagtttttgtccccaacaagaaactcatgcaacattcttcacccactagctaactaacgacttccattcttattaatctctctcaattcttcatttctgagattcatcgctctctcttctctttgtcacaatgaatttcaattcttcttacaatctcactttcaatgacgttttcttctcttcttcttcctccagtgaccctctggtttcacggaggctgtttctcttgagagatgttcagattcttgagctccttattgcaattttcgtctttgtcgcaatacatgccttgcgtcagaagaaataccaaggtcttcccgtgtggccgtttcttgggatgcttccttctctagcttttggcctcagaggaaacatatacgagtggctatccgatgttctatgtctccagaacggaactttccaattcagaggtccctggtttagcagcctcaacagcactatcacttgtgacccaagaaacgttgagcatctccttaagaaccggttttctgtcttccctaaaggttcttactttcgagacaatctccgagacctcctaggagatggaatattcaacgcggatgatgaaacttggcagaggcagaggaaaacagcgagcattgagtttcattcagccaaattcagacaattaaccactcaatctttgtttgagctcgtgcacaagaggctcttacctgttcttgagacatcggttaagagctcatctcctatcgatctacaagacgtcttgttgaggctaacgtttgataacgtatgtatgattgcttttggagtcgatccaggatgtctcggtccagatcaaccagtgattccttttgcgaaagcctttgaggatgcgactgaagctgcggttgtgagattcgtcatgcctacttgcgtgtggaagttcatgaggtatcttgatataggaacagagaagaagcttaaggaatcaataaagggtgtggatgatttcgctgatgaagttatcaggacgaggaagaaagaactgtctcttgagggcgaaactacaaaaagatcggatctcttaactgtgtttatgggtctgagagatgagaagggagagagtttttcagacaagtttcttcgtgatatctgtgtgaacttcatacttgctgggagagatacttcttctgtggctttgagctggtttttctggttgctagagaagaacccagaggtcgaagagaagatcatggtggagatgtgtaagattctgaggcagagagatgaccatggaaatgcagagaagagtgattatgaacctgtgtttggaccagaagagatcaagaagatggattatctacaagctgctttgtctgaagctcttagattgtatccttcagttcccgtggatcacaaagaggttcaagaagacgacgtatttcctgatggaactatgttgaagaagggagacaaagttatatacgcgatttacgcaatgggtcgtatggaagctatttggggaaaagactgtcttgagtttaggccagagaggtggctaagagacggacggttcatgagtgagtcggcctacaaattcacagcctttaacggtggtccacgcctttgtcttggcaaagattttgcctattatcagatgaaatctacggcggccgcaatagtttatcggtacaaggtgaaggtggtgaatggtcacaaggtggagccgaagttggcactcacaatgtacatgaaacatggtttgatggtgaacttgatcaataggagtgtctccgagatagatcaatactatgccaagtcttttgatgagggttatattaattagtgtttttaatgttttgaagatttgttaattgattaagttaatggtctaagaagattgtgtgcttacttttagttgatttgaatttttaaagtatgttttttgtgtccactttgttattagatgatgtgtacagtctatgggttatgtgtacgtggaaatgtggaggaagttgaatgggttatatatacttatattgataataaattaattacttggaattttaattttagtttctatc

SEQ ID NO: 82609 - protein, 559 aa, Arabidopsis thaliana
  peptide (1)..(559): Ceres Seq. ID no. 12666502
  misc_feature (1)..(559): Homolog of NCBI NO: 15237250 NR Description: cytochrome P450-like protein; protein id:
  misc_feature (1)..(549): Homolog of NCBI NO: 11249681 NR Description: cytochrome P450-like protein - Arabidopsis
  misc_feature (62)..(549): Homolog of NCBI NO: 30682301 NR Description: cytochrome P450 family [Arabidopsis thaliana]
  misc_feature (30)..(545): Homolog of NCBI NO: 37535524 NR Description: putative cytochrome P450 protein [Oryza sativa
  misc_feature (25)..(537): Homolog of NCBI NO: 15221776 NR Description: cytochrome P450, putative; protein id: At1g24540.1
  misc_feature (33)..(547): Homolog of NCBI NO: 15229477 NR Description: cytochrome P450, putative; protein id:
  misc_feature (17)..(544): Homolog of NCBI NO: 15222186 NR Description: cytochrome p450, putative; protein id: At1g13140.1
  misc_feature (38)..(544): Homolog of NCBI NO: 15222187 NR Description: cytochrome P450, putative; protein id: At1g13150.1
  misc_feature (38)..(544): Homolog of NCBI NO: 28393041 NR Description: putative cytochrome P450 [Arabidopsis thaliana]
  misc_feature (38)..(543): Homolog of NCBI NO: 15222515 NR Description: cytochrome P450, putative; protein id: supported by cDNA: 37538. [Arabidopsis thaliana]
MNFNSSYNLTFNDVFFSSSSSSDPLVSRRLFLLRDVQILELLIAIFVFVAIHALRQKKYQGLPVWPFLGMLPSLAFGLRGNIYEWLSDVLCLQNGTFQFRGPWFSSLNSTITCDPRNVEHLLKNRFSVFPKGSYFRDNLRDLLGDGIFNADDETWQRQRKTASIEFHSAKFRQLTTQSLFELVHKRLLPVLETSVKSSSPIDLQDVLLRLTFDNVCMIAFGVDPGCLGPDQPVIPFAKAFEDATEAAVVRFVMPTCVWKFMRYLDIGTEKKLKESIKGVDDFADEVIRTRKKELSLEGETTKRSDLLTVFMGLRDEKGESFSDKFLRDICVNFILAGRDTSSVALSWFFWLLEKNPEVEEKIMVEMCKILRQRDDHGNAEKSDYEPVFGPEEIKKMDYLQAALSEALRLYPSVPVDHKEVQEDDVFPDGTMLKKGDKVIYAIYAMGRMEAIWGKDCLEFRPERWLRDGRFMSESAYKFTAFNGGPRLCLGKDFAYYQMKSTAAAIVYRYKVKVVNGHKVEPKLALTMYMKHGLMVNLINRSVSEIDQYYAKSFDEGYIN

SEQ ID NO: 82610 - protein, 490 aa, Arabidopsis thaliana
  peptide (1)..(490): Ceres Seq. ID no. 12666503
  misc_feature (1)..(490): Homolog of NCBI NO: 15237250 NR Description: cytochrome P450-like protein; protein id:
  misc_feature (1)..(480): Homolog of NCBI NO: 11249681 NR Description: cytochrome P450-like protein - Arabidopsis
  misc_feature (1)..(480): Homolog of NCBI NO: 30682301 NR Description: cytochrome P450 family [Arabidopsis thaliana]
  misc_feature (1)..(476): Homolog of NCBI NO: 37535524 NR Description: putative cytochrome P450 protein [Oryza sativa
  misc_feature (1)..(468): Homolog of NCBI NO: 15221776 NR Description: cytochrome P450, putative; protein id: At1g24540.1
  misc_feature (1)..(478): Homolog of NCBI NO: 15229477 NR Description: cytochrome P450, putative; protein id:
  misc_feature (1)..(475): Homolog of NCBI NO: 15222186 NR Description: cytochrome p450, putative; protein id: At1g13140.1
  misc_feature (1)..(475): Homolog of NCBI NO: 15222187 NR Description: cytochrome P450, putative; protein id: At1g13150.1
  misc_feature (1)..(475): Homolog of NCBI NO: 28393041 NR Description: putative cytochrome P450 [Arabidopsis thaliana]
  misc_feature (1)..(474): Homolog of NCBI NO: 15222515 NR Description: cytochrome P450, putative; protein id: supported by cDNA: 37538. [Arabidopsis thaliana]
MLPSLAFGLRGNIYEWLSDVLCLQNGTFQFRGPWFSSLNSTITCDPRNVEHLLKNRFSVFPKGSYFRDNLRDLLGDGIFNADDETWQRQRKTASIEFHSAKFRQLTTQSLFELVHKRLLPVLETSVKSSSPIDLQDVLLRLTFDNVCMIAFGVDPGCLGPDQPVIPFAKAFEDATEAAVVRFVMPTCVWKFMRYLDIGTEKKLKESIKGVDDFADEVIRTRKKELSLEGETTKRSDLLTVFMGLRDEKGESFSDKFLRDICVNFILAGRDTSSVALSWFFWLLEKNPEVEEKIMVEMCKILRQRDDHGNAEKSDYEPVFGPEEIKKMDYLQAALSEALRLYPSVPVDHKEVQEDDVFPDGTMLKKGDKVIYAIYAMGRMEAIWGKDCLEFRPERWLRDGRFMSESAYKFTAFNGGPRLCLGKDFAYYQMKSTAAAIVYRYKVKVVNGHKVEPKLALTMYMKHGLMVNLINRSVSEIDQYYAKSFDEGYIN

SEQ ID NO: 82611 - protein, 343 aa, Arabidopsis thaliana
  peptide (1)..(343): Ceres Seq. ID no. 12666504
  misc_feature (1)..(343): Homolog of NCBI NO: 15237250 NR Description: cytochrome P450-like protein; protein id:
  misc_feature (1)..(333): Homolog of NCBI NO: 11249681 NR Description: cytochrome P450-like protein - Arabidopsis
  misc_feature (1)..(333): Homolog of NCBI NO: 30682301 NR Description: cytochrome P450 family [Arabidopsis thaliana]
  misc_feature (1)..(329): Homolog of NCBI NO: 37535524 NR Description: putative cytochrome P450 protein [Oryza sativa
  misc_feature (1)..(321): Homolog of NCBI NO: 15221776 NR Description: cytochrome P450, putative; protein id: At1g24540.1
  misc_feature (1)..(331): Homolog of NCBI NO: 15229477 NR Description: cytochrome P450, putative; protein id:
  misc_feature (1)..(328): Homolog of NCBI NO: 15222186 NR Description: cytochrome p450, putative; protein id: At1g13140.1
  misc_feature (1)..(328): Homolog of NCBI NO: 15222187 NR Description: cytochrome P450, putative; protein id: At1g13150.1
  misc_feature (1)..(328): Homolog of NCBI NO: 28393041 NR Description: putative cytochrome P450 [Arabidopsis thaliana]
  misc_feature (1)..(327): Homolog of NCBI NO: 15222515 NR Description: cytochrome P450, putative; protein id: supported by cDNA: 37538. [Arabidopsis thaliana]
MIAFGVDPGCLGPDQPVIPFAKAFEDATEAAVVRFVMPTCVWKFMRYLDIGTEKKLKESIKGVDDFADEVIRTRKKELSLEGETTKRSDLLTVFMGLRDEKGESFSDKFLRDICVNFILAGRDTSSVALSWFFWLLEKNPEVEEKIMVEMCKILRQRDDHGNAEKSDYEPVFGPEEIKKMDYLQAALSEALRLYPSVPVDHKEVQEDDVFPDGTMLKKGDKVIYAIYAMGRMEAIWGKDCLEFRPERWLRDGRFMSESAYKFTAFNGGPRLCLGKDFAYYQMKSTAAAIVYRYKVKVVNGHKVEPKLALTMYMKHGLMVNLINRSVSEIDQYYAKSFDEGYIN

SEQ ID NO: 82612 - DNA, 1692 bp, Arabidopsis thaliana
  misc_feature (1)..(1692): Ceres Seq. ID no. 12666541
  misc_feature: MA Experiment ID: 20000185 Result: Up-regulated in Transcription
  misc_feature: MA Experiment 20000185 PARAMETER Experiment Name: At_Roots__P Parameter: Age (day) Value: 7 vs. 21
  misc_feature: MA Experiment 20000185 PARAMETER Experiment Name: At_Roots__P Parameter: Organism Value: A. thaliana
  misc_feature: MA Experiment 20000185 PARAMETER Experiment Name: At_Roots__P Parameter: Tissue Value: Roots vs. Whole Plant
  misc_feature: MA Experiment ID: 20000234 Result: Up-regulated in Transcription
  misc_feature: MA Experiment 20000234 PARAMETER Experiment Name: At_Siliques_P Parameter: Age (day) Value: 21
  misc_feature: MA Experiment 20000234 PARAMETER Experiment Name: At_Siliques_P Parameter: Organism Value: A. thaliana
  misc_feature: MA Experiment 20000234 PARAMETER Experiment Name: At_Siliques_P Parameter: Plant Line Value: WS
  misc_feature: MA Experiment 20000234 PARAMETER Experiment Name: At_Siliques_P Parameter: Tissue Value: Less Than 5mm Siliques vs. Whole Plant
  misc_feature: MA Experiment ID: 20000235 Result: Up-regulated in Transcription
  misc_feature: MA Experiment 20000235 PARAMETER Experiment Name: At_Siliques_P Parameter: Age (day) Value: 21
  misc_feature: MA Experiment 20000235 PARAMETER Experiment Name: At_Siliques_P Parameter: Organism Value: A. thaliana
  misc_feature: MA Experiment 20000235 PARAMETER Experiment Name: At_Siliques_P Parameter: Plant Line Value: WS
  misc_feature: MA Experiment 20000235 PARAMETER Experiment Name: At_Siliques_P Parameter: Tissue Value: 5-10mm Siliques vs. Whole Plant
  misc_feature: MA Experiment ID: 20000264 Result: Up-regulated in Transcription
  misc_feature: MA Experiment 20000264 PARAMETER Experiment Name: At_Open_Flower_P Parameter: Age (day) Value: 21
  misc_feature: MA Experiment 20000264 PARAMETER Experiment Name: At_Open_Flower_P Parameter: Plant Line Value: WS
  misc_feature: MA Experiment 20000264 PARAMETER Experiment Name: At_Open_Flower_P Parameter: Tissue Value: Open Flower vs. Whole Plant
  misc_feature: MA Experiment ID: 20000265 Result: Up-regulated in Transcription
  misc_feature: MA Experiment 20000265 PARAMETER Experiment Name: At_Open_Flower_P Parameter: Age (day) Value: 21
  misc_feature: MA Experiment 20000265 PARAMETER Experiment Name: At_Open_Flower_P Parameter: Plant Line Value: WS
  misc_feature: MA Experiment 20000265 PARAMETER Experiment Name: At_Open_Flower_P Parameter: Tissue Value: Closed Flower vs. Whole Plant
  misc_feature: MA Experiment ID: 20000286 Result: Up-regulated in Transcription
  misc_feature: MA Experiment 20000286 PARAMETER Experiment Name: At_Open_Flower_P Parameter: Age (day) Value: 21
  misc_feature: MA Experiment 20000286 PARAMETER Experiment Name: At_Open_Flower_P Parameter: Plant Line Value: WS
  misc_feature: MA Experiment 20000286 PARAMETER Experiment Name: At_Open_Flower_P Parameter: Tissue Value: Half Open vs. Whole Plant
  misc_feature: MA Experiment ID: 20000439 Result: Up-regulated in Transcription
  misc_feature: MA Experiment 20000439 PARAMETER Experiment Name: At_Roots__P Parameter: Age (day) Value: 14 vs. 21
  misc_feature: MA Experiment 20000439 PARAMETER Experiment Name: At_Roots__P Parameter: Organism Value: A. thaliana
  misc_feature: MA Experiment 20000439 PARAMETER Experiment Name: At_Roots__P Parameter: Tissue Value: Roots vs. Whole Plant
  misc_feature: MA Experiment ID: 20000794 Result: Up-regulated in Transcription
  misc_feature: MA Experiment 20000794 PARAMETER Experiment Name: At_Petals_P Parameter: Age (day) Value: 23-25 days
  misc_feature: MA Experiment 20000794 PARAMETER Experiment Name: At_Petals_P Parameter: Plant Line Value: WS
  misc_feature: MA Experiment 20000794 PARAMETER Experiment Name: At_Petals_P Parameter: Tissue Value: Petals vs. Whole plant
  misc_feature: MA Experiment ID: 20001248 Result: Down-regulated in Transcription
  misc_feature: MA Experiment 20001248 PARAMETER Experiment Name: At_Far-red-induction_P Parameter: Age (day) Value: 7
  misc_feature: MA Experiment 20001248 PARAMETER Experiment Name: At_Far-red-induction_P Parameter: Light Value: Far-red vs. White
  misc_feature: MA Experiment 20001248 PARAMETER Experiment Name: At_Far-red-induction_P Parameter: Organism Value: A. thaliana
  misc_feature: MA Experiment 20001248 PARAMETER Experiment Name: At_Far-red-induction_P Parameter: Plant Line Value: Columbia
  misc_feature: MA Experiment 20001248 PARAMETER Experiment Name: At_Far-red-induction_P Parameter: Timepoint (hr) Value: 4
  misc_feature: MA Experiment 20001248 PARAMETER Experiment Name: At_Far-red-induction_P Parameter: Tissue Value: Whole Plant
acgaaaccctcaaagaaataaaaaaaagctctcaagaatggcgaacaaaccaagaaccagatgggttcttccttacaagaccaaaaacgttgaagacaattactttcttggtcaagtccttggacaaggccaattcggaaccactttcctctgtacccataaacagacaggtcaaaagcttgcctgcaaatccatacccaaaaggaagctcctttgtcaagaagattacgacgacgttctgagagagatccagataatgcatcacttgtctgaataccccaacgttgtccgtatagagagtgcgtacgaggacaccaaaaacgtgcatcttgtgatggagctttgtgaaggaggtgagttgtttgatagaattgtgaagagaggtcattacagtgaaagagaagctgctaagcttatcaagaccattgttggggttgttgaggcgtgtcactctcttggtgttgttcatagagatcttaagcctgagaatttcttgttttcttcttctgatgaagatgcttctcttaaatctactgactttggcctctctgttttctgcacaccaggagaagcattttcggaactcgttggtagtgcttactatgtggcacctgaggttttacataagcattatggtcctgaatgtgacgtatggagtgctggagttatcctctacattctcttatgtggttttcctcctttttgggctgagagtgaaataggcatcttcaggaagattttacagggaaagttggagtttgagatcaatccttggcctagcatttcagagagtgccaaagatcttataaagaaaatgcttgaaagcaatcctaaaaagaggctaactgctcatcaagtgttgtgtcatccgtggattgtggatgataaggttgctccagataaacctttggactgcgcggtagtgtcccgcctgaagaagttctctgcaatgaacaaacttaagaagatggctttacgagttattgcagagagactatctgaggaagaaatcggtggtctcaaagaactgttcaaaatgatagacacagataaaagtgggactatcacgtttgaagagttaaaagatagtatgagacgtgttgggtcagagcttatggaatcagagatccaagaactcttgcgtgcggctgatgttgatgagagtggaacaattgactatggagagttcttagctgcaacaatccacttgaacaagctggagagagaggagaatctagtagctgcattctctttctttgataaggatgcaagtggttacatcactatcgaagagcttcaacaggcatggaaggagtttggtataaacgattctaatcttgatgaaatgatcaaagacattgatcaagataatgatggacaaatagactatggagaatttgtggcaatgatgaggaaaggaaatggcactggaggagggattggtcggagaactatgaggaactctctcaactttggaactactcttcctgatgagtctatgaatgtctgaagtactcatttttagtgaaaataatttagcgactttatggagcaaaacatgtcatatgatacaacttgctgtttctgcttactctaattctgcttttaacaactcttagtaattgaaattgtaagctctcaacaatttgtagaattttcccatggattttaccatatctcagagctttagag

SEQ ID NO: 82613 - protein, 502 aa, Arabidopsis thaliana
  peptide (1)..(502): Ceres Seq. ID no. 12666542
  misc_feature (34)..(292): Pfam Name: Protein kinase domain Pfam Description: Protein kinase domain
  misc_feature (13)..(502): Homolog of NCBI NO: 15237791 NR Description: calcium-dependent protein kinase (pir||S71196); id: At5g23580.1, supported by cDNA: gi_836937 [Arabidopsis
  misc_feature (13)..(502): Homolog of NCBI NO: 7428006 NR Description: calcium-dependent protein kinase (EC 2.7.1.-) 9 -
  misc_feature (16)..(495): Homolog of NCBI NO: 15289760 NR Description: calcium dependent protein kinase [Solanum
RNPQRNKKKLSRMANKPRTRWVLPYKTKNVEDNYFLGQVLGQGQFGTTFLCTHKQTGQKLACKSIPKRKLLCQEDYDDVLREIQIMHHLSEYPNVVRIESAYEDTKNVHLVMELCEGGELFDRIVKRGHYSEREAAKLIKTIVGVVEACHSLGVVHRDLKPENFLFSSSDEDASLKSTDFGLSVFCTPGEAFSELVGSAYYVAPEVLHKHYGPECDVWSAGVILYILLCGFPPFWAESEIGIFRKILQGKLEFEINPWPSISESAKDLIKKMLESNPKKRLTAHQVLCHPWIVDDKVAPDKPLDCAVVSRLKKFSAMNKLKKMALRVIAERLSEEEIGGLKELFKMIDTDKSGTITFEELKDSMRRVGSELMESEIQELLRAADVDESGTIDYGEFLAATIHLNKLEREENLVAAFSFFDKDASGYITIEELQQAWKEFGINDSNLDEMIKDIDQDNDGQIDYGEFVAMMRKGNGTGGGIGRRTMRNSLNFGTTLPDESMNV

SEQ ID NO: 82614 - protein, 490 aa, Arabidopsis thaliana
  peptide (1)..(490): Ceres Seq. ID no. 12666543
  misc_feature (22)..(280): Pfam Name: Protein kinase domain Pfam Description: Protein kinase domain
  misc_feature (1)..(490): Homolog of NCBI NO: 15237791 NR Description: calcium-dependent protein kinase (pir||S71196); id: At5g23580.1, supported by cDNA: gi_836937 [Arabidopsis
  misc_feature (1)..(490): Homolog of NCBI NO: 7428006 NR Description: calcium-dependent protein kinase (EC 2.7.1.-) 9 -
  misc_feature (4)..(483): Homolog of NCBI NO: 15289760 NR Description: calcium dependent protein kinase [Solanum
MANKPRTRWVLPYKTKNVEDNYFLGQVLGQGQFGTTFLCTHKQTGQKLACKSIPKRKLLCQEDYDDVLREIQIMHHLSEYPNVVRIESAYEDTKNVHLVMELCEGGELFDRIVKRGHYSEREAAKLIKTIVGVVEACHSLGVVHRDLKPENFLFSSSDEDASLKSTDFGLSVFCTPGEAFSELVGSAYYVAPEVLHKHYGPECDVWSAGVILYILLCGFPPFWAESEIGIFRKILQGKLEFEINPWPSISESAKDLIKKMLESNPKKRLTAHQVLCHPWIVDDKVAPDKPLDCAVVSRLKKFSAMNKLKKMALRVIAERLSEEEIGGLKELFKMIDTDKSGTITFEELKDSMRRVGSELMESEIQELLRAADVDESGTIDYGEFLAATIHLNKLEREENLVAAFSFFDKDASGYITIEELQQAWKEFGINDSNLDEMIKDIDQDNDGQIDYGEFVAMMRKGNGTGGGIGRRTMRNSLNFGTTLPDESMNV

SEQ ID NO: 82615 - protein, 417 aa, Arabidopsis thaliana
  peptide (1)..(417): Ceres Seq. ID no. 12666544
  misc_feature (1)..(207): Pfam Name: Protein kinase domain Pfam Description: Protein kinase domain
  misc_feature (1)..(417): Homolog of NCBI NO: 15237791 NR Description: calcium-dependent protein kinase (pir||S71196); id: At5g23580.1, supported by cDNA: gi_836937 [Arabidopsis
  misc_feature (1)..(417): Homolog of NCBI NO: 7428006 NR Description: calcium-dependent protein kinase (EC 2.7.1.-) 9 -
  misc_feature (1)..(410): Homolog of NCBI NO: 15289760 NR Description: calcium dependent protein kinase [Solanum
MHHLSEYPNVVRIESAYEDTKNVHLVMELCEGGELFDRIVKRGHYSEREAAKLIKTIVGVVEACHSLGVVHRDLKPENFLFSSSDEDASLKSTDFGLSVFCTPGEAFSELVGSAYYVAPEVLHKHYGPECDVWSAGVILYILLCGFPPFWAESEIGIFRKILQGKLEFEINPWPSISESAKDLIKKMLESNPKKRLTAHQVLCHPWIVDDKVAPDKPLDCAVVSRLKKFSAMNKLKKMALRVIAERLSEEEIGGLKELFKMIDTDKSGTITFEELKDSMRRVGSELMESEIQELLRAADVDESGTIDYGEFLAATIHLNKLEREENLVAAFSFFDKDASGYITIEELQQAWKEFGINDSNLDEMIKDIDQDNDGQIDYGEFVAMMRKGNGTGGGIGRRTMRNSLNFGTTLPDESMNV

SEQ ID NO: 82616 - DNA, 1014 bp, Arabidopsis thaliana
  misc_feature (1)..(1014): Ceres Seq. ID no. 12666549
atgaatttaggacaggaaattagtgtcggatcgtcttggagcaaggatgatgatattgctttcgagaaagcccttgcaatttataacgataaaacagagattcgttggaaaaaaattgctacagttgttccgggaaaaactttagaacaagttatagagcattacaacattttagctcgtgatgttatgttgattgaatctggatgtgtacgtcttccagattatgatgattttttagaagaaccaaatcacaatgcttttggtaaagaaagaagcatattggaaggtggcaacgatcgcaaatatgagtctaaacacaaaggtaaatcaaaactaaagcaaaaacgacgaaggggtgttccttggaagccttttgaacacagacaatttctgcatggtttgaaaaaatatgggaaaggtgattggcgtagtatttctcgtcactgtgtagtgacaagaacatcaactcaggttgcaagtcatgctcaaaaatactttgcacatatcaactcagaggataaaaagagaaagaggccaagcattcatgacatcactattgcggaaaacaaaagtatctcaacaaaacaaagaccaatcacatggcaaaaaataaacaacaatggtgctactgcttccaacactcaagccaatcaaaccactttgcaaccatcacttgacattcctatatatggtacacacaacaacatatggaatgcacaagccactcaagtcatttcacagccatcacaaaaccatcctacatatgatgcacccatcatatggaacacacaagtcgcttcgcaaccatcggccaatattcctatgtatggaacgtccaccataagtcaaccaatggttggaccaatgctctcaccttttggaacaaacttgaaccacttggctccatctcatatgacttctggagttcaacatgattcagtaccttactactcaggtcctagtgcaccgatcaacatggattcaataccatacaacattgacttatataactag

SEQ ID NO: 82617 - protein, 337 aa, Arabidopsis thaliana
  peptide (1)..(337): Ceres Seq. ID no. 12666550
  misc_feature (119)..(166): Pfam Name: Myb-like DNA-binding domain Pfam Description: Myb-like DNA-binding domain
  misc_feature (1)..(337): Homolog of NCBI NO: 15237801 NR Description: putative protein; protein id: At5g23650.1
  misc_feature (5)..(300): Homolog of NCBI NO: 15241652 NR Description: putative protein; protein id: At5g08520.1, by cDNA: gi_18175699, supported by cDNA: gi_20465998 [Arabidopsis
MNLGQEISVGSSWSKDDDIAFEKALAIYNDKTEIRWKKIATVVPGKTLEQVIEHYNILARDVMLIESGCVRLPDYDDFLEEPNHNAFGKERSILEGGNDRKYESKHKGKSKLKQKRRRGVPWKPFEHRQFLHGLKKYGKGDWRSISRHCVVTRTSTQVASHAQKYFAHINSEDKKRKRPSIHDITIAENKSISTKQRPITWQKINNNGATASNTQANQTTLQPSLDIPIYGTHNNIWNAQATQVISQPSQNHPTYDAPIIWNTQVASQPSANIPMYGTSTISQPMVGPMLSPFGTNLNHLAPSHMTSGVQHDSVPYYSGPSAPINMDSIPYNIDLYN

SEQ ID NO: 82618 - protein, 275 aa, Arabidopsis thaliana
  peptide (1)..(275): Ceres Seq. ID no. 12666551
  misc_feature (57)..(104): Pfam Name: Myb-like DNA-binding domain Pfam Description: Myb-like DNA-binding domain
  misc_feature (1)..(275): Homolog of NCBI NO: 15237801 NR Description: putative protein; protein id: At5g23650.1
  misc_feature (1)..(238): Homolog of NCBI NO: 15241652 NR Description: putative protein; protein id: At5g08520.1, by cDNA: gi_18175699, supported by cDNA: gi_20465998 [Arabidopsis
MLIESGCVRLPDYDDFLEEPNHNAFGKERSILEGGNDRKYESKHKGKSKLKQKRRRGVPWKPFEHRQFLHGLKKYGKGDWRSISRHCVVTRTSTQVASHAQKYFAHINSEDKKRKRPSIHDITIAENKSISTKQRPITWQKINNNGATASNTQANQTTLQPSLDIPIYGTHNNIWNAQATQVISQPSQNHPTYDAPIIWNTQVASQPSANIPMYGTSTISQPMVGPMLSPFGTNLNHLAPSHMTSGVQHDSVPYYSGPSAPINMDSIPYNIDLYN

SEQ ID NO: 82619 - DNA, 645 bp, Arabidopsis thaliana
  misc_feature (1)..(645): Ceres Seq. ID no. 12666587
  misc_feature: MA Experiment ID: 20000169 Result: Up-regulated in Transcription
  misc_feature: MA Experiment 20000169 PARAMETER Experiment Name: At_100uM_ABA_P Parameter: Age (day) Value: 14
  misc_feature: MA Experiment 20000169 PARAMETER Experiment Name: At_100uM_ABA_P Parameter: Organism Value: A. thaliana
  misc_feature: MA Experiment 20000169 PARAMETER Experiment Name: At_100uM_ABA_P Parameter: Plant Line Value: WS
  misc_feature: MA Experiment 20000169 PARAMETER Experiment Name: At_100uM_ABA_P Parameter: Timepoint (hr) Value: 6
  misc_feature: MA Experiment 20000169 PARAMETER Experiment Name: At_100uM_ABA_P Parameter: Tissue Value: Aerial
  misc_feature: MA Experiment 20000169 PARAMETER Experiment Name: At_100uM_ABA_P Parameter: Treatment Value: 100uM ABA vs. No Treatment
  misc_feature: MA Experiment ID: 20000171 Result: Down-regulated in Transcription
  misc_feature: MA Experiment 20000171 PARAMETER Experiment Name: At_42deg_Heat_P Parameter: Age (day) Value: 14
  misc_feature: MA Experiment 20000171 PARAMETER Experiment Name: At_42deg_Heat_P Parameter: Organism Value: A. thaliana
  misc_feature: MA Experiment 20000171 PARAMETER Experiment Name: At_42deg_Heat_P Parameter: Plant Line Value: WS
  misc_feature: MA Experiment 20000171 PARAMETER Experiment Name: At_42deg_Heat_P Parameter: Temperature (deg C) Value: 42 vs. 22
  misc_feature: MA Experiment 20000171 PARAMETER Experiment Name: At_42deg_Heat_P Parameter: Timepoint (hr) Value: 1
  misc_feature: MA Experiment 20000171 PARAMETER Experiment Name: At_42deg_Heat_P Parameter: Tissue Value: Aerial
  misc_feature: MA Experiment ID: 20000180 Result: Up-regulated in Transcription
  misc_feature: MA Experiment 20000180 PARAMETER Experiment Name: At_Germinating_Seeds_P Parameter: Age (hr) Value: 24 vs. 0
  misc_feature: MA Experiment 20000180 PARAMETER Experiment Name: At_Germinating_Seeds_P Parameter: Tissue Value: Germinating Seeds
  misc_feature: MA Experiment ID: 20000184 Result: Up-regulated in Transcription
  misc_feature: MA Experiment 20000184 PARAMETER Experiment Name: At_Shoots__P Parameter: Age (day) Value: 7
  misc_feature: MA Experiment 20000184 PARAMETER Experiment Name: At_Shoots__P Parameter: Tissue Value: Shoots vs. Whole Plant
  misc_feature: MA Experiment ID: 20000234 Result: Up-regulated in Transcription
  misc_feature: MA Experiment 20000234 PARAMETER Experiment Name: At_Siliques_P Parameter: Age (day) Value: 21
  misc_feature: MA Experiment 20000234 PARAMETER Experiment Name: At_Siliques_P Parameter: Organism Value: A. thaliana
  misc_feature: MA Experiment 20000234 PARAMETER Experiment Name: At_Siliques_P Parameter: Plant Line Value: WS
  misc_feature: MA Experiment 20000234 PARAMETER Experiment Name: At_Siliques_P Parameter: Tissue Value: Less Than 5mm Siliques vs. Whole Plant
  misc_feature: MA Experiment ID: 20000235 Result: Up-regulated in Transcription
  misc_feature: MA Experiment 20000235 PARAMETER Experiment Name: At_Siliques_P Parameter: Age (day) Value: 21
  misc_feature: MA Experiment 20000235 PARAMETER Experiment Name: At_Siliques_P Parameter: Organism Value: A. thaliana
  misc_feature: MA Experiment 20000235 PARAMETER Experiment Name: At_Siliques_P Parameter: Plant Line Value: WS
  misc_feature: MA Experiment 20000235 PARAMETER Experiment Name: At_Siliques_P Parameter: Tissue Value: 5-10mm Siliques vs. Whole Plant
  misc_feature: MA Experiment ID: 20000264 Result: Up-regulated in Transcription
  misc_feature: MA Experiment 20000264 PARAMETER Experiment Name: At_Open_Flower_P Parameter: Age (day) Value: 21
  misc_feature: MA Experiment 20000264 PARAMETER Experiment Name: At_Open_Flower_P Parameter: Plant Line Value: WS
  misc_feature: MA Experiment 20000264 PARAMETER Experiment Name: At_Open_Flower_P Parameter: Tissue Value: Open Flower vs. Whole Plant
  misc_feature: MA Experiment ID: 20000265 Result: Up-regulated in Transcription
  misc_feature: MA Experiment 20000265 PARAMETER Experiment Name: At_Open_Flower_P Parameter: Age (day) Value: 21
  misc_feature: MA Experiment 20000265 PARAMETER Experiment Name: At_Open_Flower_P Parameter: Plant Line Value: WS
  misc_feature: MA Experiment 20000265 PARAMETER Experiment Name: At_Open_Flower_P Parameter: Tissue Value: Closed Flower vs. Whole Plant
  misc_feature: MA Experiment ID: 20000267 Result: Up-regulated in Transcription
  misc_feature: MA Experiment 20000267 PARAMETER Experiment Name: At_Drought_P Parameter: Age (day) Value: 7
  misc_feature: MA Experiment 20000267 PARAMETER Experiment Name: At_Drought_P Parameter: Organism Value: A. thaliana
  misc_feature: MA Experiment 20000267 PARAMETER Experiment Name: At_Drought_P Parameter: Plant Line Value: WS
  misc_feature: MA Experiment 20000267 PARAMETER Experiment Name: At_Drought_P Parameter: Timepoint (hr) Value: 6
  misc_feature: MA Experiment 20000267 PARAMETER Experiment Name: At_Drought_P Parameter: Tissue Value: Whole Plant
  misc_feature: MA Experiment 20000267 PARAMETER Experiment Name: At_Drought_P Parameter: Treatment Value: Drought vs. No Drought
  misc_feature: MA Experiment ID: 20000268 Result: Up-regulated in Transcription
  misc_feature: MA Experiment 20000268 PARAMETER Experiment Name: At_100mM_NaCl__P Parameter: Age (day) Value: 14
  misc_feature: MA Experiment 20000268 PARAMETER Experiment Name: At_100mM_NaCl__P Parameter: Organism Value: A. thaliana
  misc_feature: MA Experiment 20000268 PARAMETER Experiment Name: At_100mM_NaCl__P Parameter: Plant Line Value: WS
  misc_feature: MA Experiment 20000268 PARAMETER Experiment Name: At_100mM_NaCl__P Parameter: Timepoint (hr) Value: 6
  misc_feature: MA Experiment 20000268 PARAMETER Experiment Name: At_100mM_NaCl__P Parameter: Tissue Value: Whole Plant
  misc_feature: MA Experiment 20000268 PARAMETER Experiment Name: At_100mM_NaCl__P Parameter: Treatment Value: 100mM NaCl vs. No Treatment
  misc_feature: MA Experiment ID: 20000286 Result: Up-regulated in Transcription
  misc_feature: MA Experiment 20000286 PARAMETER Experiment Name: At_Open_Flower_P Parameter: Age (day) Value: 21
  misc_feature: MA Experiment 20000286 PARAMETER Experiment Name: At_Open_Flower_P Parameter: Plant Line Value: WS
  misc_feature: MA Experiment 20000286 PARAMETER Experiment Name: At_Open_Flower_P Parameter: Tissue Value: Half Open vs. Whole Plant
  misc_feature: MA Experiment ID: 20000308 Result: Up-regulated in Transcription
  misc_feature: MA Experiment 20000308 PARAMETER Experiment Name: At_100mM_NaCl__P Parameter: Age (day) Value: 17
  misc_feature: MA Experiment 20000308 PARAMETER Experiment Name: At_100mM_NaCl__P Parameter: Organism Value: A. thaliana
  misc_feature: MA Experiment 20000308 PARAMETER Experiment Name: At_100mM_NaCl__P Parameter: Plant Line Value: WS
  misc_feature: MA Experiment 20000308 PARAMETER Experiment Name: At_100mM_NaCl__P Parameter: Timepoint (hr) Value: 72
  misc_feature: MA Experiment 20000308 PARAMETER Experiment Name: At_100mM_NaCl__P Parameter: Tissue Value: Whole Plant
  misc_feature: MA Experiment 20000308 PARAMETER Experiment Name: At_100mM_NaCl__P Parameter: Treatment Value: 100mM NaCl vs. No Treatment
  misc_feature: MA Experiment ID: 20000438 Result: Up-regulated in Transcription
  misc_feature: MA Experiment 20000438 PARAMETER Experiment Name: At_Shoots__P Parameter: Age (day) Value: 14
  misc_feature: MA Experiment 20000438 PARAMETER Experiment Name: At_Shoots__P Parameter: Tissue Value: Shoots vs. Whole Plant
  misc_feature: MA Experiment ID: 20000441 Result: Down-regulated in Transcription
  misc_feature: MA Experiment 20000441 PARAMETER Experiment Name: At_1uM_BR-BRZ__P Parameter: Tissue Value: Shoot Apices
  misc_feature: MA Experiment 20000441 PARAMETER Experiment Name: At_1uM_BR-BRZ__P Parameter: Treatment Value: 1uM BR vs. No Treatment
  misc_feature: MA Experiment ID: 20000506 Result: Up-regulated in Transcription
  misc_feature: MA Experiment 20000506 PARAMETER Experiment Name: At_Wounding_P Parameter: Organism Value: A. thaliana
  misc_feature: MA Experiment 20000506 PARAMETER Experiment Name: At_Wounding_P Parameter: Plant Line Value: WS
  misc_feature: MA Experiment 20000506 PARAMETER Experiment Name: At_Wounding_P Parameter: Timepoint (hr) Value: 6
  misc_feature: MA Experiment 20000506 PARAMETER Experiment Name: At_Wounding_P Parameter: Tissue Value: Aerial
  misc_feature: MA Experiment 20000506 PARAMETER Experiment Name: At_Wounding_P Parameter: Treatment Value: Wounding vs. No Wounding
  misc_feature: MA Experiment ID: 20000573 Result: Down-regulated in Transcription
  misc_feature: MA Experiment 20000573 PARAMETER Experiment Name: At_100uM_ABA_Mutants__P Parameter: Organism Value: A. thaliana
  misc_feature: MA Experiment 20000573 PARAMETER Experiment Name: At_100uM_ABA_Mutants__P Parameter: Plant Line Value: CS22 vs. Ler wt
  misc_feature: MA Experiment 20000573 PARAMETER Experiment Name: At_100uM_ABA_Mutants__P Parameter: Timepoint (hr) Value: N/A
  misc_feature: MA Experiment 20000573 PARAMETER Experiment Name: At_100uM_ABA_Mutants__P Parameter: Tissue Value: Whole Plant
  misc_feature: MA Experiment 20000573 PARAMETER Experiment Name: At_100uM_ABA_Mutants__P Parameter: Treatment Value: None
  misc_feature: MA Experiment ID: 20000574 Result: Down-regulated in Transcription
  misc_feature: MA Experiment 20000574 PARAMETER Experiment Name: At_100uM_ABA_Mutants__P Parameter: Organism Value: A. thaliana
  misc_feature: MA Experiment 20000574 PARAMETER Experiment Name: At_100uM_ABA_Mutants__P Parameter: Plant Line Value: CS23 vs. Ler wt
  misc_feature: MA Experiment 20000574 PARAMETER Experiment Name: At_100uM_ABA_Mutants__P Parameter: Timepoint (hr) Value: N/A
  misc_feature: MA Experiment 20000574 PARAMETER Experiment Name: At_100uM_ABA_Mutants__P Parameter: Tissue Value: Whole Plant
  misc_feature: MA Experiment 20000574 PARAMETER Experiment Name: At_100uM_ABA_Mutants__P Parameter: Treatment Value: None
  misc_feature: MA Experiment ID: 20000794 Result: Up-regulated in Transcription
  misc_feature: MA Experiment 20000794 PARAMETER Experiment Name: At_Petals_P Parameter: Age (day) Value: 23-25 days
  misc_feature: MA Experiment 20000794 PARAMETER Experiment Name: At_Petals_P Parameter: Plant Line Value: WS
  misc_feature: MA Experiment 20000794 PARAMETER Experiment Name: At_Petals_P Parameter: Tissue Value: Petals vs. Whole plant
  misc_feature: MA Experiment ID: 20001247 Result: Down-regulated in Transcription
  misc_feature: MA Experiment 20001247 PARAMETER Experiment Name: At_Far-red-induction_P Parameter: Age (day) Value: 7
  misc_feature: MA Experiment 20001247 PARAMETER Experiment Name: At_Far-red-induction_P Parameter: Light Value: Far-red vs. White
  misc_feature: MA Experiment 20001247 PARAMETER Experiment Name: At_Far-red-induction_P Parameter: Organism Value: A. thaliana
  misc_feature: MA Experiment 20001247 PARAMETER Experiment Name: At_Far-red-induction_P Parameter: Plant Line Value: Columbia
  misc_feature: MA Experiment 20001247 PARAMETER Experiment Name: At_Far-red-induction_P Parameter: Timepoint (hr) Value: 1
  misc_feature: MA Experiment 20001247 PARAMETER Experiment Name: At_Far-red-induction_P Parameter: Tissue Value: Whole Plant
  misc_feature: MA Experiment ID: 20001248 Result: Down-regulated in Transcription
  misc_feature: MA Experiment 20001248 PARAMETER Experiment Name: At_Far-red-induction_P Parameter: Age (day) Value: 7
  misc_feature: MA Experiment 20001248 PARAMETER Experiment Name: At_Far-red-induction_P Parameter: Light Value: Far-red vs. White
  misc_feature: MA Experiment 20001248 PARAMETER Experiment Name: At_Far-red-induction_P Parameter: Organism Value: A. thaliana
  misc_feature: MA Experiment 20001248 PARAMETER Experiment Name: At_Far-red-induction_P Parameter: Plant Line Value: Columbia
  misc_feature: MA Experiment 20001248 PARAMETER Experiment Name: At_Far-red-induction_P Parameter: Timepoint (hr) Value: 4
  misc_feature: MA Experiment 20001248 PARAMETER Experiment Name: At_Far-red-induction_P Parameter: Tissue Value: Whole Plant
  misc_feature: MA Experiment ID: 20001450 Result: Down-regulated in Transcription
  misc_feature: MA Experiment 20001450 PARAMETER Experiment Name: At_Far-red-induction_P Parameter: Age (day) Value: 7
  misc_feature: MA Experiment 20001450 PARAMETER Experiment Name: At_Far-red-induction_P Parameter: Light Value: Far-red vs. White
  misc_feature: MA Experiment 20001450 PARAMETER Experiment Name: At_Far-red-induction_P Parameter: Organism Value: A. thaliana
  misc_feature: MA Experiment 20001450 PARAMETER Experiment Name: At_Far-red-induction_P Parameter: Plant Line Value: Columbia
  misc_feature: MA Experiment 20001450 PARAMETER Experiment Name: At_Far-red-induction_P Parameter: Timepoint (hr) Value: 8
  misc_feature: MA Experiment 20001450 PARAMETER Experiment Name: At_Far-red-induction_P Parameter: Tissue Value: Whole Plant
  misc_feature: MA Experiment ID: 20001451 Result: Down-regulated in Transcription
  misc_feature: MA Experiment 20001451 PARAMETER Experiment Name: At_Far-red-induction_P Parameter: Age (day) Value: 7
  misc_feature: MA Experiment 20001451 PARAMETER Experiment Name: At_Far-red-induction_P Parameter: Light Value: Far-red vs. White
  misc_feature: MA Experiment 20001451 PARAMETER Experiment Name: At_Far-red-induction_P Parameter: Organism Value: A. thaliana
  misc_feature: MA Experiment 20001451 PARAMETER Experiment Name: At_Far-red-induction_P Parameter: Plant Line Value: Columbia
  misc_feature: MA Experiment 20001451 PARAMETER Experiment Name: At_Far-red-induction_P Parameter: Timepoint (hr) Value: 24
  misc_feature: MA Experiment 20001451 PARAMETER Experiment Name: At_Far-red-induction_P Parameter: Tissue Value: Whole Plant
  misc_feature: MA Experiment ID: 20001554 Result: Up-regulated in Transcription
  misc_feature: MA Experiment 20001554 PARAMETER Experiment Name: At_Drought_Soil_Dry_P Parameter: Age (day) Value: 21
  misc_feature: MA Experiment 20001554 PARAMETER Experiment Name: At_Drought_Soil_Dry_P Parameter: Organism Value: A. thaliana
  misc_feature: MA Experiment 20001554 PARAMETER Experiment Name: At_Drought_Soil_Dry_P Parameter: Plant Line Value: WS
  misc_feature: MA Experiment 20001554 PARAMETER Experiment Name: At_Drought_Soil_Dry_P Parameter: Post Timepoint (hr) Value: None
  misc_feature: MA Experiment 20001554 PARAMETER Experiment Name: At_Drought_Soil_Dry_P Parameter: Post-Treatment Value: None
  misc_feature: MA Experiment 20001554 PARAMETER Experiment Name: At_Drought_Soil_Dry_P Parameter: Timepoint (day) Value: 7
  misc_feature: MA Experiment 20001554 PARAMETER Experiment Name: At_Drought_Soil_Dry_P Parameter: Treatment Value: Drought vs. No Drought
  misc_feature: MA Experiment ID: 20001555 Result: Up-regulated in Transcription
  misc_feature: MA Experiment 20001555 PARAMETER Experiment Name: At_Drought_Soil_Dry_P Parameter: Age (day) Value: 24
  misc_feature: MA Experiment 20001555 PARAMETER Experiment Name: At_Drought_Soil_Dry_P Parameter: Organism Value: A. thaliana
  misc_feature: MA Experiment 20001555 PARAMETER Experiment Name: At_Drought_Soil_Dry_P Parameter: Plant Line Value: WS
  misc_feature: MA Experiment 20001555 PARAMETER Experiment Name: At_Drought_Soil_Dry_P Parameter: Post Timepoint (hr) Value: None
  misc_feature: MA Experiment 20001555 PARAMETER Experiment Name: At_Drought_Soil_Dry_P Parameter: Post-Treatment Value: None
  misc_feature: MA Experiment 20001555 PARAMETER Experiment Name: At_Drought_Soil_Dry_P Parameter: Timepoint (day) Value: 10
  misc_feature: MA Experiment 20001555 PARAMETER Experiment Name: At_Drought_Soil_Dry_P Parameter: Treatment Value: Drought vs. No Drought
  misc_feature: MA Experiment ID: 20001556 Result: Up-regulated in Transcription
  misc_feature: MA Experiment 20001556 PARAMETER Experiment Name: At_Drought_Soil_Dry_P Parameter: Age (day) Value: 26
  misc_feature: MA Experiment 20001556 PARAMETER Experiment Name: At_Drought_Soil_Dry_P Parameter: Organism Value: A. thaliana
  misc_feature: MA Experiment 20001556 PARAMETER Experiment Name: At_Drought_Soil_Dry_P Parameter: Plant Line Value: WS
  misc_feature: MA Experiment 20001556 PARAMETER Experiment Name: At_Drought_Soil_Dry_P Parameter: Post Timepoint (hr) Value: None
  misc_feature: MA Experiment 20001556 PARAMETER Experiment Name: At_Drought_Soil_Dry_P Parameter: Post-Treatment Value: None
  misc_feature: MA Experiment 20001556 PARAMETER Experiment Name: At_Drought_Soil_Dry_P Parameter: Timepoint (day) Value: 12
  misc_feature: MA Experiment 20001556 PARAMETER Experiment Name: At_Drought_Soil_Dry_P Parameter: Treatment Value: Drought vs. No Drought
  misc_feature: MA Experiment ID: 20001559 Result: Up-regulated in Transcription
  misc_feature: MA Experiment 20001559 PARAMETER Experiment Name: At_Drought_Soil_Dry_P Parameter: Age (day) Value: 28
  misc_feature: MA Experiment 20001559 PARAMETER Experiment Name: At_Drought_Soil_Dry_P Parameter: Organism Value: A. thaliana
  misc_feature: MA Experiment 20001559 PARAMETER Experiment Name: At_Drought_Soil_Dry_P Parameter: Plant Line Value: WS
  misc_feature: MA Experiment 20001559 PARAMETER Experiment Name: At_Drought_Soil_Dry_P Parameter: Post Timepoint (hr) Value: 29
  misc_feature: MA Experiment 20001559 PARAMETER Experiment Name: At_Drought_Soil_Dry_P Parameter: Post-Treatment Value: Re-Water vs. No Drought
  misc_feature: MA Experiment 20001559 PARAMETER Experiment Name: At_Drought_Soil_Dry_P Parameter: Timepoint (day) Value: 14
  misc_feature: MA Experiment 20001559 PARAMETER Experiment Name: At_Drought_Soil_Dry_P Parameter: Treatment Value: Drought vs. No Drought
  misc_feature: MA Experiment ID: 20001560 Result: Up-regulated in Transcription
  misc_feature: MA Experiment 20001560 PARAMETER Experiment Name: At_Drought_Soil_Dry_P Parameter: Age (day) Value: 28
  misc_feature: MA Experiment 20001560 PARAMETER Experiment Name: At_Drought_Soil_Dry_P Parameter: Organism Value: A. thaliana
  misc_feature: MA Experiment 20001560 PARAMETER Experiment Name: At_Drought_Soil_Dry_P Parameter: Plant Line Value: WS
  misc_feature: MA Experiment 20001560 PARAMETER Experiment Name: At_Drought_Soil_Dry_P Parameter: Post Timepoint (hr) Value: None
  misc_feature: MA Experiment 20001560 PARAMETER Experiment Name: At_Drought_Soil_Dry_P Parameter: Post-Treatment Value: None
  misc_feature: MA Experiment 20001560 PARAMETER Experiment Name: At_Drought_Soil_Dry_P Parameter: Timepoint (day) Value: 14
  misc_feature: MA Experiment 20001560 PARAMETER Experiment Name: At_Drought_Soil_Dry_P Parameter: Treatment Value: Drought vs. No Drought
  misc_feature: MA Experiment ID: 20001757 Result: Down-regulated in Transcription
  misc_feature: MA Experiment 20001757 PARAMETER Experiment Name: At_50mM_NH4NO3_L-to-H_P Parameter: Timepoint (hr) Value: 6
  misc_feature: MA Experiment 20001757 PARAMETER Experiment Name: At_50mM_NH4NO3_L-to-H_P Parameter: Tissue Value: Leaf
  misc_feature: MA Experiment 20001757 PARAMETER Experiment Name: At_50mM_NH4NO3_L-to-H_P Parameter: Treatment Value: 50mM NH4NO3 vs 100mM Mannitol
  misc_feature: MA Experiment ID: 20001760 Result: Up-regulated in Transcription
  misc_feature: MA Experiment 20001760 PARAMETER Experiment Name: At_50mM_NH4NO3_L-to-H_P Parameter: Timepoint (hr) Value: 2
  misc_feature: MA Experiment 20001760 PARAMETER Experiment Name: At_50mM_NH4NO3_L-to-H_P Parameter: Tissue Value: Siliques
  misc_feature: MA Experiment 20001760 PARAMETER Experiment Name: At_50mM_NH4NO3_L-to-H_P Parameter: Treatment Value: 50mM NH4NO3 vs 100mM Mannitol
  misc_feature: MA Experiment ID: 20001904 Result: Up-regulated in Transcription
  misc_feature: MA Experiment 20001904 PARAMETER Experiment Name: At_Drought_Reproduction_P Parameter: Age (day) Value: 37
  misc_feature: MA Experiment 20001904 PARAMETER Experiment Name: At_Drought_Reproduction_P Parameter: Organism Value: A. thaliana
  misc_feature: MA Experiment 20001904 PARAMETER Experiment Name: At_Drought_Reproduction_P Parameter: Plant Line Value: WS
  misc_feature: MA Experiment 20001904 PARAMETER Experiment Name: At_Drought_Reproduction_P Parameter: Timepoint (day) Value: 7
  misc_feature: MA Experiment 20001904 PARAMETER Experiment Name: At_Drought_Reproduction_P Parameter: Tissue Value: Rosettes
  misc_feature: MA Experiment 20001904 PARAMETER Experiment Name: At_Drought_Reproduction_P Parameter: Treatment Value: Drought vs. No Drought
atggttgtgaaactatatggacaggtaacagcagcttgtccacaaagagtcttgctttgttttctcgagaaaggaattgaatttgagattattcatatcgatcttgatacatttgagcaaaaaaaaccagaacatcttcttcgtcagccatttggtcaagttccagccatagaagatggagatttcaagctttttgaatcacgagccatcgcgagatactacgctaccaagttcgcggaccaaggcacgaaccttttgggcaagtctctagagcaccgagccatcgtggaccagtgggctgacgtggagacctattacttcaacgttctggcccaacccctcgtgattaacctaatcatcaagcctaggttaggcgagaaatgtgacgtcgttttggtcgaggatctcaaagtgaagctaggagtggtcttggacatatacaataaccggctttcttcgaaccggtttttggctggtgaagaattcactatggctgatttgacgcacatgccggcgatggggtacttgatgagtataaccgatataaaccagatggttaaggctcggggtagttttaaccggtggtgggaagagatttcggatagaccgtcttggaagaagcttatggtgctggctggtcactga

SEQ ID NO: 82620 - protein, 214 aa, Arabidopsis thaliana
  peptide (1)..(214): Ceres Seq. ID no. 12666588
  misc_feature (1)..(214): Homolog of NCBI NO: 15237931 NR Description: glutathione transferase, putative; protein id:
  misc_feature (1)..(214): Homolog of NCBI NO: 15228488 NR Description: glutathione transferase, putative; protein id: supported by cDNA: gi_1575751, supported by cDNA: gi_20466619
  misc_feature (1)..(211): Homolog of NCBI NO: 1524316 NR Description: glutathione S-transferase [Petunia x hybrida]
MVVKLYGQVTAACPQRVLLCFLEKGIEFEIIHIDLDTFEQKKPEHLLRQPFGQVPAIEDGDFKLFESRAIARYYATKFADQGTNLLGKSLEHRAIVDQWADVETYYFNVLAQPLVINLIIKPRLGEKCDVVLVEDLKVKLGVVLDIYNNRLSSNRFLAGEEFTMADLTHMPAMGYLMSITDINQMVKARGSFNRWWEEISDRPSWKKLMVLAGH

SEQ ID NO: 82621 - DNA, 3355 bp, Arabidopsis thaliana
  misc_feature (1)..(3355): Ceres Seq. ID no. 12666615
  misc_feature: MA Experiment ID: 20000180 Result: Up-regulated in Transcription
  misc_feature: MA Experiment 20000180 PARAMETER Experiment Name: At_Germinating_Seeds_P Parameter: Age (hr) Value: 24 vs. 0
  misc_feature: MA Experiment 20000180 PARAMETER Experiment Name: At_Germinating_Seeds_P Parameter: Tissue Value: Germinating Seeds
  misc_feature: MA Experiment ID: 20000184 Result: Down-regulated in Transcription
  misc_feature: MA Experiment 20000184 PARAMETER Experiment Name: At_Shoots__P Parameter: Age (day) Value: 7
  misc_feature: MA Experiment 20000184 PARAMETER Experiment Name: At_Shoots__P Parameter: Tissue Value: Shoots vs. Whole Plant
  misc_feature: MA Experiment ID: 20000185 Result: Down-regulated in Transcription
  misc_feature: MA Experiment 20000185 PARAMETER Experiment Name: At_Roots__P Parameter: Age (day) Value: 7 vs. 21
  misc_feature: MA Experiment 20000185 PARAMETER Experiment Name: At_Roots__P Parameter: Organism Value: A. thaliana
  misc_feature: MA Experiment 20000185 PARAMETER Experiment Name: At_Roots__P Parameter: Tissue Value: Roots vs. Whole Plant
  misc_feature: MA Experiment ID: 20000234 Result: Down-regulated in Transcription
  misc_feature: MA Experiment 20000234 PARAMETER Experiment Name: At_Siliques_P Parameter: Age (day) Value: 21
  misc_feature: MA Experiment 20000234 PARAMETER Experiment Name: At_Siliques_P Parameter: Organism Value: A. thaliana
  misc_feature: MA Experiment 20000234 PARAMETER Experiment Name: At_Siliques_P Parameter: Plant Line Value: WS
  misc_feature: MA Experiment 20000234 PARAMETER Experiment Name: At_Siliques_P Parameter: Tissue Value: Less Than 5mm Siliques vs. Whole Plant
  misc_feature: MA Experiment ID: 20000264 Result: Down-regulated in Transcription
  misc_feature: MA Experiment 20000264 PARAMETER Experiment Name: At_Open_Flower_P Parameter: Age (day) Value: 21
  misc_feature: MA Experiment 20000264 PARAMETER Experiment Name: At_Open_Flower_P Parameter: Plant Line Value: WS
  misc_feature: MA Experiment 20000264 PARAMETER Experiment Name: At_Open_Flower_P Parameter: Tissue Value: Open Flower vs. Whole Plant
  misc_feature: MA Experiment ID: 20000265 Result: Down-regulated in Transcription
  misc_feature: MA Experiment 20000265 PARAMETER Experiment Name: At_Open_Flower_P Parameter: Age (day) Value: 21
  misc_feature: MA Experiment 20000265 PARAMETER Experiment Name: At_Open_Flower_P Parameter: Plant Line Value: WS
  misc_feature: MA Experiment 20000265 PARAMETER Experiment Name: At_Open_Flower_P Parameter: Tissue Value: Closed Flower vs. Whole Plant
  misc_feature: MA Experiment ID: 20000286 Result: Down-regulated in Transcription
  misc_feature: MA Experiment 20000286 PARAMETER Experiment Name: At_Open_Flower_P Parameter: Age (day) Value: 21
  misc_feature: MA Experiment 20000286 PARAMETER Experiment Name: At_Open_Flower_P Parameter: Plant Line Value: WS
  misc_feature: MA Experiment 20000286 PARAMETER Experiment Name: At_Open_Flower_P Parameter: Tissue Value: Half Open vs. Whole Plant
  misc_feature: MA Experiment ID: 20000438 Result: Down-regulated in Transcription
  misc_feature: MA Experiment 20000438 PARAMETER Experiment Name: At_Shoots__P Parameter: Age (day) Value: 14
  misc_feature: MA Experiment 20000438 PARAMETER Experiment Name: At_Shoots__P Parameter: Tissue Value: Shoots vs. Whole Plant
  misc_feature: MA Experiment ID: 20000794 Result: Down-regulated in Transcription
  misc_feature: MA Experiment 20000794 PARAMETER Experiment Name: At_Petals_P Parameter: Age (day) Value: 23-25 days
  misc_feature: MA Experiment 20000794 PARAMETER Experiment Name: At_Petals_P Parameter: Plant Line Value: WS
  misc_feature: MA Experiment 20000794 PARAMETER Experiment Name: At_Petals_P Parameter: Tissue Value: Petals vs. Whole plant
  misc_feature: MA Experiment ID: 20001451 Result: Down-regulated in Transcription
  misc_feature: MA Experiment 20001451 PARAMETER Experiment Name: At_Far-red-induction_P Parameter: Age (day) Value: 7
  misc_feature: MA Experiment 20001451 PARAMETER Experiment Name: At_Far-red-induction_P Parameter: Light Value: Far-red vs. White
  misc_feature: MA Experiment 20001451 PARAMETER Experiment Name: At_Far-red-induction_P Parameter: Organism Value: A. thaliana
  misc_feature: MA Experiment 20001451 PARAMETER Experiment Name: At_Far-red-induction_P Parameter: Plant Line Value: Columbia
  misc_feature: MA Experiment 20001451 PARAMETER Experiment Name: At_Far-red-induction_P Parameter: Timepoint (hr) Value: 24
  misc_feature: MA Experiment 20001451 PARAMETER Experiment Name: At_Far-red-induction_P Parameter: Tissue Value: Whole Plant
  misc_feature: MA Experiment ID: 20001556 Result: Down-regulated in Transcription
  misc_feature: MA Experiment 20001556 PARAMETER Experiment Name: At_Drought_Soil_Dry_P Parameter: Age (day) Value: 26
  misc_feature: MA Experiment 20001556 PARAMETER Experiment Name: At_Drought_Soil_Dry_P Parameter: Organism Value: A. thaliana
  misc_feature: MA Experiment 20001556 PARAMETER Experiment Name: At_Drought_Soil_Dry_P Parameter: Plant Line Value: WS
  misc_feature: MA Experiment 20001556 PARAMETER Experiment Name: At_Drought_Soil_Dry_P Parameter: Post Timepoint (hr) Value: None
  misc_feature: MA Experiment 20001556 PARAMETER Experiment Name: At_Drought_Soil_Dry_P Parameter: Post-Treatment Value: None
  misc_feature: MA Experiment 20001556 PARAMETER Experiment Name: At_Drought_Soil_Dry_P Parameter: Timepoint (day) Value: 12
  misc_feature: MA Experiment 20001556 PARAMETER Experiment Name: At_Drought_Soil_Dry_P Parameter: Treatment Value: Drought vs. No Drought
  misc_feature: MA Experiment ID: 20001557 Result: Down-regulated in Transcription
  misc_feature: MA Experiment 20001557 PARAMETER Experiment Name: At_Drought_Soil_Dry_P Parameter: Age (day) Value: 27
  misc_feature: MA Experiment 20001557 PARAMETER Experiment Name: At_Drought_Soil_Dry_P Parameter: Organism Value: A. thaliana
  misc_feature: MA Experiment 20001557 PARAMETER Experiment Name: At_Drought_Soil_Dry_P Parameter: Plant Line Value: WS
  misc_feature: MA Experiment 20001557 PARAMETER Experiment Name: At_Drought_Soil_Dry_P Parameter: Post Timepoint (hr) Value: 3
  misc_feature: MA Experiment 20001557 PARAMETER Experiment Name: At_Drought_Soil_Dry_P Parameter: Post-Treatment Value: Re-Water vs. No Drought
  misc_feature: MA Experiment 20001557 PARAMETER Experiment Name: At_Drought_Soil_Dry_P Parameter: Timepoint (day) Value: 13
  misc_feature: MA Experiment 20001557 PARAMETER Experiment Name: At_Drought_Soil_Dry_P Parameter: Treatment Value: Drought vs. No Drought
  misc_feature: MA Experiment ID: 20001558 Result: Down-regulated in Transcription
  misc_feature: MA Experiment 20001558 PARAMETER Experiment Name: At_Drought_Soil_Dry_P Parameter: Age (day) Value: 27
  misc_feature: MA Experiment 20001558 PARAMETER Experiment Name: At_Drought_Soil_Dry_P Parameter: Organism Value: A. thaliana
  misc_feature: MA Experiment 20001558 PARAMETER Experiment Name: At_Drought_Soil_Dry_P Parameter: Plant Line Value: WS
  misc_feature: MA Experiment 20001558 PARAMETER Experiment Name: At_Drought_Soil_Dry_P Parameter: Post Timepoint (hr) Value: 6
  misc_feature: MA Experiment 20001558 PARAMETER Experiment Name: At_Drought_Soil_Dry_P Parameter: Post-Treatment Value: Re-Water vs. No Drought
  misc_feature: MA Experiment 20001558 PARAMETER Experiment Name: At_Drought_Soil_Dry_P Parameter: Timepoint (day) Value: 13
  misc_feature: MA Experiment 20001558 PARAMETER Experiment Name: At_Drought_Soil_Dry_P Parameter: Treatment Value: Drought vs. No Drought
  misc_feature: MA Experiment ID: 20001768 Result: Up-regulated in Transcription
  misc_feature: MA Experiment 20001768 PARAMETER Experiment Name: At_Far-red-enriched-adult_P Parameter: Age (day) Value: 28
  misc_feature: MA Experiment 20001768 PARAMETER Experiment Name: At_Far-red-enriched-adult_P Parameter: Light Value: Far-red enriched vs. White
  misc_feature: MA Experiment 20001768 PARAMETER Experiment Name: At_Far-red-enriched-adult_P Parameter: Organism Value: A. thaliana
  misc_feature: MA Experiment 20001768 PARAMETER Experiment Name: At_Far-red-enriched-adult_P Parameter: Plant Line Value: Columbia
  misc_feature: MA Experiment 20001768 PARAMETER Experiment Name: At_Far-red-enriched-adult_P Parameter: Timepoint (hr) Value: 1
  misc_feature: MA Experiment 20001768 PARAMETER Experiment Name: At_Far-red-enriched-adult_P Parameter: Tissue Value: Aerial
  misc_feature: MA Experiment ID: 20001769 Result: Down-regulated in Transcription
  misc_feature: MA Experiment 20001769 PARAMETER Experiment Name: At_Far-red-enriched-adult_P Parameter: Age (day) Value: 28
  misc_feature: MA Experiment 20001769 PARAMETER Experiment Name: At_Far-red-enriched-adult_P Parameter: Light Value: Far-red enriched vs. White
  misc_feature: MA Experiment 20001769 PARAMETER Experiment Name: At_Far-red-enriched-adult_P Parameter: Organism Value: A. thaliana
  misc_feature: MA Experiment 20001769 PARAMETER Experiment Name: At_Far-red-enriched-adult_P Parameter: Plant Line Value: Columbia
  misc_feature: MA Experiment 20001769 PARAMETER Experiment Name: At_Far-red-enriched-adult_P Parameter: Timepoint (hr) Value: 4
  misc_feature: MA Experiment 20001769 PARAMETER Experiment Name: At_Far-red-enriched-adult_P Parameter: Tissue Value: Aerial
  misc_feature: MA Experiment ID: 20001771 Result: Up-regulated in Transcription
  misc_feature: MA Experiment 20001771 PARAMETER Experiment Name: At_Far-red-enriched-adult_P Parameter: Age (day) Value: 28
  misc_feature: MA Experiment 20001771 PARAMETER Experiment Name: At_Far-red-enriched-adult_P Parameter: Light Value: Far-red enriched vs. White
  misc_feature: MA Experiment 20001771 PARAMETER Experiment Name: At_Far-red-enriched-adult_P Parameter: Organism Value: A. thaliana
  misc_feature: MA Experiment 20001771 PARAMETER Experiment Name: At_Far-red-enriched-adult_P Parameter: Plant Line Value: Columbia
  misc_feature: MA Experiment 20001771 PARAMETER Experiment Name: At_Far-red-enriched-adult_P Parameter: Timepoint (hr) Value: 16
  misc_feature: MA Experiment 20001771 PARAMETER Experiment Name: At_Far-red-enriched-adult_P Parameter: Tissue Value: Aerial
  misc_feature: MA Experiment ID: 20001773 Result: Up-regulated in Transcription
  misc_feature: MA Experiment 20001773 PARAMETER Experiment Name: At_Far-red-enriched-adult_P Parameter: Age (day) Value: 30
  misc_feature: MA Experiment 20001773 PARAMETER Experiment Name: At_Far-red-enriched-adult_P Parameter: Light Value: Far-red enriched vs. White
  misc_feature: MA Experiment 20001773 PARAMETER Experiment Name: At_Far-red-enriched-adult_P Parameter: Organism Value: A. thaliana
  misc_feature: MA Experiment 20001773 PARAMETER Experiment Name: At_Far-red-enriched-adult_P Parameter: Plant Line Value: Columbia
  misc_feature: MA Experiment 20001773 PARAMETER Experiment Name: At_Far-red-enriched-adult_P Parameter: Timepoint (hr) Value: 48
  misc_feature: MA Experiment 20001773 PARAMETER Experiment Name: At_Far-red-enriched-adult_P Parameter: Tissue Value: Aerial
  misc_feature: MA Experiment ID: 20001906 Result: Down-regulated in Transcription
  misc_feature: MA Experiment 20001906 PARAMETER Experiment Name: At_Drought_Reproduction_P Parameter: Age (day) Value: 35
  misc_feature: MA Experiment 20001906 PARAMETER Experiment Name: At_Drought_Reproduction_P Parameter: Organism Value: A. thaliana
  misc_feature: MA Experiment 20001906 PARAMETER Experiment Name: At_Drought_Reproduction_P Parameter: Plant Line Value: WS
  misc_feature: MA Experiment 20001906 PARAMETER Experiment Name: At_Drought_Reproduction_P Parameter: Timepoint (day) Value: 5
  misc_feature: MA Experiment 20001906 PARAMETER Experiment Name: At_Drought_Reproduction_P Parameter: Tissue Value: Siliques
  misc_feature: MA Experiment 20001906 PARAMETER Experiment Name: At_Drought_Reproduction_P Parameter: Treatment Value: Drought vs. No Drought
accgttttgttctctcaagatcgctgctaatctccggccgtccctatggaagctagcgccggtcttgtcgccggttctcataaccgtaatgaactagtcgtcattcacaaccatgaagagccaaagcctctgaagaatctagatggacaattctgtgagatatgtggagatcagattggtttaacagtagaaggagacctcttcgtagcttgcaatgagtgtggttttccggcgtgtagaccttgctatgagtacgagagaagagaaggaacacaaaactgtcctcagtgtaagactcgttacaagcgtctcagaggaagcccaagagtggagggagatgaagacgaagaagatattgatgatattgagtatgaatttaatatcgaacatgaacaagataagcataagcattctgctgaggctatgctttatgggaaaatgagctatggaagaggtcctgaggatgatgagaatgggagattcccacctgttatagctggtggtcatagtggagaatttccagttggaggaggttatggtaatggagaacatgggcttcataagcgtgtgcacccatatccatcatctgaagctgggagtgagggaggatggcgggaaagaatggatgactggaagctccagcatggaaatcttgggccagaaccagatgatgatcctgagatgggactgatcgacgaggcacggcagccactctcgcggaaagttcccattgcctcaagcaagatcaatccatatcggatggtcatcgtcgctaggcttgtgattctagcagtttttctgcggtataggctcttgaatccagtgcatgatgctctgggattatggctgacctctgtgatctgtgaaatctggttcgctgtctcttggattcttgatcagttccccaagtggttccctattgaacgtgagacctatctagatcggctttccctcaggtacgagagagaaggtgaaccaaatatgcttgcccctgtagatgtctttgtcagtacggtggacccattgaaggagcctcccctcgtcacatccaacactgtgctgtcaatcttggccatggactacccagttgagaaaatctcctgctatgtctctgacgacggtgcttcaatgcttacattcgaatctctctcggaaactgctgagtttgcaagaaaatgggttcccttctgtaagaaattctccatagagccacgggcaccggagatgtacttcacgttgaaagttgattatctccaggacaaagtccacccaacatttgttaaggaacgtcgagccatgaagagagaatatgaggagttcaaggtcaggatcaacgctcaagtggcgaaggcctcaaaggttcctctagaaggttggatcatgcaagatggaacaccgtggccagggaacaacaccaaggaccaccccggtatgatccaagtcttcctcggccacagcggaggatttgatgtcgaagggcatgagcttcctcggcttgtgtacgtgtcccgtgagaagcgtcctggttttcaacaccacaagaaagctggcgccatgaatgccctggttcgagtggcaggcgtactcacaaatgctcctttcatgctgaacttggactgtgatcactatgtaaacaacagcaaggccgtgagggaagcaatgtgttttttgatggatcctcagattggaaagaaggtctgctatgttcagttccctcaaaggtttgatggcattgacacaaacgatcgttacgccaacagaaacacagtcttctttgatatcaatatgaaaggtctagatggaatccaaggtccagtttacgttggtactggttgtgttttcaaacgacaagctctgtatggttatgaaccaccaaagggtcctaaacgtccaaagatgataagctgtggttgttgtccttgctttgggcgccggagaaagaataagaaattttccaagaatgacatgaatggtgacgtagcagcccttggaggagcagaaggtgataaggagcatttgatgtctgaaatgaactttgagaaaacatttgggcaatcatccatctttgtaacctcaactttgatggaagaaggtggtgttcctccgtcatcaagtcctgcagtgctccttaaagaggcaatccatgtcataagctgcggttatgaagacaagactgagtggggaactgagctgggttggatctatggctctatcacagaggatattttgacgggattcaagatgcattgccgtggatggaggtctatttactgcatgcctaagaggcctgcattcaaaggttcagctcctattaatctatcagacaggttaaaccaggttttgcgttgggcacttggatcggttgagatatttttcagccggcacagtcctctctggtatggctacaaaggaggcaaactcaagtggcttgagcgttttgcttatgccaacacaacaatctaccccttcacatctataccacttcttgcctactgtatccttccagccatctgtctccttactgacaaattcatcatgccaccgataagcacatttgctagtctcttcttcatctcactgtttatgtcgatcattgtaacgggaatcttggaattgagatggagcggagttagcattgaggaatggtggagaaacgagcaattctgggtcattggaggaatctcagctcatctctttgcggttgtccaaggtctcctcaaaatcttagcaggcattgacacaaacttcaccgtcacatcaaaggcaacagatgatgatgactttggagaactttacgcattcaaatggacaacactgctgatccctccaacaactgtcttaatcataaacattgttggcgttgttgcaggcatctcagatgccattaacaatggatatcagtcttggggacctctatttggtaaactcttcttctccttttgggtcattgttcatctctacccattcctcaaaggtctgatgggtagacagaacagaacaccaaccattgtggtgatttggtcagtgttattggcatctatcttctctttgctttgggtaagaattgatccttttgtgctcaagaccaaaggacctgacacttccaagtgtggcatcaactgctgaagcaaaatctttttcgtcttctgaaactttttctgtactttgtcgagagtgttttcacttctctctttggattgcataattggattttgtttattgtatattagccagtaaaacagatggatctgggtttattgtgagcgagtaatgcattgtaagaaaatttgaacaaaactactttttagttacacagtaaaagattcacagatacttccctcaagagacatgtagt

SEQ ID NO: 82622 - protein, 1026 aa, Arabidopsis thaliana
  peptide (1)..(1026): Ceres Seq. ID no. 12666616
  misc_feature (685)..(1009): Homolog of NCBI NO: 15217853 NR Description: hypothetical protein; protein id: At1g02730.1
  misc_feature (455)..(682): Homolog of NCBI NO: 15217853 NR Description: hypothetical protein; protein id: At1g02730.1
  misc_feature (194)..(431): Homolog of NCBI NO: 15217853 NR Description: hypothetical protein; protein id: At1g02730.1
  misc_feature (34)..(103): Homolog of NCBI NO: 15217853 NR Description: hypothetical protein; protein id: At1g02730.1
  misc_feature (469)..(1009): Homolog of NCBI NO: 15228448 NR Description: putative cellulose synthase catalytic subunit; id: At3g03050.1, supported by cDNA: gi_12619787, supported by gi_13430535 [Arabidopsis thaliana]
  misc_feature (196)..(431): Homolog of NCBI NO: 15228448 NR Description: putative cellulose synthase catalytic subunit; id: At3g03050.1, supported by cDNA: gi_12619787, supported by gi_13430535 [Arabidopsis thaliana]
  misc_feature (481)..(1009): Homolog of NCBI NO: 27372782 NR Description: cellulose synthase-like protein D4 [Populus
  misc_feature (209)..(431): Homolog of NCBI NO: 27372782 NR Description: cellulose synthase-like protein D4 [Populus
  misc_feature (396)..(1009): Homolog of NCBI NO: 13925884 NR Description: cellulose synthase D-like protein [Nicotiana
  misc_feature (94)..(430): Homolog of NCBI NO: 13925884 NR Description: cellulose synthase D-like protein [Nicotiana
MEASAGLVAGSHNRNELVVIHNHEEPKPLKNLDGQFCEICGDQIGLTVEGDLFVACNECGFPACRPCYEYERREGTQNCPQCKTRYKRLRGSPRVEGDEDEEDIDDIEYEFNIEHEQDKHKHSAEAMLYGKMSYGRGPEDDENGRFPPVIAGGHSGEFPVGGGYGNGEHGLHKRVHPYPSSEAGSEGGWRERMDDWKLQHGNLGPEPDDDPEMGLIDEARQPLSRKVPIASSKINPYRMVIVARLVILAVFLRYRLLNPVHDALGLWLTSVICEIWFAVSWILDQFPKWFPIERETYLDRLSLRYEREGEPNMLAPVDVFVSTVDPLKEPPLVTSNTVLSILAMDYPVEKISCYVSDDGASMLTFESLSETAEFARKWVPFCKKFSIEPRAPEMYFTLKVDYLQDKVHPTFVKERRAMKREYEEFKVRINAQVAKASKVPLEGWIMQDGTPWPGNNTKDHPGMIQVFLGHSGGFDVEGHELPRLVYVSREKRPGFQHHKKAGAMNALVRVAGVLTNAPFMLNLDCDHYVNNSKAVREAMCFLMDPQIGKKVCYVQFPQRFDGIDTNDRYANRNTVFFDINMKGLDGIQGPVYVGTGCVFKRQALYGYEPPKGPKRPKMISCGCCPCFGRRRKNKKFSKNDMNGDVAALGGAEGDKEHLMSEMNFEKTFGQSSIFVTSTLMEEGGVPPSSSPAVLLKEAIHVISCGYEDKTEWGTELGWIYGSITEDILTGFKMHCRGWRSIYCMPKRPAFKGSAPINLSDRLNQVLRWALGSVEIFFSRHSPLWYGYKGGKLKWLERFAYANTTIYPFTSIPLLAYCILPAICLLTDKFIMPPISTFASLFFISLFMSIIVTGILELRWSGVSIEEWWRNEQFWVIGGISAHLFAVVQGLLKILAGIDTNFTVTSKATDDDDFGELYAFKWTTLLIPPTTVLIINIVGVVAGISDAINNGYQSWGPLFGKLFFSFWVIVHLYPFLKGLMGRQNRTPTIVVIWSVLLASIFSLLWVRIDPFVLKTKGPDTSKCGINC

SEQ ID NO: 82623 - protein, 900 aa, Arabidopsis thaliana
  peptide (1)..(900): Ceres Seq. ID no. 12666617
  misc_feature (559)..(883): Homolog of NCBI NO: 15217853 NR Description: hypothetical protein; protein id: At1g02730.1
  misc_feature (329)..(556): Homolog of NCBI NO: 15217853 NR Description: hypothetical protein; protein id: At1g02730.1
  misc_feature (68)..(305): Homolog of NCBI NO: 15217853 NR Description: hypothetical protein; protein id: At1g02730.1
  misc_feature (343)..(883): Homolog of NCBI NO: 15228448 NR Description: putative cellulose synthase catalytic subunit; id: At3g03050.1, supported by cDNA: gi_12619787, supported by gi_13430535 [Arabidopsis thaliana]
  misc_feature (70)..(305): Homolog of NCBI NO: 15228448 NR Description: putative cellulose synthase catalytic subunit; id: At3g03050.1, supported by cDNA: gi_12619787, supported by gi_13430535 [Arabidopsis thaliana]
  misc_feature (355)..(883): Homolog of NCBI NO: 27372782 NR Description: cellulose synthase-like protein D4 [Populus
  misc_feature (83)..(305): Homolog of NCBI NO: 27372782 NR Description: cellulose synthase-like protein D4 [Populus
  misc_feature (270)..(883): Homolog of NCBI NO: 13925884 NR Description: cellulose synthase D-like protein [Nicotiana
  misc_feature (1)..(304): Homolog of NCBI NO: 13925884 NR Description: cellulose synthase D-like protein [Nicotiana
  misc_feature (343)..(883): Homolog of NCBI NO: 15237873 NR Description: cellulose synthase catalytic subunit -like protein id: At5g16910.1 [Arabidopsis thaliana]
MLYGKMSYGRGPEDDENGRFPPVIAGGHSGEFPVGGGYGNGEHGLHKRVHPYPSSEAGSEGGWRERMDDWKLQHGNLGPEPDDDPEMGLIDEARQPLSRKVPIASSKINPYRMVIVARLVILAVFLRYRLLNPVHDALGLWLTSVICEIWFAVSWILDQFPKWFPIERETYLDRLSLRYEREGEPNMLAPVDVFVSTVDPLKEPPLVTSNTVLSILAMDYPVEKISCYVSDDGASMLTFESLSETAEFARKWVPFCKKFSIEPRAPEMYFTLKVDYLQDKVHPTFVKERRAMKREYEEFKVRINAQVAKASKVPLEGWIMQDGTPWPGNNTKDHPGMIQVFLGHSGGFDVEGHELPRLVYVSREKRPGFQHHKKAGAMNALVRVAGVLTNAPFMLNLDCDHYVNNSKAVREAMCFLMDPQIGKKVCYVQFPQRFDGIDTNDRYANRNTVFFDINMKGLDGIQGPVYVGTGCVFKRQALYGYEPPKGPKRPKMISCGCCPCFGRRRKNKKFSKNDMNGDVAALGGAEGDKEHLMSEMNFEKTFGQSSIFVTSTLMEEGGVPPSSSPAVLLKEAIHVISCGYEDKTEWGTELGWIYGSITEDILTGFKMHCRGWRSIYCMPKRPAFKGSAPINLSDRLNQVLRWALGSVEIFFSRHSPLWYGYKGGKLKWLERFAYANTTIYPFTSIPLLAYCILPAICLLTDKFIMPPISTFASLFFISLFMSIIVTGILELRWSGVSIEEWWRNEQFWVIGGISAHLFAVVQGLLKILAGIDTNFTVTSKATDDDDFGELYAFKWTTLLIPPTTVLIINIVGVVAGISDAINNGYQSWGPLFGKLFFSFWVIVHLYPFLKGLMGRQNRTPTIVVIWSVLLASIFSLLWVRIDPFVLKTKGPDTSKCGINC

SEQ ID NO: 82624 - protein, 895 aa, Arabidopsis thaliana
  peptide (1)..(895): Ceres Seq. ID no. 12666618
  misc_feature (554)..(878): Homolog of NCBI NO: 15217853 NR Description: hypothetical protein; protein id: At1g02730.1
  misc_feature (324)..(551): Homolog of NCBI NO: 15217853 NR Description: hypothetical protein; protein id: At1g02730.1
  misc_feature (63)..(300): Homolog of NCBI NO: 15217853 NR Description: hypothetical protein; protein id: At1g02730.1
  misc_feature (338)..(878): Homolog of NCBI NO: 15228448 NR Description: putative cellulose synthase catalytic subunit; id: At3g03050.1, supported by cDNA: gi_12619787, supported by gi_13430535 [Arabidopsis thaliana]
  misc_feature (65)..(300): Homolog of NCBI NO: 15228448 NR Description: putative cellulose synthase catalytic subunit; id: At3g03050.1, supported by cDNA: gi_12619787, supported by gi_13430535 [Arabidopsis thaliana]
  misc_feature (350)..(878): Homolog of NCBI NO: 27372782 NR Description: cellulose synthase-like protein D4 [Populus
  misc_feature (78)..(300): Homolog of NCBI NO: 27372782 NR Description: cellulose synthase-like protein D4 [Populus
  misc_feature (265)..(878): Homolog of NCBI NO: 13925884 NR Description: cellulose synthase D-like protein [Nicotiana
  misc_feature (1)..(299): Homolog of NCBI NO: 13925884 NR Description: cellulose synthase D-like protein [Nicotiana
  misc_feature (338)..(878): Homolog of NCBI NO: 15237873 NR Description: cellulose synthase catalytic subunit -like protein id: At5g16910.1 [Arabidopsis thaliana]
MSYGRGPEDDENGRFPPVIAGGHSGEFPVGGGYGNGEHGLHKRVHPYPSSEAGSEGGWRERMDDWKLQHGNLGPEPDDDPEMGLIDEARQPLSRKVPIASSKINPYRMVIVARLVILAVFLRYRLLNPVHDALGLWLTSVICEIWFAVSWILDQFPKWFPIERETYLDRLSLRYEREGEPNMLAPVDVFVSTVDPLKEPPLVTSNTVLSILAMDYPVEKISCYVSDDGASMLTFESLSETAEFARKWVPFCKKFSIEPRAPEMYFTLKVDYLQDKVHPTFVKERRAMKREYEEFKVRINAQVAKASKVPLEGWIMQDGTPWPGNNTKDHPGMIQVFLGHSGGFDVEGHELPRLVYVSREKRPGFQHHKKAGAMNALVRVAGVLTNAPFMLNLDCDHYVNNSKAVREAMCFLMDPQIGKKVCYVQFPQRFDGIDTNDRYANRNTVFFDINMKGLDGIQGPVYVGTGCVFKRQALYGYEPPKGPKRPKMISCGCCPCFGRRRKNKKFSKNDMNGDVAALGGAEGDKEHLMSEMNFEKTFGQSSIFVTSTLMEEGGVPPSSSPAVLLKEAIHVISCGYEDKTEWGTELGWIYGSITEDILTGFKMHCRGWRSIYCMPKRPAFKGSAPINLSDRLNQVLRWALGSVEIFFSRHSPLWYGYKGGKLKWLERFAYANTTIYPFTSIPLLAYCILPAICLLTDKFIMPPISTFASLFFISLFMSIIVTGILELRWSGVSIEEWWRNEQFWVIGGISAHLFAVVQGLLKILAGIDTNFTVTSKATDDDDFGELYAFKWTTLLIPPTTVLIINIVGVVAGISDAINNGYQSWGPLFGKLFFSFWVIVHLYPFLKGLMGRQNRTPTIVVIWSVLLASIFSLLWVRIDPFVLKTKGPDTSKCGINC

SEQ ID NO: 82625 - DNA, 1746 bp, Arabidopsis thaliana
  misc_feature (1)..(1746): Ceres Seq. ID no. 12666619
  misc_feature: MA Experiment ID: 20000180 Result: Down-regulated in Transcription
  misc_feature: MA Experiment 20000180 PARAMETER Experiment Name: At_Germinating_Seeds_P Parameter: Age (hr) Value: 24 vs. 0
  misc_feature: MA Experiment 20000180 PARAMETER Experiment Name: At_Germinating_Seeds_P Parameter: Tissue Value: Germinating Seeds
  misc_feature: MA Experiment ID: 20000185 Result: Up-regulated in Transcription
  misc_feature: MA Experiment 20000185 PARAMETER Experiment Name: At_Roots__P Parameter: Age (day) Value: 7 vs. 21
  misc_feature: MA Experiment 20000185 PARAMETER Experiment Name: At_Roots__P Parameter: Organism Value: A. thaliana
  misc_feature: MA Experiment 20000185 PARAMETER Experiment Name: At_Roots__P Parameter: Tissue Value: Roots vs. Whole Plant
  misc_feature: MA Experiment ID: 20000439 Result: Up-regulated in Transcription
  misc_feature: MA Experiment 20000439 PARAMETER Experiment Name: At_Roots__P Parameter: Age (day) Value: 14 vs. 21
  misc_feature: MA Experiment 20000439 PARAMETER Experiment Name: At_Roots__P Parameter: Organism Value: A. thaliana
  misc_feature: MA Experiment 20000439 PARAMETER Experiment Name: At_Roots__P Parameter: Tissue Value: Roots vs. Whole Plant
atgaactcgatgaataactggttaggcttctctctctctcctcatgatcaaaatcatcaccgtacggatgttgactcctccaccaccagaaccgccgtagatgttgccggagggtactgttttgatctggccgctccctccgatgaatcttctgccgttcaaacatcttttctttctcctttcggtgtcaccctcgaagctttcaccagagacaataatagtcactcccgagattgggacatcaatggtggtgcatgcaataacattaacaataacgaacaaaatggaccaaagcttgagaatttcctcggccgcaccaccacgatttacaataccaacgagaccgttgtagatggaaatggcgattgtggaggaggagacggtggtggtggcggctcactaggcctttcgatgataaaaacatggctgagtaatcattcggttgctaatgctaatcatcaagacaatggtaacggtgcacgaggcttgtccctctctatgaattcatctactagtgatagcaacaactacaacaacaatgatgatgtcgtccaagagaagactattgttgatgtcgtagaaactacaccgaagaaaactattgagagttttggacaaaggacgtctatataccgcggtgttacaaggcatcggtggacaggtagatacgaggcacatttatgggacaatagttgcaaaagagaaggccagactcgcaaaggaagacaaggaggttatgacaaagaagaaaaagcagctagggcttacgatttagccgcactaaagtattggggaaccaccactactactaacttccccttgagtgaatatgagaaagaggtagaagagatgaagcacatgacgaggcaagagtatgttgcctctctgcgcaggaaaagtagtggtttctctcgtggtgcatcgatttatcgaggagtaacaaggcatcaccaacatggaaggtggcaagctaggatcggaagagtcgccggtaacaaagacctctacttgggaactttcggcacacaggaagaggctgctgaggcttatgacattgcagccattaaattcagaggattaagcgcagtgactaacttcgacatgaacagatacaatgttaaagcaatcctcgagagcccgagtctacctattggtagttctgcgaaacgtctcaaggacgttaataatccggttccagctatgatgattagtaataacgtttcagagagtgcaaataatgttagcggttggcaaaacactgcgtttcagcatcatcagggaatggatttgagcttattgcagcaacagcaggagaggtacgttggttattacaatggaggaaacttgtctaccgagagtactagggtttgtttcaaacaagaggaggaacaacaacacttcttgagaaactcgccgagtcacatgactaatgttgatcatcatagctcgacctctgatgattctgttaccgtttgtggaaatgttgttagttatggtggttatcaaggattcgcaatccctgttggaacatcggttaattacgatccctttactgctgctgagattgcttacaacgcaagaaatcattattactatgctcagcatcagcaacaacagcagattcagcagtcgccgggaggagattttccggtggcgatttcgaataaccatagctctaacatgtactttcacggggaaggtggtggagaaggggctccaacgttttcagtttggaacgacacttag

SEQ ID NO: 82626 - protein, 581 aa, Arabidopsis thaliana
  peptide (1)..(581): Ceres Seq. ID no. 12666620
  misc_feature (208)..(278): Pfam Name: AP2 domain Pfam Description: AP2 domain
  misc_feature (5)..(580): Homolog of NCBI NO: 21069053 NR Description: AP2/EREBP transcription factor BABY BOOM2
  misc_feature (5)..(580): Homolog of NCBI NO: 21069051 NR Description: AP2/EREBP transcription factor BABY BOOM1 napus] >gi|21069055|gb|AAM33802.1| AP2/EREBP transcription factor
  misc_feature (103)..(392): Homolog of NCBI NO: 15238174 NR Description: ovule development protein, putative; protein id:
  misc_feature (121)..(393): Homolog of NCBI NO: 32490266 NR Description: OSJNBb0116K07.8 [Oryza sativa (japonica
  misc_feature (53)..(393): Homolog of NCBI NO: 15223777 NR Description: ovule development protein, putative; protein id:
  misc_feature (82)..(393): Homolog of NCBI NO: 21304227 NR Description: ovule development aintegumenta-like protein BNM3
  misc_feature (97)..(393): Homolog of NCBI NO: 25405447 NR Description: hypothetical protein F11M15.6 [imported] - thaliana >gi|4836931|gb|AAD30633.1|AC006085_6 Hypothetical
  misc_feature (82)..(393): Homolog of NCBI NO: 34907686 NR Description: putative ovule development protein
  misc_feature (71)..(482): Homolog of NCBI NO: 9294411 NR Description: contains similarity to unknown
  misc_feature (97)..(482): Homolog of NCBI NO: 15232375 NR Description: ovule development protein, putative; protein id:
MNSMNNWLGFSLSPHDQNHHRTDVDSSTTRTAVDVAGGYCFDLAAPSDESSAVQTSFLSPFGVTLEAFTRDNNSHSRDWDINGGACNNINNNEQNGPKLENFLGRTTTIYNTNETVVDGNGDCGGGDGGGGGSLGLSMIKTWLSNHSVANANHQDNGNGARGLSLSMNSSTSDSNNYNNNDDVVQEKTIVDVVETTPKKTIESFGQRTSIYRGVTRHRWTGRYEAHLWDNSCKREGQTRKGRQGGYDKEEKAARAYDLAALKYWGTTTTTNFPLSEYEKEVEEMKHMTRQEYVASLRRKSSGFSRGASIYRGVTRHHQHGRWQARIGRVAGNKDLYLGTFGTQEEAAEAYDIAAIKFRGLSAVTNFDMNRYNVKAILESPSLPIGSSAKRLKDVNNPVPAMMISNNVSESANNVSGWQNTAFQHHQGMDLSLLQQQQERYVGYYNGGNLSTESTRVCFKQEEEQQHFLRNSPSHMTNVDHHSSTSDDSVTVCGNVVSYGGYQGFAIPVGTSVNYDPFTAAEIAYNARNHYYYAQHQQQQQIQQSPGGDFPVAISNNHSSNMYFHGEGGGEGAPTFSVWNDT

SEQ ID NO: 82627 - protein, 578 aa, Arabidopsis thaliana
  peptide (1)..(578): Ceres Seq. ID no. 12666621
  misc_feature (205)..(275): Pfam Name: AP2 domain Pfam Description: AP2 domain
  misc_feature (2)..(577): Homolog of NCBI NO: 21069053 NR Description: AP2/EREBP transcription factor BABY BOOM2
  misc_feature (2)..(577): Homolog of NCBI NO: 21069051 NR Description: AP2/EREBP transcription factor BABY BOOM1 napus] >gi|21069055|gb|AAM33802.1| AP2/EREBP transcription factor
  misc_feature (100)..(389): Homolog of NCBI NO: 15238174 NR Description: ovule development protein, putative; protein id:
  misc_feature (118)..(390): Homolog of NCBI NO: 32490266 NR Description: OSJNBb0116K07.8 [Oryza sativa (japonica
  misc_feature (50)..(390): Homolog of NCBI NO: 15223777 NR Description: ovule development protein, putative; protein id:
  misc_feature (79)..(390): Homolog of NCBI NO: 21304227 NR Description: ovule development aintegumenta-like protein BNM3
  misc_feature (94)..(390): Homolog of NCBI NO: 25405447 NR Description: hypothetical protein F11M15.6 [imported] - thaliana >gi|4836931|gb|AAD30633.1|AC006085_6 Hypothetical
  misc_feature (79)..(390): Homolog of NCBI NO: 34907686 NR Description: putative ovule development protein
  misc_feature (68)..(479): Homolog of NCBI NO: 9294411 NR Description: contains similarity to unknown
  misc_feature (94)..(479): Homolog of NCBI NO: 15232375 NR Description: ovule development protein, putative; protein id:
MNNWLGFSLSPHDQNHHRTDVDSSTTRTAVDVAGGYCFDLAAPSDESSAVQTSFLSPFGVTLEAFTRDNNSHSRDWDINGGACNNINNNEQNGPKLENFLGRTTTIYNTNETVVDGNGDCGGGDGGGGGSLGLSMIKTWLSNHSVANANHQDNGNGARGLSLSMNSSTSDSNNYNNNDDVVQEKTIVDVVETTPKKTIESFGQRTSIYRGVTRHRWTGRYEAHLWDNSCKREGQTRKGRQGGYDKEEKAARAYDLAALKYWGTTTTTNFPLSEYEKEVEEMKHMTRQEYVASLRRKSSGFSRGASIYRGVTRHHQHGRWQARIGRVAGNKDLYLGTFGTQEEAAEAYDIAAIKFRGLSAVTNFDMNRYNVKAILESPSLPIGSSAKRLKDVNNPVPAMMISNNVSESANNVSGWQNTAFQHHQGMDLSLLQQQQERYVGYYNGGNLSTESTRVCFKQEEEQQHFLRNSPSHMTNVDHHSSTSDDSVTVCGNVVSYGGYQGFAIPVGTSVNYDPFTAAEIAYNARNHYYYAQHQQQQQIQQSPGGDFPVAISNNHSSNMYFHGEGGGEGAPTFSVWNDT

SEQ ID NO: 82628 - protein, 444 aa, Arabidopsis thaliana
  peptide (1)..(444): Ceres Seq. ID no. 12666622
  misc_feature (71)..(141): Pfam Name: AP2 domain Pfam Description: AP2 domain
  misc_feature (1)..(443): Homolog of NCBI NO: 21069053 NR Description: AP2/EREBP transcription factor BABY BOOM2
  misc_feature (1)..(443): Homolog of NCBI NO: 21069051 NR Description: AP2/EREBP transcription factor BABY BOOM1 napus] >gi|21069055|gb|AAM33802.1| AP2/EREBP transcription factor
  misc_feature (1)..(255): Homolog of NCBI NO: 15238174 NR Description: ovule development protein, putative; protein id:
  misc_feature (1)..(256): Homolog of NCBI NO: 32490266 NR Description: OSJNBb0116K07.8 [Oryza sativa (japonica
  misc_feature (1)..(256): Homolog of NCBI NO: 15223777 NR Description: ovule development protein, putative; protein id:
  misc_feature (1)..(256): Homolog of NCBI NO: 21304227 NR Description: ovule development aintegumenta-like protein BNM3
  misc_feature (1)..(256): Homolog of NCBI NO: 25405447 NR Description: hypothetical protein F11M15.6 [imported] - thaliana >gi|4836931|gb|AAD30633.1|AC006085_6 Hypothetical
  misc_feature (1)..(256): Homolog of NCBI NO: 34907686 NR Description: putative ovule development protein
  misc_feature (1)..(345): Homolog of NCBI NO: 9294411 NR Description: contains similarity to unknown
  misc_feature (1)..(345): Homolog of NCBI NO: 15232375 NR Description: ovule development protein, putative; protein id:
MIKTWLSNHSVANANHQDNGNGARGLSLSMNSSTSDSNNYNNNDDVVQEKTIVDVVETTPKKTIESFGQRTSIYRGVTRHRWTGRYEAHLWDNSCKREGQTRKGRQGGYDKEEKAARAYDLAALKYWGTTTTTNFPLSEYEKEVEEMKHMTRQEYVASLRRKSSGFSRGASIYRGVTRHHQHGRWQARIGRVAGNKDLYLGTFGTQEEAAEAYDIAAIKFRGLSAVTNFDMNRYNVKAILESPSLPIGSSAKRLKDVNNPVPAMMISNNVSESANNVSGWQNTAFQHHQGMDLSLLQQQQERYVGYYNGGNLSTESTRVCFKQEEEQQHFLRNSPSHMTNVDHHSSTSDDSVTVCGNVVSYGGYQGFAIPVGTSVNYDPFTAAEIAYNARNHYYYAQHQQQQQIQQSPGGDFPVAISNNHSSNMYFHGEGGGEGAPTFSVWNDT

SEQ ID NO: 82629 - DNA, 450 bp, Arabidopsis thaliana
  misc_feature (1)..(450): Ceres Seq. ID no. 12666623
  misc_feature: MA Experiment ID: 20000264 Result: Up-regulated in Transcription
  misc_feature: MA Experiment 20000264 PARAMETER Experiment Name: At_Open_Flower_P Parameter: Age (day) Value: 21
  misc_feature: MA Experiment 20000264 PARAMETER Experiment Name: At_Open_Flower_P Parameter: Plant Line Value: WS
  misc_feature: MA Experiment 20000264 PARAMETER Experiment Name: At_Open_Flower_P Parameter: Tissue Value: Open Flower vs. Whole Plant
  misc_feature: MA Experiment ID: 20000437 Result: Up-regulated in Transcription
  misc_feature: MA Experiment 20000437 PARAMETER Experiment Name: At_Drought_P Parameter: Age (day) Value: 8
  misc_feature: MA Experiment 20000437 PARAMETER Experiment Name: At_Drought_P Parameter: Organism Value: A. thaliana
  misc_feature: MA Experiment 20000437 PARAMETER Experiment Name: At_Drought_P Parameter: Plant Line Value: WS
  misc_feature: MA Experiment 20000437 PARAMETER Experiment Name: At_Drought_P Parameter: Timepoint (hr) Value: 24
  misc_feature: MA Experiment 20000437 PARAMETER Experiment Name: At_Drought_P Parameter: Tissue Value: Whole Plant
  misc_feature: MA Experiment 20000437 PARAMETER Experiment Name: At_Drought_P Parameter: Treatment Value: Drought vs. No Drought
  misc_feature: MA Experiment ID: 20000441 Result: Down-regulated in Transcription
  misc_feature: MA Experiment 20000441 PARAMETER Experiment Name: At_1uM_BR-BRZ__P Parameter: Tissue Value: Shoot Apices
  misc_feature: MA Experiment 20000441 PARAMETER Experiment Name: At_1uM_BR-BRZ__P Parameter: Treatment Value: 1uM BR vs. No Treatment
  misc_feature: MA Experiment ID: 20000794 Result: Up-regulated in Transcription
  misc_feature: MA Experiment 20000794 PARAMETER Experiment Name: At_Petals_P Parameter: Age (day) Value: 23-25 days
  misc_feature: MA Experiment 20000794 PARAMETER Experiment Name: At_Petals_P Parameter: Plant Line Value: WS
  misc_feature: MA Experiment 20000794 PARAMETER Experiment Name: At_Petals_P Parameter: Tissue Value: Petals vs. Whole plant
  misc_feature: MA Experiment ID: 20001248 Result: Down-regulated in Transcription
  misc_feature: MA Experiment 20001248 PARAMETER Experiment Name: At_Far-red-induction_P Parameter: Age (day) Value: 7
  misc_feature: MA Experiment 20001248 PARAMETER Experiment Name: At_Far-red-induction_P Parameter: Light Value: Far-red vs. White
  misc_feature: MA Experiment 20001248 PARAMETER Experiment Name: At_Far-red-induction_P Parameter: Organism Value: A. thaliana
  misc_feature: MA Experiment 20001248 PARAMETER Experiment Name: At_Far-red-induction_P Parameter: Plant Line Value: Columbia
  misc_feature: MA Experiment 20001248 PARAMETER Experiment Name: At_Far-red-induction_P Parameter: Timepoint (hr) Value: 4
  misc_feature: MA Experiment 20001248 PARAMETER Experiment Name: At_Far-red-induction_P Parameter: Tissue Value: Whole Plant
atgggtgcatttgattatatctctagcttttgttcatatacatacgctaatgccaaaaccaagcgtaagccattgcagacagtggatatcaaggtgaaaatggactgtgatggttgtgaaaggagagttagaaacgtggttcgtcgcatgaaaggggtgaaatcggtggaggtgaaccggaaacagagccggataacggtgaacggacacgtggacccaaacaaggtgttgaagagagtgaagagcaccggtaaaaaggctgagttttggccttacatacctcaacatatggtctattacccttttgctcctggcatgtacgataaacgtgcacctgcaggccacatccgtaatcccactcaatcgtttccaacagcaaacgctcccgaggaaaattacgtttccctcttcagcgacgacaacgtccacgccgcttgttccatcatgtga

SEQ ID NO: 82630 - protein, 149 aa, Arabidopsis thaliana
  peptide (1)..(149): Ceres Seq. ID no. 12666624
  misc_feature (29)..(89): Pfam Name: Heavy-metal-associated domain Pfam Description: Heavy-metal-associated domain
  misc_feature (1)..(149): Homolog of NCBI NO: 15237967 NR Description: copper chaperone (CCH)-related; protein id:
  misc_feature (1)..(149): Homolog of NCBI NO: 15223925 NR Description: copper chaperone (CCH)-related; protein id: supported by cDNA: 39127. [Arabidopsis thaliana]
  misc_feature (1)..(149): Homolog of NCBI NO: 28866019 NR Description: farnesylated protein 3 [Hordeum vulgare subsp.
  misc_feature (1)..(149): Homolog of NCBI NO: 34914538 NR Description: OSJNBa0094H06.16 [Oryza sativa (japonica
  misc_feature (1)..(149): Homolog of NCBI NO: 28866017 NR Description: farnesylated protein 2 [Hordeum vulgare subsp.
  misc_feature (1)..(149): Homolog of NCBI NO: 15219990 NR Description: copper chaperone (CCH)-related; protein id: supported by cDNA: gi_13899062, supported by cDNA: gi_15450582, by cDNA: gi_17386147, supported by cDNA: gi_18377445
  misc_feature (1)..(149): Homolog of NCBI NO: 38346843 NR Description: OSJNBa0091C12.3 [Oryza sativa (japonica
  misc_feature (1)..(149): Homolog of NCBI NO: 23304411 NR Description: farnesylated protein 1 [Hordeum vulgare subsp.
  misc_feature (2)..(149): Homolog of NCBI NO: 15235984 NR Description: copper chaperone (CCH)-related; protein id:
  misc_feature (1)..(149): Homolog of NCBI NO: 15233937 NR Description: copper chaperone (CCH)-related; protein id: supported by cDNA: 10238., supported by cDNA: gi_11908067, by cDNA: gi_12642881, supported by cDNA: gi_13265451, supported
MGAFDYISSFCSYTYANAKTKRKPLQTVDIKVKMDCDGCERRVRNVVRRMKGVKSVEVNRKQSRITVNGHVDPNKVLKRVKSTGKKAEFWPYIPQHMVYYPFAPGMYDKRAPAGHIRNPTQSFPTANAPEENYVSLFSDDNVHAACSIM

SEQ ID NO: 82631 - protein, 116 aa, Arabidopsis thaliana
  peptide (1)..(116): Ceres Seq. ID no. 12666625
  misc_feature (1)..(56): Pfam Name: Heavy-metal-associated domain Pfam Description: Heavy-metal-associated domain
  misc_feature (1)..(116): Homolog of NCBI NO: 15237967 NR Description: copper chaperone (CCH)-related; protein id:
  misc_feature (1)..(116): Homolog of NCBI NO: 15223925 NR Description: copper chaperone (CCH)-related; protein id: supported by cDNA: 39127. [Arabidopsis thaliana]
  misc_feature (1)..(116): Homolog of NCBI NO: 28866019 NR Description: farnesylated protein 3 [Hordeum vulgare subsp.
  misc_feature (1)..(116): Homolog of NCBI NO: 34914538 NR Description: OSJNBa0094H06.16 [Oryza sativa (japonica
  misc_feature (1)..(116): Homolog of NCBI NO: 28866017 NR Description: farnesylated protein 2 [Hordeum vulgare subsp.
  misc_feature (1)..(116): Homolog of NCBI NO: 15219990 NR Description: copper chaperone (CCH)-related; protein id: supported by cDNA: gi_13899062, supported by cDNA: gi_15450582, by cDNA: gi_17386147, supported by cDNA: gi_18377445
  misc_feature (1)..(116): Homolog of NCBI NO: 38346843 NR Description: OSJNBa0091C12.3 [Oryza sativa (japonica
  misc_feature (1)..(116): Homolog of NCBI NO: 23304411 NR Description: farnesylated protein 1 [Hordeum vulgare subsp.
  misc_feature (1)..(116): Homolog of NCBI NO: 15235984 NR Description: copper chaperone (CCH)-related; protein id:
  misc_feature (1)..(116): Homolog of NCBI NO: 15233937 NR Description: copper chaperone (CCH)-related; protein id: supported by cDNA: 10238., supported by cDNA: gi_11908067, by cDNA: gi_12642881, supported by cDNA: gi_13265451, supported
MDCDGCERRVRNVVRRMKGVKSVEVNRKQSRITVNGHVDPNKVLKRVKSTGKKAEFWPYIPQHMVYYPFAPGMYDKRAPAGHIRNPTQSFPTANAPEENYVSLFSDDNVHAACSIM

SEQ ID NO: 82632 - protein, 100 aa, Arabidopsis thaliana
  peptide (1)..(100): Ceres Seq. ID no. 12666626
  misc_feature (1)..(100): Homolog of NCBI NO: 15237967 NR Description: copper chaperone (CCH)-related; protein id:
  misc_feature (1)..(100): Homolog of NCBI NO: 15223925 NR Description: copper chaperone (CCH)-related; protein id: supported by cDNA: 39127. [Arabidopsis thaliana]
  misc_feature (1)..(100): Homolog of NCBI NO: 28866019 NR Description: farnesylated protein 3 [Hordeum vulgare subsp.
  misc_feature (1)..(100): Homolog of NCBI NO: 34914538 NR Description: OSJNBa0094H06.16 [Oryza sativa (japonica
  misc_feature (1)..(100): Homolog of NCBI NO: 28866017 NR Description: farnesylated protein 2 [Hordeum vulgare subsp.
  misc_feature (1)..(100): Homolog of NCBI NO: 15219990 NR Description: copper chaperone (CCH)-related; protein id: supported by cDNA: gi_13899062, supported by cDNA: gi_15450582, by cDNA: gi_17386147, supported by cDNA: gi_18377445
  misc_feature (1)..(100): Homolog of NCBI NO: 38346843 NR Description: OSJNBa0091C12.3 [Oryza sativa (japonica
  misc_feature (1)..(100): Homolog of NCBI NO: 23304411 NR Description: farnesylated protein 1 [Hordeum vulgare subsp.
  misc_feature (1)..(100): Homolog of NCBI NO: 15235984 NR Description: copper chaperone (CCH)-related; protein id:
  misc_feature (1)..(100): Homolog of NCBI NO: 15233937 NR Description: copper chaperone (CCH)-related; protein id: supported by cDNA: 10238., supported by cDNA: gi_11908067, by cDNA: gi_12642881, supported by cDNA: gi_13265451, supported
MKGVKSVEVNRKQSRITVNGHVDPNKVLKRVKSTGKKAEFWPYIPQHMVYYPFAPGMYDKRAPAGHIRNPTQSFPTANAPEENYVSLFSDDNVHAACSIM

SEQ ID NO: 82633 - DNA, 1581 bp, Arabidopsis thaliana
  misc_feature (1)..(1581): Ceres Seq. ID no. 12666636
  misc_feature: MA Experiment ID: 20000443 Result: Up-regulated in Transcription
  misc_feature: MA Experiment 20000443 PARAMETER Experiment Name: At_1uM_BR-BRZ__P Parameter: Tissue Value: Shoot Apices
  misc_feature: MA Experiment 20000443 PARAMETER Experiment Name: At_1uM_BR-BRZ__P Parameter: Treatment Value: 1uM BRZ vs. No Treatment
atggcaaaagcaatcgctttaactgtctttttgttcttattcttgtcattaatatctctaaccctagcaacagattatccactattcacaaagtctcgatggatcgtaaacaacaagggccaccgcgtgaagctagcttgcgcgaactggccttcgcacctcaagccagtggtagcagaggggctgagcagccagccaatggattcaatatcgaaaaagataaaagacatgggattcaattgtgttaggctcacttggccacttgaattaatgattaatgacactttagcctttaatgttaccgtgaaacaatcatttgagagatatggattggatcatgagcttcaagggatttacactcacaatccatacattgtcaatactcctctcatcaatgtctttcaggctgtggtgtatagtcttgggaggcatgatgtgatggtgatacttgacaaccacaagaccgtaccggggtggtgttgtagcaacgatgacccggacgcgttctttggcgacccaaaattcaacccggatctatggatgttgggtcttaagaagatggccacaatatttatgaacgtgaaaaacgttgttggtatgagcctgaggaatgaacttagaggctacaatcatacatcaaaagattggtacaagtacatgcaaaaaggagcagaagcagtgcatacatcaaaccctaacgtactggtcatactctcagggcttaacttcgatgctgacctaagtttcttaaaagatcgtccagtgaatcttagcttcaagaaaaaacttgtcttggagcttcattggtattctttcactgacggtactggtcaatggaagtcacacaatgtcaacgacttttgcagccaaatgttctctaaggagcgtcgtaccggcggttttgttctcgaccaaggctttcctttgttcttgagcgagtttgggaccgatcaaagaggtggcgatcttgaaggaaacaggtacatgaattgtatgttggcatgggcggccgagaaagatttggattgggcggtttgggcggttacgggagtttattatttccgcgaaggcaaacgtggtgtagttgaagcttacggtatgttagatgcgaattggcataatgttcataactatacttatctccgtaggctctccgtcattcaaccaccgcacacaggacccggtgtaaagcacaatcatcacaagaaaatatttcatccgttaaccggactctgcctagtgagaaagtcacactgccatgagtccgagctcacgttaggtccatgcacaaaggacgaaccgtggagctattctcatggaggcatacttgagatcagacgcggtcacaaatcttgcttagaaggagaaacagcggtcggaaaaagtgtgaaacttggcaggatatgcacaaagattgagcaaatatcggccacaaagatgcatttgtcgttcaacactagtgacggttcgttggtatgcttagacgtggattcggataacaatgttgttgctaattcttgcaactgtttgaccggagatactacttgtgaacctgcaagccaatggttcaaaatcttctga

SEQ ID NO: 82634 - protein, 526 aa, Arabidopsis thaliana
  peptide (1)..(526): Ceres Seq. ID no. 12666637
  misc_feature (42)..(353): Pfam Name: Cellulase (glycosyl hydrolase family 5) Pfam Description: Cellulase (glycosyl hydrolase family 5)
  misc_feature (1)..(526): Homolog of NCBI NO: 15237972 NR Description: glycosyl hydrolase family 5/cellulase; protein At5g17500.1 [Arabidopsis thaliana] >gi|11357940|pir||T51476
  misc_feature (1)..(357): Homolog of NCBI NO: 15237397 NR Description: glycosyl hydrolase family 5/cellulase; protein At5g16700.1 [Arabidopsis thaliana] >gi|11357811|pir||T51502
  misc_feature (392)..(525): Homolog of NCBI NO: 15237397 NR Description: glycosyl hydrolase family 5/cellulase; protein At5g16700.1 [Arabidopsis thaliana] >gi|11357811|pir||T51502
  misc_feature (26)..(525): Homolog of NCBI NO: 15222185 NR Description: glycosyl hydrolase family 5/cellulase; protein At1g13130.1 [Arabidopsis thaliana] >gi|25402755|pir||E86265
  misc_feature (10)..(525): Homolog of NCBI NO: 11994430 NR Description: gene_id:MTC11.2~unknown protein [Arabidopsis
  misc_feature (26)..(525): Homolog of NCBI NO: 15231514 NR Description: glycosyl hydrolase family 5/cellulase; protein At3g26140.1 [Arabidopsis thaliana] >gi|11994432|dbj|BAB02434.1|
  misc_feature (10)..(525): Homolog of NCBI NO: 15231513 NR Description: glycosyl hydrolase family 5/cellulase; protein
  misc_feature (1)..(525): Homolog of NCBI NO: 38345244 NR Description: OSJNBb0011N17.5 [Oryza sativa (japonica
  misc_feature (1)..(525): Homolog of NCBI NO: 38345245 NR Description: OSJNBb0011N17.6 [Oryza sativa (japonica
  misc_feature (91)..(525): Homolog of NCBI NO: 38345246 NR Description: OSJNBb0011N17.7 [Oryza sativa (japonica
MAKAIALTVFLFLFLSLISLTLATDYPLFTKSRWIVNNKGHRVKLACANWPSHLKPVVAEGLSSQPMDSISKKIKDMGFNCVRLTWPLELMINDTLAFNVTVKQSFERYGLDHELQGIYTHNPYIVNTPLINVFQAVVYSLGRHDVMVILDNHKTVPGWCCSNDDPDAFFGDPKFNPDLWMLGLKKMATIFMNVKNVVGMSLRNELRGYNHTSKDWYKYMQKGAEAVHTSNPNVLVILSGLNFDADLSFLKDRPVNLSFKKKLVLELHWYSFTDGTGQWKSHNVNDFCSQMFSKERRTGGFVLDQGFPLFLSEFGTDQRGGDLEGNRYMNCMLAWAAEKDLDWAVWAVTGVYYFREGKRGVVEAYGMLDANWHNVHNYTYLRRLSVIQPPHTGPGVKHNHHKKIFHPLTGLCLVRKSHCHESELTLGPCTKDEPWSYSHGGILEIRRGHKSCLEGETAVGKSVKLGRICTKIEQISATKMHLSFNTSDGSLVCLDVDSDNNVVANSCNCLTGDTTCEPASQWFKIF

SEQ ID NO: 82635 - protein, 460 aa, Arabidopsis thaliana
  peptide (1)..(460): Ceres Seq. ID no. 12666638
  misc_feature (1)..(287): Pfam Name: Cellulase (glycosyl hydrolase family 5) Pfam Description: Cellulase (glycosyl hydrolase family 5)
  misc_feature (1)..(460): Homolog of NCBI NO: 15237972 NR Description: glycosyl hydrolase family 5/cellulase; protein At5g17500.1 [Arabidopsis thaliana] >gi|11357940|pir||T51476
  misc_feature (1)..(291): Homolog of NCBI NO: 15237397 NR Description: glycosyl hydrolase family 5/cellulase; protein At5g16700.1 [Arabidopsis thaliana] >gi|11357811|pir||T51502
  misc_feature (326)..(459): Homolog of NCBI NO: 15237397 NR Description: glycosyl hydrolase family 5/cellulase; protein At5g16700.1 [Arabidopsis thaliana] >gi|11357811|pir||T51502
  misc_feature (1)..(459): Homolog of NCBI NO: 15222185 NR Description: glycosyl hydrolase family 5/cellulase; protein At1g13130.1 [Arabidopsis thaliana] >gi|25402755|pir||E86265
  misc_feature (1)..(459): Homolog of NCBI NO: 11994430 NR Description: gene_id:MTC11.2~unknown protein [Arabidopsis
  misc_feature (1)..(459): Homolog of NCBI NO: 15231514 NR Description: glycosyl hydrolase family 5/cellulase; protein At3g26140.1 [Arabidopsis thaliana] >gi|11994432|dbj|BAB02434.1|
  misc_feature (1)..(459): Homolog of NCBI NO: 15231513 NR Description: glycosyl hydrolase family 5/cellulase; protein
  misc_feature (1)..(459): Homolog of NCBI NO: 38345244 NR Description: OSJNBb0011N17.5 [Oryza sativa (japonica
  misc_feature (1)..(459): Homolog of NCBI NO: 38345245 NR Description: OSJNBb0011N17.6 [Oryza sativa (japonica
  misc_feature (25)..(459): Homolog of NCBI NO: 38345246 NR Description: OSJNBb0011N17.7 [Oryza sativa (japonica
MDSISKKIKDMGFNCVRLTWPLELMINDTLAFNVTVKQSFERYGLDHELQGIYTHNPYIVNTPLINVFQAVVYSLGRHDVMVILDNHKTVPGWCCSNDDPDAFFGDPKFNPDLWMLGLKKMATIFMNVKNVVGMSLRNELRGYNHTSKDWYKYMQKGAEAVHTSNPNVLVILSGLNFDADLSFLKDRPVNLSFKKKLVLELHWYSFTDGTGQWKSHNVNDFCSQMFSKERRTGGFVLDQGFPLFLSEFGTDQRGGDLEGNRYMNCMLAWAAEKDLDWAVWAVTGVYYFREGKRGVVEAYGMLDANWHNVHNYTYLRRLSVIQPPHTGPGVKHNHHKKIFHPLTGLCLVRKSHCHESELTLGPCTKDEPWSYSHGGILEIRRGHKSCLEGETAVGKSVKLGRICTKIEQISATKMHLSFNTSDGSLVCLDVDSDNNVVANSCNCLTGDTTCEPASQWFKIF

SEQ ID NO: 82636 - protein, 450 aa, Arabidopsis thaliana
  peptide (1)..(450): Ceres Seq. ID no. 12666639
  misc_feature (1)..(277): Pfam Name: Cellulase (glycosyl hydrolase family 5) Pfam Description: Cellulase (glycosyl hydrolase family 5)
  misc_feature (1)..(450): Homolog of NCBI NO: 15237972 NR Description: glycosyl hydrolase family 5/cellulase; protein At5g17500.1 [Arabidopsis thaliana] >gi|11357940|pir||T51476
  misc_feature (1)..(281): Homolog of NCBI NO: 15237397 NR Description: glycosyl hydrolase family 5/cellulase; protein At5g16700.1 [Arabidopsis thaliana] >gi|11357811|pir||T51502
  misc_feature (316)..(449): Homolog of NCBI NO: 15237397 NR Description: glycosyl hydrolase family 5/cellulase; protein At5g16700.1 [Arabidopsis thaliana] >gi|11357811|pir||T51502
  misc_feature (1)..(449): Homolog of NCBI NO: 15222185 NR Description: glycosyl hydrolase family 5/cellulase; protein At1g13130.1 [Arabidopsis thaliana] >gi|25402755|pir||E86265
  misc_feature (1)..(449): Homolog of NCBI NO: 11994430 NR Description: gene_id:MTC11.2~unknown protein [Arabidopsis
  misc_feature (1)..(449): Homolog of NCBI NO: 15231514 NR Description: glycosyl hydrolase family 5/cellulase; protein At3g26140.1 [Arabidopsis thaliana] >gi|11994432|dbj|BAB02434.1|
  misc_feature (1)..(449): Homolog of NCBI NO: 15231513 NR Description: glycosyl hydrolase family 5/cellulase; protein
  misc_feature (1)..(449): Homolog of NCBI NO: 38345244 NR Description: OSJNBb0011N17.5 [Oryza sativa (japonica
  misc_feature (1)..(449): Homolog of NCBI NO: 38345245 NR Description: OSJNBb0011N17.6 [Oryza sativa (japonica
  misc_feature (15)..(449): Homolog of NCBI NO: 38345246 NR Description: OSJNBb0011N17.7 [Oryza sativa (japonica
MGFNCVRLTWPLELMINDTLAFNVTVKQSFERYGLDHELQGIYTHNPYIVNTPLINVFQAVVYSLGRHDVMVILDNHKTVPGWCCSNDDPDAFFGDPKFNPDLWMLGLKKMATIFMNVKNVVGMSLRNELRGYNHTSKDWYKYMQKGAEAVHTSNPNVLVILSGLNFDADLSFLKDRPVNLSFKKKLVLELHWYSFTDGTGQWKSHNVNDFCSQMFSKERRTGGFVLDQGFPLFLSEFGTDQRGGDLEGNRYMNCMLAWAAEKDLDWAVWAVTGVYYFREGKRGVVEAYGMLDANWHNVHNYTYLRRLSVIQPPHTGPGVKHNHHKKIFHPLTGLCLVRKSHCHESELTLGPCTKDEPWSYSHGGILEIRRGHKSCLEGETAVGKSVKLGRICTKIEQISATKMHLSFNTSDGSLVCLDVDSDNNVVANSCNCLTGDTTCEPASQWFKIF

SEQ ID NO: 82637 - DNA, 1386 bp, Arabidopsis thaliana
  misc_feature (1)..(1386): Ceres Seq. ID no. 12666640
atgtccgggtcactcacgtttaagatttaccggcagaagccggagttagtttctccggcgaagccaacgccaagagagctcaaacccctctcagatattgacgaccaagaaggactaagatttcacattcccactatctttttctatagacacaaccctactactaactctgatcctgtcgcagtcattcggagagctctcgcagagacgctggtttactactatccgttcgccggtaggcttcgggaaggaccgaaccggaaactggctgtggattgtaccggtgaaggcgttttgtttattgaggctgatgctgacgtgacacttgttgagtttgaagagaaggatgctcttaagcctcctttcccttgctttgaagagcttctgtttaacgttgaaggttcttgtgaaatgctcaacactcctttgatgctcatgcaggtcacgcgcttgaaatgcggcggttttatcttcgccgtccgtatcaaccacgcaatgtccgatgccggcggtctcacgctgttcctcaaaacgatgtgcgagttcgtgcgtggttatcatgcacctacggttgctccggtgtgggaacgtcacctgctgagcgccagagtcctgctgcgtgtgacacacgcacaccgagagtacgacgaaatgccggcaataggtacagaactcggcagtagaagagacaatctggtaggccggtcactcttcttcggtccctgcgagatgtccgcaatacgcaggctcctcccaccaaatcttgtcaacagcagcaccaatatggaaatgctaacgtctttcttatggcgttatcgcaccatcgctctacgaccagaccaggacaaggagatgcggctcatattaattgtcaacgcacgttctaagcttaaaaatccaccactacctcgaggatactacggaaatgcctttgcgttcccagtcgcaatcgcaacagctaatgaactaactaagaaaccgttagagtttgctctgagactaataaaagaggcgaaatcgagcgtgacggaggagtacatgcgatcacttgcggatctgatggtgataaagggaagaccaagcttctcgtcggacggagcttacttggtttcggatgtaagaattttcgcagatattgatttcggaatttgggggaaaccagtttacggaggaattggtacagccggagttgaagaccttccgggggctagcttctacgtttcatttgagaagagaaatggtgagatagggatcgttgtaccggtttgtttgccagagaaggcgatgcagaggtttgtggaagagcttgaaggcgtgtttaatggtcaagttgtattcaatagaggaagcaaaagctctaataaattgatcatgtcttctctgtaa

SEQ ID NO: 82638 - protein, 461 aa, Arabidopsis thaliana
  peptide (1)..(461): Ceres Seq. ID no. 12666641
  misc_feature (7)..(439): Pfam Name: Transferase family Pfam Description: Transferase family
  misc_feature (1)..(461): Homolog of NCBI NO: 15237985 NR Description: putative protein; protein id: At5g17540.1
  misc_feature (5)..(441): Homolog of NCBI NO: 15228568 NR Description: putative hypersensitivity-related gene; protein
  misc_feature (5)..(441): Homolog of NCBI NO: 21536854 NR Description: putative hypersensitivity-related gene
  misc_feature (2)..(439): Homolog of NCBI NO: 22854880 NR Description: benzoyl coenzyme A: benzyl alcohol benzoyl
  misc_feature (2)..(439): Homolog of NCBI NO: 7489142 NR Description: hsr201 protein, hypersensitivity-related - common
  misc_feature (4)..(445): Homolog of NCBI NO: 22854876 NR Description: benzoyl coenzyme A: benzyl alcohol benzoyl
  misc_feature (2)..(436): Homolog of NCBI NO: 37535814 NR Description: putative hypersensitivity-related (hsr)protein
  misc_feature (6)..(432): Homolog of NCBI NO: 18652312 NR Description: putative acyltransferase [Cucumis melo]
  misc_feature (6)..(432): Homolog of NCBI NO: 17351914 NR Description: alcohol acetyltransferase [Cucumis melo]
  misc_feature (1)..(441): Homolog of NCBI NO: 34898614 NR Description: putative hypersensitivity-related (hsr) protein
MSGSLTFKIYRQKPELVSPAKPTPRELKPLSDIDDQEGLRFHIPTIFFYRHNPTTNSDPVAVIRRALAETLVYYYPFAGRLREGPNRKLAVDCTGEGVLFIEADADVTLVEFEEKDALKPPFPCFEELLFNVEGSCEMLNTPLMLMQVTRLKCGGFIFAVRINHAMSDAGGLTLFLKTMCEFVRGYHAPTVAPVWERHLLSARVLLRVTHAHREYDEMPAIGTELGSRRDNLVGRSLFFGPCEMSAIRRLLPPNLVNSSTNMEMLTSFLWRYRTIALRPDQDKEMRLILIVNARSKLKNPPLPRGYYGNAFAFPVAIATANELTKKPLEFALRLIKEAKSSVTEEYMRSLADLMVIKGRPSFSSDGAYLVSDVRIFADIDFGIWGKPVYGGIGTAGVEDLPGASFYVSFEKRNGEIGIVVPVCLPEKAMQRFVEELEGVFNGQVVFNRGSKSSNKLIMSSL

SEQ ID NO: 82639 - protein, 324 aa, Arabidopsis thaliana
  peptide (1)..(324): Ceres Seq. ID no. 12666642
  misc_feature (1)..(302): Pfam Name: Transferase family Pfam Description: Transferase family
  misc_feature (1)..(324): Homolog of NCBI NO: 15237985 NR Description: putative protein; protein id: At5g17540.1
  misc_feature (1)..(304): Homolog of NCBI NO: 15228568 NR Description: putative hypersensitivity-related gene; protein
  misc_feature (1)..(304): Homolog of NCBI NO: 21536854 NR Description: putative hypersensitivity-related gene
  misc_feature (1)..(302): Homolog of NCBI NO: 22854880 NR Description: benzoyl coenzyme A: benzyl alcohol benzoyl
  misc_feature (1)..(302): Homolog of NCBI NO: 7489142 NR Description: hsr201 protein, hypersensitivity-related - common
  misc_feature (1)..(308): Homolog of NCBI NO: 22854876 NR Description: benzoyl coenzyme A: benzyl alcohol benzoyl
  misc_feature (1)..(299): Homolog of NCBI NO: 37535814 NR Description: putative hypersensitivity-related (hsr)protein
  misc_feature (1)..(295): Homolog of NCBI NO: 18652312 NR Description: putative acyltransferase [Cucumis melo]
  misc_feature (1)..(295): Homolog of NCBI NO: 17351914 NR Description: alcohol acetyltransferase [Cucumis melo]
  misc_feature (1)..(304): Homolog of NCBI NO: 34898614 NR Description: putative hypersensitivity-related (hsr) protein
MLNTPLMLMQVTRLKCGGFIFAVRINHAMSDAGGLTLFLKTMCEFVRGYHAPTVAPVWERHLLSARVLLRVTHAHREYDEMPAIGTELGSRRDNLVGRSLFFGPCEMSAIRRLLPPNLVNSSTNMEMLTSFLWRYRTIALRPDQDKEMRLILIVNARSKLKNPPLPRGYYGNAFAFPVAIATANELTKKPLEFALRLIKEAKSSVTEEYMRSLADLMVIKGRPSFSSDGAYLVSDVRIFADIDFGIWGKPVYGGIGTAGVEDLPGASFYVSFEKRNGEIGIVVPVCLPEKAMQRFVEELEGVFNGQVVFNRGSKSSNKLIMSSL

SEQ ID NO: 82640 - protein, 318 aa, Arabidopsis thaliana
  peptide (1)..(318): Ceres Seq. ID no. 12666643
  misc_feature (1)..(296): Pfam Name: Transferase family Pfam Description: Transferase family
  misc_feature (1)..(318): Homolog of NCBI NO: 15237985 NR Description: putative protein; protein id: At5g17540.1
  misc_feature (1)..(298): Homolog of NCBI NO: 15228568 NR Description: putative hypersensitivity-related gene; protein
  misc_feature (1)..(298): Homolog of NCBI NO: 21536854 NR Description: putative hypersensitivity-related gene
  misc_feature (1)..(296): Homolog of NCBI NO: 22854880 NR Description: benzoyl coenzyme A: benzyl alcohol benzoyl
  misc_feature (1)..(296): Homolog of NCBI NO: 7489142 NR Description: hsr201 protein, hypersensitivity-related - common
  misc_feature (1)..(302): Homolog of NCBI NO: 22854876 NR Description: benzoyl coenzyme A: benzyl alcohol benzoyl
  misc_feature (1)..(293): Homolog of NCBI NO: 37535814 NR Description: putative hypersensitivity-related (hsr)protein
  misc_feature (1)..(289): Homolog of NCBI NO: 18652312 NR Description: putative acyltransferase [Cucumis melo]
  misc_feature (1)..(289): Homolog of NCBI NO: 17351914 NR Description: alcohol acetyltransferase [Cucumis melo]
  misc_feature (1)..(298): Homolog of NCBI NO: 34898614 NR Description: putative hypersensitivity-related (hsr) protein
MLMQVTRLKCGGFIFAVRINHAMSDAGGLTLFLKTMCEFVRGYHAPTVAPVWERHLLSARVLLRVTHAHREYDEMPAIGTELGSRRDNLVGRSLFFGPCEMSAIRRLLPPNLVNSSTNMEMLTSFLWRYRTIALRPDQDKEMRLILIVNARSKLKNPPLPRGYYGNAFAFPVAIATANELTKKPLEFALRLIKEAKSSVTEEYMRSLADLMVIKGRPSFSSDGAYLVSDVRIFADIDFGIWGKPVYGGIGTAGVEDLPGASFYVSFEKRNGEIGIVVPVCLPEKAMQRFVEELEGVFNGQVVFNRGSKSSNKLIMSSL

SEQ ID NO: 82641 - DNA, 1479 bp, Arabidopsis thaliana
  misc_feature (1)..(1479): Ceres Seq. ID no. 12666658
  misc_feature: MA Experiment ID: 20000184 Result: Up-regulated in Transcription
  misc_feature: MA Experiment 20000184 PARAMETER Experiment Name: At_Shoots__P Parameter: Age (day) Value: 7
  misc_feature: MA Experiment 20000184 PARAMETER Experiment Name: At_Shoots__P Parameter: Tissue Value: Shoots vs. Whole Plant
  misc_feature: MA Experiment ID: 20000437 Result: Down-regulated in Transcription
  misc_feature: MA Experiment 20000437 PARAMETER Experiment Name: At_Drought_P Parameter: Age (day) Value: 8
  misc_feature: MA Experiment 20000437 PARAMETER Experiment Name: At_Drought_P Parameter: Organism Value: A. thaliana
  misc_feature: MA Experiment 20000437 PARAMETER Experiment Name: At_Drought_P Parameter: Plant Line Value: WS
  misc_feature: MA Experiment 20000437 PARAMETER Experiment Name: At_Drought_P Parameter: Timepoint (hr) Value: 24
  misc_feature: MA Experiment 20000437 PARAMETER Experiment Name: At_Drought_P Parameter: Tissue Value: Whole Plant
  misc_feature: MA Experiment 20000437 PARAMETER Experiment Name: At_Drought_P Parameter: Treatment Value: Drought vs. No Drought
  misc_feature: MA Experiment ID: 20001248 Result: Down-regulated in Transcription
  misc_feature: MA Experiment 20001248 PARAMETER Experiment Name: At_Far-red-induction_P Parameter: Age (day) Value: 7
  misc_feature: MA Experiment 20001248 PARAMETER Experiment Name: At_Far-red-induction_P Parameter: Light Value: Far-red vs. White
  misc_feature: MA Experiment 20001248 PARAMETER Experiment Name: At_Far-red-induction_P Parameter: Organism Value: A. thaliana
  misc_feature: MA Experiment 20001248 PARAMETER Experiment Name: At_Far-red-induction_P Parameter: Plant Line Value: Columbia
  misc_feature: MA Experiment 20001248 PARAMETER Experiment Name: At_Far-red-induction_P Parameter: Timepoint (hr) Value: 4
  misc_feature: MA Experiment 20001248 PARAMETER Experiment Name: At_Far-red-induction_P Parameter: Tissue Value: Whole Plant
gcttaaacaatgatctccctgaatctatctccttccctcaatccgggtctcctccacaagacccggacctgtcaacaaccgacccgtctctctgctcttctcgtcaccaaccctaaacccttcaatcacagacacccactagggctttcaccgattcccaatctccagattcgtgatgtttccgcaaaacccttgctttcactcacaaaccctgaatcctcatctgggttctcgagaaaacccagatccatcgccgccgttggctcatcggattcaaatccagacgaaaaatccgatcttggtgaagcggagaagaaagagaagaaggctaagactcttcagctagggattgtgtttggtctttggtatttccagaacatcgtcttcaacatcttcaacaaaaaggcactcaatgtctttccttatccatggcttctcgcttcgtttcagctcttcgcaggttctatttggatgcttgtcttatggtcctttaagctttacccctgccctaaaatctccaagccttttatcattgctctccttggtcctgcattgttccacactattggacatatctcagcttgtgtctcattctccaaagtcgctgtttcgttcactcatgttatcaaatcagcagagcctgtcttctctgttatcttctcgtctttactcggtgattcgtatccgttagctgtctggttatcgattcttccgattgttatgggttgttctttagctgcagtcactgaagtgtcattcaatttaggtggattatcaggagctatgattagtaacgttggttttgtcttgagaaacatttactctaaacgtagcttacagagctttaaagagattgatggattgaatctatacggttgcatcagtatactctctctgctttatctgtttcccgtggcgattttcgttgaaggatcacattgggttccaggttaccataaagccattgcatctgttgggacaccatcaacgttctacttttgggttttgctctctggtgtcttctatcatctgtacaaccagtcttcttaccaggcactcgacgagatcagtccattgactttctctgttgggaacacgatgaagcgagtcgtggtgattatctccactgttttggtgtttaggaatcctgttagacctctgaatgctcttggatcagccattgcgattttcggtaccttcttgtattctcaggccactgcaaagaagaagaagattgaagtgggaggtgataagaagaactaaaggttttaagtgcaaaaccaaggtttacttgagctttttctttctttccaagttttttctttttttcttttgctgtttttgatttcattatgagactagaattatcatttctgttgactggtttagttgctttaaagactttgatctacttagttcttgacctcgtctacttgatgtttttccattgatataaagttggtctgattctgagaagag

SEQ ID NO: 82642 - protein, 417 aa, Arabidopsis thaliana
  peptide (1)..(417): Ceres Seq. ID no. 12666659
  misc_feature (123)..(245): Pfam Name: Integral membrane protein DUF6 Pfam Description: Integral membrane protein DUF6
  misc_feature (1)..(417): Homolog of NCBI NO: 15238003 NR Description: glucose 6 phosphate/phosphate translocator-like protein id: At5g17630.1, supported by cDNA: gi_13937217
  misc_feature (1)..(417): Homolog of NCBI NO: 13937218 NR Description: AT5g17630/K10A8_110 [Arabidopsis thaliana]
  misc_feature (1)..(417): Homolog of NCBI NO: 12060553 NR Description: phosphate/pentose phosphate translocator
  misc_feature (34)..(402): Homolog of NCBI NO: 18423670 NR Description: glucose-6-phosphate/phosphate translocator; id: At5g54800.1, supported by cDNA: 26107., supported by cDNA: supported by cDNA: gi_7229674 [Arabidopsis thaliana]
  misc_feature (34)..(401): Homolog of NCBI NO: 9758260 NR Description: glucose-6-phosphate/phosphate translocator
  misc_feature (34)..(402): Homolog of NCBI NO: 21554690 NR Description: glucose-6-phosphate/phosphate translocator
  misc_feature (58)..(402): Homolog of NCBI NO: 38637068 NR Description: glucose-6-phosphate/phosphate translocator [Oryza
  misc_feature (62)..(402): Homolog of NCBI NO: 14150753 NR Description: glucose-6-phosphate/phosphate translocator [Oryza
  misc_feature (70)..(402): Homolog of NCBI NO: 18407336 NR Description: glucose-6-phosphate/phosphate-translocator putative; protein id: At1g61800.1, supported by cDNA:
  misc_feature (64)..(402): Homolog of NCBI NO: 7488807 NR Description: glucose-6-phosphate/phosphate-translocator
MISLNLSPSLNPGLLHKTRTCQQPTRLSALLVTNPKPFNHRHPLGLSPIPNLQIRDVSAKPLLSLTNPESSSGFSRKPRSIAAVGSSDSNPDEKSDLGEAEKKEKKAKTLQLGIVFGLWYFQNIVFNIFNKKALNVFPYPWLLASFQLFAGSIWMLVLWSFKLYPCPKISKPFIIALLGPALFHTIGHISACVSFSKVAVSFTHVIKSAEPVFSVIFSSLLGDSYPLAVWLSILPIVMGCSLAAVTEVSFNLGGLSGAMISNVGFVLRNIYSKRSLQSFKEIDGLNLYGCISILSLLYLFPVAIFVEGSHWVPGYHKAIASVGTPSTFYFWVLLSGVFYHLYNQSSYQALDEISPLTFSVGNTMKRVVVIISTVLVFRNPVRPLNALGSAIAIFGTFLYSQATAKKKKIEVGGDKKN

SEQ ID NO: 82643 - protein, 263 aa, Arabidopsis thaliana
  peptide (1)..(263): Ceres Seq. ID no. 12666660
  misc_feature (1)..(91): Pfam Name: Integral membrane protein DUF6 Pfam Description: Integral membrane protein DUF6
  misc_feature (1)..(263): Homolog of NCBI NO: 15238003 NR Description: glucose 6 phosphate/phosphate translocator-like protein id: At5g17630.1, supported by cDNA: gi_13937217
  misc_feature (1)..(263): Homolog of NCBI NO: 13937218 NR Description: AT5g17630/K10A8_110 [Arabidopsis thaliana]
  misc_feature (1)..(263): Homolog of NCBI NO: 12060553 NR Description: phosphate/pentose phosphate translocator
  misc_feature (1)..(248): Homolog of NCBI NO: 18423670 NR Description: glucose-6-phosphate/phosphate translocator; id: At5g54800.1, supported by cDNA: 26107., supported by cDNA: supported by cDNA: gi_7229674 [Arabidopsis thaliana]
  misc_feature (1)..(247): Homolog of NCBI NO: 9758260 NR Description: glucose-6-phosphate/phosphate translocator
  misc_feature (1)..(248): Homolog of NCBI NO: 21554690 NR Description: glucose-6-phosphate/phosphate translocator
  misc_feature (1)..(248): Homolog of NCBI NO: 38637068 NR Description: glucose-6-phosphate/phosphate translocator [Oryza
  misc_feature (1)..(248): Homolog of NCBI NO: 14150753 NR Description: glucose-6-phosphate/phosphate translocator [Oryza
  misc_feature (1)..(248): Homolog of NCBI NO: 18407336 NR Description: glucose-6-phosphate/phosphate-translocator putative; protein id: At1g61800.1, supported by cDNA:
  misc_feature (1)..(248): Homolog of NCBI NO: 7488807 NR Description: glucose-6-phosphate/phosphate-translocator
MLVLWSFKLYPCPKISKPFIIALLGPALFHTIGHISACVSFSKVAVSFTHVIKSAEPVFSVIFSSLLGDSYPLAVWLSILPIVMGCSLAAVTEVSFNLGGLSGAMISNVGFVLRNIYSKRSLQSFKEIDGLNLYGCISILSLLYLFPVAIFVEGSHWVPGYHKAIASVGTPSTFYFWVLLSGVFYHLYNQSSYQALDEISPLTFSVGNTMKRVVVIISTVLVFRNPVRPLNALGSAIAIFGTFLYSQATAKKKKIEVGGDKKN

SEQ ID NO: 82644 - DNA, 1811 bp, Arabidopsis thaliana
  misc_feature (1)..(1811): Ceres Seq. ID no. 12666661
  misc_feature: MA Experiment ID: 20000171 Result: Down-regulated in Transcription
  misc_feature: MA Experiment 20000171 PARAMETER Experiment Name: At_42deg_Heat_P Parameter: Age (day) Value: 14
  misc_feature: MA Experiment 20000171 PARAMETER Experiment Name: At_42deg_Heat_P Parameter: Organism Value: A. thaliana
  misc_feature: MA Experiment 20000171 PARAMETER Experiment Name: At_42deg_Heat_P Parameter: Plant Line Value: WS
  misc_feature: MA Experiment 20000171 PARAMETER Experiment Name: At_42deg_Heat_P Parameter: Temperature (deg C) Value: 42 vs. 22
  misc_feature: MA Experiment 20000171 PARAMETER Experiment Name: At_42deg_Heat_P Parameter: Timepoint (hr) Value: 1
  misc_feature: MA Experiment 20000171 PARAMETER Experiment Name: At_42deg_Heat_P Parameter: Tissue Value: Aerial
  misc_feature: MA Experiment ID: 20000173 Result: Down-regulated in Transcription
  misc_feature: MA Experiment 20000173 PARAMETER Experiment Name: At_42deg_Heat_P Parameter: Age (day) Value: 14
  misc_feature: MA Experiment 20000173 PARAMETER Experiment Name: At_42deg_Heat_P Parameter: Organism Value: A. thaliana
  misc_feature: MA Experiment 20000173 PARAMETER Experiment Name: At_42deg_Heat_P Parameter: Plant Line Value: WS
  misc_feature: MA Experiment 20000173 PARAMETER Experiment Name: At_42deg_Heat_P Parameter: Temperature (deg C) Value: 42 vs. 22
  misc_feature: MA Experiment 20000173 PARAMETER Experiment Name: At_42deg_Heat_P Parameter: Timepoint (hr) Value: 6
  misc_feature: MA Experiment 20000173 PARAMETER Experiment Name: At_42deg_Heat_P Parameter: Tissue Value: Aerial
  misc_feature: MA Experiment ID: 20000496 Result: Up-regulated in Transcription
  misc_feature: MA Experiment 20000496 PARAMETER Experiment Name: At_Guard_Cells_P Parameter: Harvest Date Value: 7/19/2002
  misc_feature: MA Experiment 20000496 PARAMETER Experiment Name: At_Guard_Cells_P Parameter: Organism Value: Canola
  misc_feature: MA Experiment 20000496 PARAMETER Experiment Name: At_Guard_Cells_P Parameter: Tissue Value: Guard Cells vs. Leaves
  misc_feature: MA Experiment ID: 20001247 Result: Up-regulated in Transcription
  misc_feature: MA Experiment 20001247 PARAMETER Experiment Name: At_Far-red-induction_P Parameter: Age (day) Value: 7
  misc_feature: MA Experiment 20001247 PARAMETER Experiment Name: At_Far-red-induction_P Parameter: Light Value: Far-red vs. White
  misc_feature: MA Experiment 20001247 PARAMETER Experiment Name: At_Far-red-induction_P Parameter: Organism Value: A. thaliana
  misc_feature: MA Experiment 20001247 PARAMETER Experiment Name: At_Far-red-induction_P Parameter: Plant Line Value: Columbia
  misc_feature: MA Experiment 20001247 PARAMETER Experiment Name: At_Far-red-induction_P Parameter: Timepoint (hr) Value: 1
  misc_feature: MA Experiment 20001247 PARAMETER Experiment Name: At_Far-red-induction_P Parameter: Tissue Value: Whole Plant
  misc_feature: MA Experiment ID: 20001451 Result: Up-regulated in Transcription
  misc_feature: MA Experiment 20001451 PARAMETER Experiment Name: At_Far-red-induction_P Parameter: Age (day) Value: 7
  misc_feature: MA Experiment 20001451 PARAMETER Experiment Name: At_Far-red-induction_P Parameter: Light Value: Far-red vs. White
  misc_feature: MA Experiment 20001451 PARAMETER Experiment Name: At_Far-red-induction_P Parameter: Organism Value: A. thaliana
  misc_feature: MA Experiment 20001451 PARAMETER Experiment Name: At_Far-red-induction_P Parameter: Plant Line Value: Columbia
  misc_feature: MA Experiment 20001451 PARAMETER Experiment Name: At_Far-red-induction_P Parameter: Timepoint (hr) Value: 24
  misc_feature: MA Experiment 20001451 PARAMETER Experiment Name: At_Far-red-induction_P Parameter: Tissue Value: Whole Plant
  misc_feature: MA Experiment ID: 20001557 Result: Up-regulated in Transcription
  misc_feature: MA Experiment 20001557 PARAMETER Experiment Name: At_Drought_Soil_Dry_P Parameter: Age (day) Value: 27
  misc_feature: MA Experiment 20001557 PARAMETER Experiment Name: At_Drought_Soil_Dry_P Parameter: Organism Value: A. thaliana
  misc_feature: MA Experiment 20001557 PARAMETER Experiment Name: At_Drought_Soil_Dry_P Parameter: Plant Line Value: WS
  misc_feature: MA Experiment 20001557 PARAMETER Experiment Name: At_Drought_Soil_Dry_P Parameter: Post Timepoint (hr) Value: 3
  misc_feature: MA Experiment 20001557 PARAMETER Experiment Name: At_Drought_Soil_Dry_P Parameter: Post-Treatment Value: Re-Water vs. No Drought
  misc_feature: MA Experiment 20001557 PARAMETER Experiment Name: At_Drought_Soil_Dry_P Parameter: Timepoint (day) Value: 13
  misc_feature: MA Experiment 20001557 PARAMETER Experiment Name: At_Drought_Soil_Dry_P Parameter: Treatment Value: Drought vs. No Drought
agcaaatatcacacaatttttcttcaatatttttacttatacacagcaaaaacgagagaaagagagagagaagaaaagtttctctctttggggttctgtgaaaaccaaaatcgaaatcgcatcataatcttaaatctctcttctttctacgaattttcatgtttatgttccctctctcttgattctccaccatttcactattcacatattttttttttattgataaagttttctcctttttttgagttttacgagaggatttttcaaaggtctaaactttcttgggatctatcagattgtcttgaaactaatgcttacgggttttaacaggttgattgattgatcataccaccatggatatgcatcatctctgaaccaatggggaaacatttctgacatttaatggatcctcaagctttcattcgtctttcggttggctctcttgctttgagaattcccaaggtccttataaactctacttcaaaatctaatgagaagaagaacttttcttctcaatgctcttgcgaaataaaactacgaggctttcctgttcaaacaacatctatccctttgatgccgtcccttgatgcagctcctgaccatcacagtatttccactagcttttatcttgaagaatctgatttaagagctcttttgacacctggatgcttctatagtcctcatgctcacttggaaatctcggttttcacgggtaaaaagagtttgaattgcggtgttggtggcaaaagacagcagattgggatgtttaagttggaggtaggtcctgaatggggagaaggaaaaccaatgattcttttcaatggttggatcagtattggaaagaccaagcgggatggtgctgcagagcttcatttgaaagtgaaacttgatcctgatcctcgatatgtttttcagtttgaggatgttactaccttgagccctcagatagttcagctccgtggctcggtcaagcaacctatcttcagttgcaagtttagcagagacagggtgtcacaggtggatccgttgaatgggtactggtcaagttcaggcgatggaactgagcttgagagtgagagacgtgaaagaaaaggatggaaggtgaagatacatgatctctctggctctgcagttgctgctgctttcataacaactccttttgttccatccactggatgtgattgggtcgcaaagtccaacccgggtgcttggcttgtggtccggcctgacccatctcgaccaaacagctggcagccatggggaaagctcgaagcttggcgggaacgcgggatcagagactccgtgtgttgcagattccatcttctatcaaacggtctagaagttggagatgttttaatgtctgaaatcctcatcagcgctgagaaaggtggggaatttttaatcgacacggataaacagatgctaacagttgcagctacaccaattccaagcccgcagagtagtggagacttctcagggttgggacagtgtgtctctggaggtgggtttgtaatgagctcgagagtgcaaggggaagggaaaagcagcaagcccgttgtacaattagctatgagacatgtaacttgtgtggaagatgcagccattttcatggcacttgctgcagctgttgatcttagcattcttgcttgtaaaccttttaggagaacgagtcggagaaggttccggcattactcctggtgaagaaaggaactctcttttgtgtgttttagtgtacagtttttgaattggactcaaagtctcattgtattaggaagaaactggcttaaggattaagaaatttcactcttctc

SEQ ID NO: 82645 - protein, 432 aa, Arabidopsis thaliana
  peptide (1)..(432): Ceres Seq. ID no. 12666662
  misc_feature (249)..(432): Pfam Name: Protein of unknown function (DUF1005) Pfam Description: Protein of unknown function (DUF1005)
  misc_feature (1)..(432): Homolog of NCBI NO: 15238004 NR Description: putative protein; protein id: At5g17640.1
  misc_feature (1)..(421): Homolog of NCBI NO: 34905328 NR Description: OJ9990_A01.12 [Oryza sativa (japonica
  misc_feature (1)..(379): Homolog of NCBI NO: 15218372 NR Description: unknown protein; protein id: At1g10020.1
  misc_feature (345)..(431): Homolog of NCBI NO: 15218372 NR Description: unknown protein; protein id: At1g10020.1
  misc_feature (1)..(429): Homolog of NCBI NO: 36104436 NR Description: unknown protein [Oryza sativa (japonica
  misc_feature (1)..(429): Homolog of NCBI NO: 15233530 NR Description: putative protein; protein id: At4g29310.1, by cDNA: gi_20260629 [Arabidopsis thaliana]
  misc_feature (62)..(429): Homolog of NCBI NO: 34896878 NR Description: unknown protein [Oryza sativa (japonica
  misc_feature (1)..(431): Homolog of NCBI NO: 15222861 NR Description: hypothetical protein; protein id: At1g50040.1, by cDNA: gi_18389271, supported by cDNA: gi_20258934 [Arabidopsis
  misc_feature (1)..(429): Homolog of NCBI NO: 34909364 NR Description: P0638D12.14 [Oryza sativa (japonica
  misc_feature (119)..(382): Homolog of NCBI NO: 15230917 NR Description: unknown protein; protein id: At3g19680.1, by cDNA: gi_18176371 [Arabidopsis thaliana]
MDPQAFIRLSVGSLALRIPKVLINSTSKSNEKKNFSSQCSCEIKLRGFPVQTTSIPLMPSLDAAPDHHSISTSFYLEESDLRALLTPGCFYSPHAHLEISVFTGKKSLNCGVGGKRQQIGMFKLEVGPEWGEGKPMILFNGWISIGKTKRDGAAELHLKVKLDPDPRYVFQFEDVTTLSPQIVQLRGSVKQPIFSCKFSRDRVSQVDPLNGYWSSSGDGTELESERRERKGWKVKIHDLSGSAVAAAFITTPFVPSTGCDWVAKSNPGAWLVVRPDPSRPNSWQPWGKLEAWRERGIRDSVCCRFHLLSNGLEVGDVLMSEILISAEKGGEFLIDTDKQMLTVAATPIPSPQSSGDFSGLGQCVSGGGFVMSSRVQGEGKSSKPVVQLAMRHVTCVEDAAIFMALAAAVDLSILACKPFRRTSRRRFRHYSW

SEQ ID NO: 82646 - protein, 375 aa, Arabidopsis thaliana
  peptide (1)..(375): Ceres Seq. ID no. 12666663
  misc_feature (192)..(375): Pfam Name: Protein of unknown function (DUF1005) Pfam Description: Protein of unknown function (DUF1005)
  misc_feature (1)..(375): Homolog of NCBI NO: 15238004 NR Description: putative protein; protein id: At5g17640.1
  misc_feature (1)..(364): Homolog of NCBI NO: 34905328 NR Description: OJ9990_A01.12 [Oryza sativa (japonica
  misc_feature (1)..(322): Homolog of NCBI NO: 15218372 NR Description: unknown protein; protein id: At1g10020.1
  misc_feature (288)..(374): Homolog of NCBI NO: 15218372 NR Description: unknown protein; protein id: At1g10020.1
  misc_feature (1)..(372): Homolog of NCBI NO: 36104436 NR Description: unknown protein [Oryza sativa (japonica
  misc_feature (1)..(372): Homolog of NCBI NO: 15233530 NR Description: putative protein; protein id: At4g29310.1, by cDNA: gi_20260629 [Arabidopsis thaliana]
  misc_feature (5)..(372): Homolog of NCBI NO: 34896878 NR Description: unknown protein [Oryza sativa (japonica
  misc_feature (1)..(374): Homolog of NCBI NO: 15222861 NR Description: hypothetical protein; protein id: At1g50040.1, by cDNA: gi_18389271, supported by cDNA: gi_20258934 [Arabidopsis
  misc_feature (1)..(372): Homolog of NCBI NO: 34909364 NR Description: P0638D12.14 [Oryza sativa (japonica
  misc_feature (62)..(325): Homolog of NCBI NO: 15230917 NR Description: unknown protein; protein id: At3g19680.1, by cDNA: gi_18176371 [Arabidopsis thaliana]
MPSLDAAPDHHSISTSFYLEESDLRALLTPGCFYSPHAHLEISVFTGKKSLNCGVGGKRQQIGMFKLEVGPEWGEGKPMILFNGWISIGKTKRDGAAELHLKVKLDPDPRYVFQFEDVTTLSPQIVQLRGSVKQPIFSCKFSRDRVSQVDPLNGYWSSSGDGTELESERRERKGWKVKIHDLSGSAVAAAFITTPFVPSTGCDWVAKSNPGAWLVVRPDPSRPNSWQPWGKLEAWRERGIRDSVCCRFHLLSNGLEVGDVLMSEILISAEKGGEFLIDTDKQMLTVAATPIPSPQSSGDFSGLGQCVSGGGFVMSSRVQGEGKSSKPVVQLAMRHVTCVEDAAIFMALAAAVDLSILACKPFRRTSRRRFRHYSW

SEQ ID NO: 82647 - protein, 312 aa, Arabidopsis thaliana
  peptide (1)..(312): Ceres Seq. ID no. 12666664
  misc_feature (129)..(312): Pfam Name: Protein of unknown function (DUF1005) Pfam Description: Protein of unknown function (DUF1005)
  misc_feature (1)..(312): Homolog of NCBI NO: 15238004 NR Description: putative protein; protein id: At5g17640.1
  misc_feature (1)..(301): Homolog of NCBI NO: 34905328 NR Description: OJ9990_A01.12 [Oryza sativa (japonica
  misc_feature (1)..(259): Homolog of NCBI NO: 15218372 NR Description: unknown protein; protein id: At1g10020.1
  misc_feature (225)..(311): Homolog of NCBI NO: 15218372 NR Description: unknown protein; protein id: At1g10020.1
  misc_feature (1)..(309): Homolog of NCBI NO: 36104436 NR Description: unknown protein [Oryza sativa (japonica
  misc_feature (1)..(309): Homolog of NCBI NO: 15233530 NR Description: putative protein; protein id: At4g29310.1, by cDNA: gi_20260629 [Arabidopsis thaliana]
  misc_feature (1)..(309): Homolog of NCBI NO: 34896878 NR Description: unknown protein [Oryza sativa (japonica
  misc_feature (1)..(311): Homolog of NCBI NO: 15222861 NR Description: hypothetical protein; protein id: At1g50040.1, by cDNA: gi_18389271, supported by cDNA: gi_20258934 [Arabidopsis
  misc_feature (1)..(309): Homolog of NCBI NO: 34909364 NR Description: P0638D12.14 [Oryza sativa (japonica
  misc_feature (1)..(262): Homolog of NCBI NO: 15230917 NR Description: unknown protein; protein id: At3g19680.1, by cDNA: gi_18176371 [Arabidopsis thaliana]
MFKLEVGPEWGEGKPMILFNGWISIGKTKRDGAAELHLKVKLDPDPRYVFQFEDVTTLSPQIVQLRGSVKQPIFSCKFSRDRVSQVDPLNGYWSSSGDGTELESERRERKGWKVKIHDLSGSAVAAAFITTPFVPSTGCDWVAKSNPGAWLVVRPDPSRPNSWQPWGKLEAWRERGIRDSVCCRFHLLSNGLEVGDVLMSEILISAEKGGEFLIDTDKQMLTVAATPIPSPQSSGDFSGLGQCVSGGGFVMSSRVQGEGKSSKPVVQLAMRHVTCVEDAAIFMALAAAVDLSILACKPFRRTSRRRFRHYSW

SEQ ID NO: 82648 - DNA, 5075 bp, Arabidopsis thaliana
  misc_feature (1)..(5075): Ceres Seq. ID no. 12666701
  misc_feature: MA Experiment ID: 20000314 Result: Up-regulated in Transcription
  misc_feature: MA Experiment 20000314 PARAMETER Experiment Name: At_14day_Shoots-Roots_Sub_P Parameter: Age (day) Value: 14
  misc_feature: MA Experiment 20000314 PARAMETER Experiment Name: At_14day_Shoots-Roots_Sub_P Parameter: Organism Value: A. thaliana
  misc_feature: MA Experiment 20000314 PARAMETER Experiment Name: At_14day_Shoots-Roots_Sub_P Parameter: Plant Line Value: WS
  misc_feature: MA Experiment 20000314 PARAMETER Experiment Name: At_14day_Shoots-Roots_Sub_P Parameter: Tissue Value: Roots vs. Whole Plant
  misc_feature: MA Experiment ID: 20000315 Result: Down-regulated in Transcription
  misc_feature: MA Experiment 20000315 PARAMETER Experiment Name: At_14day_Shoots-Roots_Sub_P Parameter: Age (day) Value: 14
  misc_feature: MA Experiment 20000315 PARAMETER Experiment Name: At_14day_Shoots-Roots_Sub_P Parameter: Organism Value: A. thaliana
  misc_feature: MA Experiment 20000315 PARAMETER Experiment Name: At_14day_Shoots-Roots_Sub_P Parameter: Plant Line Value: WS
  misc_feature: MA Experiment 20000315 PARAMETER Experiment Name: At_14day_Shoots-Roots_Sub_P Parameter: Tissue Value: Shoots vs. Whole Plant
  misc_feature: MA Experiment ID: 20000440 Result: Down-regulated in Transcription
  misc_feature: MA Experiment 20000440 PARAMETER Experiment Name: At_Closed-Flower__Sub_P Parameter: Tissue Value: Closed Flower vs. Whole Plant
gtgttaagaatagatagatgagagtgatgatttggagaaagagagatggaaccaccagctgctcgtgtaacgccgtcgattaaggccgactgtagtcacagcgtcaacatcatctgcgaggaaacagtactgcactcccttgtcagccacctctcggccgctttacgccgggaaggcatatctgtgtttgtggatgcgtgcggattgcaggaaaccaagttcttctccattaaacagaatcagccgttgacagatggggctagggttttggtggtggttatttccgacgaggtggagttctacgatccttggtttcctaagttcttaaaggttatccagggttggcaaaacaacggccacgtggtggttccagtcttctacggcgtcgattcgttgacccgagtttacgggtgggccaatagttggctggaggccgaaaaattaaccagccaccaatcaaagatcttaagcaataatgtactcacggactccgaactagtggaagagatcgtcagagatgtttatgggaagctttatcctgcagaacgagttggaatttacgcgaggctactagagatagaaaagttgctttacaagcaacatagggacatccgaagcataggaatttggggtatgcctggcataggcaagacgacgcttgctaaagcagtctttaatcacatgtccactgattatgatgcttcttgcttcatcgagaactttgatgaagcttttcataaggagggactccaccgtttgctcaaagaaagaattggtaaaattctaaaggatgagtttgacatagaaagttcgtatattatgagaccgaccctccatagggacaaattatacgataaaaggattcttgttgttttagatgatgtgcgcgattcccttgctgcagagtccttccttaaaaggcttgattggtttggttccggaagccttataatcataacctccgttgataaacaagtgtttgccttttgtcagatcaatcaaatatacacggttcaaggtttaaatgtgcacgaggctctgcagcttttctcccaaagcgtatttggaataaacgagccagagcagaatgacaggaaactgtcaatgaaggtgattgactatgttaatggaaacccgttagctctcagcatttacggccgagagctaatggggaagaagtcagaaatggagactgcattcttcgagctcaagcattgtcctcccttaaagattcaggatgtgctaaaaaacgcttatagtgcacttagcgacaatgagaagaacattgttttggacattgcttttttcttcaagggagaaactgtcaattatgtgatgcagctgcttgaggaatctcattactttccacgtcttgcaatagatgttcttgtggacaagtgtgtgttaactatctcagaaaacacagtgcaaatgaataatttgatccaagacacctgccaagaaatcttcaatggagaaattgagacctgcaccagaatgtgggaaccttccagaatcagatatctgctagaatatgatgaacttgaaggaagtggagaaaccaaagcaatgcctaaatctggtctggtcgctgaacacatcgaaagcatattcctggacacttcaaacgtgaaatttgatgtcaaacacgatgcattcaagaatatgtttaatctcaaattcctaaagatatacaattcatgctctaaatatatttctggactcaattttccaaagggcctcgattctctgccttatgagctaaggctcctccactgggagaactaccctttgcaatccttgcctcaagattttgactttggacaccttgttaagctcagtatgccttacagccagcttcataaactcgggacaagagtcaaggaccttgtgatgttaaagaggctcattctttctcattctttacagctagttgaatgtgacatactaatatatgctcaaaatatcgagctaattgatcttcaaggctgtacaggattgcaaagatttccagacacgagtcaattacagaatctccgggtagtaaatctctcaggttgcacagagatcaaatgtttctcaggggttccaccaaatattgaggaattacatctccaaggaactcgtataagggaaataccaatattcaatgcgacccatccccccaaggttaagctggaccggaaaaagctttggaatcttctagaaaacttctcggatgttgagcatatcgatttggagtgtgtaacaaatctagctacagttacctcaaataatcatgttatgggcaagcttgtctgcttgaatatgaaatattgttccaatttgcgaggccttcctgacatggtcagtttagaatctctcaaagttctttatctgtcgggctgttcagagcttgagaaaattatgggtttcccgagaaacttgaaaaaactatatgttggtggaaccgccatacgagaattgccacagcttcccaacagtctagaattcctgaatgctcatggttgtaagcatctgaagtcaattaatttggattttgagcagcttcctaggcacttcatcttcagtaattgttatagattttcttcacaagtgatcgctgagttcgtagagaaaggtcttgtagcaagtttagcaagagcaaaacaagaggaactcatcaaagcacctgaagtcatcatctgtattcctatggacacacggcagagatcctcctttcgcttgcaagcaggtcgaaatgcaatgacagacttagttccgtggatgcaaaaacctatctcaggcttttctatgtcagttgtagtatcatttcaagatgattaccacaatgatgtaggtcttcgcattaggtgtgtaggtacatggaagacctggaacaaccagcctgatagaatagttgagagattttttcaatgttgggctcctaccgaagctccaaaagttgtagcggatcacatttttgtcttgtatgataccaaaatgcatcctagtgatagtgaagaaaaccacatcagtatgtgggctcatgaagtcaaatttgaattccacacagtgagtggggaaaacaatcctctaggtgctagttgcaaggtgactgaatgtggtgtcgaggtaattacagctgcaacaggtgatactagtgttagtggaattataagagaaagtgaaactataactattatcgagaaggaggatactattattgatgaggaggatactcctcttttgtccagaaagccagaggaaacgaatcgttctcgttcatctagcgaattacagaagctttctagtacgtcaagtaaggtaagatctaagggaaatgtgttttggaagtggttaggttgttttcccctgcagccaaaaaacttgagatctagaagtaggcgcacaacagcgttagaagaagcgttagaagaagcattaaaagaaagagaaaaattagaggacaccagagagttacaaatagcattaatagagtcaaagaagataaaaaaaataaagcaagcagacgaaagggatcaaataaagcacgcagacgaaagggaacaaagaaagcattccaaagatcatgaggaagaagaaatagagtcaaatgagaaagaagaaagaaggcattccaaagattatgtgatagaagaattagtgttaaaggggaaaggtaaaagaaagcaactggatgatgataaagccgacgaaaaggaacaaataaagcattccaaagatcatgtggaagaagaagtgaatcctcctcttagcaaatgcaaggattgcaaatctgcaattgaagatggaatatctatcaatgcctacggttctgtttggcatcctcaatgtttctgttgccttcgttgtcgggagcctattgctatgaacgagatttcagacttaagaggaatgtatcacaaaccttgctacaaggagctccgtcatccgaattgctatgtctgcgaaaaaaagattcctcgtactgcggaaggtttaaagtaccatgagcatccgttctggatggaaacatactgcccttctcatgatggtgatggaactcccaaatgttgtagctgtgaaagattagagcattgcggaacacagtatgtaatgcttgcagattttcgatggctatgtcgagaatgtatggacagcgcgattatggattctgatgaatgccaacctttgcactttgaaatccgtgaattctttgagggcttacacatgaagattgaggaagaatttcctgtttatttggtggagaaaaatgctctgaataaagctgagaaggaagagaagattgacaaacagggggatcagtgtctgatggtagtcagaggtatttgcctatctgaagagcagattgtcacaagtgtctcacaaggagtaaggaggatgttgaataagcagatactagatacggttacagagtctcaaagggttgttcgcaagtgcgaggtcactgcaattctcatcttatatgggcttcctaggttactcacaggatatatcttggcccatgagatgatgcatgcttatcttagactcaatggttacaggaatcttaacatggttcttgaagaaggattatgccaagtgttaggctacatgtggttggagtgtcagacatacgtttttgatactgccacaatagcttcttcttcttcttcttcccgcactcctctatctacaaccacatcaaagaaagttgacccatctgattttgagaagaggctggtaaatttctgcaagcatcagatagaaacagatgagtcaccattcttcggtgacgggttcaggaaagttaacaaaatgatggcctcaaataatcacagccttaaggataccctgaaagagatcatcagcatttccaagactccacaatattcaaagttatgatagccagccatatgttataccagtaatgcacgttttcattctttggtgtgaacacagtttcttcttgctctattgctcttgttctcatgttttaagagtttctccttcgttttgcagccatagaaactttaaacaatcttgcctgttgtacaaatgtatttttcgctggaatgaattcttgctgtgat

SEQ ID NO: 82649 - protein, 1613 aa, Arabidopsis thaliana
  peptide (1)..(1613): Ceres Seq. ID no. 12666702
  misc_feature (178)..(368): Pfam Name: NB-ARC domain Pfam Description: NB-ARC domain
  misc_feature (20)..(832): Homolog of NCBI NO: 15242355 NR Description: disease resistance protein (TIR-NBS-LRR class), protein id: At5g45260.1 [Arabidopsis thaliana]
  misc_feature (759)..(1037): Homolog of NCBI NO: 15242355 NR Description: disease resistance protein (TIR-NBS-LRR class), protein id: At5g45260.1 [Arabidopsis thaliana]
  misc_feature (20)..(832): Homolog of NCBI NO: 26449414 NR Description: putative disease resistance protein [Arabidopsis
  misc_feature (759)..(1037): Homolog of NCBI NO: 26449414 NR Description: putative disease resistance protein [Arabidopsis
  misc_feature (20)..(832): Homolog of NCBI NO: 29839621 NR Description: Probable WRKY transcription factor 52 (WRKY protein 52) (Disease resistance protein RRS1) (Resistance to
  misc_feature (759)..(1037): Homolog of NCBI NO: 29839621 NR Description: Probable WRKY transcription factor 52 (WRKY protein 52) (Disease resistance protein RRS1) (Resistance to
  misc_feature (19)..(1035): Homolog of NCBI NO: 15234300 NR Description: disease resistance protein (TIR-NBS-LRR class), protein id: At4g36140.1 [Arabidopsis thaliana]
  misc_feature (20)..(866): Homolog of NCBI NO: 30694675 NR Description: disease resistance protein-related [Arabidopsis >gi|29839627|sp|Q9FL92|WR16_ARATH Probable WRKY transcription
  misc_feature (20)..(1037): Homolog of NCBI NO: 30694677 NR Description: disease resistance protein-related [Arabidopsis
  misc_feature (1276)..(1613): Homolog of NCBI NO: 10177891 NR Description: emb|CAB16816.1|~gene_id:MPI7.6~similar to unknown
MEPPAARVTPSIKADCSHSVNIICEETVLHSLVSHLSAALRREGISVFVDACGLQETKFFSIKQNQPLTDGARVLVVVISDEVEFYDPWFPKFLKVIQGWQNNGHVVVPVFYGVDSLTRVYGWANSWLEAEKLTSHQSKILSNNVLTDSELVEEIVRDVYGKLYPAERVGIYARLLEIEKLLYKQHRDIRSIGIWGMPGIGKTTLAKAVFNHMSTDYDASCFIENFDEAFHKEGLHRLLKERIGKILKDEFDIESSYIMRPTLHRDKLYDKRILVVLDDVRDSLAAESFLKRLDWFGSGSLIIITSVDKQVFAFCQINQIYTVQGLNVHEALQLFSQSVFGINEPEQNDRKLSMKVIDYVNGNPLALSIYGRELMGKKSEMETAFFELKHCPPLKIQDVLKNAYSALSDNEKNIVLDIAFFFKGETVNYVMQLLEESHYFPRLAIDVLVDKCVLTISENTVQMNNLIQDTCQEIFNGEIETCTRMWEPSRIRYLLEYDELEGSGETKAMPKSGLVAEHIESIFLDTSNVKFDVKHDAFKNMFNLKFLKIYNSCSKYISGLNFPKGLDSLPYELRLLHWENYPLQSLPQDFDFGHLVKLSMPYSQLHKLGTRVKDLVMLKRLILSHSLQLVECDILIYAQNIELIDLQGCTGLQRFPDTSQLQNLRVVNLSGCTEIKCFSGVPPNIEELHLQGTRIREIPIFNATHPPKVKLDRKKLWNLLENFSDVEHIDLECVTNLATVTSNNHVMGKLVCLNMKYCSNLRGLPDMVSLESLKVLYLSGCSELEKIMGFPRNLKKLYVGGTAIRELPQLPNSLEFLNAHGCKHLKSINLDFEQLPRHFIFSNCYRFSSQVIAEFVEKGLVASLARAKQEELIKAPEVIICIPMDTRQRSSFRLQAGRNAMTDLVPWMQKPISGFSMSVVVSFQDDYHNDVGLRIRCVGTWKTWNNQPDRIVERFFQCWAPTEAPKVVADHIFVLYDTKMHPSDSEENHISMWAHEVKFEFHTVSGENNPLGASCKVTECGVEVITAATGDTSVSGIIRESETITIIEKEDTIIDEEDTPLLSRKPEETNRSRSSSELQKLSSTSSKVRSKGNVFWKWLGCFPLQPKNLRSRSRRTTALEEALEEALKEREKLEDTRELQIALIESKKIKKIKQADERDQIKHADEREQRKHSKDHEEEEIESNEKEERRHSKDYVIEELVLKGKGKRKQLDDDKADEKEQIKHSKDHVEEEVNPPLSKCKDCKSAIEDGISINAYGSVWHPQCFCCLRCREPIAMNEISDLRGMYHKPCYKELRHPNCYVCEKKIPRTAEGLKYHEHPFWMETYCPSHDGDGTPKCCSCERLEHCGTQYVMLADFRWLCRECMDSAIMDSDECQPLHFEIREFFEGLHMKIEEEFPVYLVEKNALNKAEKEEKIDKQGDQCLMVVRGICLSEEQIVTSVSQGVRRMLNKQILDTVTESQRVVRKCEVTAILILYGLPRLLTGYILAHEMMHAYLRLNGYRNLNMVLEEGLCQVLGYMWLECQTYVFDTATIASSSSSSRTPLSTTTSKKVDPSDFEKRLVNFCKHQIETDESPFFGDGFRKVNKMMASNNHSLKDTLKEIISISKTPQYSKL

SEQ ID NO: 82650 - protein, 1417 aa, Arabidopsis thaliana
  peptide (1)..(1417): Ceres Seq. ID no. 12666703
  misc_feature (1)..(172): Pfam Name: NB-ARC domain Pfam Description: NB-ARC domain
  misc_feature (1)..(636): Homolog of NCBI NO: 15242355 NR Description: disease resistance protein (TIR-NBS-LRR class), protein id: At5g45260.1 [Arabidopsis thaliana]
  misc_feature (563)..(841): Homolog of NCBI NO: 15242355 NR Description: disease resistance protein (TIR-NBS-LRR class), protein id: At5g45260.1 [Arabidopsis thaliana]
  misc_feature (1)..(636): Homolog of NCBI NO: 26449414 NR Description: putative disease resistance protein [Arabidopsis
  misc_feature (563)..(841): Homolog of NCBI NO: 26449414 NR Description: putative disease resistance protein [Arabidopsis
  misc_feature (1)..(636): Homolog of NCBI NO: 29839621 NR Description: Probable WRKY transcription factor 52 (WRKY protein 52) (Disease resistance protein RRS1) (Resistance to
  misc_feature (563)..(841): Homolog of NCBI NO: 29839621 NR Description: Probable WRKY transcription factor 52 (WRKY protein 52) (Disease resistance protein RRS1) (Resistance to
  misc_feature (1)..(839): Homolog of NCBI NO: 15234300 NR Description: disease resistance protein (TIR-NBS-LRR class), protein id: At4g36140.1 [Arabidopsis thaliana]
  misc_feature (1)..(670): Homolog of NCBI NO: 30694675 NR Description: disease resistance protein-related [Arabidopsis >gi|29839627|sp|Q9FL92|WR16_ARATH Probable WRKY transcription
  misc_feature (1)..(841): Homolog of NCBI NO: 30694677 NR Description: disease resistance protein-related [Arabidopsis
  misc_feature (1080)..(1417): Homolog of NCBI NO: 10177891 NR Description: emb|CAB16816.1|~gene_id:MPI7.6~similar to unknown
MPGIGKTTLAKAVFNHMSTDYDASCFIENFDEAFHKEGLHRLLKERIGKILKDEFDIESSYIMRPTLHRDKLYDKRILVVLDDVRDSLAAESFLKRLDWFGSGSLIIITSVDKQVFAFCQINQIYTVQGLNVHEALQLFSQSVFGINEPEQNDRKLSMKVIDYVNGNPLALSIYGRELMGKKSEMETAFFELKHCPPLKIQDVLKNAYSALSDNEKNIVLDIAFFFKGETVNYVMQLLEESHYFPRLAIDVLVDKCVLTISENTVQMNNLIQDTCQEIFNGEIETCTRMWEPSRIRYLLEYDELEGSGETKAMPKSGLVAEHIESIFLDTSNVKFDVKHDAFKNMFNLKFLKIYNSCSKYISGLNFPKGLDSLPYELRLLHWENYPLQSLPQDFDFGHLVKLSMPYSQLHKLGTRVKDLVMLKRLILSHSLQLVECDILIYAQNIELIDLQGCTGLQRFPDTSQLQNLRVVNLSGCTEIKCFSGVPPNIEELHLQGTRIREIPIFNATHPPKVKLDRKKLWNLLENFSDVEHIDLECVTNLATVTSNNHVMGKLVCLNMKYCSNLRGLPDMVSLESLKVLYLSGCSELEKIMGFPRNLKKLYVGGTAIRELPQLPNSLEFLNAHGCKHLKSINLDFEQLPRHFIFSNCYRFSSQVIAEFVEKGLVASLARAKQEELIKAPEVIICIPMDTRQRSSFRLQAGRNAMTDLVPWMQKPISGFSMSVVVSFQDDYHNDVGLRIRCVGTWKTWNNQPDRIVERFFQCWAPTEAPKVVADHIFVLYDTKMHPSDSEENHISMWAHEVKFEFHTVSGENNPLGASCKVTECGVEVITAATGDTSVSGIIRESETITIIEKEDTIIDEEDTPLLSRKPEETNRSRSSSELQKLSSTSSKVRSKGNVFWKWLGCFPLQPKNLRSRSRRTTALEEALEEALKEREKLEDTRELQIALIESKKIKKIKQADERDQIKHADEREQRKHSKDHEEEEIESNEKEERRHSKDYVIEELVLKGKGKRKQLDDDKADEKEQIKHSKDHVEEEVNPPLSKCKDCKSAIEDGISINAYGSVWHPQCFCCLRCREPIAMNEISDLRGMYHKPCYKELRHPNCYVCEKKIPRTAEGLKYHEHPFWMETYCPSHDGDGTPKCCSCERLEHCGTQYVMLADFRWLCRECMDSAIMDSDECQPLHFEIREFFEGLHMKIEEEFPVYLVEKNALNKAEKEEKIDKQGDQCLMVVRGICLSEEQIVTSVSQGVRRMLNKQILDTVTESQRVVRKCEVTAILILYGLPRLLTGYILAHEMMHAYLRLNGYRNLNMVLEEGLCQVLGYMWLECQTYVFDTATIASSSSSSRTPLSTTTSKKVDPSDFEKRLVNFCKHQIETDESPFFGDGFRKVNKMMASNNHSLKDTLKEIISISKTPQYSKL

SEQ ID NO: 82651 - protein, 1401 aa, Arabidopsis thaliana
  peptide (1)..(1401): Ceres Seq. ID no. 12666704
  misc_feature (1)..(156): Pfam Name: NB-ARC domain Pfam Description: NB-ARC domain
  misc_feature (1)..(620): Homolog of NCBI NO: 15242355 NR Description: disease resistance protein (TIR-NBS-LRR class), protein id: At5g45260.1 [Arabidopsis thaliana]
  misc_feature (547)..(825): Homolog of NCBI NO: 15242355 NR Description: disease resistance protein (TIR-NBS-LRR class), protein id: At5g45260.1 [Arabidopsis thaliana]
  misc_feature (1)..(620): Homolog of NCBI NO: 26449414 NR Description: putative disease resistance protein [Arabidopsis
  misc_feature (547)..(825): Homolog of NCBI NO: 26449414 NR Description: putative disease resistance protein [Arabidopsis
  misc_feature (1)..(620): Homolog of NCBI NO: 29839621 NR Description: Probable WRKY transcription factor 52 (WRKY protein 52) (Disease resistance protein RRS1) (Resistance to
  misc_feature (547)..(825): Homolog of NCBI NO: 29839621 NR Description: Probable WRKY transcription factor 52 (WRKY protein 52) (Disease resistance protein RRS1) (Resistance to
  misc_feature (1)..(823): Homolog of NCBI NO: 15234300 NR Description: disease resistance protein (TIR-NBS-LRR class), protein id: At4g36140.1 [Arabidopsis thaliana]
  misc_feature (1)..(654): Homolog of NCBI NO: 30694675 NR Description: disease resistance protein-related [Arabidopsis >gi|29839627|sp|Q9FL92|WR16_ARATH Probable WRKY transcription
  misc_feature (1)..(825): Homolog of NCBI NO: 30694677 NR Description: disease resistance protein-related [Arabidopsis
  misc_feature (1064)..(1401): Homolog of NCBI NO: 10177891 NR Description: emb|CAB16816.1|~gene_id:MPI7.6~similar to unknown
MSTDYDASCFIENFDEAFHKEGLHRLLKERIGKILKDEFDIESSYIMRPTLHRDKLYDKRILVVLDDVRDSLAAESFLKRLDWFGSGSLIIITSVDKQVFAFCQINQIYTVQGLNVHEALQLFSQSVFGINEPEQNDRKLSMKVIDYVNGNPLALSIYGRELMGKKSEMETAFFELKHCPPLKIQDVLKNAYSALSDNEKNIVLDIAFFFKGETVNYVMQLLEESHYFPRLAIDVLVDKCVLTISENTVQMNNLIQDTCQEIFNGEIETCTRMWEPSRIRYLLEYDELEGSGETKAMPKSGLVAEHIESIFLDTSNVKFDVKHDAFKNMFNLKFLKIYNSCSKYISGLNFPKGLDSLPYELRLLHWENYPLQSLPQDFDFGHLVKLSMPYSQLHKLGTRVKDLVMLKRLILSHSLQLVECDILIYAQNIELIDLQGCTGLQRFPDTSQLQNLRVVNLSGCTEIKCFSGVPPNIEELHLQGTRIREIPIFNATHPPKVKLDRKKLWNLLENFSDVEHIDLECVTNLATVTSNNHVMGKLVCLNMKYCSNLRGLPDMVSLESLKVLYLSGCSELEKIMGFPRNLKKLYVGGTAIRELPQLPNSLEFLNAHGCKHLKSINLDFEQLPRHFIFSNCYRFSSQVIAEFVEKGLVASLARAKQEELIKAPEVIICIPMDTRQRSSFRLQAGRNAMTDLVPWMQKPISGFSMSVVVSFQDDYHNDVGLRIRCVGTWKTWNNQPDRIVERFFQCWAPTEAPKVVADHIFVLYDTKMHPSDSEENHISMWAHEVKFEFHTVSGENNPLGASCKVTECGVEVITAATGDTSVSGIIRESETITIIEKEDTIIDEEDTPLLSRKPEETNRSRSSSELQKLSSTSSKVRSKGNVFWKWLGCFPLQPKNLRSRSRRTTALEEALEEALKEREKLEDTRELQIALIESKKIKKIKQADERDQIKHADEREQRKHSKDHEEEEIESNEKEERRHSKDYVIEELVLKGKGKRKQLDDDKADEKEQIKHSKDHVEEEVNPPLSKCKDCKSAIEDGISINAYGSVWHPQCFCCLRCREPIAMNEISDLRGMYHKPCYKELRHPNCYVCEKKIPRTAEGLKYHEHPFWMETYCPSHDGDGTPKCCSCERLEHCGTQYVMLADFRWLCRECMDSAIMDSDECQPLHFEIREFFEGLHMKIEEEFPVYLVEKNALNKAEKEEKIDKQGDQCLMVVRGICLSEEQIVTSVSQGVRRMLNKQILDTVTESQRVVRKCEVTAILILYGLPRLLTGYILAHEMMHAYLRLNGYRNLNMVLEEGLCQVLGYMWLECQTYVFDTATIASSSSSSRTPLSTTTSKKVDPSDFEKRLVNFCKHQIETDESPFFGDGFRKVNKMMASNNHSLKDTLKEIISISKTPQYSKL

SEQ ID NO: 82652 - DNA, 570 bp, Arabidopsis thaliana
  misc_feature (1)..(570): Ceres Seq. ID no. 12666741
  misc_feature: MA Experiment ID: 20000307 Result: Down-regulated in Transcription
  misc_feature: MA Experiment 20000307 PARAMETER Experiment Name: At_Germinating_Seeds_Sub_P Parameter: Age (hr) Value: 24 vs. 0
  misc_feature: MA Experiment 20000307 PARAMETER Experiment Name: At_Germinating_Seeds_Sub_P Parameter: Organism Value: A. thaliana
  misc_feature: MA Experiment 20000307 PARAMETER Experiment Name: At_Germinating_Seeds_Sub_P Parameter: Plant Line Value: WS
  misc_feature: MA Experiment 20000307 PARAMETER Experiment Name: At_Germinating_Seeds_Sub_P Parameter: Tissue Value: Germinating Seeds
atgagaccaccacgtggcggcggcagcttcaggggaaggggaggaagagataacggcggacgtggacgtggacgtggacgtggacgtggacgctttggtggtggtaattatgacgaaggacctcccagcgaagtcgttgaagttgcaacttttctccatgcttgtgagggagatgctgtgttcaagctctccaatgtgaaaatcccacatttcaatgccccaatctacctacaaaacaagacccagattgggagagtagatgaaatctttggtcctattaatgaatctctattttctatcaaaatgagggaaggtattgtagctacctcatatagtcaaggcgataagttcttcattagccctgagaagcttttacctctatcaagattccttcctcaaccaaagggacaatcaggaggccgtggtgaaggaagagtccctccccgtggtagagggcctccccgtggtagaggcaatttcagaggtagaggtgctcccagaggtgctagcagagggtttcaaccaagaggtggtcctcgtggaggcttcagaggccgagggagggcctag

SEQ ID NO: 82653 - protein, 189 aa, Arabidopsis thaliana
  peptide (1)..(189): Ceres Seq. ID no. 12666742
  misc_feature (38)..(139): Pfam Name: Gar1 protein RNA binding region Pfam Description: Gar1 protein RNA binding region
  misc_feature (1)..(189): Homolog of NCBI NO: 15238764 NR Description: putative protein; protein id: At5g18180.1 thaliana] >gi|9758900|dbj|BAB09476.1| contains similarity to GAR1
  misc_feature (1)..(188): Homolog of NCBI NO: 18396707 NR Description: putative GAR1 protein; protein id: At3g03920.1, by cDNA: 10984., supported by cDNA: gi_17380835, supported by gi_20259632 [Arabidopsis thaliana] >gi|17380836|gb|AAL36230.1|
  misc_feature (1)..(188): Homolog of NCBI NO: 21536739 NR Description: putative GAR1 protein [Arabidopsis thaliana]
  misc_feature (1)..(188): Homolog of NCBI NO: 6006850 NR Description: putative GAR1 protein [Arabidopsis thaliana]
  misc_feature (6)..(187): Homolog of NCBI NO: 39587922 NR Description: Hypothetical protein CBG13541 [Caenorhabditis
  misc_feature (5)..(187): Homolog of NCBI NO: 9506713 NR Description: nucleolar protein family A, member 1; GAR1 [Homo sapiens] >gi|15011916|ref|NP_127460.1| nucleolar protein A, member 1; GAR1 protein [Homo sapiens]
  misc_feature (9)..(188): Homolog of NCBI NO: 6321881 NR Description: small nucleolar RNP proteins; Gar1p
  misc_feature (6)..(187): Homolog of NCBI NO: 18256903 NR Description: Similar to nucleolar protein family A, member 1
  misc_feature (6)..(187): Homolog of NCBI NO: 28913737 NR Description: Similar to nucleolar protein family A, member 1
  misc_feature (6)..(187): Homolog of NCBI NO: 13384710 NR Description: nucleolar protein family A, member 1; H/ACA small RNPs; expressed sequence AI326794 [Mus musculus]
MRPPRGGGSFRGRGGRDNGGRGRGRGRGRGRFGGGNYDEGPPSEVVEVATFLHACEGDAVFKLSNVKIPHFNAPIYLQNKTQIGRVDEIFGPINESLFSIKMREGIVATSYSQGDKFFISPEKLLPLSRFLPQPKGQSGGRGEGRVPPRGRGPPRGRGNFRGRGAPRGASRGFQPRGGPRGGFRGRGRA

SEQ ID NO: 82654 - DNA, 1467 bp, Arabidopsis thaliana
  misc_feature (1)..(1467): Ceres Seq. ID no. 12666749
  misc_feature: MA Experiment ID: 20000171 Result: Up-regulated in Transcription
  misc_feature: MA Experiment 20000171 PARAMETER Experiment Name: At_42deg_Heat_P Parameter: Age (day) Value: 14
  misc_feature: MA Experiment 20000171 PARAMETER Experiment Name: At_42deg_Heat_P Parameter: Organism Value: A. thaliana
  misc_feature: MA Experiment 20000171 PARAMETER Experiment Name: At_42deg_Heat_P Parameter: Plant Line Value: WS
  misc_feature: MA Experiment 20000171 PARAMETER Experiment Name: At_42deg_Heat_P Parameter: Temperature (deg C) Value: 42 vs. 22
  misc_feature: MA Experiment 20000171 PARAMETER Experiment Name: At_42deg_Heat_P Parameter: Timepoint (hr) Value: 1
  misc_feature: MA Experiment 20000171 PARAMETER Experiment Name: At_42deg_Heat_P Parameter: Tissue Value: Aerial
atgagtaaccgacggaaacagagcaccactgccggcatcttcctctgcatcaccatagtatctttattatccggcgacgtctccgccttgggagtaaactggggaacgatgtcaactcaccagctccctccaaagacggtggtacagatgttaaaagacaacaacgtcaaaaaagtgaagcttttcgatgcggacacaaacaccatggtagctcttgccggctctggtatcgaagttatggttgcaatccctaacgatcagctcaaagccatgggaagttataacagagctaaagattgggttcgaagaaacatcactcgtttcaatgacgatgttaaaatcaaatatgtcgccgttggaaatgagccgtttttgacagcttataatggatcattcataaacttaacttatccagcactcttcaacatccaaaaagcattaaacgaagctggagttggagatttcatcaaagccaccgtacctttaaacgctgacgtctataattctccgctggaaaatccagttccttctgccggaagtttccgtcaagacatctttgaagagatgaaactaatagtcaacttcttagctcataacaaagctcccttcactgtcaacatttaccctttcctaagtctttaccttagcagcgatttcccttttgactatgccttcttcaatggccaaaacactgtcagcgataacggcgttatctatacaaatgttttcgacgccaatttcgataccctcttggcttcacttaaagctttgggtcatggagacatgactgttatagttggagaagttggttggccaacggatggtgacaagaatgctaacatcccaaacgcagaacgcttctacacaggtttgcttccaaagctagcagccaacagaggaacacctatgcgtccgggttacattgaagtttatctctttggattcatcgatgaagatgcaaagagtatagctcctggtaactttgaacgtcactgggggatattcaaatacgatggccaaccgaaatttccagcggatttgtcaggagcaggtcagaagaagatcttaaccggagctcaaaatgttcagtacttgcgaaaccagtggtgtatgttcaaccctaatgccctcactttcagcaacaacactaaccagctcggggataacgtaaactacgcatgtaccttctccgactgcacagctttgggctatggttcctcttgtggtaatcttgatgaggtcgggaatgcctcgtatgcattcaacatgtattttcaggtacagaatcaaaaggcagaggcttgtgactttgagggccttgcaattatcactaccaggaatatttctcgagaacagtgtaattttcctattcaaatcggagatccaacatccggacatagtgatcataaccaccggtttatcagcttctctctggtgagtatgttgctactctttacagcactatga

SEQ ID NO: 82655 - protein, 488 aa, Arabidopsis thaliana
  peptide (1)..(488): Ceres Seq. ID no. 12666750
  misc_feature (30)..(347): Pfam Name: Glycosyl hydrolases family 17 Pfam Description: Glycosyl hydrolases family 17
  misc_feature (1)..(488): Homolog of NCBI NO: 15238768 NR Description: glycosyl hydrolase family 17; protein id:
  misc_feature (1)..(485): Homolog of NCBI NO: 6223646 NR Description: putative beta-1,3-glucanase [Arabidopsis thaliana]
  misc_feature (37)..(485): Homolog of NCBI NO: 22330833 NR Description: glycosyl hydrolase family 17; protein id:
  misc_feature (17)..(485): Homolog of NCBI NO: 15217739 NR Description: glycosyl hydrolase family 17; protein id:
  misc_feature (27)..(459): Homolog of NCBI NO: 15224778 NR Description: glycosyl hydrolase family 17; protein id:
  misc_feature (37)..(485): Homolog of NCBI NO: 25404490 NR Description: hypothetical protein F13O11.7 [imported] -
  misc_feature (12)..(485): Homolog of NCBI NO: 28269434 NR Description: putative beta-1,3 glucanase [Oryza sativa
  misc_feature (8)..(488): Homolog of NCBI NO: 18483232 NR Description: 3-glucanase [Sorghum bicolor]
  misc_feature (114)..(459): Homolog of NCBI NO: 7486246 NR Description: hypothetical protein F27F23.24 - Arabidopsis
  misc_feature (1)..(484): Homolog of NCBI NO: 15238256 NR Description: glycosyl hydrolase family 17; protein id:
MSNRRKQSTTAGIFLCITIVSLLSGDVSALGVNWGTMSTHQLPPKTVVQMLKDNNVKKVKLFDADTNTMVALAGSGIEVMVAIPNDQLKAMGSYNRAKDWVRRNITRFNDDVKIKYVAVGNEPFLTAYNGSFINLTYPALFNIQKALNEAGVGDFIKATVPLNADVYNSPLENPVPSAGSFRQDIFEEMKLIVNFLAHNKAPFTVNIYPFLSLYLSSDFPFDYAFFNGQNTVSDNGVIYTNVFDANFDTLLASLKALGHGDMTVIVGEVGWPTDGDKNANIPNAERFYTGLLPKLAANRGTPMRPGYIEVYLFGFIDEDAKSIAPGNFERHWGIFKYDGQPKFPADLSGAGQKKILTGAQNVQYLRNQWCMFNPNALTFSNNTNQLGDNVNYACTFSDCTALGYGSSCGNLDEVGNASYAFNMYFQVQNQKAEACDFEGLAIITTRNISREQCNFPIQIGDPTSGHSDHNHRFISFSLVSMLLLFTAL

SEQ ID NO: 82656 - protein, 452 aa, Arabidopsis thaliana
  peptide (1)..(452): Ceres Seq. ID no. 12666751
  misc_feature (1)..(311): Pfam Name: Glycosyl hydrolases family 17 Pfam Description: Glycosyl hydrolases family 17
  misc_feature (1)..(452): Homolog of NCBI NO: 15238768 NR Description: glycosyl hydrolase family 17; protein id:
  misc_feature (1)..(449): Homolog of NCBI NO: 6223646 NR Description: putative beta-1,3-glucanase [Arabidopsis thaliana]
  misc_feature (1)..(449): Homolog of NCBI NO: 22330833 NR Description: glycosyl hydrolase family 17; protein id:
  misc_feature (1)..(449): Homolog of NCBI NO: 15217739 NR Description: glycosyl hydrolase family 17; protein id:
  misc_feature (1)..(423): Homolog of NCBI NO: 15224778 NR Description: glycosyl hydrolase family 17; protein id:
  misc_feature (1)..(449): Homolog of NCBI NO: 25404490 NR Description: hypothetical protein F13O11.7 [imported] -
  misc_feature (1)..(449): Homolog of NCBI NO: 28269434 NR Description: putative beta-1,3 glucanase [Oryza sativa
  misc_feature (1)..(452): Homolog of NCBI NO: 18483232 NR Description: 3-glucanase [Sorghum bicolor]
  misc_feature (78)..(423): Homolog of NCBI NO: 7486246 NR Description: hypothetical protein F27F23.24 - Arabidopsis
  misc_feature (1)..(448): Homolog of NCBI NO: 15238256 NR Description: glycosyl hydrolase family 17; protein id:
MSTHQLPPKTVVQMLKDNNVKKVKLFDADTNTMVALAGSGIEVMVAIPNDQLKAMGSYNRAKDWVRRNITRFNDDVKIKYVAVGNEPFLTAYNGSFINLTYPALFNIQKALNEAGVGDFIKATVPLNADVYNSPLENPVPSAGSFRQDIFEEMKLIVNFLAHNKAPFTVNIYPFLSLYLSSDFPFDYAFFNGQNTVSDNGVIYTNVFDANFDTLLASLKALGHGDMTVIVGEVGWPTDGDKNANIPNAERFYTGLLPKLAANRGTPMRPGYIEVYLFGFIDEDAKSIAPGNFERHWGIFKYDGQPKFPADLSGAGQKKILTGAQNVQYLRNQWCMFNPNALTFSNNTNQLGDNVNYACTFSDCTALGYGSSCGNLDEVGNASYAFNMYFQVQNQKAEACDFEGLAIITTRNISREQCNFPIQIGDPTSGHSDHNHRFISFSLVSMLLLFTAL

SEQ ID NO: 82657 - protein, 439 aa, Arabidopsis thaliana
  peptide (1)..(439): Ceres Seq. ID no. 12666752
  misc_feature (1)..(298): Pfam Name: Glycosyl hydrolases family 17 Pfam Description: Glycosyl hydrolases family 17
  misc_feature (1)..(439): Homolog of NCBI NO: 15238768 NR Description: glycosyl hydrolase family 17; protein id:
  misc_feature (1)..(436): Homolog of NCBI NO: 6223646 NR Description: putative beta-1,3-glucanase [Arabidopsis thaliana]
  misc_feature (1)..(436): Homolog of NCBI NO: 22330833 NR Description: glycosyl hydrolase family 17; protein id:
  misc_feature (1)..(436): Homolog of NCBI NO: 15217739 NR Description: glycosyl hydrolase family 17; protein id:
  misc_feature (1)..(410): Homolog of NCBI NO: 15224778 NR Description: glycosyl hydrolase family 17; protein id:
  misc_feature (1)..(436): Homolog of NCBI NO: 25404490 NR Description: hypothetical protein F13O11.7 [imported] -
  misc_feature (1)..(436): Homolog of NCBI NO: 28269434 NR Description: putative beta-1,3 glucanase [Oryza sativa
  misc_feature (1)..(439): Homolog of NCBI NO: 18483232 NR Description: 3-glucanase [Sorghum bicolor]
  misc_feature (65)..(410): Homolog of NCBI NO: 7486246 NR Description: hypothetical protein F27F23.24 - Arabidopsis
  misc_feature (1)..(435): Homolog of NCBI NO: 15238256 NR Description: glycosyl hydrolase family 17; protein id:
MLKDNNVKKVKLFDADTNTMVALAGSGIEVMVAIPNDQLKAMGSYNRAKDWVRRNITRFNDDVKIKYVAVGNEPFLTAYNGSFINLTYPALFNIQKALNEAGVGDFIKATVPLNADVYNSPLENPVPSAGSFRQDIFEEMKLIVNFLAHNKAPFTVNIYPFLSLYLSSDFPFDYAFFNGQNTVSDNGVIYTNVFDANFDTLLASLKALGHGDMTVIVGEVGWPTDGDKNANIPNAERFYTGLLPKLAANRGTPMRPGYIEVYLFGFIDEDAKSIAPGNFERHWGIFKYDGQPKFPADLSGAGQKKILTGAQNVQYLRNQWCMFNPNALTFSNNTNQLGDNVNYACTFSDCTALGYGSSCGNLDEVGNASYAFNMYFQVQNQKAEACDFEGLAIITTRNISREQCNFPIQIGDPTSGHSDHNHRFISFSLVSMLLLFTAL

SEQ ID NO: 82658 - DNA, 1528 bp, Arabidopsis thaliana
  misc_feature (1)..(1528): Ceres Seq. ID no. 12666753
  misc_feature: MA Experiment ID: 20000173 Result: Down-regulated in Transcription
  misc_feature: MA Experiment 20000173 PARAMETER Experiment Name: At_42deg_Heat_P Parameter: Age (day) Value: 14
  misc_feature: MA Experiment 20000173 PARAMETER Experiment Name: At_42deg_Heat_P Parameter: Organism Value: A. thaliana
  misc_feature: MA Experiment 20000173 PARAMETER Experiment Name: At_42deg_Heat_P Parameter: Plant Line Value: WS
  misc_feature: MA Experiment 20000173 PARAMETER Experiment Name: At_42deg_Heat_P Parameter: Temperature (deg C) Value: 42 vs. 22
  misc_feature: MA Experiment 20000173 PARAMETER Experiment Name: At_42deg_Heat_P Parameter: Timepoint (hr) Value: 6
  misc_feature: MA Experiment 20000173 PARAMETER Experiment Name: At_42deg_Heat_P Parameter: Tissue Value: Aerial
  misc_feature: MA Experiment ID: 20000184 Result: Down-regulated in Transcription
  misc_feature: MA Experiment 20000184 PARAMETER Experiment Name: At_Shoots__P Parameter: Age (day) Value: 7
  misc_feature: MA Experiment 20000184 PARAMETER Experiment Name: At_Shoots__P Parameter: Tissue Value: Shoots vs. Whole Plant
  misc_feature: MA Experiment ID: 20000438 Result: Down-regulated in Transcription
  misc_feature: MA Experiment 20000438 PARAMETER Experiment Name: At_Shoots__P Parameter: Age (day) Value: 14
  misc_feature: MA Experiment 20000438 PARAMETER Experiment Name: At_Shoots__P Parameter: Tissue Value: Shoots vs. Whole Plant
  misc_feature: MA Experiment ID: 20000451 Result: Down-regulated in Transcription
  misc_feature: MA Experiment 20000451 PARAMETER Experiment Name: At_CS6879_Shoots-Roots_P Parameter: Age (day) Value: 14
  misc_feature: MA Experiment 20000451 PARAMETER Experiment Name: At_CS6879_Shoots-Roots_P Parameter: Organism Value: A. thaliana
  misc_feature: MA Experiment 20000451 PARAMETER Experiment Name: At_CS6879_Shoots-Roots_P Parameter: Plant Line Value: CS6879 vs. WS
  misc_feature: MA Experiment 20000451 PARAMETER Experiment Name: At_CS6879_Shoots-Roots_P Parameter: Tissue Value: Roots
  misc_feature: MA Experiment ID: 20001904 Result: Down-regulated in Transcription
  misc_feature: MA Experiment 20001904 PARAMETER Experiment Name: At_Drought_Reproduction_P Parameter: Age (day) Value: 37
  misc_feature: MA Experiment 20001904 PARAMETER Experiment Name: At_Drought_Reproduction_P Parameter: Organism Value: A. thaliana
  misc_feature: MA Experiment 20001904 PARAMETER Experiment Name: At_Drought_Reproduction_P Parameter: Plant Line Value: WS
  misc_feature: MA Experiment 20001904 PARAMETER Experiment Name: At_Drought_Reproduction_P Parameter: Timepoint (day) Value: 7
  misc_feature: MA Experiment 20001904 PARAMETER Experiment Name: At_Drought_Reproduction_P Parameter: Tissue Value: Rosettes
  misc_feature: MA Experiment 20001904 PARAMETER Experiment Name: At_Drought_Reproduction_P Parameter: Treatment Value: Drought vs. No Drought
gagagaccccggcctgagaaaaagagcataaataaggaaagcagcaaagacatcttcccaagttggtggagttgcaaaccatagtgtatctctgaactgagagtagcaggttgcaattaaaaactaaagattgtgtcagacagacttatgtattaccacaaccagcaccaaggaaagagcatcctctcttcatcgagaatgcccatttcttctgaaaggcatccgttcctcagaggaaatggcacaggagattctggactcattctctccactgatgcaaagccacgactaaaatggactccagatcttcacgagagatttgttgaagcggtcaaccagcttggaggaggagataaggctactcctaagacaatcatgaaagtcatgggcattccaggccttaccttataccatctcaagagtcatcttcagaaatataggctaagcaagaatcttaatggacaagctaacagcagtttaaacaagacaagtgtgatgaccatggtagaagaaaacccccctgaagtagacgaaagtcacagtgagagtttaagcattggaccacagccgagcatgaacttacccataagtgatgcccttcaaatgcaaatagaggtccagagacggctacacgagcaacttgaggtacagcgacatttgcagctcaggatagaggctcaaggaaagtacctgcaatcgattctggagaaagcacaagagactcttggaagacagaacctaggtgcagctgggattgaagcaacaaaagctcaactctcagaattagtatctaaagtatcagcagactatccagactctagtttcctcgaaccgaaagaactgcagaatctacaccatcaacagatgcaaaaaacgtatccacctaactcctccctggacagttgcctaacctcaagtgaaggaactcagaaagccccaaagatgcttgacaacagactgggattaagaacatatattggagattcaacttcagagcagaaagagataatggaagagccattcttccatagaatggagctcacatgggcagaagaagaaagcctcagagagaatcacaacaggccatatctttcaacaatggttaacaacgcagaaccgagaatctcgtcttcaagaagaagtcctggaagattgtcaataggagtgggattacatgaacacagaggaaggagtagcaacaacagtgagtatacagaagaaagattcaacgagaataatgaagattgcaagcttgaaacacacacaagaacagctctagatcttaacacacacgacgaaaactatggcacaacgcgtcctaaacagtttgatttaaatggtttcagctggaattgagaagaacaaataagctttagaagagtgcaacaacctttttatgataatcacacaggaaatgaaaagcctttgatttcctttgttagcttgagggattcgtctaaaaattgaattattagtcgaactcaaaagagacatcttgtgcaacaatgtacaacactattaatttgcg

SEQ ID NO: 82659 - protein, 402 aa, Arabidopsis thaliana
  peptide (1)..(402): Ceres Seq. ID no. 12666754
  misc_feature (47)..(98): Pfam Name: Myb-like DNA-binding domain Pfam Description: Myb-like DNA-binding domain
  misc_feature (1)..(402): Homolog of NCBI NO: 15238770 NR Description: transfactor-like protein; protein id: supported by cDNA: gi_14596180 [Arabidopsis thaliana]
  misc_feature (1)..(402): Homolog of NCBI NO: 28059694 NR Description: transfactor-like protein [Arabidopsis thaliana]
  misc_feature (1)..(402): Homolog of NCBI NO: 14596181 NR Description: transfactor-like protein [Arabidopsis thaliana]
  misc_feature (1)..(402): Homolog of NCBI NO: 30686726 NR Description: transfactor-related protein [Arabidopsis
  misc_feature (1)..(402): Homolog of NCBI NO: 6223653 NR Description: transfactor-like [Arabidopsis thaliana]
  misc_feature (1)..(402): Homolog of NCBI NO: 22330835 NR Description: transfactor-like; protein id: At3g04030.1, by cDNA: gi_18377832 [Arabidopsis thaliana] AT3g04030/T11I18_14 [Arabidopsis thaliana]
  misc_feature (1)..(258): Homolog of NCBI NO: 34394528 NR Description: transfactor-like protein [Oryza sativa (japonica
  misc_feature (31)..(271): Homolog of NCBI NO: 15222366 NR Description: transfactor, putative; protein id: At1g69580.1
  misc_feature (16)..(270): Homolog of NCBI NO: 18414049 NR Description: putative protein; protein id: At4g13640.1, by cDNA: 38327. [Arabidopsis thaliana]
  misc_feature (20)..(218): Homolog of NCBI NO: 18404044 NR Description: transfactor, putative; protein id: At3g24120.1, by cDNA: 6626., supported by cDNA: gi_15215653, supported by gi_20334891 [Arabidopsis thaliana] >gi|15215654|gb|AAK91372.1|
MYYHNQHQGKSILSSSRMPISSERHPFLRGNGTGDSGLILSTDAKPRLKWTPDLHERFVEAVNQLGGGDKATPKTIMKVMGIPGLTLYHLKSHLQKYRLSKNLNGQANSSLNKTSVMTMVEENPPEVDESHSESLSIGPQPSMNLPISDALQMQIEVQRRLHEQLEVQRHLQLRIEAQGKYLQSILEKAQETLGRQNLGAAGIEATKAQLSELVSKVSADYPDSSFLEPKELQNLHHQQMQKTYPPNSSLDSCLTSSEGTQKAPKMLDNRLGLRTYIGDSTSEQKEIMEEPFFHRMELTWAEEESLRENHNRPYLSTMVNNAEPRISSSRRSPGRLSIGVGLHEHRGRSSNNSEYTEERFNENNEDCKLETHTRTALDLNTHDENYGTTRPKQFDLNGFSWN

SEQ ID NO: 82660 - protein, 385 aa, Arabidopsis thaliana
  peptide (1)..(385): Ceres Seq. ID no. 12666755
  misc_feature (30)..(81): Pfam Name: Myb-like DNA-binding domain Pfam Description: Myb-like DNA-binding domain
  misc_feature (1)..(385): Homolog of NCBI NO: 15238770 NR Description: transfactor-like protein; protein id: supported by cDNA: gi_14596180 [Arabidopsis thaliana]
  misc_feature (1)..(385): Homolog of NCBI NO: 28059694 NR Description: transfactor-like protein [Arabidopsis thaliana]
  misc_feature (1)..(385): Homolog of NCBI NO: 14596181 NR Description: transfactor-like protein [Arabidopsis thaliana]
  misc_feature (1)..(385): Homolog of NCBI NO: 30686726 NR Description: transfactor-related protein [Arabidopsis
  misc_feature (1)..(385): Homolog of NCBI NO: 6223653 NR Description: transfactor-like [Arabidopsis thaliana]
  misc_feature (1)..(385): Homolog of NCBI NO: 22330835 NR Description: transfactor-like; protein id: At3g04030.1, by cDNA: gi_18377832 [Arabidopsis thaliana] AT3g04030/T11I18_14 [Arabidopsis thaliana]
  misc_feature (1)..(241): Homolog of NCBI NO: 34394528 NR Description: transfactor-like protein [Oryza sativa (japonica
  misc_feature (14)..(254): Homolog of NCBI NO: 15222366 NR Description: transfactor, putative; protein id: At1g69580.1
  misc_feature (1)..(253): Homolog of NCBI NO: 18414049 NR Description: putative protein; protein id: At4g13640.1, by cDNA: 38327. [Arabidopsis thaliana]
  misc_feature (3)..(201): Homolog of NCBI NO: 18404044 NR Description: transfactor, putative; protein id: At3g24120.1, by cDNA: 6626., supported by cDNA: gi_15215653, supported by gi_20334891 [Arabidopsis thaliana] >gi|15215654|gb|AAK91372.1|
MPISSERHPFLRGNGTGDSGLILSTDAKPRLKWTPDLHERFVEAVNQLGGGDKATPKTIMKVMGIPGLTLYHLKSHLQKYRLSKNLNGQANSSLNKTSVMTMVEENPPEVDESHSESLSIGPQPSMNLPISDALQMQIEVQRRLHEQLEVQRHLQLRIEAQGKYLQSILEKAQETLGRQNLGAAGIEATKAQLSELVSKVSADYPDSSFLEPKELQNLHHQQMQKTYPPNSSLDSCLTSSEGTQKAPKMLDNRLGLRTYIGDSTSEQKEIMEEPFFHRMELTWAEEESLRENHNRPYLSTMVNNAEPRISSSRRSPGRLSIGVGLHEHRGRSSNNSEYTEERFNENNEDCKLETHTRTALDLNTHDENYGTTRPKQFDLNGFSWN

SEQ ID NO: 82661 - protein, 326 aa, Arabidopsis thaliana
  peptide (1)..(326): Ceres Seq. ID no. 12666756
  misc_feature (1)..(326): Homolog of NCBI NO: 15238770 NR Description: transfactor-like protein; protein id: supported by cDNA: gi_14596180 [Arabidopsis thaliana]
  misc_feature (1)..(326): Homolog of NCBI NO: 28059694 NR Description: transfactor-like protein [Arabidopsis thaliana]
  misc_feature (1)..(326): Homolog of NCBI NO: 14596181 NR Description: transfactor-like protein [Arabidopsis thaliana]
  misc_feature (1)..(326): Homolog of NCBI NO: 30686726 NR Description: transfactor-related protein [Arabidopsis
  misc_feature (1)..(326): Homolog of NCBI NO: 6223653 NR Description: transfactor-like [Arabidopsis thaliana]
  misc_feature (1)..(326): Homolog of NCBI NO: 22330835 NR Description: transfactor-like; protein id: At3g04030.1, by cDNA: gi_18377832 [Arabidopsis thaliana] AT3g04030/T11I18_14 [Arabidopsis thaliana]
  misc_feature (1)..(182): Homolog of NCBI NO: 34394528 NR Description: transfactor-like protein [Oryza sativa (japonica
  misc_feature (1)..(195): Homolog of NCBI NO: 15222366 NR Description: transfactor, putative; protein id: At1g69580.1
  misc_feature (1)..(194): Homolog of NCBI NO: 18414049 NR Description: putative protein; protein id: At4g13640.1, by cDNA: 38327. [Arabidopsis thaliana]
  misc_feature (1)..(142): Homolog of NCBI NO: 18404044 NR Description: transfactor, putative; protein id: At3g24120.1, by cDNA: 6626., supported by cDNA: gi_15215653, supported by gi_20334891 [Arabidopsis thaliana] >gi|15215654|gb|AAK91372.1|
MKVMGIPGLTLYHLKSHLQKYRLSKNLNGQANSSLNKTSVMTMVEENPPEVDESHSESLSIGPQPSMNLPISDALQMQIEVQRRLHEQLEVQRHLQLRIEAQGKYLQSILEKAQETLGRQNLGAAGIEATKAQLSELVSKVSADYPDSSFLEPKELQNLHHQQMQKTYPPNSSLDSCLTSSEGTQKAPKMLDNRLGLRTYIGDSTSEQKEIMEEPFFHRMELTWAEEESLRENHNRPYLSTMVNNAEPRISSSRRSPGRLSIGVGLHEHRGRSSNNSEYTEERFNENNEDCKLETHTRTALDLNTHDENYGTTRPKQFDLNGFSWN

SEQ ID NO: 82662 - DNA, 1599 bp, Arabidopsis thaliana
  misc_feature (1)..(1599): Ceres Seq. ID no. 12666794
atgataaataatcatccaattagagaaaaaccaaaacacattattttcaacttactgtcactaatctttttcctaatcttcttatccaccgttgtttcatctcaatcaccatcatacaccactcacaaaacccagcgtttaaccgaaaccaaaaccatccccgagcttatcatcgcggacttaaacctaaccatcttaaaggttaatctcgcttcctccaacttctccgacctccaaacccgtctttttccaaacctaacccactatgaacgttgcgcattcgaagactgtctcgggctactcgatgacaccatctccgacctcgaaaccgcagtctccgatcttcgatcttcctctcttgagttcaacgacatcagcatgttgctcaccaacgtcatgacataccaagatacgtgtcttgatggtttctcgacaagtgacaatgagaataataatgatatgacgtatgaattgcctgagaacttgaaggagatcatcttagacatctctaacaaccttagcaactccctccatatgcttcaggtgatttccaggaagaaaccttccccgaaatcatcagaagttgacgttgagtacccgagttggctctcagagaatgaccagagactccttgaggctccggtacaagagaccaattacaatctctcggtggcgattgatggtaccggaaacttcacaaccattaatgatgccgtctttgctgctcccaacatgagcgaaactagatttattatctatataaaaggtggggaatattttgagaacgtcgaattacctaagaagaagacaatgataatgtttatcggagatggtatcggaaaaacagtcataaaagcaaaccgcagccgcattgatggatggtcaacatttcaaactcctaccgtaggcgtgaaaggtaaaggctacatagcaaaggacatatcattcgtgaattctgcaggaccggccaaagcacaggctgtggcctttcgaagcggctctgatcactctgccttttaccgttgtgagttcgatggttaccaagacaccctttatgttcattcagccaaacaattttatcgagaatgcgatatatatggtacaatcgatttcatattcggcaatgcggctgttgtgttccagaatagtagtctttatgctcgtaaacctaatcctggacataaaattgcattcaccgctcaaagccgcaatcagtcggaccagcccacgggtatatctatacttaattgtagaatcttggccgcacctgatttgatccctgtgaaagaaaacttcaaggcgtacttaggtcgaccatggagaaaatattctaggacggttatcataaaatcatttattgatgatcttatacatcccgctggatggttggaggggaaaaaagattttgcacttgaaactttatattatggagagtatatgaatgaagggcctggggcaaacatggcaaagcgagtcacatggcctggttttagacgcatcgaaaaccaaacggaggctacccaattcacagtcggtccatttatcgacggtagcacatggctaaattcaactggcatcccttttagtcttggtttctaa

SEQ ID NO: 82663 - protein, 532 aa, Arabidopsis thaliana
  peptide (1)..(532): Ceres Seq. ID no. 12666795
  misc_feature (221)..(518): Pfam Name: Pectinesterase Pfam Description: Pectinesterase
  misc_feature (1)..(532): Homolog of NCBI NO: 15235315 NR Description: pectinesterase family; protein id: At4g02300.1
  misc_feature (10)..(530): Homolog of NCBI NO: 15235323 NR Description: pectinesterase family; protein id: At4g02320.1
  misc_feature (40)..(531): Homolog of NCBI NO: 34393863 NR Description: putative pectinesterase [Oryza sativa (japonica
  misc_feature (44)..(531): Homolog of NCBI NO: 2098711 NR Description: pectinesterase [Citrus sinensis]
  misc_feature (44)..(531): Homolog of NCBI NO: 6174912 NR Description: Pectinesterase 1.1 precursor (Pectin
  misc_feature (55)..(531): Homolog of NCBI NO: 24250746 NR Description: putative thermostable pectinesterase [Citrus >gi|24250751|gb|AAK84486.1| putative thermostable pectinesterase
  misc_feature (55)..(531): Homolog of NCBI NO: 15229105 NR Description: pectinesterase - like protein; protein id: supported by cDNA: gi_16648928 [Arabidopsis thaliana]
  misc_feature (16)..(531): Homolog of NCBI NO: 15081598 NR Description: pectin methylesterase PME1 [Vitis vinifera]
  misc_feature (41)..(531): Homolog of NCBI NO: 6689892 NR Description: pectin methyl esterase [Solanum tuberosum]
  misc_feature (44)..(531): Homolog of NCBI NO: 8671350 NR Description: pectin methylesterase [Nicotiana tabacum]
MINNHPIREKPKHIIFNLLSLIFFLIFLSTVVSSQSPSYTTHKTQRLTETKTIPELIIADLNLTILKVNLASSNFSDLQTRLFPNLTHYERCAFEDCLGLLDDTISDLETAVSDLRSSSLEFNDISMLLTNVMTYQDTCLDGFSTSDNENNNDMTYELPENLKEIILDISNNLSNSLHMLQVISRKKPSPKSSEVDVEYPSWLSENDQRLLEAPVQETNYNLSVAIDGTGNFTTINDAVFAAPNMSETRFIIYIKGGEYFENVELPKKKTMIMFIGDGIGKTVIKANRSRIDGWSTFQTPTVGVKGKGYIAKDISFVNSAGPAKAQAVAFRSGSDHSAFYRCEFDGYQDTLYVHSAKQFYRECDIYGTIDFIFGNAAVVFQNSSLYARKPNPGHKIAFTAQSRNQSDQPTGISILNCRILAAPDLIPVKENFKAYLGRPWRKYSRTVIIKSFIDDLIHPAGWLEGKKDFALETLYYGEYMNEGPGANMAKRVTWPGFRRIENQTEATQFTVGPFIDGSTWLNSTGIPFSLGF

SEQ ID NO: 82664 - protein, 406 aa, Arabidopsis thaliana
  peptide (1)..(406): Ceres Seq. ID no. 12666796
  misc_feature (95)..(392): Pfam Name: Pectinesterase Pfam Description: Pectinesterase
  misc_feature (1)..(406): Homolog of NCBI NO: 15235315 NR Description: pectinesterase family; protein id: At4g02300.1
  misc_feature (1)..(404): Homolog of NCBI NO: 15235323 NR Description: pectinesterase family; protein id: At4g02320.1
  misc_feature (1)..(405): Homolog of NCBI NO: 34393863 NR Description: putative pectinesterase [Oryza sativa (japonica
  misc_feature (1)..(405): Homolog of NCBI NO: 2098711 NR Description: pectinesterase [Citrus sinensis]
  misc_feature (1)..(405): Homolog of NCBI NO: 6174912 NR Description: Pectinesterase 1.1 precursor (Pectin
  misc_feature (1)..(405): Homolog of NCBI NO: 24250746 NR Description: putative thermostable pectinesterase [Citrus >gi|24250751|gb|AAK84486.1| putative thermostable pectinesterase
  misc_feature (1)..(405): Homolog of NCBI NO: 15229105 NR Description: pectinesterase - like protein; protein id: supported by cDNA: gi_16648928 [Arabidopsis thaliana]
  misc_feature (1)..(405): Homolog of NCBI NO: 15081598 NR Description: pectin methylesterase PME1 [Vitis vinifera]
  misc_feature (1)..(405): Homolog of NCBI NO: 6689892 NR Description: pectin methyl esterase [Solanum tuberosum]
  misc_feature (1)..(405): Homolog of NCBI NO: 8671350 NR Description: pectin methylesterase [Nicotiana tabacum]
MLLTNVMTYQDTCLDGFSTSDNENNNDMTYELPENLKEIILDISNNLSNSLHMLQVISRKKPSPKSSEVDVEYPSWLSENDQRLLEAPVQETNYNLSVAIDGTGNFTTINDAVFAAPNMSETRFIIYIKGGEYFENVELPKKKTMIMFIGDGIGKTVIKANRSRIDGWSTFQTPTVGVKGKGYIAKDISFVNSAGPAKAQAVAFRSGSDHSAFYRCEFDGYQDTLYVHSAKQFYRECDIYGTIDFIFGNAAVVFQNSSLYARKPNPGHKIAFTAQSRNQSDQPTGISILNCRILAAPDLIPVKENFKAYLGRPWRKYSRTVIIKSFIDDLIHPAGWLEGKKDFALETLYYGEYMNEGPGANMAKRVTWPGFRRIENQTEATQFTVGPFIDGSTWLNSTGIPFSLGF

SEQ ID NO: 82665 - protein, 400 aa, Arabidopsis thaliana
  peptide (1)..(400): Ceres Seq. ID no. 12666797
  misc_feature (89)..(386): Pfam Name: Pectinesterase Pfam Description: Pectinesterase
  misc_feature (1)..(400): Homolog of NCBI NO: 15235315 NR Description: pectinesterase family; protein id: At4g02300.1
  misc_feature (1)..(398): Homolog of NCBI NO: 15235323 NR Description: pectinesterase family; protein id: At4g02320.1
  misc_feature (1)..(399): Homolog of NCBI NO: 34393863 NR Description: putative pectinesterase [Oryza sativa (japonica
  misc_feature (1)..(399): Homolog of NCBI NO: 2098711 NR Description: pectinesterase [Citrus sinensis]
  misc_feature (1)..(399): Homolog of NCBI NO: 6174912 NR Description: Pectinesterase 1.1 precursor (Pectin
  misc_feature (1)..(399): Homolog of NCBI NO: 24250746 NR Description: putative thermostable pectinesterase [Citrus >gi|24250751|gb|AAK84486.1| putative thermostable pectinesterase
  misc_feature (1)..(399): Homolog of NCBI NO: 15229105 NR Description: pectinesterase - like protein; protein id: supported by cDNA: gi_16648928 [Arabidopsis thaliana]
  misc_feature (1)..(399): Homolog of NCBI NO: 15081598 NR Description: pectin methylesterase PME1 [Vitis vinifera]
  misc_feature (1)..(399): Homolog of NCBI NO: 6689892 NR Description: pectin methyl esterase [Solanum tuberosum]
  misc_feature (1)..(399): Homolog of NCBI NO: 8671350 NR Description: pectin methylesterase [Nicotiana tabacum]
MTYQDTCLDGFSTSDNENNNDMTYELPENLKEIILDISNNLSNSLHMLQVISRKKPSPKSSEVDVEYPSWLSENDQRLLEAPVQETNYNLSVAIDGTGNFTTINDAVFAAPNMSETRFIIYIKGGEYFENVELPKKKTMIMFIGDGIGKTVIKANRSRIDGWSTFQTPTVGVKGKGYIAKDISFVNSAGPAKAQAVAFRSGSDHSAFYRCEFDGYQDTLYVHSAKQFYRECDIYGTIDFIFGNAAVVFQNSSLYARKPNPGHKIAFTAQSRNQSDQPTGISILNCRILAAPDLIPVKENFKAYLGRPWRKYSRTVIIKSFIDDLIHPAGWLEGKKDFALETLYYGEYMNEGPGANMAKRVTWPGFRRIENQTEATQFTVGPFIDGSTWLNSTGIPFSLGF

SEQ ID NO: 82666 - DNA, 1894 bp, Arabidopsis thaliana
  misc_feature (1)..(1894): Ceres Seq. ID no. 12666802
  misc_feature: MA Experiment ID: 20000166 Result: Up-regulated in Transcription
  misc_feature: MA Experiment 20000166 PARAMETER Experiment Name: At_100uM_ABA_P Parameter: Age (day) Value: 14
  misc_feature: MA Experiment 20000166 PARAMETER Experiment Name: At_100uM_ABA_P Parameter: Organism Value: A. thaliana
  misc_feature: MA Experiment 20000166 PARAMETER Experiment Name: At_100uM_ABA_P Parameter: Plant Line Value: WS
  misc_feature: MA Experiment 20000166 PARAMETER Experiment Name: At_100uM_ABA_P Parameter: Timepoint (hr) Value: 1
  misc_feature: MA Experiment 20000166 PARAMETER Experiment Name: At_100uM_ABA_P Parameter: Tissue Value: Aerial
  misc_feature: MA Experiment 20000166 PARAMETER Experiment Name: At_100uM_ABA_P Parameter: Treatment Value: 100uM ABA vs. No Treatment
  misc_feature: MA Experiment ID: 20000180 Result: Up-regulated in Transcription
  misc_feature: MA Experiment 20000180 PARAMETER Experiment Name: At_Germinating_Seeds_P Parameter: Age (hr) Value: 24 vs. 0
  misc_feature: MA Experiment 20000180 PARAMETER Experiment Name: At_Germinating_Seeds_P Parameter: Tissue Value: Germinating Seeds
  misc_feature: MA Experiment ID: 20000185 Result: Down-regulated in Transcription
  misc_feature: MA Experiment 20000185 PARAMETER Experiment Name: At_Roots__P Parameter: Age (day) Value: 7 vs. 21
  misc_feature: MA Experiment 20000185 PARAMETER Experiment Name: At_Roots__P Parameter: Organism Value: A. thaliana
  misc_feature: MA Experiment 20000185 PARAMETER Experiment Name: At_Roots__P Parameter: Tissue Value: Roots vs. Whole Plant
  misc_feature: MA Experiment ID: 20000437 Result: Down-regulated in Transcription
  misc_feature: MA Experiment 20000437 PARAMETER Experiment Name: At_Drought_P Parameter: Age (day) Value: 8
  misc_feature: MA Experiment 20000437 PARAMETER Experiment Name: At_Drought_P Parameter: Organism Value: A. thaliana
  misc_feature: MA Experiment 20000437 PARAMETER Experiment Name: At_Drought_P Parameter: Plant Line Value: WS
  misc_feature: MA Experiment 20000437 PARAMETER Experiment Name: At_Drought_P Parameter: Timepoint (hr) Value: 24
  misc_feature: MA Experiment 20000437 PARAMETER Experiment Name: At_Drought_P Parameter: Tissue Value: Whole Plant
  misc_feature: MA Experiment 20000437 PARAMETER Experiment Name: At_Drought_P Parameter: Treatment Value: Drought vs. No Drought
  misc_feature: MA Experiment ID: 20000445 Result: Up-regulated in Transcription
  misc_feature: MA Experiment 20000445 PARAMETER Experiment Name: At_100uM_NAA__P Parameter: Age (day) Value: 14
  misc_feature: MA Experiment 20000445 PARAMETER Experiment Name: At_100uM_NAA__P Parameter: Organism Value: A. thaliana
  misc_feature: MA Experiment 20000445 PARAMETER Experiment Name: At_100uM_NAA__P Parameter: Plant Line Value: WS
  misc_feature: MA Experiment 20000445 PARAMETER Experiment Name: At_100uM_NAA__P Parameter: Timepoint (hr) Value: 6
  misc_feature: MA Experiment 20000445 PARAMETER Experiment Name: At_100uM_NAA__P Parameter: Tissue Value: Aerial
  misc_feature: MA Experiment 20000445 PARAMETER Experiment Name: At_100uM_NAA__P Parameter: Treatment Value: 100uM NAA vs. No Treatment
  misc_feature: MA Experiment ID: 20000451 Result: Up-regulated in Transcription
  misc_feature: MA Experiment 20000451 PARAMETER Experiment Name: At_CS6879_Shoots-Roots_P Parameter: Age (day) Value: 14
  misc_feature: MA Experiment 20000451 PARAMETER Experiment Name: At_CS6879_Shoots-Roots_P Parameter: Organism Value: A. thaliana
  misc_feature: MA Experiment 20000451 PARAMETER Experiment Name: At_CS6879_Shoots-Roots_P Parameter: Plant Line Value: CS6879 vs. WS
  misc_feature: MA Experiment 20000451 PARAMETER Experiment Name: At_CS6879_Shoots-Roots_P Parameter: Tissue Value: Roots
  misc_feature: MA Experiment ID: 20000460 Result: Up-regulated in Transcription
  misc_feature: MA Experiment 20000460 PARAMETER Experiment Name: At_10percent_PEG_P Parameter: Age (day) Value: 12
  misc_feature: MA Experiment 20000460 PARAMETER Experiment Name: At_10percent_PEG_P Parameter: Organism Value: A. thaliana
  misc_feature: MA Experiment 20000460 PARAMETER Experiment Name: At_10percent_PEG_P Parameter: Plant Line Value: WS
  misc_feature: MA Experiment 20000460 PARAMETER Experiment Name: At_10percent_PEG_P Parameter: Timepoint (day) Value: 12
  misc_feature: MA Experiment 20000460 PARAMETER Experiment Name: At_10percent_PEG_P Parameter: Tissue Value: Whole Plant
  misc_feature: MA Experiment 20000460 PARAMETER Experiment Name: At_10percent_PEG_P Parameter: Treatment Value: 10percent PEG vs. No Treatment
  misc_feature: MA Experiment ID: 20000527 Result: Up-regulated in Transcription
  misc_feature: MA Experiment 20000527 PARAMETER Experiment Name: At_10percent_PEG_P Parameter: Age (day) Value: 20
  misc_feature: MA Experiment 20000527 PARAMETER Experiment Name: At_10percent_PEG_P Parameter: Organism Value: A. thaliana
  misc_feature: MA Experiment 20000527 PARAMETER Experiment Name: At_10percent_PEG_P Parameter: Plant Line Value: WS
  misc_feature: MA Experiment 20000527 PARAMETER Experiment Name: At_10percent_PEG_P Parameter: Timepoint (day) Value: 20
  misc_feature: MA Experiment 20000527 PARAMETER Experiment Name: At_10percent_PEG_P Parameter: Tissue Value: Whole Plant
  misc_feature: MA Experiment 20000527 PARAMETER Experiment Name: At_10percent_PEG_P Parameter: Treatment Value: 10percent PEG vs. No Treatment
  misc_feature: MA Experiment ID: 20001554 Result: Down-regulated in Transcription
  misc_feature: MA Experiment 20001554 PARAMETER Experiment Name: At_Drought_Soil_Dry_P Parameter: Age (day) Value: 21
  misc_feature: MA Experiment 20001554 PARAMETER Experiment Name: At_Drought_Soil_Dry_P Parameter: Organism Value: A. thaliana
  misc_feature: MA Experiment 20001554 PARAMETER Experiment Name: At_Drought_Soil_Dry_P Parameter: Plant Line Value: WS
  misc_feature: MA Experiment 20001554 PARAMETER Experiment Name: At_Drought_Soil_Dry_P Parameter: Post Timepoint (hr) Value: None
  misc_feature: MA Experiment 20001554 PARAMETER Experiment Name: At_Drought_Soil_Dry_P Parameter: Post-Treatment Value: None
  misc_feature: MA Experiment 20001554 PARAMETER Experiment Name: At_Drought_Soil_Dry_P Parameter: Timepoint (day) Value: 7
  misc_feature: MA Experiment 20001554 PARAMETER Experiment Name: At_Drought_Soil_Dry_P Parameter: Treatment Value: Drought vs. No Drought
  misc_feature: MA Experiment ID: 20001555 Result: Down-regulated in Transcription
  misc_feature: MA Experiment 20001555 PARAMETER Experiment Name: At_Drought_Soil_Dry_P Parameter: Age (day) Value: 24
  misc_feature: MA Experiment 20001555 PARAMETER Experiment Name: At_Drought_Soil_Dry_P Parameter: Organism Value: A. thaliana
  misc_feature: MA Experiment 20001555 PARAMETER Experiment Name: At_Drought_Soil_Dry_P Parameter: Plant Line Value: WS
  misc_feature: MA Experiment 20001555 PARAMETER Experiment Name: At_Drought_Soil_Dry_P Parameter: Post Timepoint (hr) Value: None
  misc_feature: MA Experiment 20001555 PARAMETER Experiment Name: At_Drought_Soil_Dry_P Parameter: Post-Treatment Value: None
  misc_feature: MA Experiment 20001555 PARAMETER Experiment Name: At_Drought_Soil_Dry_P Parameter: Timepoint (day) Value: 10
  misc_feature: MA Experiment 20001555 PARAMETER Experiment Name: At_Drought_Soil_Dry_P Parameter: Treatment Value: Drought vs. No Drought
  misc_feature: MA Experiment ID: 20001556 Result: Down-regulated in Transcription
  misc_feature: MA Experiment 20001556 PARAMETER Experiment Name: At_Drought_Soil_Dry_P Parameter: Age (day) Value: 26
  misc_feature: MA Experiment 20001556 PARAMETER Experiment Name: At_Drought_Soil_Dry_P Parameter: Organism Value: A. thaliana
  misc_feature: MA Experiment 20001556 PARAMETER Experiment Name: At_Drought_Soil_Dry_P Parameter: Plant Line Value: WS
  misc_feature: MA Experiment 20001556 PARAMETER Experiment Name: At_Drought_Soil_Dry_P Parameter: Post Timepoint (hr) Value: None
  misc_feature: MA Experiment 20001556 PARAMETER Experiment Name: At_Drought_Soil_Dry_P Parameter: Post-Treatment Value: None
  misc_feature: MA Experiment 20001556 PARAMETER Experiment Name: At_Drought_Soil_Dry_P Parameter: Timepoint (day) Value: 12
  misc_feature: MA Experiment 20001556 PARAMETER Experiment Name: At_Drought_Soil_Dry_P Parameter: Treatment Value: Drought vs. No Drought
  misc_feature: MA Experiment ID: 20001558 Result: Up-regulated in Transcription
  misc_feature: MA Experiment 20001558 PARAMETER Experiment Name: At_Drought_Soil_Dry_P Parameter: Age (day) Value: 27
  misc_feature: MA Experiment 20001558 PARAMETER Experiment Name: At_Drought_Soil_Dry_P Parameter: Organism Value: A. thaliana
  misc_feature: MA Experiment 20001558 PARAMETER Experiment Name: At_Drought_Soil_Dry_P Parameter: Plant Line Value: WS
  misc_feature: MA Experiment 20001558 PARAMETER Experiment Name: At_Drought_Soil_Dry_P Parameter: Post Timepoint (hr) Value: 6
  misc_feature: MA Experiment 20001558 PARAMETER Experiment Name: At_Drought_Soil_Dry_P Parameter: Post-Treatment Value: Re-Water vs. No Drought
  misc_feature: MA Experiment 20001558 PARAMETER Experiment Name: At_Drought_Soil_Dry_P Parameter: Timepoint (day) Value: 13
  misc_feature: MA Experiment 20001558 PARAMETER Experiment Name: At_Drought_Soil_Dry_P Parameter: Treatment Value: Drought vs. No Drought
  misc_feature: MA Experiment ID: 20001770 Result: Up-regulated in Transcription
  misc_feature: MA Experiment 20001770 PARAMETER Experiment Name: At_Far-red-enriched-adult_P Parameter: Age (day) Value: 28
  misc_feature: MA Experiment 20001770 PARAMETER Experiment Name: At_Far-red-enriched-adult_P Parameter: Light Value: Far-red enriched vs. White
  misc_feature: MA Experiment 20001770 PARAMETER Experiment Name: At_Far-red-enriched-adult_P Parameter: Organism Value: A. thaliana
  misc_feature: MA Experiment 20001770 PARAMETER Experiment Name: At_Far-red-enriched-adult_P Parameter: Plant Line Value: Columbia
  misc_feature: MA Experiment 20001770 PARAMETER Experiment Name: At_Far-red-enriched-adult_P Parameter: Timepoint (hr) Value: 8
  misc_feature: MA Experiment 20001770 PARAMETER Experiment Name: At_Far-red-enriched-adult_P Parameter: Tissue Value: Aerial
  misc_feature: MA Experiment ID: 20001907 Result: Down-regulated in Transcription
  misc_feature: MA Experiment 20001907 PARAMETER Experiment Name: At_Drought_Reproduction_P Parameter: Age (day) Value: 37
  misc_feature: MA Experiment 20001907 PARAMETER Experiment Name: At_Drought_Reproduction_P Parameter: Organism Value: A. thaliana
  misc_feature: MA Experiment 20001907 PARAMETER Experiment Name: At_Drought_Reproduction_P Parameter: Plant Line Value: WS
  misc_feature: MA Experiment 20001907 PARAMETER Experiment Name: At_Drought_Reproduction_P Parameter: Timepoint (day) Value: 7
  misc_feature: MA Experiment 20001907 PARAMETER Experiment Name: At_Drought_Reproduction_P Parameter: Tissue Value: Siliques
  misc_feature: MA Experiment 20001907 PARAMETER Experiment Name: At_Drought_Reproduction_P Parameter: Treatment Value: Drought vs. No Drought
  misc_feature: MA Experiment ID: 20001910 Result: Down-regulated in Transcription
  misc_feature: MA Experiment 20001910 PARAMETER Experiment Name: At_Drought_Reproduction_P Parameter: Age (day) Value: 37
  misc_feature: MA Experiment 20001910 PARAMETER Experiment Name: At_Drought_Reproduction_P Parameter: Organism Value: A. thaliana
  misc_feature: MA Experiment 20001910 PARAMETER Experiment Name: At_Drought_Reproduction_P Parameter: Plant Line Value: WS
  misc_feature: MA Experiment 20001910 PARAMETER Experiment Name: At_Drought_Reproduction_P Parameter: Timepoint (day) Value: 7
  misc_feature: MA Experiment 20001910 PARAMETER Experiment Name: At_Drought_Reproduction_P Parameter: Tissue Value: Flowers
  misc_feature: MA Experiment 20001910 PARAMETER Experiment Name: At_Drought_Reproduction_P Parameter: Treatment Value: Drought vs. No Drought
  misc_feature: MA Experiment ID: 20001911 Result: Down-regulated in Transcription
  misc_feature: MA Experiment 20001911 PARAMETER Experiment Name: At_Drought_Reproduction_P Parameter: Age (day) Value: 40
  misc_feature: MA Experiment 20001911 PARAMETER Experiment Name: At_Drought_Reproduction_P Parameter: Organism Value: A. thaliana
  misc_feature: MA Experiment 20001911 PARAMETER Experiment Name: At_Drought_Reproduction_P Parameter: Plant Line Value: WS
  misc_feature: MA Experiment 20001911 PARAMETER Experiment Name: At_Drought_Reproduction_P Parameter: Timepoint (day) Value: 10
  misc_feature: MA Experiment 20001911 PARAMETER Experiment Name: At_Drought_Reproduction_P Parameter: Tissue Value: Flowers
  misc_feature: MA Experiment 20001911 PARAMETER Experiment Name: At_Drought_Reproduction_P Parameter: Treatment Value: Drought vs. No Drought
aaacttttccaaaatcataccaaaaaaacatttagtaacatcaaaatttacaaaaaacaaaaaaacatgctatctctcaaactcttcctcgtaacactcttcttatctcttcaaacactcttcattgcttctcaaactcttcttccttcaaactcttcatcaaccatatgcaaaacaacacccgatccaaaattctgcaaatcagtgttcccacaaacatctcaaggcgacgttcgcgaatacggccgcttctccctccgcaaatcgctaacgcaatcgcggaaattcacacgcaccattgacagatacctcaaacgcaacaatgcactattatctcaatccgccgttggagctctccaagactgccgttacctagcaagcctcacaacagactatctcataacatcgttcgagacggtcaatatcactacatcatccaaaacgttgtcgttttccaaagccgacgaaatccaaacacttctctccgcggctttgactaacgagcaaacatgtcttgatggaatcaacaccgccgcttcctcttcatggactatacgaaacggtgtcgcattgcctctaatcaacgacacgaagctctttagtgtctcgctcgcattattcaccaaaggttgggttccaaagaagaagaaacaagtagccagttactcttgggcccatccaaagaacactcacagtcacacaaaaccattccgtcatttccgtaacggagctttaccgttaaagatgacggaacacacacgcgccgtttacgagtctttaagcaggaggaaactcgctgacgacgataatgacgtaaacacggtgcttgtaagcgacatcgtaacggtgaaccaaaacggaacggggaatttcacgaccataacggaagctgttaattcggcgccgaataaaactgacggtaccgccggttatttcgttatctacgtgacgtcaggtgtttatgaggaaaacgtagtgattgccaaaaacaaaagatatctaatgatgattggtgacggaataaaccgtacggtggttaccggtaaccggaatgtcgtcgacggttggaccactttcaactccgccacttttgctgttacatcgccgaacttcgttgccgtgaacatgactttccgaaataccgctggaccagagaagcaccaggccgtagctatgaggagcagtgcagatctttcaatcttctatagttgcagtttcgaagcttatcaagacactttatacacacattcactaagacagttctatagagaatgtgacatttatggaacagtcgatttcatattcggcaatgcagctgttgtgttccaagactgtaatctctatccaagacaaccgatgcagaaccagttcaacgctattacagctcaaggtcgtactgatccgaatcaaaacacgggaatttcgattcacaattgtacgattaaaccggcagatgatttggtttcgagtaactatacggttaaaacgtatttgggacgaccatggaaggagtattcacgtacggtttttatgcaatcgtacatagacgaggttgttgaaccggttggttggagagaatggaacggagatttcgcattgagtacgttgtactatgctgagtataacaataccggttccggttcaagtactacagatcgagtggtttggcccggttatcatgtgattaattctacggatgcgaataatttcacagtcgagaatttcttgttaggagatggttggatggttcagagtggtgtaccttatattagtggtttactttcgtaatttcttgtatctgattatttgttttagctattattatgggtaaattttggtcttaattttggtccattgttgtaatttggaacattctttaataaaataaagatct

SEQ ID NO: 82667 - protein, 595 aa, Arabidopsis thaliana
  peptide (1)..(595): Ceres Seq. ID no. 12666803
  misc_feature (281)..(579): Pfam Name: Pectinesterase Pfam Description: Pectinesterase
  misc_feature (23)..(595): Homolog of NCBI NO: 18411914 NR Description: hypothetical protein; protein id: At4g02330.1, by cDNA: gi_19424044 [Arabidopsis thaliana]
  misc_feature (23)..(595): Homolog of NCBI NO: 19424045 NR Description: unknown protein [Arabidopsis thaliana]
  misc_feature (30)..(595): Homolog of NCBI NO: 18379010 NR Description: pectinesterase family; protein id: At1g02810.1
  misc_feature (24)..(595): Homolog of NCBI NO: 18407388 NR Description: pectinesterase family; protein id: At2g47550.1, by cDNA: 111254., supported by cDNA: gi_16604401 [Arabidopsis >gi|20196963|gb|AAC62855.2| putative pectinesterase [Arabidopsis
  misc_feature (278)..(595): Homolog of NCBI NO: 7447370 NR Description: probable pectinesterase (EC 3.1.1.11) T30B22.15 -
  misc_feature (85)..(217): Homolog of NCBI NO: 7447370 NR Description: probable pectinesterase (EC 3.1.1.11) T30B22.15 -
  misc_feature (223)..(593): Homolog of NCBI NO: 34894528 NR Description: putative pectinesterase [Oryza sativa (japonica group)] >gi|20805092|dbj|BAB92764.1| putative pectinesterase
  misc_feature (32)..(217): Homolog of NCBI NO: 34894528 NR Description: putative pectinesterase [Oryza sativa (japonica group)] >gi|20805092|dbj|BAB92764.1| putative pectinesterase
  misc_feature (249)..(595): Homolog of NCBI NO: 27363394 NR Description: At2g47550/T30B22.15 [Arabidopsis thaliana]
  misc_feature (249)..(595): Homolog of NCBI NO: 16604402 NR Description: At2g47550/T30B22.15 [Arabidopsis thaliana]
KLFQNHTKKTFSNIKIYKKQKNMLSLKLFLVTLFLSLQTLFIASQTLLPSNSSSTICKTTPDPKFCKSVFPQTSQGDVREYGRFSLRKSLTQSRKFTRTIDRYLKRNNALLSQSAVGALQDCRYLASLTTDYLITSFETVNITTSSKTLSFSKADEIQTLLSAALTNEQTCLDGINTAASSSWTIRNGVALPLINDTKLFSVSLALFTKGWVPKKKKQVASYSWAHPKNTHSHTKPFRHFRNGALPLKMTEHTRAVYESLSRRKLADDDNDVNTVLVSDIVTVNQNGTGNFTTITEAVNSAPNKTDGTAGYFVIYVTSGVYEENVVIAKNKRYLMMIGDGINRTVVTGNRNVVDGWTTFNSATFAVTSPNFVAVNMTFRNTAGPEKHQAVAMRSSADLSIFYSCSFEAYQDTLYTHSLRQFYRECDIYGTVDFIFGNAAVVFQDCNLYPRQPMQNQFNAITAQGRTDPNQNTGISIHNCTIKPADDLVSSNYTVKTYLGRPWKEYSRTVFMQSYIDEVVEPVGWREWNGDFALSTLYYAEYNNTGSGSSTTDRVVWPGYHVINSTDANNFTVENFLLGDGWMVQSGVPYISGLLS

SEQ ID NO: 82668 - protein, 573 aa, Arabidopsis thaliana
  peptide (1)..(573): Ceres Seq. ID no. 12666804
  misc_feature (259)..(557): Pfam Name: Pectinesterase Pfam Description: Pectinesterase
  misc_feature (1)..(573): Homolog of NCBI NO: 18411914 NR Description: hypothetical protein; protein id: At4g02330.1, by cDNA: gi_19424044 [Arabidopsis thaliana]
  misc_feature (1)..(573): Homolog of NCBI NO: 19424045 NR Description: unknown protein [Arabidopsis thaliana]
  misc_feature (8)..(573): Homolog of NCBI NO: 18379010 NR Description: pectinesterase family; protein id: At1g02810.1
  misc_feature (2)..(573): Homolog of NCBI NO: 18407388 NR Description: pectinesterase family; protein id: At2g47550.1, by cDNA: 111254., supported by cDNA: gi_16604401 [Arabidopsis >gi|20196963|gb|AAC62855.2| putative pectinesterase [Arabidopsis
  misc_feature (256)..(573): Homolog of NCBI NO: 7447370 NR Description: probable pectinesterase (EC 3.1.1.11) T30B22.15 -
  misc_feature (63)..(195): Homolog of NCBI NO: 7447370 NR Description: probable pectinesterase (EC 3.1.1.11) T30B22.15 -
  misc_feature (201)..(571): Homolog of NCBI NO: 34894528 NR Description: putative pectinesterase [Oryza sativa (japonica group)] >gi|20805092|dbj|BAB92764.1| putative pectinesterase
  misc_feature (10)..(195): Homolog of NCBI NO: 34894528 NR Description: putative pectinesterase [Oryza sativa (japonica group)] >gi|20805092|dbj|BAB92764.1| putative pectinesterase
  misc_feature (227)..(573): Homolog of NCBI NO: 27363394 NR Description: At2g47550/T30B22.15 [Arabidopsis thaliana]
  misc_feature (227)..(573): Homolog of NCBI NO: 16604402 NR Description: At2g47550/T30B22.15 [Arabidopsis thaliana]
MLSLKLFLVTLFLSLQTLFIASQTLLPSNSSSTICKTTPDPKFCKSVFPQTSQGDVREYGRFSLRKSLTQSRKFTRTIDRYLKRNNALLSQSAVGALQDCRYLASLTTDYLITSFETVNITTSSKTLSFSKADEIQTLLSAALTNEQTCLDGINTAASSSWTIRNGVALPLINDTKLFSVSLALFTKGWVPKKKKQVASYSWAHPKNTHSHTKPFRHFRNGALPLKMTEHTRAVYESLSRRKLADDDNDVNTVLVSDIVTVNQNGTGNFTTITEAVNSAPNKTDGTAGYFVIYVTSGVYEENVVIAKNKRYLMMIGDGINRTVVTGNRNVVDGWTTFNSATFAVTSPNFVAVNMTFRNTAGPEKHQAVAMRSSADLSIFYSCSFEAYQDTLYTHSLRQFYRECDIYGTVDFIFGNAAVVFQDCNLYPRQPMQNQFNAITAQGRTDPNQNTGISIHNCTIKPADDLVSSNYTVKTYLGRPWKEYSRTVFMQSYIDEVVEPVGWREWNGDFALSTLYYAEYNNTGSGSSTTDRVVWPGYHVINSTDANNFTVENFLLGDGWMVQSGVPYISGLLS

SEQ ID NO: 82669 - protein, 347 aa, Arabidopsis thaliana
  peptide (1)..(347): Ceres Seq. ID no. 12666805
  misc_feature (33)..(331): Pfam Name: Pectinesterase Pfam Description: Pectinesterase
  misc_feature (1)..(347): Homolog of NCBI NO: 18411914 NR Description: hypothetical protein; protein id: At4g02330.1, by cDNA: gi_19424044 [Arabidopsis thaliana]
  misc_feature (1)..(347): Homolog of NCBI NO: 19424045 NR Description: unknown protein [Arabidopsis thaliana]
  misc_feature (1)..(347): Homolog of NCBI NO: 18379010 NR Description: pectinesterase family; protein id: At1g02810.1
  misc_feature (1)..(347): Homolog of NCBI NO: 18407388 NR Description: pectinesterase family; protein id: At2g47550.1, by cDNA: 111254., supported by cDNA: gi_16604401 [Arabidopsis >gi|20196963|gb|AAC62855.2| putative pectinesterase [Arabidopsis
  misc_feature (30)..(347): Homolog of NCBI NO: 7447370 NR Description: probable pectinesterase (EC 3.1.1.11) T30B22.15 -
  misc_feature (1)..(345): Homolog of NCBI NO: 34894528 NR Description: putative pectinesterase [Oryza sativa (japonica group)] >gi|20805092|dbj|BAB92764.1| putative pectinesterase
  misc_feature (1)..(347): Homolog of NCBI NO: 27363394 NR Description: At2g47550/T30B22.15 [Arabidopsis thaliana]
  misc_feature (1)..(347): Homolog of NCBI NO: 16604402 NR Description: At2g47550/T30B22.15 [Arabidopsis thaliana]
  misc_feature (1)..(347): Homolog of NCBI NO: 6630558 NR Description: putative pectinesterase [Arabidopsis thaliana]
  misc_feature (1)..(347): Homolog of NCBI NO: 30681457 NR Description: pectinesterase, putative [Arabidopsis thaliana]
MTEHTRAVYESLSRRKLADDDNDVNTVLVSDIVTVNQNGTGNFTTITEAVNSAPNKTDGTAGYFVIYVTSGVYEENVVIAKNKRYLMMIGDGINRTVVTGNRNVVDGWTTFNSATFAVTSPNFVAVNMTFRNTAGPEKHQAVAMRSSADLSIFYSCSFEAYQDTLYTHSLRQFYRECDIYGTVDFIFGNAAVVFQDCNLYPRQPMQNQFNAITAQGRTDPNQNTGISIHNCTIKPADDLVSSNYTVKTYLGRPWKEYSRTVFMQSYIDEVVEPVGWREWNGDFALSTLYYAEYNNTGSGSSTTDRVVWPGYHVINSTDANNFTVENFLLGDGWMVQSGVPYISGLLS

SEQ ID NO: 82670 - DNA, 465 bp, Arabidopsis thaliana
  misc_feature (1)..(465): Ceres Seq. ID no. 12666806
  misc_feature: MA Experiment ID: 20000436 Result: Up-regulated in Transcription
  misc_feature: MA Experiment 20000436 PARAMETER Experiment Name: At_Drought_P Parameter: Age (day) Value: 7
  misc_feature: MA Experiment 20000436 PARAMETER Experiment Name: At_Drought_P Parameter: Organism Value: A. thaliana
  misc_feature: MA Experiment 20000436 PARAMETER Experiment Name: At_Drought_P Parameter: Plant Line Value: WS
  misc_feature: MA Experiment 20000436 PARAMETER Experiment Name: At_Drought_P Parameter: Timepoint (hr) Value: 12
  misc_feature: MA Experiment 20000436 PARAMETER Experiment Name: At_Drought_P Parameter: Tissue Value: Whole Plant
  misc_feature: MA Experiment 20000436 PARAMETER Experiment Name: At_Drought_P Parameter: Treatment Value: Drought vs. No Drought
  misc_feature: MA Experiment ID: 20000437 Result: Up-regulated in Transcription
  misc_feature: MA Experiment 20000437 PARAMETER Experiment Name: At_Drought_P Parameter: Age (day) Value: 8
  misc_feature: MA Experiment 20000437 PARAMETER Experiment Name: At_Drought_P Parameter: Organism Value: A. thaliana
  misc_feature: MA Experiment 20000437 PARAMETER Experiment Name: At_Drought_P Parameter: Plant Line Value: WS
  misc_feature: MA Experiment 20000437 PARAMETER Experiment Name: At_Drought_P Parameter: Timepoint (hr) Value: 24
  misc_feature: MA Experiment 20000437 PARAMETER Experiment Name: At_Drought_P Parameter: Tissue Value: Whole Plant
  misc_feature: MA Experiment 20000437 PARAMETER Experiment Name: At_Drought_P Parameter: Treatment Value: Drought vs. No Drought
  misc_feature: MA Experiment ID: 20001555 Result: Up-regulated in Transcription
  misc_feature: MA Experiment 20001555 PARAMETER Experiment Name: At_Drought_Soil_Dry_P Parameter: Age (day) Value: 24
  misc_feature: MA Experiment 20001555 PARAMETER Experiment Name: At_Drought_Soil_Dry_P Parameter: Organism Value: A. thaliana
  misc_feature: MA Experiment 20001555 PARAMETER Experiment Name: At_Drought_Soil_Dry_P Parameter: Plant Line Value: WS
  misc_feature: MA Experiment 20001555 PARAMETER Experiment Name: At_Drought_Soil_Dry_P Parameter: Post Timepoint (hr) Value: None
  misc_feature: MA Experiment 20001555 PARAMETER Experiment Name: At_Drought_Soil_Dry_P Parameter: Post-Treatment Value: None
  misc_feature: MA Experiment 20001555 PARAMETER Experiment Name: At_Drought_Soil_Dry_P Parameter: Timepoint (day) Value: 10
  misc_feature: MA Experiment 20001555 PARAMETER Experiment Name: At_Drought_Soil_Dry_P Parameter: Treatment Value: Drought vs. No Drought
  misc_feature: MA Experiment ID: 20001905 Result: Up-regulated in Transcription
  misc_feature: MA Experiment 20001905 PARAMETER Experiment Name: At_Drought_Reproduction_P Parameter: Age (day) Value: 40
  misc_feature: MA Experiment 20001905 PARAMETER Experiment Name: At_Drought_Reproduction_P Parameter: Organism Value: A. thaliana
  misc_feature: MA Experiment 20001905 PARAMETER Experiment Name: At_Drought_Reproduction_P Parameter: Plant Line Value: WS
  misc_feature: MA Experiment 20001905 PARAMETER Experiment Name: At_Drought_Reproduction_P Parameter: Timepoint (day) Value: 10
  misc_feature: MA Experiment 20001905 PARAMETER Experiment Name: At_Drought_Reproduction_P Parameter: Tissue Value: Rosettes
  misc_feature: MA Experiment 20001905 PARAMETER Experiment Name: At_Drought_Reproduction_P Parameter: Treatment Value: Drought vs. No Drought
  misc_feature: MA Experiment ID: 20001906 Result: Up-regulated in Transcription
  misc_feature: MA Experiment 20001906 PARAMETER Experiment Name: At_Drought_Reproduction_P Parameter: Age (day) Value: 35
  misc_feature: MA Experiment 20001906 PARAMETER Experiment Name: At_Drought_Reproduction_P Parameter: Organism Value: A. thaliana
  misc_feature: MA Experiment 20001906 PARAMETER Experiment Name: At_Drought_Reproduction_P Parameter: Plant Line Value: WS
  misc_feature: MA Experiment 20001906 PARAMETER Experiment Name: At_Drought_Reproduction_P Parameter: Timepoint (day) Value: 5
  misc_feature: MA Experiment 20001906 PARAMETER Experiment Name: At_Drought_Reproduction_P Parameter: Tissue Value: Siliques
  misc_feature: MA Experiment 20001906 PARAMETER Experiment Name: At_Drought_Reproduction_P Parameter: Treatment Value: Drought vs. No Drought
  misc_feature: MA Experiment ID: 20001908 Result: Up-regulated in Transcription
  misc_feature: MA Experiment 20001908 PARAMETER Experiment Name: At_Drought_Reproduction_P Parameter: Age (day) Value: 40
  misc_feature: MA Experiment 20001908 PARAMETER Experiment Name: At_Drought_Reproduction_P Parameter: Organism Value: A. thaliana
  misc_feature: MA Experiment 20001908 PARAMETER Experiment Name: At_Drought_Reproduction_P Parameter: Plant Line Value: WS
  misc_feature: MA Experiment 20001908 PARAMETER Experiment Name: At_Drought_Reproduction_P Parameter: Timepoint (day) Value: 10
  misc_feature: MA Experiment 20001908 PARAMETER Experiment Name: At_Drought_Reproduction_P Parameter: Tissue Value: Siliques
  misc_feature: MA Experiment 20001908 PARAMETER Experiment Name: At_Drought_Reproduction_P Parameter: Treatment Value: Drought vs. No Drought
  misc_feature: MA Experiment ID: 20001911 Result: Up-regulated in Transcription
  misc_feature: MA Experiment 20001911 PARAMETER Experiment Name: At_Drought_Reproduction_P Parameter: Age (day) Value: 40
  misc_feature: MA Experiment 20001911 PARAMETER Experiment Name: At_Drought_Reproduction_P Parameter: Organism Value: A. thaliana
  misc_feature: MA Experiment 20001911 PARAMETER Experiment Name: At_Drought_Reproduction_P Parameter: Plant Line Value: WS
  misc_feature: MA Experiment 20001911 PARAMETER Experiment Name: At_Drought_Reproduction_P Parameter: Timepoint (day) Value: 10
  misc_feature: MA Experiment 20001911 PARAMETER Experiment Name: At_Drought_Reproduction_P Parameter: Tissue Value: Flowers
  misc_feature: MA Experiment 20001911 PARAMETER Experiment Name: At_Drought_Reproduction_P Parameter: Treatment Value: Drought vs. No Drought
atgtcgctagacgcgaatacttgttctatcgtcttctttctattcttcactgtctctttcgccgtctccggccaaaagccaaccgcttacgacgccgtcaaactctataacttaccaccaggaatcctcccaaaaggagtggttgactatgagcttaacccaaaaacaggcaacttcaaagtctacttcaatgacacgtgtgaattcaccatccaatcctaccagctcaagtacaaatcaactatctccggcgttatatcacccggtcatgtcaagaatctgaaaggagttagtgttaaggttcttttcttctgggttaatattgctgaagtgtctcttgacggcgccgatctcgacttctccgtcggaatcgcgtcggcgagttttccggctgctaattttgaagagagtcctcagtgtggttgtgggtttgattgtaataatgggcttttattttcttcttga

SEQ ID NO: 82671 - protein, 154 aa, Arabidopsis thaliana
  peptide (1)..(154): Ceres Seq. ID no. 12666807
  misc_feature (7)..(146): Pfam Name: Protein of unknown function, DUF538 Pfam Description: Protein of unknown function, DUF538
  misc_feature (1)..(154): Homolog of NCBI NO: 15235335 NR Description: putative protein; protein id: At4g02360.1
  misc_feature (10)..(146): Homolog of NCBI NO: 18379012 NR Description: Expressed protein; protein id: At1g02813.1,
  misc_feature (10)..(146): Homolog of NCBI NO: 21553750 NR Description: unknown [Arabidopsis thaliana]
  misc_feature (7)..(151): Homolog of NCBI NO: 18411923 NR Description: coded for by A. thaliana cDNA R64991; protein id: supported by cDNA: 19543., supported by cDNA: gi_13430841, by cDNA: gi_15810602 [Arabidopsis thaliana]
  misc_feature (7)..(151): Homolog of NCBI NO: 21554037 NR Description: unknown [Arabidopsis thaliana]
  misc_feature (9)..(146): Homolog of NCBI NO: 18379014 NR Description: Expressed protein; protein id: At1g02816.1, by cDNA: 28445., supported by cDNA: gi_14423479, supported by
  misc_feature (19)..(143): Homolog of NCBI NO: 28273408 NR Description: unknown protein [Oryza sativa (japonica
  misc_feature (10)..(140): Homolog of NCBI NO: 9759120 NR Description: gb|AAF02163.1~gene_id:MQK4.11~similar to unknown
  misc_feature (10)..(140): Homolog of NCBI NO: 18417957 NR Description: putative protein; protein id: At5g16380.1, by cDNA: 115644., supported by cDNA: gi_17381065 [Arabidopsis >gi|17381066|gb|AAL36345.1| unknown protein [Arabidopsis
  misc_feature (10)..(140): Homolog of NCBI NO: 21536941 NR Description: unknown [Arabidopsis thaliana]
MSLDANTCSIVFFLFFTVSFAVSGQKPTAYDAVKLYNLPPGILPKGVVDYELNPKTGNFKVYFNDTCEFTIQSYQLKYKSTISGVISPGHVKNLKGVSVKVLFFWVNIAEVSLDGADLDFSVGIASASFPAANFEESPQCGCGFDCNNGLLFSS

SEQ ID NO: 82672 - DNA, 2184 bp, Arabidopsis thaliana
  misc_feature (1)..(2184): Ceres Seq. ID no. 12666808
  misc_feature: MA Experiment ID: 20000307 Result: Down-regulated in Transcription
  misc_feature: MA Experiment 20000307 PARAMETER Experiment Name: At_Germinating_Seeds_Sub_P Parameter: Age (hr) Value: 24 vs. 0
  misc_feature: MA Experiment 20000307 PARAMETER Experiment Name: At_Germinating_Seeds_Sub_P Parameter: Organism Value: A. thaliana
  misc_feature: MA Experiment 20000307 PARAMETER Experiment Name: At_Germinating_Seeds_Sub_P Parameter: Plant Line Value: WS
  misc_feature: MA Experiment 20000307 PARAMETER Experiment Name: At_Germinating_Seeds_Sub_P Parameter: Tissue Value: Germinating Seeds
  misc_feature: MA Experiment ID: 20000327 Result: Down-regulated in Transcription
  misc_feature: MA Experiment 20000327 PARAMETER Experiment Name: At_42deg_Heat_Sub_P Parameter: Age (day) Value: 14
  misc_feature: MA Experiment 20000327 PARAMETER Experiment Name: At_42deg_Heat_Sub_P Parameter: Organism Value: A. thaliana
  misc_feature: MA Experiment 20000327 PARAMETER Experiment Name: At_42deg_Heat_Sub_P Parameter: Plant Line Value: WS
  misc_feature: MA Experiment 20000327 PARAMETER Experiment Name: At_42deg_Heat_Sub_P Parameter: Temperature (deg C) Value: 42 vs. 22
  misc_feature: MA Experiment 20000327 PARAMETER Experiment Name: At_42deg_Heat_Sub_P Parameter: Timepoint (hr) Value: 1
  misc_feature: MA Experiment 20000327 PARAMETER Experiment Name: At_42deg_Heat_Sub_P Parameter: Tissue Value: Aerial
  misc_feature: MA Experiment ID: 20000328 Result: Down-regulated in Transcription
  misc_feature: MA Experiment 20000328 PARAMETER Experiment Name: At_42deg_Heat_Sub_P Parameter: Age (day) Value: 14
  misc_feature: MA Experiment 20000328 PARAMETER Experiment Name: At_42deg_Heat_Sub_P Parameter: Organism Value: A. thaliana
  misc_feature: MA Experiment 20000328 PARAMETER Experiment Name: At_42deg_Heat_Sub_P Parameter: Plant Line Value: WS
  misc_feature: MA Experiment 20000328 PARAMETER Experiment Name: At_42deg_Heat_Sub_P Parameter: Temperature (deg C) Value: 42 vs. 22
  misc_feature: MA Experiment 20000328 PARAMETER Experiment Name: At_42deg_Heat_Sub_P Parameter: Timepoint (hr) Value: 6
  misc_feature: MA Experiment 20000328 PARAMETER Experiment Name: At_42deg_Heat_Sub_P Parameter: Tissue Value: Aerial
  misc_feature: MA Experiment ID: 20000329 Result: Up-regulated in Transcription
  misc_feature: MA Experiment 20000329 PARAMETER Experiment Name: At_4deg_Cold_Sub_P Parameter: Age (day) Value: 14
  misc_feature: MA Experiment 20000329 PARAMETER Experiment Name: At_4deg_Cold_Sub_P Parameter: Organism Value: A. thaliana
  misc_feature: MA Experiment 20000329 PARAMETER Experiment Name: At_4deg_Cold_Sub_P Parameter: Plant Line Value: WS
  misc_feature: MA Experiment 20000329 PARAMETER Experiment Name: At_4deg_Cold_Sub_P Parameter: Temperature (deg C) Value: 4 vs. 22
  misc_feature: MA Experiment 20000329 PARAMETER Experiment Name: At_4deg_Cold_Sub_P Parameter: Timepoint (hr) Value: 6
  misc_feature: MA Experiment 20000329 PARAMETER Experiment Name: At_4deg_Cold_Sub_P Parameter: Tissue Value: Aerial
  misc_feature: MA Experiment ID: 20000347 Result: Up-regulated in Transcription
  misc_feature: MA Experiment 20000347 PARAMETER Experiment Name: At_2mM_SA_Sub_P Parameter: Age (day) Value: 14
  misc_feature: MA Experiment 20000347 PARAMETER Experiment Name: At_2mM_SA_Sub_P Parameter: Organism Value: A. thaliana
  misc_feature: MA Experiment 20000347 PARAMETER Experiment Name: At_2mM_SA_Sub_P Parameter: Plant Line Value: WS
  misc_feature: MA Experiment 20000347 PARAMETER Experiment Name: At_2mM_SA_Sub_P Parameter: Timepoint (hr) Value: 6
  misc_feature: MA Experiment 20000347 PARAMETER Experiment Name: At_2mM_SA_Sub_P Parameter: Tissue Value: Aerial
  misc_feature: MA Experiment 20000347 PARAMETER Experiment Name: At_2mM_SA_Sub_P Parameter: Treatment Value: 2mM SA vs. No Treatment
  misc_feature: MA Experiment ID: 20000355 Result: Down-regulated in Transcription
  misc_feature: MA Experiment 20000355 PARAMETER Experiment Name: At_Siliques_Sub_P Parameter: Age (day) Value: 21
  misc_feature: MA Experiment 20000355 PARAMETER Experiment Name: At_Siliques_Sub_P Parameter: Organism Value: A. thaliana
  misc_feature: MA Experiment 20000355 PARAMETER Experiment Name: At_Siliques_Sub_P Parameter: Plant Line Value: WS
  misc_feature: MA Experiment 20000355 PARAMETER Experiment Name: At_Siliques_Sub_P Parameter: Tissue Value: Less Than 5mm Siliques vs. Whole Plant
  misc_feature: MA Experiment ID: 20000440 Result: Down-regulated in Transcription
  misc_feature: MA Experiment 20000440 PARAMETER Experiment Name: At_Closed-Flower__Sub_P Parameter: Tissue Value: Closed Flower vs. Whole Plant
  misc_feature: MA Experiment ID: 20000634 Result: Up-regulated in Transcription
  misc_feature: MA Experiment 20000634 PARAMETER Experiment Name: At_10percent_PEG_Sub_P Parameter: Age (day) Value: 12
  misc_feature: MA Experiment 20000634 PARAMETER Experiment Name: At_10percent_PEG_Sub_P Parameter: Organism Value: A. thaliana
  misc_feature: MA Experiment 20000634 PARAMETER Experiment Name: At_10percent_PEG_Sub_P Parameter: Plant Line Value: WS
  misc_feature: MA Experiment 20000634 PARAMETER Experiment Name: At_10percent_PEG_Sub_P Parameter: Timepoint (day) Value: 12
  misc_feature: MA Experiment 20000634 PARAMETER Experiment Name: At_10percent_PEG_Sub_P Parameter: Tissue Value: Whole Plant
  misc_feature: MA Experiment 20000634 PARAMETER Experiment Name: At_10percent_PEG_Sub_P Parameter: Treatment Value: 10% PEG vs. No Treatment
aataatatctaaaccaaaagccaaaacacacaaaaacagagccatgttcttcaagctctttaccatcttcttcttcttcatcatcctactctctaaacccctaaactcctcttctcaaagtctcaacttcacttacaatagcttccatcgtccaccaactaacatatccatccaaggaattgccacagtcacatccaacggtatcttgaagctaacagacaaaacggttataagtacaggtcacgctttctacaccgaaccaatccggtttaaagattcaccaaacgatactgtctcgtccttctcaacaaccttcgtcatcggtatctactctgggatcccgacaattagcggccatggcatggcctttttcatcgctcctaaccccgtcctctcatcagccatggctagccaataccttggtctcttcagcagcaccaacaacggtaacgatacgaatcatatactcgctgtcgaatttgatacgatcatgaaccctgagtttgatgatacgaacgataaccatgtgggaatcaatataaatagtttgacctcggttaaaagctcgctggttgggtattgggatgagatcaatcagtttaataatctgactttgataagtcgtaaacggatgcaagtttgggttgactatgatgatcgtactaatcaaatcgatgtaactatggctccgtttggtgaggttaaacctaggaaagcgcttgtttctgttgttagagatctatcttctgttttcttgcaagacatgtacttaggtttctcggctgcgactggttatgttctgtcagaacattttgtttttgggtggagtttcatggtgaaagggaagacagctccgccgttgactttatcgaaagttccgaagtttccgagggtcgggccaacgagtttacagaggttttataagaacaggatgccgttattttccctcttgttgattccggtcttgtttgttgtctcgctcatcttcctcgtgcgctttatcgtgaggaggaggagaaagttcgcggaggagttcgaagattgggaaacagagtttgggaagaaccggttaaggtttaaggacttgtactatgctacaaaagggttcaaggataaggaccttcttggatcgggtgggtttggtagggtttatagaggtgtcatgccgacaacgaagaaagagatcgcggtgaagagagtgtcgaatgaatctcgacaagggttgaaagagtttgttgctgagattgtgagtattggtaggatgagtcatcggaacttagttcctctcttgggttattgtcgtcgtagagacgagcttcttttggtgtatgattacatgcctaatggtagcttagacaagtatttgtacgattgtcctgaggtaacacttgattggaaacagaggtttaatgtaattataggtgtggcctctggcttattctatctccacgaggaatgggaacaagtggtgattcaccgcgacatcaaagccagcaacgttttgttagacgcggagtacaacggaagactcggggattttggtttagctcggttgtgcgatcacggttcggatcctcaaactacgcgtgttgttggaacttggggatacctagccccggatcatgtcagaacaggacgggccacaaccgctactgatgtttttgcgtttggggtgctcctactagaagtggcttgcggtaggcgacctatagagattgagatcgagagtgatgagagcgtgttgctagtggattcggtttttggtttttggatagagggaaacatcttggatgctacggatccgaatctaggatcggtctatgaccaaagagaagtcgaaacggtattgaagctagggttgttatgctctcactccgacccacaagttagaccaacaatgagacaagtgctacagtatctaaggggagatgcaacgttaccagatttgtcgccgttggacttccgtgggagtgggaaaatgttgggaatgaaccacagatttagtgagtcatgcacattttccagtggatcttcgattgcttattctatagtctctggcgggaggtgattttggaatattagaacatgtatatgtcttacatagttacattacatatgtagaaagaatgtttttgcacatgatagagaccatgttgatatatatcattgaaactttattgaccg

SEQ ID NO: 82673 - protein, 688 aa, Arabidopsis thaliana
  peptide (1)..(688): Ceres Seq. ID no. 12666809
  misc_feature (15)..(688): Homolog of NCBI NO: 18411937 NR Description: contains similarity to a protein kinase domain score: 125.64) and legume lectins alpha domain [Arabidopsis
  misc_feature (15)..(688): Homolog of NCBI NO: 15224347 NR Description: putative receptor-like protein kinase; protein At2g37710.1, supported by cDNA: gi_20259540 [Arabidopsis
  misc_feature (15)..(658): Homolog of NCBI NO: 11346411 NR Description: receptor-type protein kinase LRK1 [imported] - thaliana >gi|1418331|emb|CAA65153.1| receptor like protein kinase
  misc_feature (15)..(688): Homolog of NCBI NO: 15232332 NR Description: serine/threonine-specific kinase like protein;
  misc_feature (15)..(688): Homolog of NCBI NO: 28416699 NR Description: At3g53810 [Arabidopsis thaliana]
  misc_feature (41)..(651): Homolog of NCBI NO: 37534762 NR Description: putative serine/threonine-specific kinase like
  misc_feature (43)..(686): Homolog of NCBI NO: 22093630 NR Description: contains ESTs
  misc_feature (21)..(688): Homolog of NCBI NO: 34899520 NR Description: putative receptor-like protein kinase [Oryza
  misc_feature (43)..(653): Homolog of NCBI NO: 34899514 NR Description: putative receptor-like protein kinase [Oryza
  misc_feature (25)..(686): Homolog of NCBI NO: 34899524 NR Description: putative receptor-type protein kinase LRK1 [Oryza
IISKPKAKTHKNRAMFFKLFTIFFFFIILLSKPLNSSSQSLNFTYNSFHRPPTNISIQGIATVTSNGILKLTDKTVISTGHAFYTEPIRFKDSPNDTVSSFSTTFVIGIYSGIPTISGHGMAFFIAPNPVLSSAMASQYLGLFSSTNNGNDTNHILAVEFDTIMNPEFDDTNDNHVGININSLTSVKSSLVGYWDEINQFNNLTLISRKRMQVWVDYDDRTNQIDVTMAPFGEVKPRKALVSVVRDLSSVFLQDMYLGFSAATGYVLSEHFVFGWSFMVKGKTAPPLTLSKVPKFPRVGPTSLQRFYKNRMPLFSLLLIPVLFVVSLIFLVRFIVRRRRKFAEEFEDWETEFGKNRLRFKDLYYATKGFKDKDLLGSGGFGRVYRGVMPTTKKEIAVKRVSNESRQGLKEFVAEIVSIGRMSHRNLVPLLGYCRRRDELLLVYDYMPNGSLDKYLYDCPEVTLDWKQRFNVIIGVASGLFYLHEEWEQVVIHRDIKASNVLLDAEYNGRLGDFGLARLCDHGSDPQTTRVVGTWGYLAPDHVRTGRATTATDVFAFGVLLLEVACGRRPIEIEIESDESVLLVDSVFGFWIEGNILDATDPNLGSVYDQREVETVLKLGLLCSHSDPQVRPTMRQVLQYLRGDATLPDLSPLDFRGSGKMLGMNHRFSESCTFSSGSSIAYSIVSGGR

SEQ ID NO: 82674 - protein, 674 aa, Arabidopsis thaliana
  peptide (1)..(674): Ceres Seq. ID no. 12666810
  misc_feature (1)..(674): Homolog of NCBI NO: 18411937 NR Description: contains similarity to a protein kinase domain score: 125.64) and legume lectins alpha domain [Arabidopsis
  misc_feature (1)..(674): Homolog of NCBI NO: 15224347 NR Description: putative receptor-like protein kinase; protein At2g37710.1, supported by cDNA: gi_20259540 [Arabidopsis
  misc_feature (1)..(644): Homolog of NCBI NO: 11346411 NR Description: receptor-type protein kinase LRK1 [imported] - thaliana >gi|1418331|emb|CAA65153.1| receptor like protein kinase
  misc_feature (1)..(674): Homolog of NCBI NO: 15232332 NR Description: serine/threonine-specific kinase like protein;
  misc_feature (1)..(674): Homolog of NCBI NO: 28416699 NR Description: At3g53810 [Arabidopsis thaliana]
  misc_feature (27)..(637): Homolog of NCBI NO: 37534762 NR Description: putative serine/threonine-specific kinase like
  misc_feature (29)..(672): Homolog of NCBI NO: 22093630 NR Description: contains ESTs
  misc_feature (7)..(674): Homolog of NCBI NO: 34899520 NR Description: putative receptor-like protein kinase [Oryza
  misc_feature (29)..(639): Homolog of NCBI NO: 34899514 NR Description: putative receptor-like protein kinase [Oryza
  misc_feature (11)..(672): Homolog of NCBI NO: 34899524 NR Description: putative receptor-type protein kinase LRK1 [Oryza
MFFKLFTIFFFFIILLSKPLNSSSQSLNFTYNSFHRPPTNISIQGIATVTSNGILKLTDKTVISTGHAFYTEPIRFKDSPNDTVSSFSTTFVIGIYSGIPTISGHGMAFFIAPNPVLSSAMASQYLGLFSSTNNGNDTNHILAVEFDTIMNPEFDDTNDNHVGININSLTSVKSSLVGYWDEINQFNNLTLISRKRMQVWVDYDDRTNQIDVTMAPFGEVKPRKALVSVVRDLSSVFLQDMYLGFSAATGYVLSEHFVFGWSFMVKGKTAPPLTLSKVPKFPRVGPTSLQRFYKNRMPLFSLLLIPVLFVVSLIFLVRFIVRRRRKFAEEFEDWETEFGKNRLRFKDLYYATKGFKDKDLLGSGGFGRVYRGVMPTTKKEIAVKRVSNESRQGLKEFVAEIVSIGRMSHRNLVPLLGYCRRRDELLLVYDYMPNGSLDKYLYDCPEVTLDWKQRFNVIIGVASGLFYLHEEWEQVVIHRDIKASNVLLDAEYNGRLGDFGLARLCDHGSDPQTTRVVGTWGYLAPDHVRTGRATTATDVFAFGVLLLEVACGRRPIEIEIESDESVLLVDSVFGFWIEGNILDATDPNLGSVYDQREVETVLKLGLLCSHSDPQVRPTMRQVLQYLRGDATLPDLSPLDFRGSGKMLGMNHRFSESCTFSSGSSIAYSIVSGGR

SEQ ID NO: 82675 - protein, 568 aa, Arabidopsis thaliana
  peptide (1)..(568): Ceres Seq. ID no. 12666811
  misc_feature (1)..(568): Homolog of NCBI NO: 18411937 NR Description: contains similarity to a protein kinase domain score: 125.64) and legume lectins alpha domain [Arabidopsis
  misc_feature (1)..(568): Homolog of NCBI NO: 15224347 NR Description: putative receptor-like protein kinase; protein At2g37710.1, supported by cDNA: gi_20259540 [Arabidopsis
  misc_feature (1)..(538): Homolog of NCBI NO: 11346411 NR Description: receptor-type protein kinase LRK1 [imported] - thaliana >gi|1418331|emb|CAA65153.1| receptor like protein kinase
  misc_feature (1)..(568): Homolog of NCBI NO: 15232332 NR Description: serine/threonine-specific kinase like protein;
  misc_feature (1)..(568): Homolog of NCBI NO: 28416699 NR Description: At3g53810 [Arabidopsis thaliana]
  misc_feature (1)..(531): Homolog of NCBI NO: 37534762 NR Description: putative serine/threonine-specific kinase like
  misc_feature (1)..(566): Homolog of NCBI NO: 22093630 NR Description: contains ESTs
  misc_feature (1)..(568): Homolog of NCBI NO: 34899520 NR Description: putative receptor-like protein kinase [Oryza
  misc_feature (1)..(533): Homolog of NCBI NO: 34899514 NR Description: putative receptor-like protein kinase [Oryza
  misc_feature (1)..(566): Homolog of NCBI NO: 34899524 NR Description: putative receptor-type protein kinase LRK1 [Oryza
MAFFIAPNPVLSSAMASQYLGLFSSTNNGNDTNHILAVEFDTIMNPEFDDTNDNHVGININSLTSVKSSLVGYWDEINQFNNLTLISRKRMQVWVDYDDRTNQIDVTMAPFGEVKPRKALVSVVRDLSSVFLQDMYLGFSAATGYVLSEHFVFGWSFMVKGKTAPPLTLSKVPKFPRVGPTSLQRFYKNRMPLFSLLLIPVLFVVSLIFLVRFIVRRRRKFAEEFEDWETEFGKNRLRFKDLYYATKGFKDKDLLGSGGFGRVYRGVMPTTKKEIAVKRVSNESRQGLKEFVAEIVSIGRMSHRNLVPLLGYCRRRDELLLVYDYMPNGSLDKYLYDCPEVTLDWKQRFNVIIGVASGLFYLHEEWEQVVIHRDIKASNVLLDAEYNGRLGDFGLARLCDHGSDPQTTRVVGTWGYLAPDHVRTGRATTATDVFAFGVLLLEVACGRRPIEIEIESDESVLLVDSVFGFWIEGNILDATDPNLGSVYDQREVETVLKLGLLCSHSDPQVRPTMRQVLQYLRGDATLPDLSPLDFRGSGKMLGMNHRFSESCTFSSGSSIAYSIVSGGR

SEQ ID NO: 82676 - DNA, 2010 bp, Arabidopsis thaliana
  misc_feature (1)..(2010): Ceres Seq. ID no. 12666812
  misc_feature: MA Experiment ID: 20000314 Result: Down-regulated in Transcription
  misc_feature: MA Experiment 20000314 PARAMETER Experiment Name: At_14day_Shoots-Roots_Sub_P Parameter: Age (day) Value: 14
  misc_feature: MA Experiment 20000314 PARAMETER Experiment Name: At_14day_Shoots-Roots_Sub_P Parameter: Organism Value: A. thaliana
  misc_feature: MA Experiment 20000314 PARAMETER Experiment Name: At_14day_Shoots-Roots_Sub_P Parameter: Plant Line Value: WS
  misc_feature: MA Experiment 20000314 PARAMETER Experiment Name: At_14day_Shoots-Roots_Sub_P Parameter: Tissue Value: Roots vs. Whole Plant
  misc_feature: MA Experiment ID: 20000327 Result: Down-regulated in Transcription
  misc_feature: MA Experiment 20000327 PARAMETER Experiment Name: At_42deg_Heat_Sub_P Parameter: Age (day) Value: 14
  misc_feature: MA Experiment 20000327 PARAMETER Experiment Name: At_42deg_Heat_Sub_P Parameter: Organism Value: A. thaliana
  misc_feature: MA Experiment 20000327 PARAMETER Experiment Name: At_42deg_Heat_Sub_P Parameter: Plant Line Value: WS
  misc_feature: MA Experiment 20000327 PARAMETER Experiment Name: At_42deg_Heat_Sub_P Parameter: Temperature (deg C) Value: 42 vs. 22
  misc_feature: MA Experiment 20000327 PARAMETER Experiment Name: At_42deg_Heat_Sub_P Parameter: Timepoint (hr) Value: 1
  misc_feature: MA Experiment 20000327 PARAMETER Experiment Name: At_42deg_Heat_Sub_P Parameter: Tissue Value: Aerial
  misc_feature: MA Experiment ID: 20000328 Result: Down-regulated in Transcription
  misc_feature: MA Experiment 20000328 PARAMETER Experiment Name: At_42deg_Heat_Sub_P Parameter: Age (day) Value: 14
  misc_feature: MA Experiment 20000328 PARAMETER Experiment Name: At_42deg_Heat_Sub_P Parameter: Organism Value: A. thaliana
  misc_feature: MA Experiment 20000328 PARAMETER Experiment Name: At_42deg_Heat_Sub_P Parameter: Plant Line Value: WS
  misc_feature: MA Experiment 20000328 PARAMETER Experiment Name: At_42deg_Heat_Sub_P Parameter: Temperature (deg C) Value: 42 vs. 22
  misc_feature: MA Experiment 20000328 PARAMETER Experiment Name: At_42deg_Heat_Sub_P Parameter: Timepoint (hr) Value: 6
  misc_feature: MA Experiment 20000328 PARAMETER Experiment Name: At_42deg_Heat_Sub_P Parameter: Tissue Value: Aerial
  misc_feature: MA Experiment ID: 20000347 Result: Up-regulated in Transcription
  misc_feature: MA Experiment 20000347 PARAMETER Experiment Name: At_2mM_SA_Sub_P Parameter: Age (day) Value: 14
  misc_feature: MA Experiment 20000347 PARAMETER Experiment Name: At_2mM_SA_Sub_P Parameter: Organism Value: A. thaliana
  misc_feature: MA Experiment 20000347 PARAMETER Experiment Name: At_2mM_SA_Sub_P Parameter: Plant Line Value: WS
  misc_feature: MA Experiment 20000347 PARAMETER Experiment Name: At_2mM_SA_Sub_P Parameter: Timepoint (hr) Value: 6
  misc_feature: MA Experiment 20000347 PARAMETER Experiment Name: At_2mM_SA_Sub_P Parameter: Tissue Value: Aerial
  misc_feature: MA Experiment 20000347 PARAMETER Experiment Name: At_2mM_SA_Sub_P Parameter: Treatment Value: 2mM SA vs. No Treatment
  misc_feature: MA Experiment ID: 20000355 Result: Down-regulated in Transcription
  misc_feature: MA Experiment 20000355 PARAMETER Experiment Name: At_Siliques_Sub_P Parameter: Age (day) Value: 21
  misc_feature: MA Experiment 20000355 PARAMETER Experiment Name: At_Siliques_Sub_P Parameter: Organism Value: A. thaliana
  misc_feature: MA Experiment 20000355 PARAMETER Experiment Name: At_Siliques_Sub_P Parameter: Plant Line Value: WS
  misc_feature: MA Experiment 20000355 PARAMETER Experiment Name: At_Siliques_Sub_P Parameter: Tissue Value: Less Than 5mm Siliques vs. Whole Plant
  misc_feature: MA Experiment ID: 20000440 Result: Down-regulated in Transcription
  misc_feature: MA Experiment 20000440 PARAMETER Experiment Name: At_Closed-Flower__Sub_P Parameter: Tissue Value: Closed Flower vs. Whole Plant
atgttcttcatcaagctcttcaccatcttcttcttaagcttcttttggcaatccctaaagtcctcttcccaaattatcgacttcacttacaatggcttccgtcctccaccgacagacatatccatcctaggaattgccaccatcacaccaaacggtctcttaaagctaaccaacacaaccatgcagagcaccggtcacgccttctataccaaaccaatccggttcaaagattctccaaacggtaccgtatcgtctttctccactacctttgtcttcgctattcactctcagatacccattgcacacggcatggcctttgtcatcgctcctaaccctcgcctcccattcggcagccccttacaatacctcggtctcttcaatgtaacaaacaacggtaacgttaggaaccatgtattcgctgtcgaacttgacacgattatgaatatcgagttcaatgatacgaacaataaccatgttggaatcgatatcaatagcttgaactcggtgaaaagttctcctgctgggtactgggacgagaacgatcagtttcacaatctgactttgatcagtagtaaacggatgcaggtttgggtcgatttcgatggtcccacccatctaatcgatgtaaccatggctccgtttggtgaggttaaacctaggaaaccgcttgtttctatcgtcagagatctgtcctctgttcttttgcaagatatgttcgtaggtttctcgtctgcgaccggtaatattgtgtccgaaatttttgttcttgggtggagttttggagtgaatggggaagctcagccattggccttatcgaaacttccgagattgccggtgtgggacttaaaacctacaagagtctacagattctacaagaactgggtgccgttgatctccctcttgttgattcccttcttgcttataatcttcctcgtgcgcttcatcatgaagaggagaagaaagttcgcggaggaggtggaagattgggaaacagagttcgggaagaaccgactaaggttcaaggacttgtactatgcaacaaaagggttcaaggataagaacattcttggatcaggcgggttcgggagtgtttacaaaggtatcatgcccaagacgaagaaggagattgccgtgaaaagagtctcgaacgaatctagacaaggtttgaaagagttcgtggctgagatcgtgagtattggacagatgagtcaccggaacttggttcctctcgtgggttattgccgtcggagagacgagcttcttctggtgtacgattacatgcccaatggaagtttagacaagtatttgtacaatagtccagaggtaaccctcgattggaaacagaggtttaaagtcattaatggcgtggcctctgccttattttatctccacgaggagtgggaacaagtggtgattcaccgcgacgtcaaagccagcaacgtcttgttagatgcagagctcaatgggagactcggggatttcggtttagctcagttgtgtgatcacgggtctgatcctcaaactacgcgtgtagttggaacttggggatacctagcccccgatcacatcaggacaggacgggccacaaccactactgatgtttttgcatttggggtgctcctactagaagtggcgtgcggcagacgtcctatcgagattaataaccaaagtggtgagagggtcgtgctcgtggattgggtttttagattttggatggaggcaaacattttggatgctaaggatcctaatctagggtctgagtatgaccaaaaagaagtcgaaatggttttgaagctaggtttgttgtgctctcactccgacccactagctagaccaacaatgagacaagtgctacagtatctaaggggagatgcaatgttaccagatctgtcgccgttggacttgcgtgggagtgggatcatgttgggaacccacaacgggtctaatgagtcgggcatgtttaccagtggatcttctgttgcttattctctactctccagtgggaggtga

SEQ ID NO: 82677 - protein, 669 aa, Arabidopsis thaliana [sequence omitted]

SEQ ID NO: 82678 - protein, 609 aa, Arabidopsis thaliana
  peptide (1)..(609): Ceres Seq. ID no. 12666814
  misc_feature (1)..(609): Homolog of NCBI NO: 18411935 NR Description: contains similarity to a protein kinase domain pkinase.hmm, score: 166.20) and to legume lectins beta domain lectin_legB.hmm, score: 139.32); protein id: At4g02410.1,
  misc_feature (1)..(609): Homolog of NCBI NO: 15224347 NR Description: putative receptor-like protein kinase; protein At2g37710.1, supported by cDNA: gi_20259540 [Arabidopsis
  misc_feature (1)..(579): Homolog of NCBI NO: 11346411 NR Description: receptor-type protein kinase LRK1 [imported] - thaliana >gi|1418331|emb|CAA65153.1| receptor like protein kinase
  misc_feature (1)..(609): Homolog of NCBI NO: 15232332 NR Description: serine/threonine-specific kinase like protein;
  misc_feature (1)..(609): Homolog of NCBI NO: 28416699 NR Description: At3g53810 [Arabidopsis thaliana]
  misc_feature (1)..(571): Homolog of NCBI NO: 34899508 NR Description: putative receptor-like protein kinase [Oryza
  misc_feature (1)..(575): Homolog of NCBI NO: 34899548 NR Description: putative receptor-type protein kinase LRK1 [Oryza
  misc_feature (1)..(586): Homolog of NCBI NO: 34899518 NR Description: putative receptor-like protein kinase [Oryza
  misc_feature (1)..(569): Homolog of NCBI NO: 34899498 NR Description: putative receptor-like protein kinase [Oryza
  misc_feature (1)..(579): Homolog of NCBI NO: 15239263 NR Description: receptor like protein kinase; protein id:
MQSTGHAFYTKPIRFKDSPNGTVSSFSTTFVFAIHSQIPIAHGMAFVIAPNPRLPFGSPLQYLGLFNVTNNGNVRNHVFAVELDTIMNIEFNDTNNNHVGIDINSLNSVKSSPAGYWDENDQFHNLTLISSKRMQVWVDFDGPTHLIDVTMAPFGEVKPRKPLVSIVRDLSSVLLQDMFVGFSSATGNIVSEIFVLGWSFGVNGEAQPLALSKLPRLPVWDLKPTRVYRFYKNWVPLISLLLIPFLLIIFLVRFIMKRRRKFAEEVEDWETEFGKNRLRFKDLYYATKGFKDKNILGSGGFGSVYKGIMPKTKKEIAVKRVSNESRQGLKEFVAEIVSIGQMSHRNLVPLVGYCRRRDELLLVYDYMPNGSLDKYLYNSPEVTLDWKQRFKVINGVASALFYLHEEWEQVVIHRDVKASNVLLDAELNGRLGDFGLAQLCDHGSDPQTTRVVGTWGYLAPDHIRTGRATTTTDVFAFGVLLLEVACGRRPIEINNQSGERVVLVDWVFRFWMEANILDAKDPNLGSEYDQKEVEMVLKLGLLCSHSDPLARPTMRQVLQYLRGDAMLPDLSPLDLRGSGIMLGTHNGSNESGMFTSGSSVAYSLLSSGR

SEQ ID NO: 82679 - protein, 566 aa, Arabidopsis thaliana
  peptide (1)..(566): Ceres Seq. ID no. 12666815
  misc_feature (1)..(566): Homolog of NCBI NO: 18411935 NR Description: contains similarity to a protein kinase domain pkinase.hmm, score: 166.20) and to legume lectins beta domain lectin_legB.hmm, score: 139.32); protein id: At4g02410.1,
  misc_feature (1)..(566): Homolog of NCBI NO: 15224347 NR Description: putative receptor-like protein kinase; protein At2g37710.1, supported by cDNA: gi_20259540 [Arabidopsis
  misc_feature (1)..(536): Homolog of NCBI NO: 11346411 NR Description: receptor-type protein kinase LRK1 [imported] - thaliana >gi|1418331|emb|CAA65153.1| receptor like protein kinase
  misc_feature (1)..(566): Homolog of NCBI NO: 15232332 NR Description: serine/threonine-specific kinase like protein;
  misc_feature (1)..(566): Homolog of NCBI NO: 28416699 NR Description: At3g53810 [Arabidopsis thaliana]
  misc_feature (1)..(528): Homolog of NCBI NO: 34899508 NR Description: putative receptor-like protein kinase [Oryza
  misc_feature (1)..(532): Homolog of NCBI NO: 34899548 NR Description: putative receptor-type protein kinase LRK1 [Oryza
  misc_feature (1)..(543): Homolog of NCBI NO: 34899518 NR Description: putative receptor-like protein kinase [Oryza
  misc_feature (1)..(526): Homolog of NCBI NO: 34899498 NR Description: putative receptor-like protein kinase [Oryza
  misc_feature (1)..(536): Homolog of NCBI NO: 15239263 NR Description: receptor like protein kinase; protein id:
MAFVIAPNPRLPFGSPLQYLGLFNVTNNGNVRNHVFAVELDTIMNIEFNDTNNNHVGIDINSLNSVKSSPAGYWDENDQFHNLTLISSKRMQVWVDFDGPTHLIDVTMAPFGEVKPRKPLVSIVRDLSSVLLQDMFVGFSSATGNIVSEIFVLGWSFGVNGEAQPLALSKLPRLPVWDLKPTRVYRFYKNWVPLISLLLIPFLLIIFLVRFIMKRRRKFAEEVEDWETEFGKNRLRFKDLYYATKGFKDKNILGSGGFGSVYKGIMPKTKKEIAVKRVSNESRQGLKEFVAEIVSIGQMSHRNLVPLVGYCRRRDELLLVYDYMPNGSLDKYLYNSPEVTLDWKQRFKVINGVASALFYLHEEWEQVVIHRDVKASNVLLDAELNGRLGDFGLAQLCDHGSDPQTTRVVGTWGYLAPDHIRTGRATTTTDVFAFGVLLLEVACGRRPIEINNQSGERVVLVDWVFRFWMEANILDAKDPNLGSEYDQKEVEMVLKLGLLCSHSDPLARPTMRQVLQYLRGDAMLPDLSPLDLRGSGIMLGTHNGSNESGMFTSGSSVAYSLLSSGR

SEQ ID NO: 82680 - DNA, 1505 bp, Arabidopsis thaliana
  misc_feature (1)..(1505): Ceres Seq. ID no. 12666816
  misc_feature: MA Experiment ID: 20000171 Result: Up-regulated in Transcription
  misc_feature: MA Experiment 20000171 PARAMETER Experiment Name: At_42deg_Heat_P Parameter: Age (day) Value: 14
  misc_feature: MA Experiment 20000171 PARAMETER Experiment Name: At_42deg_Heat_P Parameter: Organism Value: A. thaliana
  misc_feature: MA Experiment 20000171 PARAMETER Experiment Name: At_42deg_Heat_P Parameter: Plant Line Value: WS
  misc_feature: MA Experiment 20000171 PARAMETER Experiment Name: At_42deg_Heat_P Parameter: Temperature (deg C) Value: 42 vs. 22
  misc_feature: MA Experiment 20000171 PARAMETER Experiment Name: At_42deg_Heat_P Parameter: Timepoint (hr) Value: 1
  misc_feature: MA Experiment 20000171 PARAMETER Experiment Name: At_42deg_Heat_P Parameter: Tissue Value: Aerial
  misc_feature: MA Experiment ID: 20000185 Result: Up-regulated in Transcription
  misc_feature: MA Experiment 20000185 PARAMETER Experiment Name: At_Roots__P Parameter: Age (day) Value: 7 vs. 21
  misc_feature: MA Experiment 20000185 PARAMETER Experiment Name: At_Roots__P Parameter: Organism Value: A. thaliana
  misc_feature: MA Experiment 20000185 PARAMETER Experiment Name: At_Roots__P Parameter: Tissue Value: Roots vs. Whole Plant
  misc_feature: MA Experiment ID: 20000264 Result: Up-regulated in Transcription
  misc_feature: MA Experiment 20000264 PARAMETER Experiment Name: At_Open_Flower_P Parameter: Age (day) Value: 21
  misc_feature: MA Experiment 20000264 PARAMETER Experiment Name: At_Open_Flower_P Parameter: Plant Line Value: WS
  misc_feature: MA Experiment 20000264 PARAMETER Experiment Name: At_Open_Flower_P Parameter: Tissue Value: Open Flower vs. Whole Plant
  misc_feature: MA Experiment ID: 20000265 Result: Up-regulated in Transcription
  misc_feature: MA Experiment 20000265 PARAMETER Experiment Name: At_Open_Flower_P Parameter: Age (day) Value: 21
  misc_feature: MA Experiment 20000265 PARAMETER Experiment Name: At_Open_Flower_P Parameter: Plant Line Value: WS
  misc_feature: MA Experiment 20000265 PARAMETER Experiment Name: At_Open_Flower_P Parameter: Tissue Value: Closed Flower vs. Whole Plant
  misc_feature: MA Experiment ID: 20000286 Result: Up-regulated in Transcription
  misc_feature: MA Experiment 20000286 PARAMETER Experiment Name: At_Open_Flower_P Parameter: Age (day) Value: 21
  misc_feature: MA Experiment 20000286 PARAMETER Experiment Name: At_Open_Flower_P Parameter: Plant Line Value: WS
  misc_feature: MA Experiment 20000286 PARAMETER Experiment Name: At_Open_Flower_P Parameter: Tissue Value: Half Open vs. Whole Plant
  misc_feature: MA Experiment ID: 20000439 Result: Up-regulated in Transcription
  misc_feature: MA Experiment 20000439 PARAMETER Experiment Name: At_Roots__P Parameter: Age (day) Value: 14 vs. 21
  misc_feature: MA Experiment 20000439 PARAMETER Experiment Name: At_Roots__P Parameter: Organism Value: A. thaliana
  misc_feature: MA Experiment 20000439 PARAMETER Experiment Name: At_Roots__P Parameter: Tissue Value: Roots vs. Whole Plant
  misc_feature: MA Experiment ID: 20000451 Result: Down-regulated in Transcription
  misc_feature: MA Experiment 20000451 PARAMETER Experiment Name: At_CS6879_Shoots-Roots_P Parameter: Age (day) Value: 14
  misc_feature: MA Experiment 20000451 PARAMETER Experiment Name: At_CS6879_Shoots-Roots_P Parameter: Organism Value: A. thaliana
  misc_feature: MA Experiment 20000451 PARAMETER Experiment Name: At_CS6879_Shoots-Roots_P Parameter: Plant Line Value: CS6879 vs. WS
  misc_feature: MA Experiment 20000451 PARAMETER Experiment Name: At_CS6879_Shoots-Roots_P Parameter: Tissue Value: Roots
  misc_feature: MA Experiment ID: 20000495 Result: Up-regulated in Transcription
  misc_feature: MA Experiment 20000495 PARAMETER Experiment Name: At_Guard_Cells_P Parameter: Harvest Date Value: 8/2/2002
  misc_feature: MA Experiment 20000495 PARAMETER Experiment Name: At_Guard_Cells_P Parameter: Organism Value: A. thaliana
  misc_feature: MA Experiment 20000495 PARAMETER Experiment Name: At_Guard_Cells_P Parameter: Tissue Value: Guard Cells vs. Leaves
  misc_feature: MA Experiment ID: 20000794 Result: Up-regulated in Transcription
  misc_feature: MA Experiment 20000794 PARAMETER Experiment Name: At_Petals_P Parameter: Age (day) Value: 23-25 days
  misc_feature: MA Experiment 20000794 PARAMETER Experiment Name: At_Petals_P Parameter: Plant Line Value: WS
  misc_feature: MA Experiment 20000794 PARAMETER Experiment Name: At_Petals_P Parameter: Tissue Value: Petals vs. Whole plant
  misc_feature: MA Experiment ID: 20001558 Result: Down-regulated in Transcription
  misc_feature: MA Experiment 20001558 PARAMETER Experiment Name: At_Drought_Soil_Dry_P Parameter: Age (day) Value: 27
  misc_feature: MA Experiment 20001558 PARAMETER Experiment Name: At_Drought_Soil_Dry_P Parameter: Organism Value: A. thaliana
  misc_feature: MA Experiment 20001558 PARAMETER Experiment Name: At_Drought_Soil_Dry_P Parameter: Plant Line Value: WS
  misc_feature: MA Experiment 20001558 PARAMETER Experiment Name: At_Drought_Soil_Dry_P Parameter: Post Timepoint (hr) Value: 6
  misc_feature: MA Experiment 20001558 PARAMETER Experiment Name: At_Drought_Soil_Dry_P Parameter: Post-Treatment Value: Re-Water vs. No Drought
  misc_feature: MA Experiment 20001558 PARAMETER Experiment Name: At_Drought_Soil_Dry_P Parameter: Timepoint (day) Value: 13
  misc_feature: MA Experiment 20001558 PARAMETER Experiment Name: At_Drought_Soil_Dry_P Parameter: Treatment Value: Drought vs. No Drought
  misc_feature: MA Experiment ID: 20001757 Result: Down-regulated in Transcription
  misc_feature: MA Experiment 20001757 PARAMETER Experiment Name: At_50mM_NH4NO3_L-to-H_P Parameter: Timepoint (hr) Value: 6
  misc_feature: MA Experiment 20001757 PARAMETER Experiment Name: At_50mM_NH4NO3_L-to-H_P Parameter: Tissue Value: Leaf
  misc_feature: MA Experiment 20001757 PARAMETER Experiment Name: At_50mM_NH4NO3_L-to-H_P Parameter: Treatment Value: 50mM NH4NO3 vs 100mM Mannitol
gcctttcttcttctcttccatcggaattttctctcaggaaagaaataaatgagcagccgttcgagtagaacgatttacgtcgggaaccttcccggcgatatccgtgaaagagaagttgaagacttgttcagtaagtatggacctgttgttcaaatcgatttgaagattccgccgaggcctccaggctatgcattcgtcgagtttgaggatgctcgtgatgctgatgatgcaatttatggccgtgatggttatgactttgatgggcatcatttacgggtggaactagctcatggtgggaggcgttcatcacatgatgcacgcggtagttatagtggtcgtggtcgtggcggtcgtggtggtggtgacggtggtggtcgtgaacgtggaccatctaggagatcagagtaccgcgttgtagtgtcaggtttgccttcatctgcgtcctggcaagacctcaaggatcacatgcgtaaaggaggagaagtttgtttttctcaagtgtttcgtgatggtagaggtacaactggaattgtagattataccagctacgaggacatgaaatatgcgataaaaaaagctcgatgacacagagtttcggaatgcgttttctcatgaatatgttcgggttagagaatatgattcaaggagggattcgaggagccccagccgtggaagatcctattctaagagccgcagccgtggacggagtcccagccgtagtcgtagccgcagcagaagcaggagcaagagcagaagtccaaaggctaaatctttgcgtagatcgcctgcaaaatctacatcgagatctcctcgctctcgctcccgctctaagtcgaggtcactgtctccacgaggatgggtaacagtggagagacattggatcgcattgatatagtgtcatcaaaatggacccatcgagctaggacagatattttcattacctgctaatcgacaagcgatctggattctcatggaaccgatgctgttctggacacagggtttgatagaattagatttgctttgatattctccatctctaccatctgttttaacgaaaagcaggcttgtgttggtttgattttctgctagaaatagtctgaagatatgtttttttcttttttgcttcttgtgattgtgttttgatgtctgacatggaatgaggcatcaagggtcttggtgaaacagctattaaacacggaaatattggatttttaaaactggatttgtttctcggacttttgcagatctcgttcaaggttcagaaggaagcaagtaagagccctagcaagcagctgagccctatccgtggtaggagcaagagcagaagcaggagtccatctcggtaaagaaacatctcatatcaggtaaaaagctgggtctgttggaagattctcataaagatgatctctcttatgtatgagaagttgaaaaactagttgtgtatttcattcttattagcttgggtttgcacatgggaatgatatatactcagtcatcatcagttt

SEQ ID NO: 82681 - protein, 178 aa, Arabidopsis thaliana
  peptide (1)..(178): Ceres Seq. ID no. 12666817
  misc_feature (9)..(77): Pfam Name: RNA recognition motif. (a.k.a. RRM, RBD, or RNP domain) Pfam Description: RNA recognition motif. (a.k.a. RRM, RBD, or RNP
  misc_feature (1)..(174): Homolog of NCBI NO: 30679143 NR Description: arginine/serine-rich splicing factor (atSRp34),
  misc_feature (1)..(175): Homolog of NCBI NO: 7484802 NR Description: alternative splicing factor ASF-2 homolog - Arabidopsis thaliana >gi|3193304|gb|AAC19288.1| contains
  misc_feature (1)..(176): Homolog of NCBI NO: 30678395 NR Description: pre-mRNA splicing factor SF2 (SR1 protein)
  misc_feature (1)..(176): Homolog of NCBI NO: 5815236 NR Description: splicing factor SR1B [Arabidopsis thaliana]
  misc_feature (1)..(176): Homolog of NCBI NO: 2443473 NR Description: ASF/SF2 homolog [Arabidopsis thaliana]
  misc_feature (1)..(176): Homolog of NCBI NO: 30678391 NR Description: pre-mRNA splicing factor SF2 (SR1 protein)
  misc_feature (1)..(176): Homolog of NCBI NO: 5815235 NR Description: splicing factor SR1 [Arabidopsis thaliana]
  misc_feature (1)..(176): Homolog of NCBI NO: 5815239 NR Description: splicing factor SR1E [Arabidopsis thaliana]
  misc_feature (1)..(176): Homolog of NCBI NO: 5815237 NR Description: splicing factor SR1C [Arabidopsis thaliana]
  misc_feature (1)..(176): Homolog of NCBI NO: 22331714 NR Description: arginine/serine-rich splicing factor (atSRp34),
MSSRSSRTIYVGNLPGDIREREVEDLFSKYGPVVQIDLKIPPRPPGYAFVEFEDARDADDAIYGRDGYDFDGHHLRVELAHGGRRSSHDARGSYSGRGRGGRGGGDGGGRERGPSRRSEYRVVVSGLPSSASWQDLKDHMRKGGEVCFSQVFRDGRGTTGIVDYTSYEDMKYAIKKAR

SEQ ID NO: 82682 - protein, 93 aa, Arabidopsis thaliana
  peptide (1)..(93): Ceres Seq. ID no. 12666818
  misc_feature (1)..(91): Homolog of NCBI NO: 7484802 NR Description: alternative splicing factor ASF-2 homolog - Arabidopsis thaliana >gi|3193304|gb|AAC19288.1| contains
MTQSFGMRFLMNMFGLENMIQGGIRGAPAVEDPILRAAAVDGVPAVVVAAAEAGARAEVQRLNLCVDRLQNLHRDLLALAPALSRGHCLHEDG

SEQ ID NO: 82683 - DNA, 1782 bp, Arabidopsis thaliana
  misc_feature (1)..(1782): Ceres Seq. ID no. 12666826
  misc_feature: MA Experiment ID: 20000171 Result: Down-regulated in Transcription
  misc_feature: MA Experiment 20000171 PARAMETER Experiment Name: At_42deg_Heat_P Parameter: Age (day) Value: 14
  misc_feature: MA Experiment 20000171 PARAMETER Experiment Name: At_42deg_Heat_P Parameter: Organism Value: A. thaliana
  misc_feature: MA Experiment 20000171 PARAMETER Experiment Name: At_42deg_Heat_P Parameter: Plant Line Value: WS
  misc_feature: MA Experiment 20000171 PARAMETER Experiment Name: At_42deg_Heat_P Parameter: Temperature (deg C) Value: 42 vs. 22
  misc_feature: MA Experiment 20000171 PARAMETER Experiment Name: At_42deg_Heat_P Parameter: Timepoint (hr) Value: 1
  misc_feature: MA Experiment 20000171 PARAMETER Experiment Name: At_42deg_Heat_P Parameter: Tissue Value: Aerial
  misc_feature: MA Experiment ID: 20000179 Result: Up-regulated in Transcription
  misc_feature: MA Experiment 20000179 PARAMETER Experiment Name: At_Germinating_Seeds_P Parameter: Age (hr) Value: 6 vs. 0
  misc_feature: MA Experiment 20000179 PARAMETER Experiment Name: At_Germinating_Seeds_P Parameter: Tissue Value: Germinating Seeds
  misc_feature: MA Experiment ID: 20000180 Result: Up-regulated in Transcription
  misc_feature: MA Experiment 20000180 PARAMETER Experiment Name: At_Germinating_Seeds_P Parameter: Age (hr) Value: 24 vs. 0
  misc_feature: MA Experiment 20000180 PARAMETER Experiment Name: At_Germinating_Seeds_P Parameter: Tissue Value: Germinating Seeds
  misc_feature: MA Experiment ID: 20000794 Result: Down-regulated in Transcription
  misc_feature: MA Experiment 20000794 PARAMETER Experiment Name: At_Petals_P Parameter: Age (day) Value: 23-25 days
  misc_feature: MA Experiment 20000794 PARAMETER Experiment Name: At_Petals_P Parameter: Plant Line Value: WS
  misc_feature: MA Experiment 20000794 PARAMETER Experiment Name: At_Petals_P Parameter: Tissue Value: Petals vs. Whole plant
  misc_feature: MA Experiment ID: 20001451 Result: Down-regulated in Transcription
  misc_feature: MA Experiment 20001451 PARAMETER Experiment Name: At_Far-red-induction_P Parameter: Age (day) Value: 7
  misc_feature: MA Experiment 20001451 PARAMETER Experiment Name: At_Far-red-induction_P Parameter: Light Value: Far-red vs. White
  misc_feature: MA Experiment 20001451 PARAMETER Experiment Name: At_Far-red-induction_P Parameter: Organism Value: A. thaliana
  misc_feature: MA Experiment 20001451 PARAMETER Experiment Name: At_Far-red-induction_P Parameter: Plant Line Value: Columbia
  misc_feature: MA Experiment 20001451 PARAMETER Experiment Name: At_Far-red-induction_P Parameter: Timepoint (hr) Value: 24
  misc_feature: MA Experiment 20001451 PARAMETER Experiment Name: At_Far-red-induction_P Parameter: Tissue Value: Whole Plant
  misc_feature: MA Experiment ID: 20001911 Result: Down-regulated in Transcription
  misc_feature: MA Experiment 20001911 PARAMETER Experiment Name: At_Drought_Reproduction_P Parameter: Age (day) Value: 40
  misc_feature: MA Experiment 20001911 PARAMETER Experiment Name: At_Drought_Reproduction_P Parameter: Organism Value: A. thaliana
  misc_feature: MA Experiment 20001911 PARAMETER Experiment Name: At_Drought_Reproduction_P Parameter: Plant Line Value: WS
  misc_feature: MA Experiment 20001911 PARAMETER Experiment Name: At_Drought_Reproduction_P Parameter: Timepoint (day) Value: 10
  misc_feature: MA Experiment 20001911 PARAMETER Experiment Name: At_Drought_Reproduction_P Parameter: Tissue Value: Flowers
  misc_feature: MA Experiment 20001911 PARAMETER Experiment Name: At_Drought_Reproduction_P Parameter: Treatment Value: Drought vs. No Drought
agtaagtaactttggtaattaacagtgttattatcaaattcgaatctcttacattaatggaaactcagatcttctcttaaaaacacataaagcacagatcttttacagagaatcttgtaagaagaaagaagatgattgagaggtgtttaggagcttaccggtgccggagaatccaaagagctttacgccaattaaaggtaacgattctctgtcttcttcttaccgttgttgtcctacgtagcacaatcggcgccggtaaattcggaactccggagcaagatcttgacgagatccgtcaacatttccacgcacgcaaacgaggtgagcctcaccgtgtcctcgaagaaattcagaccggaggagattcttcttccggtgacggtggaggtaattccggtgggagtaataactacgagacgtttgacatcaacaagattttcgttgacgaaggtgaagaagagaaacccgacccgaataaaccttacactctcggacccaagatatcagattgggatgagcagagatctgattggttagctaagaaccctagcttccctaatttcatcggacctaacaagccacgtgttcttttggtgactggttcggcgccaaaaccatgtgagaatcctgtcggtgatcattacctcttgaaatcgatcaagaacaagatcgattactgtaggttacatgggatcgagatcttctacaacatggctcttctcgatgcagagatggctggtttttgggcaaagcttccattgattaggaagcttttgttgtcacatcctgagattgagtttctttggtggatggatagtgatgctatgtttacagatatggcttttgagcttccatgggagaggtataaagattacaatctggtgatgcatggatggaatgagatggtttatgatcagaagaattggattgggttgaatacagggagtttcttgcttaggaacaatcaatgggcacttgatttgcttgatacttgggctcccatgggtcctaaagggaagatccgtgaagaagcgggtaaggttttgacccgtgagctcaaggatagaccggtgttcgaagctgatgatcagtctgctatggtttatctgttggctactcagcgagacgcttggggcaataaggtgtacctagaaagtggatactatcttcacggttactgggggattcttgtggacagatatgaagaaatgatagaaaactaccacccgggtctaggagatcacagatggccattggtgactcactttgtcggttgcaaaccgtgtgggaaatttggtgattacccggtggaacggtgtctaaaacaaatggacagagcctttaactttggagataaccagattctgcaaatctatggtttcactcacaaatctttggctagtcgtaaagtcaagagagtgcggaacgagactagcaatccgttggagatgaaagacgagctcgggttgcttcatccggcgtttaaggcggttaaggtacaaaccaatcaagtttgaatcggttttgcgtttaggatttgtgttatgtttctcgctatatttatgtcttgtgtctttgcttgttgttgtactaagatggatgataaagtattgtgcagagacatcagttaattctttggttttactttgtctctacgtctagagttctattacgaaatcaaaatgttgtttttcttcctttttgttctttgtaatccattagaacttgagattttgtagcttcatggatcaataatctgtgttaattcaagaactttttttt

SEQ ID NO: 82684 - protein, 461 aa, Arabidopsis thaliana
  peptide (1)..(461): Ceres Seq. ID no. 12666827
  misc_feature (148)..(392): Pfam Name: galactosyl transferase GMA12/MNN10 family Pfam Description: galactosyl transferase GMA12/MNN10 family
  misc_feature (1)..(461): Homolog of NCBI NO: 18411962 NR Description: putative glycosyltransferase; protein id: supported by cDNA: gi_16209668 [Arabidopsis thaliana]
  misc_feature (1)..(455): Homolog of NCBI NO: 25349323 NR Description: probable glycosyltransferase [imported] - thaliana >gi|3892054|gb|AAC78266.1|AAC78266 putative [Arabidopsis thaliana] >gi|7269010|emb|CAB80743.1| putative
  misc_feature (1)..(458): Homolog of NCBI NO: 15228843 NR Description: alpha galactosyltransferase-like protein; protein At3g62720.1, supported by cDNA: gi_15983425 [Arabidopsis
  misc_feature (105)..(446): Homolog of NCBI NO: 15240848 NR Description: alpha galactosyltransferase protein; protein id: [Arabidopsis thaliana] >gi|9716848|emb|CAC01676.1| putative golgi [Arabidopsis thaliana] >gi|9759594|dbj|BAB11451.1| alpha
  misc_feature (10)..(83): Homolog of NCBI NO: 15240848 NR Description: alpha galactosyltransferase protein; protein id: [Arabidopsis thaliana] >gi|9716848|emb|CAC01676.1| putative golgi [Arabidopsis thaliana] >gi|9759594|dbj|BAB11451.1| alpha
  misc_feature (104)..(446): Homolog of NCBI NO: 15221224 NR Description: putative alpha galactosyltransferase; protein id:
  misc_feature (108)..(446): Homolog of NCBI NO: 15221850 NR Description: alpha galactosyltransferase, putative; protein
  misc_feature (108)..(446): Homolog of NCBI NO: 25349326 NR Description: hypothetical protein F6A14.20 - Arabidopsis >gi|6730715|gb|AAF27110.1|AC011809_19 Similar to
  misc_feature (113)..(364): Homolog of NCBI NO: 25486551 NR Description: alpha galactosyltransferase (EC 2.4.1.-)
  misc_feature (355)..(427): Homolog of NCBI NO: 25486551 NR Description: alpha galactosyltransferase (EC 2.4.1.-)
MIERCLGAYRCRRIQRALRQLKVTILCLLLTVVVLRSTIGAGKFGTPEQDLDEIRQHFHARKRGEPHRVLEEIQTGGDSSSGDGGGNSGGSNNYETFDINKIFVDEGEEEKPDPNKPYTLGPKISDWDEQRSDWLAKNPSFPNFIGPNKPRVLLVTGSAPKPCENPVGDHYLLKSIKNKIDYCRLHGIEIFYNMALLDAEMAGFWAKLPLIRKLLLSHPEIEFLWWMDSDAMFTDMAFELPWERYKDYNLVMHGWNEMVYDQKNWIGLNTGSFLLRNNQWALDLLDTWAPMGPKGKIREEAGKVLTRELKDRPVFEADDQSAMVYLLATQRDAWGNKVYLESGYYLHGYWGILVDRYEEMIENYHPGLGDHRWPLVTHFVGCKPCGKFGDYPVERCLKQMDRAFNFGDNQILQIYGFTHKSLASRKVKRVRNETSNPLEMKDELGLLHPAFKAVKVQTNQV

SEQ ID NO: 82685 - protein, 268 aa, Arabidopsis thaliana
  peptide (1)..(268): Ceres Seq. ID no. 12666828
  misc_feature (1)..(199): Pfam Name: galactosyl transferase GMA12/MNN10 family Pfam Description: galactosyl transferase GMA12/MNN10 family
  misc_feature (1)..(268): Homolog of NCBI NO: 18411962 NR Description: putative glycosyltransferase; protein id: supported by cDNA: gi_16209668 [Arabidopsis thaliana]
  misc_feature (1)..(262): Homolog of NCBI NO: 25349323 NR Description: probable glycosyltransferase [imported] - thaliana >gi|3892054|gb|AAC78266.1|AAC78266 putative [Arabidopsis thaliana] >gi|7269010|emb|CAB80743.1| putative
  misc_feature (1)..(265): Homolog of NCBI NO: 15228843 NR Description: alpha galactosyltransferase-like protein; protein At3g62720.1, supported by cDNA: gi_15983425 [Arabidopsis
  misc_feature (1)..(253): Homolog of NCBI NO: 15240848 NR Description: alpha galactosyltransferase protein; protein id: [Arabidopsis thaliana] >gi|9716848|emb|CAC01676.1| putative golgi [Arabidopsis thaliana] >gi|9759594|dbj|BAB11451.1| alpha
  misc_feature (1)..(253): Homolog of NCBI NO: 15221224 NR Description: putative alpha galactosyltransferase; protein id:
  misc_feature (1)..(253): Homolog of NCBI NO: 15221850 NR Description: alpha galactosyltransferase, putative; protein
  misc_feature (1)..(253): Homolog of NCBI NO: 25349326 NR Description: hypothetical protein F6A14.20 - Arabidopsis >gi|6730715|gb|AAF27110.1|AC011809_19 Similar to
  misc_feature (1)..(171): Homolog of NCBI NO: 25486551 NR Description: alpha galactosyltransferase (EC 2.4.1.-)
  misc_feature (162)..(234): Homolog of NCBI NO: 25486551 NR Description: alpha galactosyltransferase (EC 2.4.1.-)
  misc_feature (1)..(171): Homolog of NCBI NO: 32127690 NR Description: galactomannan galactosyltransferase [Lotus
MALLDAEMAGFWAKLPLIRKLLLSHPEIEFLWWMDSDAMFTDMAFELPWERYKDYNLVMHGWNEMVYDQKNWIGLNTGSFLLRNNQWALDLLDTWAPMGPKGKIREEAGKVLTRELKDRPVFEADDQSAMVYLLATQRDAWGNKVYLESGYYLHGYWGILVDRYEEMIENYHPGLGDHRWPLVTHFVGCKPCGKFGDYPVERCLKQMDRAFNFGDNQILQIYGFTHKSLASRKVKRVRNETSNPLEMKDELGLLHPAFKAVKVQTNQV

SEQ ID NO: 82686 - protein, 261 aa, Arabidopsis thaliana
  peptide (1)..(261): Ceres Seq. ID no. 12666829
  misc_feature (1)..(192): Pfam Name: galactosyl transferase GMA12/MNN10 family Pfam Description: galactosyl transferase GMA12/MNN10 family
  misc_feature (1)..(261): Homolog of NCBI NO: 18411962 NR Description: putative glycosyltransferase; protein id: supported by cDNA: gi_16209668 [Arabidopsis thaliana]
  misc_feature (1)..(255): Homolog of NCBI NO: 25349323 NR Description: probable glycosyltransferase [imported] - thaliana >gi|3892054|gb|AAC78266.1|AAC78266 putative [Arabidopsis thaliana] >gi|7269010|emb|CAB80743.1| putative
  misc_feature (1)..(258): Homolog of NCBI NO: 15228843 NR Description: alpha galactosyltransferase-like protein; protein At3g62720.1, supported by cDNA: gi_15983425 [Arabidopsis
  misc_feature (1)..(246): Homolog of NCBI NO: 15240848 NR Description: alpha galactosyltransferase protein; protein id: [Arabidopsis thaliana] >gi|9716848|emb|CAC01676.1| putative golgi [Arabidopsis thaliana] >gi|9759594|dbj|BAB11451.1| alpha
  misc_feature (1)..(246): Homolog of NCBI NO: 15221224 NR Description: putative alpha galactosyltransferase; protein id:
  misc_feature (1)..(246): Homolog of NCBI NO: 15221850 NR Description: alpha galactosyltransferase, putative; protein
  misc_feature (1)..(246): Homolog of NCBI NO: 25349326 NR Description: hypothetical protein F6A14.20 - Arabidopsis >gi|6730715|gb|AAF27110.1|AC011809_19 Similar to
  misc_feature (1)..(164): Homolog of NCBI NO: 25486551 NR Description: alpha galactosyltransferase (EC 2.4.1.-)
  misc_feature (155)..(227): Homolog of NCBI NO: 25486551 NR Description: alpha galactosyltransferase (EC 2.4.1.-)
  misc_feature (1)..(164): Homolog of NCBI NO: 32127690 NR Description: galactomannan galactosyltransferase [Lotus
MAGFWAKLPLIRKLLLSHPEIEFLWWMDSDAMFTDMAFELPWERYKDYNLVMHGWNEMVYDQKNWIGLNTGSFLLRNNQWALDLLDTWAPMGPKGKIREEAGKVLTRELKDRPVFEADDQSAMVYLLATQRDAWGNKVYLESGYYLHGYWGILVDRYEEMIENYHPGLGDHRWPLVTHFVGCKPCGKFGDYPVERCLKQMDRAFNFGDNQILQIYGFTHKSLASRKVKRVRNETSNPLEMKDELGLLHPAFKAVKVQTNQV

SEQ ID NO: 82687 - DNA, 777 bp, Arabidopsis thaliana
  misc_feature (1)..(777): Ceres Seq. ID no. 12666949
  misc_feature: MA Experiment ID: 20000306 Result: Down-regulated in Transcription
  misc_feature: MA Experiment 20000306 PARAMETER Experiment Name: At_Germinating_Seeds_Sub_P Parameter: Age (hr) Value: 6 vs. 0
  misc_feature: MA Experiment 20000306 PARAMETER Experiment Name: At_Germinating_Seeds_Sub_P Parameter: Organism Value: A. thaliana
  misc_feature: MA Experiment 20000306 PARAMETER Experiment Name: At_Germinating_Seeds_Sub_P Parameter: Plant Line Value: WS
  misc_feature: MA Experiment 20000306 PARAMETER Experiment Name: At_Germinating_Seeds_Sub_P Parameter: Tissue Value: Germinating Seeds
  misc_feature: MA Experiment ID: 20000307 Result: Down-regulated in Transcription
  misc_feature: MA Experiment 20000307 PARAMETER Experiment Name: At_Germinating_Seeds_Sub_P Parameter: Age (hr) Value: 24 vs. 0
  misc_feature: MA Experiment 20000307 PARAMETER Experiment Name: At_Germinating_Seeds_Sub_P Parameter: Organism Value: A. thaliana
  misc_feature: MA Experiment 20000307 PARAMETER Experiment Name: At_Germinating_Seeds_Sub_P Parameter: Plant Line Value: WS
  misc_feature: MA Experiment 20000307 PARAMETER Experiment Name: At_Germinating_Seeds_Sub_P Parameter: Tissue Value: Germinating Seeds
  misc_feature: MA Experiment ID: 20000314 Result: Down-regulated in Transcription
  misc_feature: MA Experiment 20000314 PARAMETER Experiment Name: At_14day_Shoots-Roots_Sub_P Parameter: Age (day) Value: 14
  misc_feature: MA Experiment 20000314 PARAMETER Experiment Name: At_14day_Shoots-Roots_Sub_P Parameter: Organism Value: A. thaliana
  misc_feature: MA Experiment 20000314 PARAMETER Experiment Name: At_14day_Shoots-Roots_Sub_P Parameter: Plant Line Value: WS
  misc_feature: MA Experiment 20000314 PARAMETER Experiment Name: At_14day_Shoots-Roots_Sub_P Parameter: Tissue Value: Roots vs. Whole Plant
  misc_feature: MA Experiment ID: 20000327 Result: Down-regulated in Transcription
  misc_feature: MA Experiment 20000327 PARAMETER Experiment Name: At_42deg_Heat_Sub_P Parameter: Age (day) Value: 14
  misc_feature: MA Experiment 20000327 PARAMETER Experiment Name: At_42deg_Heat_Sub_P Parameter: Organism Value: A. thaliana
  misc_feature: MA Experiment 20000327 PARAMETER Experiment Name: At_42deg_Heat_Sub_P Parameter: Plant Line Value: WS
  misc_feature: MA Experiment 20000327 PARAMETER Experiment Name: At_42deg_Heat_Sub_P Parameter: Temperature (deg C) Value: 42 vs. 22
  misc_feature: MA Experiment 20000327 PARAMETER Experiment Name: At_42deg_Heat_Sub_P Parameter: Timepoint (hr) Value: 1
  misc_feature: MA Experiment 20000327 PARAMETER Experiment Name: At_42deg_Heat_Sub_P Parameter: Tissue Value: Aerial
  misc_feature: MA Experiment ID: 20000355 Result: Down-regulated in Transcription
  misc_feature: MA Experiment 20000355 PARAMETER Experiment Name: At_Siliques_Sub_P Parameter: Age (day) Value: 21
  misc_feature: MA Experiment 20000355 PARAMETER Experiment Name: At_Siliques_Sub_P Parameter: Organism Value: A. thaliana
  misc_feature: MA Experiment 20000355 PARAMETER Experiment Name: At_Siliques_Sub_P Parameter: Plant Line Value: WS
  misc_feature: MA Experiment 20000355 PARAMETER Experiment Name: At_Siliques_Sub_P Parameter: Tissue Value: Less Than 5mm Siliques vs. Whole Plant
  misc_feature: MA Experiment ID: 20000440 Result: Down-regulated in Transcription
  misc_feature: MA Experiment 20000440 PARAMETER Experiment Name: At_Closed-Flower__Sub_P Parameter: Tissue Value: Closed Flower vs. Whole Plant
atgtcttcatccttcataccaaaacgcatcgctttggtccttaacttggccatggtagccatacaagtcttctttatacgcagtgtttcgtccatgaacgagaccaactcatatctataccacaaatgctccgaggctgaagggaaatacaagtccaagagcccgtacgaaggaaacctcaactttctcaccaatgacatgtataaagacacttttgtaagaggttttgtctatgcctatcatggtgacgatcccaataccgtctacatcttgctccagtgccggggtgactcctacggctccaagtgtggttcctgcctctccactgccacctccgagctgcgtagaagatgtcctatgaacaaggcgggaatagtatggtttgataaatgtcttctcaagatttctccaaccgctttcttcgagaagatcgatgacaagaacaagttctatatgtacagcacaaagaaagtaagcgatccagcgttgttcaatgtgaagacaaaggctctactcactgagctgaccgcaaaggctactcgcagatcagataagttattgttgtacgagacaggggagatgaaactcgggaagatgaagctttacggaatggtgcagtgtagacgggatttatggtttacggtttgtaagacgtgtttggataagattataggggagcttcctaaatgttgtgatggtaaagaaggagggagagttttgagtgggagttgtaactttagatatgagatttacccttttcttgacactgttcgatga

SEQ ID NO: 82688 - protein, 258 aa, Arabidopsis thaliana
  peptide (1)..(258): Ceres Seq. ID no. 12666950
  misc_feature (201)..(255): Pfam Name: Domain of unknown function DUF26 Pfam Description: Domain of unknown function DUF26
  misc_feature (1)..(258): Homolog of NCBI NO: 15231012 NR Description: putative protein; protein id: At3g58310.1
  misc_feature (8)..(256): Homolog of NCBI NO: 18403247 NR Description: receptor kinase common family, putative; protein At3g22060.1, supported by cDNA: gi_14334417 [Arabidopsis >gi|9279765|dbj|BAB01391.1| contains similarity to receptor
  misc_feature (16)..(254): Homolog of NCBI NO: 15233235 NR Description: receptor kinase common family, putative; protein At3g21990.1 [Arabidopsis thaliana] >gi|9279756|dbj|BAB01382.1| similarity to receptor kinase~gene_id:MZN24.17 [Arabidopsis
  misc_feature (16)..(254): Homolog of NCBI NO: 15233366 NR Description: pollen coat receptor kinase, putative; protein At4g20670.1 [Arabidopsis thaliana] >gi|7485931|pir||T10609
  misc_feature (28)..(254): Homolog of NCBI NO: 9279746 NR Description: contains similarity to receptor protein
  misc_feature (1)..(256): Homolog of NCBI NO: 15233238 NR Description: hypothetical protein; protein id: At3g22010.1 thaliana] >gi|9279758|dbj|BAB01384.1| contains similarity to
  misc_feature (16)..(256): Homolog of NCBI NO: 15233368 NR Description: putative protein; protein id: At4g20680.1
  misc_feature (2)..(256): Homolog of NCBI NO: 15233236 NR Description: hypothetical protein; protein id: At3g22000.1 thaliana] >gi|9279757|dbj|BAB01383.1| contains similarity to
  misc_feature (1)..(254): Homolog of NCBI NO: 9279762 NR Description: emb|CAB45834.1~gene_id:MZN24.23~similar to
  misc_feature (16)..(254): Homolog of NCBI NO: 15225108 NR Description: receptor kinase, putative; protein id: [Arabidopsis thaliana] >gi|25408171|pir||A84723 hypothetical
MSSSFIPKRIALVLNLAMVAIQVFFIRSVSSMNETNSYLYHKCSEAEGKYKSKSPYEGNLNFLTNDMYKDTFVRGFVYAYHGDDPNTVYILLQCRGDSYGSKCGSCLSTATSELRRRCPMNKAGIVWFDKCLLKISPTAFFEKIDDKNKFYMYSTKKVSDPALFNVKTKALLTELTAKATRRSDKLLLYETGEMKLGKMKLYGMVQCRRDLWFTVCKTCLDKIIGELPKCCDGKEGGRVLSGSCNFRYEIYPFLDTVR

SEQ ID NO: 82689 - protein, 241 aa, Arabidopsis thaliana
  peptide (1)..(241): Ceres Seq. ID no. 12666951
  misc_feature (184)..(238): Pfam Name: Domain of unknown function DUF26 Pfam Description: Domain of unknown function DUF26
  misc_feature (1)..(241): Homolog of NCBI NO: 15231012 NR Description: putative protein; protein id: At3g58310.1
  misc_feature (1)..(239): Homolog of NCBI NO: 18403247 NR Description: receptor kinase common family, putative; protein At3g22060.1, supported by cDNA: gi_14334417 [Arabidopsis >gi|9279765|dbj|BAB01391.1| contains similarity to receptor
  misc_feature (1)..(237): Homolog of NCBI NO: 15233235 NR Description: receptor kinase common family, putative; protein At3g21990.1 [Arabidopsis thaliana] >gi|9279756|dbj|BAB01382.1| similarity to receptor kinase~gene_id:MZN24.17 [Arabidopsis
  misc_feature (1)..(237): Homolog of NCBI NO: 15233366 NR Description: pollen coat receptor kinase, putative; protein At4g20670.1 [Arabidopsis thaliana] >gi|7485931|pir||T10609
  misc_feature (11)..(237): Homolog of NCBI NO: 9279746 NR Description: contains similarity to receptor protein
  misc_feature (1)..(239): Homolog of NCBI NO: 15233238 NR Description: hypothetical protein; protein id: At3g22010.1 thaliana] >gi|9279758|dbj|BAB01384.1| contains similarity to
  misc_feature (1)..(239): Homolog of NCBI NO: 15233368 NR Description: putative protein; protein id: At4g20680.1
  misc_feature (1)..(239): Homolog of NCBI NO: 15233236 NR Description: hypothetical protein; protein id: At3g22000.1 thaliana] >gi|9279757|dbj|BAB01383.1| contains similarity to
  misc_feature (1)..(237): Homolog of NCBI NO: 9279762 NR Description: emb|CAB45834.1~gene_id:MZN24.23~similar to
  misc_feature (1)..(237): Homolog of NCBI NO: 15225108 NR Description: receptor kinase, putative; protein id: [Arabidopsis thaliana] >gi|25408171|pir||A84723 hypothetical
MVAIQVFFIRSVSSMNETNSYLYHKCSEAEGKYKSKSPYEGNLNFLTNDMYKDTFVRGFVYAYHGDDPNTVYILLQCRGDSYGSKCGSCLSTATSELRRRCPMNKAGIVWFDKCLLKISPTAFFEKIDDKNKFYMYSTKKVSDPALFNVKTKALLTELTAKATRRSDKLLLYETGEMKLGKMKLYGMVQCRRDLWFTVCKTCLDKIIGELPKCCDGKEGGRVLSGSCNFRYEIYPFLDTVR

SEQ ID NO: 82690 - protein, 227 aa, Arabidopsis thaliana
  peptide (1)..(227): Ceres Seq. ID no. 12666952
  misc_feature (170)..(224): Pfam Name: Domain of unknown function DUF26 Pfam Description: Domain of unknown function DUF26
  misc_feature (1)..(227): Homolog of NCBI NO: 15231012 NR Description: putative protein; protein id: At3g58310.1
  misc_feature (1)..(225): Homolog of NCBI NO: 18403247 NR Description: receptor kinase common family, putative; protein At3g22060.1, supported by cDNA: gi_14334417 [Arabidopsis >gi|9279765|dbj|BAB01391.1| contains similarity to receptor
  misc_feature (1)..(223): Homolog of NCBI NO: 15233235 NR Description: receptor kinase common family, putative; protein At3g21990.1 [Arabidopsis thaliana] >gi|9279756|dbj|BAB01382.1| similarity to receptor kinase~gene_id:MZN24.17 [Arabidopsis
  misc_feature (1)..(223): Homolog of NCBI NO: 15233366 NR Description: pollen coat receptor kinase, putative; protein At4g20670.1 [Arabidopsis thaliana] >gi|7485931|pir||T10609
  misc_feature (1)..(223): Homolog of NCBI NO: 9279746 NR Description: contains similarity to receptor protein
  misc_feature (1)..(225): Homolog of NCBI NO: 15233238 NR Description: hypothetical protein; protein id: At3g22010.1 thaliana] >gi|9279758|dbj|BAB01384.1| contains similarity to
  misc_feature (1)..(225): Homolog of NCBI NO: 15233368 NR Description: putative protein; protein id: At4g20680.1
  misc_feature (1)..(225): Homolog of NCBI NO: 15233236 NR Description: hypothetical protein; protein id: At3g22000.1 thaliana] >gi|9279757|dbj|BAB01383.1| contains similarity to
  misc_feature (1)..(223): Homolog of NCBI NO: 9279762 NR Description: emb|CAB45834.1~gene_id:MZN24.23~similar to
  misc_feature (1)..(223): Homolog of NCBI NO: 15225108 NR Description: receptor kinase, putative; protein id: [Arabidopsis thaliana] >gi|25408171|pir||A84723 hypothetical
MNETNSYLYHKCSEAEGKYKSKSPYEGNLNFLTNDMYKDTFVRGFVYAYHGDDPNTVYILLQCRGDSYGSKCGSCLSTATSELRRRCPMNKAGIVWFDKCLLKISPTAFFEKIDDKNKFYMYSTKKVSDPALFNVKTKALLTELTAKATRRSDKLLLYETGEMKLGKMKLYGMVQCRRDLWFTVCKTCLDKIIGELPKCCDGKEGGRVLSGSCNFRYEIYPFLDTVR

SEQ ID NO: 82691 - DNA, 936 bp, Arabidopsis thaliana
  misc_feature (1)..(936): Ceres Seq. ID no. 12666991
  misc_feature: MA Experiment ID: 20001911 Result: Up-regulated in Transcription
  misc_feature: MA Experiment 20001911 PARAMETER Experiment Name: At_Drought_Reproduction_P Parameter: Age (day) Value: 40
  misc_feature: MA Experiment 20001911 PARAMETER Experiment Name: At_Drought_Reproduction_P Parameter: Organism Value: A. thaliana
  misc_feature: MA Experiment 20001911 PARAMETER Experiment Name: At_Drought_Reproduction_P Parameter: Plant Line Value: WS
  misc_feature: MA Experiment 20001911 PARAMETER Experiment Name: At_Drought_Reproduction_P Parameter: Timepoint (day) Value: 10
  misc_feature: MA Experiment 20001911 PARAMETER Experiment Name: At_Drought_Reproduction_P Parameter: Tissue Value: Flowers
  misc_feature: MA Experiment 20001911 PARAMETER Experiment Name: At_Drought_Reproduction_P Parameter: Treatment Value: Drought vs. No Drought
atggacaccgtcaacgattccttttcgccgggatcttcccgaccttcgccggcgacgctttctcgtgaagattgctggagcgaggaagcgaccttcacgctcatccaagcctggggtaatcgctacgtcgacctcagccgaggtaatctccgtcagaaacactggcaagaggtggctaacgccgttaacgaccgtcactacaacaccggtcgaaacgtttccgccgccaaatcgcagccgtatcgcaccgacgttcagtgtaaaaaccggatcgatactctgaagaagaagtacaaagtcgagaaggctagggtttcggaatccaatcccggtgcctacatcagcccttggcctttcttctccgctctcgatgaccttctccgggaaagctttccgacgtctagtaatcctgattcaactgataacatcccgcaccagaggctatcacttccgatgtccattaatccagttccggtcgctccacgatcggcgatccccagacgtccggcgacatcgccggcgattatacctcacgccggtgacgatttactcggatttcgcgggaatctcaacgcattcgcggcagccgcagcggcggcggcgtgtccggcgtctgaagatgactcggaaggttcaaggtctagatcgagcggtcgtagcgggagtaacaagaagcgggagaggaaaattgagaagaagcaaggctacaaggaagttgccgacgcaattgagaggcttggacagatatacgagagagtcgaggagaagaagaggaaggaaatggttgaattggagaagcagagaatgagattcgctaaggaattggaatgccataggatgcaactgttcacggagatgcaggtacgtcttcataagctccggcgtacctctggctccaaaggaccgacttcctccgcctccgccggtgagacctga

SEQ ID NO: 82692 - protein, 311 aa, Arabidopsis thaliana
  peptide (1)..(311): Ceres Seq. ID no. 12666992
  misc_feature (1)..(311): Homolog of NCBI NO: 11357442 NR Description: hypothetical protein F14P22.220 - Arabidopsis >gi|6735380|emb|CAB68201.1| putative protein [Arabidopsis
  misc_feature (1)..(308): Homolog of NCBI NO: 30694843 NR Description: expressed protein [Arabidopsis thaliana] unknown protein [Arabidopsis thaliana]
  misc_feature (77)..(310): Homolog of NCBI NO: 18149189 NR Description: 6b-interacting protein 1 [Nicotiana tabacum]
  misc_feature (7)..(274): Homolog of NCBI NO: 18149189 NR Description: 6b-interacting protein 1 [Nicotiana tabacum]
  misc_feature (12)..(192): Homolog of NCBI NO: 15231799 NR Description: hypothetical protein; protein id: At3g14180.1, by cDNA: gi_18176239, supported by cDNA: gi_21281262 [Arabidopsis
  misc_feature (205)..(305): Homolog of NCBI NO: 15231799 NR Description: hypothetical protein; protein id: At3g14180.1, by cDNA: gi_18176239, supported by cDNA: gi_21281262 [Arabidopsis
  misc_feature (3)..(127): Homolog of NCBI NO: 10178132 NR Description: gb|AAF01512.1~gene_id:MOP10.9~similar to unknown
  misc_feature (186)..(305): Homolog of NCBI NO: 10178132 NR Description: gb|AAF01512.1~gene_id:MOP10.9~similar to unknown
  misc_feature (3)..(127): Homolog of NCBI NO: 18414919 NR Description: putative protein; protein id: At5g05550.1, by cDNA: gi_15010667, supported by cDNA: gi_16974318 [Arabidopsis >gi|15010668|gb|AAK73993.1| AT5g05550/MOP10_9 [Arabidopsis
  misc_feature (186)..(301): Homolog of NCBI NO: 18414919 NR Description: putative protein; protein id: At5g05550.1, by cDNA: gi_15010667, supported by cDNA: gi_16974318 [Arabidopsis >gi|15010668|gb|AAK73993.1| AT5g05550/MOP10_9 [Arabidopsis
MDTVNDSFSPGSSRPSPATLSREDCWSEEATFTLIQAWGNRYVDLSRGNLRQKHWQEVANAVNDRHYNTGRNVSAAKSQPYRTDVQCKNRIDTLKKKYKVEKARVSESNPGAYISPWPFFSALDDLLRESFPTSSNPDSTDNIPHQRLSLPMSINPVPVAPRSAIPRRPATSPAIIPHAGDDLLGFRGNLNAFAAAAAAAACPASEDDSEGSRSRSSGRSGSNKKRERKIEKKQGYKEVADAIERLGQIYERVEEKKRKEMVELEKQRMRFAKELECHRMQLFTEMQVRLHKLRRTSGSKGPTSSASAGET

SEQ ID NO: 82693 - protein, 160 aa, Arabidopsis thaliana; identical to SEQ ID NO: 48722
  peptide (1)..(160): Ceres Seq. ID no. 12666993
  misc_feature (1)..(160): Homolog of NCBI NO: 11357442 NR Description: hypothetical protein F14P22.220 - Arabidopsis >gi|6735380|emb|CAB68201.1| putative protein [Arabidopsis
  misc_feature (1)..(157): Homolog of NCBI NO: 30694843 NR Description: expressed protein [Arabidopsis thaliana] unknown protein [Arabidopsis thaliana]
  misc_feature (1)..(159): Homolog of NCBI NO: 18149189 NR Description: 6b-interacting protein 1 [Nicotiana tabacum]
  misc_feature (1)..(123): Homolog of NCBI NO: 18149189 NR Description: 6b-interacting protein 1 [Nicotiana tabacum]
  misc_feature (1)..(41): Homolog of NCBI NO: 15231799 NR Description: hypothetical protein; protein id: At3g14180.1, by cDNA: gi_18176239, supported by cDNA: gi_21281262 [Arabidopsis
  misc_feature (54)..(154): Homolog of NCBI NO: 15231799 NR Description: hypothetical protein; protein id: At3g14180.1, by cDNA: gi_18176239, supported by cDNA: gi_21281262 [Arabidopsis
  misc_feature (35)..(154): Homolog of NCBI NO: 10178132 NR Description: gb|AAF01512.1~gene_id:MOP10.9~similar to unknown
  misc_feature (35)..(150): Homolog of NCBI NO: 18414919 NR Description: putative protein; protein id: At5g05550.1, by cDNA: gi_15010667, supported by cDNA: gi_16974318 [Arabidopsis >gi|15010668|gb|AAK73993.1| AT5g05550/MOP10_9 [Arabidopsis
  misc_feature (35)..(141): Homolog of NCBI NO: 30680994 NR Description: expressed protein [Arabidopsis thaliana]
  misc_feature (38)..(158): Homolog of NCBI NO: 12321891 NR Description: hypothetical protein; 14486-13072 [Arabidopsis

SEQ ID NO: 82694 - DNA, 819 bp, Arabidopsis thaliana
  misc_feature (1)..(819): Ceres Seq. ID no. 12666998
  misc_feature: MA Experiment ID: 20000179 Result: Up-regulated in Transcription
  misc_feature: MA Experiment 20000179 PARAMETER Experiment Name: At_Germinating_Seeds_P Parameter: Age (hr) Value: 6 vs. 0
  misc_feature: MA Experiment 20000179 PARAMETER Experiment Name: At_Germinating_Seeds_P Parameter: Tissue Value: Germinating Seeds
  misc_feature: MA Experiment ID: 20000180 Result: Up-regulated in Transcription
  misc_feature: MA Experiment 20000180 PARAMETER Experiment Name: At_Germinating_Seeds_P Parameter: Age (hr) Value: 24 vs. 0
  misc_feature: MA Experiment 20000180 PARAMETER Experiment Name: At_Germinating_Seeds_P Parameter: Tissue Value: Germinating Seeds
  misc_feature: MA Experiment ID: 20000185 Result: Up-regulated in Transcription
  misc_feature: MA Experiment 20000185 PARAMETER Experiment Name: At_Roots__P Parameter: Age (day) Value: 7 vs. 21
  misc_feature: MA Experiment 20000185 PARAMETER Experiment Name: At_Roots__P Parameter: Organism Value: A. thaliana
  misc_feature: MA Experiment 20000185 PARAMETER Experiment Name: At_Roots__P Parameter: Tissue Value: Roots vs. Whole Plant
  misc_feature: MA Experiment ID: 20000234 Result: Down-regulated in Transcription
  misc_feature: MA Experiment 20000234 PARAMETER Experiment Name: At_Siliques_P Parameter: Age (day) Value: 21
  misc_feature: MA Experiment 20000234 PARAMETER Experiment Name: At_Siliques_P Parameter: Organism Value: A. thaliana
  misc_feature: MA Experiment 20000234 PARAMETER Experiment Name: At_Siliques_P Parameter: Plant Line Value: WS
  misc_feature: MA Experiment 20000234 PARAMETER Experiment Name: At_Siliques_P Parameter: Tissue Value: Less Than 5mm Siliques vs. Whole Plant
  misc_feature: MA Experiment ID: 20000235 Result: Down-regulated in Transcription
  misc_feature: MA Experiment 20000235 PARAMETER Experiment Name: At_Siliques_P Parameter: Age (day) Value: 21
  misc_feature: MA Experiment 20000235 PARAMETER Experiment Name: At_Siliques_P Parameter: Organism Value: A. thaliana
  misc_feature: MA Experiment 20000235 PARAMETER Experiment Name: At_Siliques_P Parameter: Plant Line Value: WS
  misc_feature: MA Experiment 20000235 PARAMETER Experiment Name: At_Siliques_P Parameter: Tissue Value: 5-10mm Siliques vs. Whole Plant
  misc_feature: MA Experiment ID: 20000265 Result: Down-regulated in Transcription
  misc_feature: MA Experiment 20000265 PARAMETER Experiment Name: At_Open_Flower_P Parameter: Age (day) Value: 21
  misc_feature: MA Experiment 20000265 PARAMETER Experiment Name: At_Open_Flower_P Parameter: Plant Line Value: WS
  misc_feature: MA Experiment 20000265 PARAMETER Experiment Name: At_Open_Flower_P Parameter: Tissue Value: Closed Flower vs. Whole Plant
  misc_feature: MA Experiment ID: 20000286 Result: Down-regulated in Transcription
  misc_feature: MA Experiment 20000286 PARAMETER Experiment Name: At_Open_Flower_P Parameter: Age (day) Value: 21
  misc_feature: MA Experiment 20000286 PARAMETER Experiment Name: At_Open_Flower_P Parameter: Plant Line Value: WS
  misc_feature: MA Experiment 20000286 PARAMETER Experiment Name: At_Open_Flower_P Parameter: Tissue Value: Half Open vs. Whole Plant
  misc_feature: MA Experiment ID: 20000438 Result: Down-regulated in Transcription
  misc_feature: MA Experiment 20000438 PARAMETER Experiment Name: At_Shoots__P Parameter: Age (day) Value: 14
  misc_feature: MA Experiment 20000438 PARAMETER Experiment Name: At_Shoots__P Parameter: Tissue Value: Shoots vs. Whole Plant
  misc_feature: MA Experiment ID: 20000439 Result: Up-regulated in Transcription
  misc_feature: MA Experiment 20000439 PARAMETER Experiment Name: At_Roots__P Parameter: Age (day) Value: 14 vs. 21
  misc_feature: MA Experiment 20000439 PARAMETER Experiment Name: At_Roots__P Parameter: Organism Value: A. thaliana
  misc_feature: MA Experiment 20000439 PARAMETER Experiment Name: At_Roots__P Parameter: Tissue Value: Roots vs. Whole Plant
  misc_feature: MA Experiment ID: 20000495 Result: Up-regulated in Transcription
  misc_feature: MA Experiment 20000495 PARAMETER Experiment Name: At_Guard_Cells_P Parameter: Harvest Date Value: 8/2/2002
  misc_feature: MA Experiment 20000495 PARAMETER Experiment Name: At_Guard_Cells_P Parameter: Organism Value: A. thaliana
  misc_feature: MA Experiment 20000495 PARAMETER Experiment Name: At_Guard_Cells_P Parameter: Tissue Value: Guard Cells vs. Leaves
  misc_feature: MA Experiment ID: 20001451 Result: Up-regulated in Transcription
  misc_feature: MA Experiment 20001451 PARAMETER Experiment Name: At_Far-red-induction_P Parameter: Age (day) Value: 7
  misc_feature: MA Experiment 20001451 PARAMETER Experiment Name: At_Far-red-induction_P Parameter: Light Value: Far-red vs. White
  misc_feature: MA Experiment 20001451 PARAMETER Experiment Name: At_Far-red-induction_P Parameter: Organism Value: A. thaliana
  misc_feature: MA Experiment 20001451 PARAMETER Experiment Name: At_Far-red-induction_P Parameter: Plant Line Value: Columbia
  misc_feature: MA Experiment 20001451 PARAMETER Experiment Name: At_Far-red-induction_P Parameter: Timepoint (hr) Value: 24
  misc_feature: MA Experiment 20001451 PARAMETER Experiment Name: At_Far-red-induction_P Parameter: Tissue Value: Whole Plant
atgcatcgtagagcagcaattcaagaatcggatgacgaagaagatgagacttacaacgacgtcgttcctgaatctccttcttcttgtgaagactcaaagatctcaaaaccaactccaaagaaaagtaggaggaacgtagagaagagagttgtctcagttccgatagctgacgtggaaggatctaagagcagaggcgaagtatatccaccgtccgattcatgggcctggagaaagtacggacaaaaaccgatcaaaggctcgccttatcccaggggatattacagatgtagtagctcaaaaggatgtccggcgaggaagcaggtggagagaagccgtgtggacccttctaagcttatgattacttacgcctgcgaccacaatcaccctttcccttcctcctccgctaacaccaaatcccaccaccgctcctccgtcgtcctcaaaaccgcaaagaaagaggaagaatacgaagaggaggaagaagaactaaccgtcaccgccgcagaggaaccaccggcgggacttgatctaagccacgtagactcaccgttgctattaggcggctgctacagcgaaatcggagagttcgggtggttctacgacgcgtcgatctcatcatcatctggttcttcgaatttcctcgacgtaactctagagagaggtttttcagtaggccaagaggaagatgagtctttgttcggtgatctcggtgatttacctgattgcgcctccgtgttccgccgtgggactgttgcgacggaggagcaacatcgaagatgtgattttggcgccattcctttctgtgatagttctagatga

SEQ ID NO: 82695 - protein, 272 aa, Arabidopsis thaliana; identical to SEQ ID NO: 38750
  peptide (1)..(272): Ceres Seq. ID no. 12666999
  misc_feature (70)..(130): Pfam Name: WRKY DNA -binding domain Pfam Description: WRKY DNA -binding domain
  misc_feature (1)..(272): Homolog of NCBI NO: 30694863 NR Description: WRKY family transcription factor [Arabidopsis
  misc_feature (1)..(272): Homolog of NCBI NO: 22331854 NR Description: WRKY family transcription factor; protein id: supported by cDNA: gi_15991735 [Arabidopsis thaliana]
  misc_feature (92)..(272): Homolog of NCBI NO: 11357269 NR Description: DNA-binding WRKY-like protein - Arabidopsis
  misc_feature (1)..(92): Homolog of NCBI NO: 11357269 NR Description: DNA-binding WRKY-like protein - Arabidopsis
  misc_feature (14)..(251): Homolog of NCBI NO: 22329838 NR Description: WRKY family transcription factor; protein id: supported by cDNA: gi_17980955 [Arabidopsis thaliana]
  misc_feature (22)..(219): Homolog of NCBI NO: 34910854 NR Description: P0435H01.23 [Oryza sativa (japonica
  misc_feature (225)..(248): Homolog of NCBI NO: 34910854 NR Description: P0435H01.23 [Oryza sativa (japonica
  misc_feature (25)..(172): Homolog of NCBI NO: 34909540 NR Description: P0481E12.40 [Oryza sativa (japonica
  misc_feature (41)..(141): Homolog of NCBI NO: 38567968 NR Description: OSJNBa0093F12.9 [Oryza sativa (japonica
  misc_feature (27)..(145): Homolog of NCBI NO: 15226838 NR Description: WRKY family transcription factor; protein id: supported by cDNA: gi_15384228 [Arabidopsis thaliana]

SEQ ID NO: 82696 - protein, 154 aa, Arabidopsis thaliana; identical to SEQ ID NO: 38751
  peptide (1)..(154): Ceres Seq. ID no. 12667000
  misc_feature (1)..(154): Homolog of NCBI NO: 30694863 NR Description: WRKY family transcription factor [Arabidopsis
  misc_feature (1)..(154): Homolog of NCBI NO: 22331854 NR Description: WRKY family transcription factor; protein id: supported by cDNA: gi_15991735 [Arabidopsis thaliana]
  misc_feature (1)..(154): Homolog of NCBI NO: 11357269 NR Description: DNA-binding WRKY-like protein - Arabidopsis
  misc_feature (1)..(133): Homolog of NCBI NO: 22329838 NR Description: WRKY family transcription factor; protein id: supported by cDNA: gi_17980955 [Arabidopsis thaliana]
  misc_feature (1)..(101): Homolog of NCBI NO: 34910854 NR Description: P0435H01.23 [Oryza sativa (japonica
  misc_feature (107)..(130): Homolog of NCBI NO: 34910854 NR Description: P0435H01.23 [Oryza sativa (japonica
  misc_feature (1)..(54): Homolog of NCBI NO: 34909540 NR Description: P0481E12.40 [Oryza sativa (japonica
  misc_feature (1)..(23): Homolog of NCBI NO: 38567968 NR Description: OSJNBa0093F12.9 [Oryza sativa (japonica
  misc_feature (1)..(27): Homolog of NCBI NO: 15226838 NR Description: WRKY family transcription factor; protein id: supported by cDNA: gi_15384228 [Arabidopsis thaliana]
  misc_feature (1)..(45): Homolog of NCBI NO: 29126352 NR Description: putative DNA -binding protein [Oryza sativa

SEQ ID NO: 82697 - DNA, 1621 bp, Arabidopsis thaliana
  misc_feature (1)..(1621): Ceres Seq. ID no. 12667009
  misc_feature: MA Experiment ID: 20000180 Result: Down-regulated in Transcription
  misc_feature: MA Experiment 20000180 PARAMETER Experiment Name: At_Germinating_Seeds_P Parameter: Age (hr) Value: 24 vs. 0
  misc_feature: MA Experiment 20000180 PARAMETER Experiment Name: At_Germinating_Seeds_P Parameter: Tissue Value: Germinating Seeds
  misc_feature: MA Experiment ID: 20001905 Result: Down-regulated in Transcription
  misc_feature: MA Experiment 20001905 PARAMETER Experiment Name: At_Drought_Reproduction_P Parameter: Age (day) Value: 40
  misc_feature: MA Experiment 20001905 PARAMETER Experiment Name: At_Drought_Reproduction_P Parameter: Organism Value: A. thaliana
  misc_feature: MA Experiment 20001905 PARAMETER Experiment Name: At_Drought_Reproduction_P Parameter: Plant Line Value: WS
  misc_feature: MA Experiment 20001905 PARAMETER Experiment Name: At_Drought_Reproduction_P Parameter: Timepoint (day) Value: 10
  misc_feature: MA Experiment 20001905 PARAMETER Experiment Name: At_Drought_Reproduction_P Parameter: Tissue Value: Rosettes
  misc_feature: MA Experiment 20001905 PARAMETER Experiment Name: At_Drought_Reproduction_P Parameter: Treatment Value: Drought vs. No Drought
atgacgattaagcctaaatcgccggcgagattcaagctaggtaggcagtcttcgcttgcgccggaatcaagaaccccgattgatacgttaacggaagatgaggacgacgacttggctgcggcggctacagctgggatcggggatccgacgattcgtttaatgtatttagccaacgaaggtgatatcgatggcatcaataagatgcttgattcgggtactaatgttgattaccgtgacatcgatgcccgtactgctcttcacgtcgccgcttgtcaaggacgaaccgatgtcgttgagctgctgcttagccgtggtgctaaggttgatacgaaggaccgatggggtagtacgcctcttgcagatgcagtgtattacaaaaatcatgatgtgattaaacttttggagaaacatggtgctaagcctacgattgctcctatgcatgtcctaactgataaagaagttccagagtacgagattcatcctacagagcttgatttttccaactctgtcaaaatttcaaagggtacctttaacaaggcttcatggcgtggaattgacgtggctgttaaaacctttggagaggaaatgttcactgatgaagacaaagtgaatgcatttagggacgaacttgcactgcttcaaaagatacgccatccgaatgttgttcagtttctaggggcagttactcagagtacccccatgatgattgtcaccgagtatttaccaaagggagatcttcgacaatatctagacaggaaaggacctctaatgccagcacacgcagtgaagttcgcccttgaaattgctaggttaagtggctatttcctgggaatgaattatttgcacgaacataaacctgaagcaataatccattgcgacctagaacctccaaacatactgcgggatgattcgggacatctgaaagttgcagactttggagtcagcaagctgctggtagttaagaagacagttaaaaaagacagacctgttgttacatgcttggacagttcatggcgatatatggctccagaggtttataggaatgaagagtatgatacaaaagtagatgtattctctttcgctttaatcttacaagagatgatagaaggttgtgaaccatttcatgagatagaagaccgcgaagttcctaaagcatatattgaagatgaacgtccaccattcaatgctccaacaaaatcatatcctttcgggttacaagagctaatccaggattgttgggacaaagaagcatcaaaaagaccaacatttagagtaatcatctctactttggagttgataagtgatcgaattgcacgcaaaaggagctggaaggtgatgctaggaagatgccttccaagattcagattgtttacaaagcgagattatgtgaatcccggtggtagtaaccgctcatcaggctcattcaacagatgagtgactgcaaagagctttgggtttgtttttctttaattgccttaaaaggatgaaaaaatgtcaaatactttttaggtcttttgtatttatatatgacatcatgactgtttttcttaaccagaatgaacacggtggtgtgtattattttttacgcagtggcgaagtaaaataatgagatctctgagct

SEQ ID NO: 82698 - protein, 477 aa, Arabidopsis thaliana
  peptide (1)..(477): Ceres Seq. ID no. 12667010
  misc_feature (1)..(477): Homolog of NCBI NO: 18411024 NR Description: putative protein; protein id: At3g58760.1
  misc_feature (1)..(278): Homolog of NCBI NO: 11358145 NR Description: hypothetical protein T20N10.110 - Arabidopsis >gi|7630071|emb|CAB88293.1| putative protein [Arabidopsis
  misc_feature (298)..(477): Homolog of NCBI NO: 11358145 NR Description: hypothetical protein T20N10.110 - Arabidopsis >gi|7630071|emb|CAB88293.1| putative protein [Arabidopsis
  misc_feature (10)..(474): Homolog of NCBI NO: 18415205 NR Description: protein kinase - like protein; protein id: supported by cDNA: 38712., supported by cDNA: gi_16648823 thaliana] >gi|16648824|gb|AAL25602.1| AT4g18950/F13C5_120
  misc_feature (10)..(444): Homolog of NCBI NO: 18700701 NR Description: ankyrin-kinase [Medicago truncatula]
  misc_feature (1)..(203): Homolog of NCBI NO: 34909506 NR Description: putative protein kinase homolog [Oryza sativa
  misc_feature (298)..(474): Homolog of NCBI NO: 34909506 NR Description: putative protein kinase homolog [Oryza sativa
  misc_feature (10)..(444): Homolog of NCBI NO: 18700703 NR Description: putative ankyrin-kinase [Medicago sativa]
  misc_feature (10)..(444): Homolog of NCBI NO: 15232181 NR Description: putative protein; protein id: At3g59830.1
  misc_feature (10)..(444): Homolog of NCBI NO: 30689517 NR Description: protein kinase -related [Arabidopsis thaliana]
MTIKPKSPARFKLGRQSSLAPESRTPIDTLTEDEDDDLAAAATAGIGDPTIRLMYLANEGDIDGINKMLDSGTNVDYRDIDARTALHVAACQGRTDVVELLLSRGAKVDTKDRWGSTPLADAVYYKNHDVIKLLEKHGAKPTIAPMHVLTDKEVPEYEIHPTELDFSNSVKISKGTFNKASWRGIDVAVKTFGEEMFTDEDKVNAFRDELALLQKIRHPNVVQFLGAVTQSTPMMIVTEYLPKGDLRQYLDRKGPLMPAHAVKFALEIARLSGYFLGMNYLHEHKPEAIIHCDLEPPNILRDDSGHLKVADFGVSKLLVVKKTVKKDRPVVTCLDSSWRYMAPEVYRNEEYDTKVDVFSFALILQEMIEGCEPFHEIEDREVPKAYIEDERPPFNAPTKSYPFGLQELIQDCWDKEASKRPTFRVIISTLELISDRIARKRSWKVMLGRCLPRFRLFTKRDYVNPGGSNRSSGSFNR

SEQ ID NO: 82699 - protein, 424 aa, Arabidopsis thaliana
  peptide (1)..(424): Ceres Seq. ID no. 12667011
  misc_feature (1)..(424): Homolog of NCBI NO: 18411024 NR Description: putative protein; protein id: At3g58760.1
  misc_feature (1)..(225): Homolog of NCBI NO: 11358145 NR Description: hypothetical protein T20N10.110 - Arabidopsis >gi|7630071|emb|CAB88293.1| putative protein [Arabidopsis
  misc_feature (245)..(424): Homolog of NCBI NO: 11358145 NR Description: hypothetical protein T20N10.110 - Arabidopsis >gi|7630071|emb|CAB88293.1| putative protein [Arabidopsis
  misc_feature (1)..(421): Homolog of NCBI NO: 18415205 NR Description: protein kinase - like protein; protein id: supported by cDNA: 38712., supported by cDNA: gi_16648823 thaliana] >gi|16648824|gb|AAL25602.1| AT4g18950/F13C5_120
  misc_feature (1)..(391): Homolog of NCBI NO: 18700701 NR Description: ankyrin-kinase [Medicago truncatula]
  misc_feature (1)..(150): Homolog of NCBI NO: 34909506 NR Description: putative protein kinase homolog [Oryza sativa
  misc_feature (245)..(421): Homolog of NCBI NO: 34909506 NR Description: putative protein kinase homolog [Oryza sativa
  misc_feature (1)..(391): Homolog of NCBI NO: 18700703 NR Description: putative ankyrin-kinase [Medicago sativa]
  misc_feature (1)..(391): Homolog of NCBI NO: 15232181 NR Description: putative protein; protein id: At3g59830.1
  misc_feature (1)..(391): Homolog of NCBI NO: 30689517 NR Description: protein kinase -related [Arabidopsis thaliana]
MYLANEGDIDGINKMLDSGTNVDYRDIDARTALHVAACQGRTDVVELLLSRGAKVDTKDRWGSTPLADAVYYKNHDVIKLLEKHGAKPTIAPMHVLTDKEVPEYEIHPTELDFSNSVKISKGTFNKASWRGIDVAVKTFGEEMFTDEDKVNAFRDELALLQKIRHPNVVQFLGAVTQSTPMMIVTEYLPKGDLRQYLDRKGPLMPAHAVKFALEIARLSGYFLGMNYLHEHKPEAIIHCDLEPPNILRDDSGHLKVADFGVSKLLVVKKTVKKDRPVVTCLDSSWRYMAPEVYRNEEYDTKVDVFSFALILQEMIEGCEPFHEIEDREVPKAYIEDERPPFNAPTKSYPFGLQELIQDCWDKEASKRPTFRVIISTLELISDRIARKRSWKVMLGRCLPRFRLFTKRDYVNPGGSNRSSGSFNR

SEQ ID NO: 82700 - protein, 410 aa, Arabidopsis thaliana
  peptide (1)..(410): Ceres Seq. ID no. 12667012
  misc_feature (1)..(410): Homolog of NCBI NO: 18411024 NR Description: putative protein; protein id: At3g58760.1
  misc_feature (1)..(211): Homolog of NCBI NO: 11358145 NR Description: hypothetical protein T20N10.110 - Arabidopsis >gi|7630071|emb|CAB88293.1| putative protein [Arabidopsis
  misc_feature (231)..(410): Homolog of NCBI NO: 11358145 NR Description: hypothetical protein T20N10.110 - Arabidopsis >gi|7630071|emb|CAB88293.1| putative protein [Arabidopsis
  misc_feature (1)..(407): Homolog of NCBI NO: 18415205 NR Description: protein kinase - like protein; protein id: supported by cDNA: 38712., supported by cDNA: gi_16648823 thaliana] >gi|16648824|gb|AAL25602.1| AT4g18950/F13C5_120
  misc_feature (1)..(377): Homolog of NCBI NO: 18700701 NR Description: ankyrin-kinase [Medicago truncatula]
  misc_feature (1)..(136): Homolog of NCBI NO: 34909506 NR Description: putative protein kinase homolog [Oryza sativa
  misc_feature (231)..(407): Homolog of NCBI NO: 34909506 NR Description: putative protein kinase homolog [Oryza sativa
  misc_feature (1)..(377): Homolog of NCBI NO: 18700703 NR Description: putative ankyrin-kinase [Medicago sativa]
  misc_feature (1)..(377): Homolog of NCBI NO: 15232181 NR Description: putative protein; protein id: At3g59830.1
  misc_feature (1)..(377): Homolog of NCBI NO: 30689517 NR Description: protein kinase -related [Arabidopsis thaliana]
MLDSGTNVDYRDIDARTALHVAACQGRTDVVELLLSRGAKVDTKDRWGSTPLADAVYYKNHDVIKLLEKHGAKPTIAPMHVLTDKEVPEYEIHPTELDFSNSVKISKGTFNKASWRGIDVAVKTFGEEMFTDEDKVNAFRDELALLQKIRHPNVVQFLGAVTQSTPMMIVTEYLPKGDLRQYLDRKGPLMPAHAVKFALEIARLSGYFLGMNYLHEHKPEAIIHCDLEPPNILRDDSGHLKVADFGVSKLLVVKKTVKKDRPVVTCLDSSWRYMAPEVYRNEEYDTKVDVFSFALILQEMIEGCEPFHEIEDREVPKAYIEDERPPFNAPTKSYPFGLQELIQDCWDKEASKRPTFRVIISTLELISDRIARKRSWKVMLGRCLPRFRLFTKRDYVNPGGSNRSSGSFNR

SEQ ID NO: 82701 - DNA, 2356 bp, Arabidopsis thaliana
  misc_feature (1)..(2356): Ceres Seq. ID no. 12667013
  misc_feature: MA Experiment ID: 20000179 Result: Up-regulated in Transcription
  misc_feature: MA Experiment 20000179 PARAMETER Experiment Name: At_Germinating_Seeds_P Parameter: Age (hr) Value: 6 vs. 0
  misc_feature: MA Experiment 20000179 PARAMETER Experiment Name: At_Germinating_Seeds_P Parameter: Tissue Value: Germinating Seeds
  misc_feature: MA Experiment ID: 20000495 Result: Down-regulated in Transcription
  misc_feature: MA Experiment 20000495 PARAMETER Experiment Name: At_Guard_Cells_P Parameter: Harvest Date Value: 8/2/2002
  misc_feature: MA Experiment 20000495 PARAMETER Experiment Name: At_Guard_Cells_P Parameter: Organism Value: A. thaliana
  misc_feature: MA Experiment 20000495 PARAMETER Experiment Name: At_Guard_Cells_P Parameter: Tissue Value: Guard Cells vs. Leaves
  misc_feature: MA Experiment ID: 20001247 Result: Up-regulated in Transcription
  misc_feature: MA Experiment 20001247 PARAMETER Experiment Name: At_Far-red-induction_P Parameter: Age (day) Value: 7
  misc_feature: MA Experiment 20001247 PARAMETER Experiment Name: At_Far-red-induction_P Parameter: Light Value: Far-red vs. White
  misc_feature: MA Experiment 20001247 PARAMETER Experiment Name: At_Far-red-induction_P Parameter: Organism Value: A. thaliana
  misc_feature: MA Experiment 20001247 PARAMETER Experiment Name: At_Far-red-induction_P Parameter: Plant Line Value: Columbia
  misc_feature: MA Experiment 20001247 PARAMETER Experiment Name: At_Far-red-induction_P Parameter: Timepoint (hr) Value: 1
  misc_feature: MA Experiment 20001247 PARAMETER Experiment Name: At_Far-red-induction_P Parameter: Tissue Value: Whole Plant
aggaataatattggtgaaatattatcttttacaaaaatgcatttattttggtaagcatatgtccgcttggcttctttagaaaaattcattcctctttgaatgttgttttttattcccgtcgtacagatcaaaaaccaaacagtccctctcgacctactggattcgcgttttgcttttgatcacatcttcgtcattgagcttcttcttcttctcgatccctgttggttttggttgttgtttttgatgaactgatagtggagatcagagatctggaaaacagagccgtgtgttactgttttggattgatggaactgaagaaacgttgtgagaaagttagggaaactgtgaagaaatgaagttttacatatcagcgacggggattaagaaggttacgatatcaaatcccggcgtcggaatcggtaaaggaagcggaggatgtgcggctgcagcggcggcgttagcagcgcggagattctctagtcgcacgttgttactgttgctgctgctgctcgctatcgtcctcccttttatcttcgtcaggttcgcgtttctcgtcctcgaatctgcctccgtttgcgattcaccactcgattgcatgggactcagacttttccgtgggggcgacacatctctgaaaattggggaagagttgacacgggctctagtggaagagacgacagatcatcaggacgttaatggaagaggaacgaagggatcattggagtcattcgacgaccttgttaaggagatgacgttaaaacgccgtgacataagggcgtttgcttccgtgactaagaagatgctgttgcagatggaacgtaaagtccaatcagcgaaacatcatgagttagtgtactggcatttagcctctcacggtattcctaaaagcctccattgcctttccctcagattaactgaagagtactctgtaaatgcaatggctcgaatgcgtttgcctccgcctgagtccgtatcacgtctgaccgacccatcttttcatcatattgtcctcctgactgacaatgtccttgctgcctctgtcgtcatatcgtctactgtacaaaacgctgtgaatcccgagaagtttgtctttcatattgttaccgataagaaaacctatacccctatgcatgcttggtttgctatcaactctgcttcatcaccagttgttgaagtaaagggacttcatcagtatgattggcctcaagaagtgaacttcaaagttagagagatgctggacattcaccgcttaatttggagacgacattatcaaaatttgaaagactctgattttagttttgttgagggtactcatgagcagtccttgcaagctctaaatcctagctgccttgcccttttgaaccatcttcgcatttacattcccaagctttttccagatctcaacaagatagtgttgttggatgatgatgtagtagtacagagcgatctttcgtctttatgggaaacggatctcaacggtaaagttgttggtgctgtcgttgattcgtggtgcggagacaactgttgccccggaagaaaatacaaagactatttcaacttctcacatcctttgatctcatcaaacttagttcaagaagactgtgcttggctttctggtatgaatgtctttgatctcaaagcctggagacaaaccaatattactgaagcttactctacatggctaagactcagtgttaggtcaggactacaattatggcaaccaggggctttaccaccgacattacttgctttcaaaggacttacacagtctcttgaaccatcatggcacgtcgctggactaggttctcgatccgtaaaatcccctcaagagattctgaaatctgcttcggttttacatttcagcggtccagcaaaaccgtggctagagatcagtaaccctgaggtacgatctctttggtatagatacgtaaattcctccgacatcttcgttagaaaatgcaaaatcatgaactgagactaaaaaacagattagaaaacaaatataaagaaaagagaaaactgagtgatgaagccaatacttgcggctgtgtgagagaacagagggaagaaggtttaagccttcagcctctgctcatatttctctcatgtccatatactaaacagtaatttagataaaggacagtatcaaattagactttaagcgtatgaagcttctttttgagatcattatctcaagtagtaactatagtaaaaaatgtaattttgtttaattatagctacacattaatttatcacattatagatcttttgtaagtttttatttttgtaatccataattaatttatggacatgttgtaatgattttatgatcaatgtttatagttttgcttgtctc

SEQ ID NO: 82702 - protein, 540 aa, Arabidopsis thaliana
  peptide (1)..(540): Ceres Seq. ID no. 12667014
  misc_feature (1)..(540): Homolog of NCBI NO: 22331857 NR Description: putative protein; protein id: At3g58790.1, by cDNA: gi_20466463 [Arabidopsis thaliana] putative protein [Arabidopsis thaliana]
  misc_feature (1)..(540): Homolog of NCBI NO: 11358146 NR Description: hypothetical protein T20N10.140 - Arabidopsis >gi|7630074|emb|CAB88296.1| putative protein [Arabidopsis
  misc_feature (36)..(539): Homolog of NCBI NO: 30685369 NR Description: glycosyltransferase family 8 [Arabidopsis >gi|26452322|dbj|BAC43247.1| unknown protein [Arabidopsis
  misc_feature (36)..(539): Homolog of NCBI NO: 6714484 NR Description: unknown protein [Arabidopsis thaliana]
  misc_feature (36)..(539): Homolog of NCBI NO: 30678270 NR Description: glycosyltransferase family 8 [Arabidopsis
  misc_feature (36)..(539): Homolog of NCBI NO: 11358133 NR Description: hypothetical protein T20K14_80 - Arabidopsis >gi|9755802|emb|CAC01746.1| putative protein [Arabidopsis
  misc_feature (36)..(538): Homolog of NCBI NO: 15239707 NR Description: putative protein; protein id: At5g54690.1 thaliana] >gi|10176796|dbj|BAB09935.1| contains similarity to
  misc_feature (124)..(422): Homolog of NCBI NO: 34910786 NR Description: P0042A10.22 [Oryza sativa (japonica
  misc_feature (450)..(539): Homolog of NCBI NO: 34910786 NR Description: P0042A10.22 [Oryza sativa (japonica
  misc_feature (93)..(538): Homolog of NCBI NO: 38423965 NR Description: putative glycosyltransferase [Oryza sativa
MKFYISATGIKKVTISNPGVGIGKGSGGCAAAAAALAARRFSSRTLLLLLLLLAIVLPFIFVRFAFLVLESASVCDSPLDCMGLRLFRGGDTSLKIGEELTRALVEETTDHQDVNGRGTKGSLESFDDLVKEMTLKRRDIRAFASVTKKMLLQMERKVQSAKHHELVYWHLASHGIPKSLHCLSLRLTEEYSVNAMARMRLPPPESVSRLTDPSFHHIVLLTDNVLAASVVISSTVQNAVNPEKFVFHIVTDKKTYTPMHAWFAINSASSPVVEVKGLHQYDWPQEVNFKVREMLDIHRLIWRRHYQNLKDSDFSFVEGTHEQSLQALNPSCLALLNHLRIYIPKLFPDLNKIVLLDDDVVVQSDLSSLWETDLNGKVVGAVVDSWCGDNCCPGRKYKDYFNFSHPLISSNLVQEDCAWLSGMNVFDLKAWRQTNITEAYSTWLRLSVRSGLQLWQPGALPPTLLAFKGLTQSLEPSWHVAGLGSRSVKSPQEILKSASVLHFSGPAKPWLEISNPEVRSLWYRYVNSSDIFVRKCKIMN

SEQ ID NO: 82703 - protein, 459 aa, Arabidopsis thaliana
  peptide (1)..(459): Ceres Seq. ID no. 12667015
  misc_feature (1)..(459): Homolog of NCBI NO: 22331857 NR Description: putative protein; protein id: At3g58790.1, by cDNA: gi_20466463 [Arabidopsis thaliana] putative protein [Arabidopsis thaliana]
  misc_feature (1)..(459): Homolog of NCBI NO: 11358146 NR Description: hypothetical protein T20N10.140 - Arabidopsis >gi|7630074|emb|CAB88296.1| putative protein [Arabidopsis
  misc_feature (1)..(458): Homolog of NCBI NO: 30685369 NR Description: glycosyltransferase family 8 [Arabidopsis >gi|26452322|dbj|BAC43247.1| unknown protein [Arabidopsis
  misc_feature (1)..(458): Homolog of NCBI NO: 6714484 NR Description: unknown protein [Arabidopsis thaliana]
  misc_feature (1)..(458): Homolog of NCBI NO: 30678270 NR Description: glycosyltransferase family 8 [Arabidopsis
  misc_feature (1)..(458): Homolog of NCBI NO: 11358133 NR Description: hypothetical protein T20K14_80 - Arabidopsis >gi|9755802|emb|CAC01746.1| putative protein [Arabidopsis
  misc_feature (1)..(457): Homolog of NCBI NO: 15239707 NR Description: putative protein; protein id: At5g54690.1 thaliana] >gi|10176796|dbj|BAB09935.1| contains similarity to
  misc_feature (43)..(341): Homolog of NCBI NO: 34910786 NR Description: P0042A10.22 [Oryza sativa (japonica
  misc_feature (369)..(458): Homolog of NCBI NO: 34910786 NR Description: P0042A10.22 [Oryza sativa (japonica
  misc_feature (12)..(457): Homolog of NCBI NO: 38423965 NR Description: putative glycosyltransferase [Oryza sativa
MGLRLFRGGDTSLKIGEELTRALVEETTDHQDVNGRGTKGSLESFDDLVKEMTLKRRDIRAFASVTKKMLLQMERKVQSAKHHELVYWHLASHGIPKSLHCLSLRLTEEYSVNAMARMRLPPPESVSRLTDPSFHHIVLLTDNVLAASVVISSTVQNAVNPEKFVFHIVTDKKTYTPMHAWFAINSASSPVVEVKGLHQYDWPQEVNFKVREMLDIHRLIWRRHYQNLKDSDFSFVEGTHEQSLQALNPSCLALLNHLRIYIPKLFPDLNKIVLLDDDVVVQSDLSSLWETDLNGKVVGAVVDSWCGDNCCPGRKYKDYFNFSHPLISSNLVQEDCAWLSGMNVFDLKAWRQTNITEAYSTWLRLSVRSGLQLWQPGALPPTLLAFKGLTQSLEPSWHVAGLGSRSVKSPQEILKSASVLHFSGPAKPWLEISNPEVRSLWYRYVNSSDIFVRKCKIMN

SEQ ID NO: 82704 - protein, 408 aa, Arabidopsis thaliana
  peptide (1)..(408): Ceres Seq. ID no. 12667016
  misc_feature (1)..(408): Homolog of NCBI NO: 22331857 NR Description: putative protein; protein id: At3g58790.1, by cDNA: gi_20466463 [Arabidopsis thaliana] putative protein [Arabidopsis thaliana]
  misc_feature (1)..(408): Homolog of NCBI NO: 11358146 NR Description: hypothetical protein T20N10.140 - Arabidopsis >gi|7630074|emb|CAB88296.1| putative protein [Arabidopsis
  misc_feature (1)..(407): Homolog of NCBI NO: 30685369 NR Description: glycosyltransferase family 8 [Arabidopsis >gi|26452322|dbj|BAC43247.1| unknown protein [Arabidopsis
  misc_feature (1)..(407): Homolog of NCBI NO: 6714484 NR Description: unknown protein [Arabidopsis thaliana]
  misc_feature (1)..(407): Homolog of NCBI NO: 30678270 NR Description: glycosyltransferase family 8 [Arabidopsis
  misc_feature (1)..(407): Homolog of NCBI NO: 11358133 NR Description: hypothetical protein T20K14_80 - Arabidopsis >gi|9755802|emb|CAC01746.1| putative protein [Arabidopsis
  misc_feature (1)..(406): Homolog of NCBI NO: 15239707 NR Description: putative protein; protein id: At5g54690.1 thaliana] >gi|10176796|dbj|BAB09935.1| contains similarity to
  misc_feature (1)..(290): Homolog of NCBI NO: 34910786 NR Description: P0042A10.22 [Oryza sativa (japonica
  misc_feature (318)..(407): Homolog of NCBI NO: 34910786 NR Description: P0042A10.22 [Oryza sativa (japonica
  misc_feature (1)..(406): Homolog of NCBI NO: 38423965 NR Description: putative glycosyltransferase [Oryza sativa
MTLKRRDIRAFASVTKKMLLQMERKVQSAKHHELVYWHLASHGIPKSLHCLSLRLTEEYSVNAMARMRLPPPESVSRLTDPSFHHIVLLTDNVLAASVVISSTVQNAVNPEKFVFHIVTDKKTYTPMHAWFAINSASSPVVEVKGLHQYDWPQEVNFKVREMLDIHRLIWRRHYQNLKDSDFSFVEGTHEQSLQALNPSCLALLNHLRIYIPKLFPDLNKIVLLDDDVVVQSDLSSLWETDLNGKVVGAVVDSWCGDNCCPGRKYKDYFNFSHPLISSNLVQEDCAWLSGMNVFDLKAWRQTNITEAYSTWLRLSVRSGLQLWQPGALPPTLLAFKGLTQSLEPSWHVAGLGSRSVKSPQEILKSASVLHFSGPAKPWLEISNPEVRSLWYRYVNSSDIFVRKCKIMN

SEQ ID NO: 82705 - DNA, 1137 bp, Arabidopsis thaliana
  misc_feature (1)..(1137): Ceres Seq. ID no. 12667017
  misc_feature: MA Experiment ID: 20000306 Result: Up-regulated in Transcription
  misc_feature: MA Experiment 20000306 PARAMETER Experiment Name: At_Germinating_Seeds_Sub_P Parameter: Age (hr) Value: 6 vs. 0
  misc_feature: MA Experiment 20000306 PARAMETER Experiment Name: At_Germinating_Seeds_Sub_P Parameter: Organism Value: A. thaliana
  misc_feature: MA Experiment 20000306 PARAMETER Experiment Name: At_Germinating_Seeds_Sub_P Parameter: Plant Line Value: WS
  misc_feature: MA Experiment 20000306 PARAMETER Experiment Name: At_Germinating_Seeds_Sub_P Parameter: Tissue Value: Germinating Seeds
  misc_feature: MA Experiment ID: 20000307 Result: Up-regulated in Transcription
  misc_feature: MA Experiment 20000307 PARAMETER Experiment Name: At_Germinating_Seeds_Sub_P Parameter: Age (hr) Value: 24 vs. 0
  misc_feature: MA Experiment 20000307 PARAMETER Experiment Name: At_Germinating_Seeds_Sub_P Parameter: Organism Value: A. thaliana
  misc_feature: MA Experiment 20000307 PARAMETER Experiment Name: At_Germinating_Seeds_Sub_P Parameter: Plant Line Value: WS
  misc_feature: MA Experiment 20000307 PARAMETER Experiment Name: At_Germinating_Seeds_Sub_P Parameter: Tissue Value: Germinating Seeds
  misc_feature: MA Experiment ID: 20000314 Result: Up-regulated in Transcription
  misc_feature: MA Experiment 20000314 PARAMETER Experiment Name: At_14day_Shoots-Roots_Sub_P Parameter: Age (day) Value: 14
  misc_feature: MA Experiment 20000314 PARAMETER Experiment Name: At_14day_Shoots-Roots_Sub_P Parameter: Organism Value: A. thaliana
  misc_feature: MA Experiment 20000314 PARAMETER Experiment Name: At_14day_Shoots-Roots_Sub_P Parameter: Plant Line Value: WS
  misc_feature: MA Experiment 20000314 PARAMETER Experiment Name: At_14day_Shoots-Roots_Sub_P Parameter: Tissue Value: Roots vs. Whole Plant
  misc_feature: MA Experiment ID: 20000355 Result: Up-regulated in Transcription
  misc_feature: MA Experiment 20000355 PARAMETER Experiment Name: At_Siliques_Sub_P Parameter: Age (day) Value: 21
  misc_feature: MA Experiment 20000355 PARAMETER Experiment Name: At_Siliques_Sub_P Parameter: Organism Value: A. thaliana
  misc_feature: MA Experiment 20000355 PARAMETER Experiment Name: At_Siliques_Sub_P Parameter: Plant Line Value: WS
  misc_feature: MA Experiment 20000355 PARAMETER Experiment Name: At_Siliques_Sub_P Parameter: Tissue Value: Less Than 5mm Siliques vs. Whole Plant
  misc_feature: MA Experiment ID: 20000634 Result: Down-regulated in Transcription
  misc_feature: MA Experiment 20000634 PARAMETER Experiment Name: At_10percent_PEG_Sub_P Parameter: Age (day) Value: 12
  misc_feature: MA Experiment 20000634 PARAMETER Experiment Name: At_10percent_PEG_Sub_P Parameter: Organism Value: A. thaliana
  misc_feature: MA Experiment 20000634 PARAMETER Experiment Name: At_10percent_PEG_Sub_P Parameter: Plant Line Value: WS
  misc_feature: MA Experiment 20000634 PARAMETER Experiment Name: At_10percent_PEG_Sub_P Parameter: Timepoint (day) Value: 12
  misc_feature: MA Experiment 20000634 PARAMETER Experiment Name: At_10percent_PEG_Sub_P Parameter: Tissue Value: Whole Plant
  misc_feature: MA Experiment 20000634 PARAMETER Experiment Name: At_10percent_PEG_Sub_P Parameter: Treatment Value: 10% PEG vs. No Treatment
atgaaagaccatattcatgagcatgaccacatggttcagatttgtggggaagtttcatcaggagaaacaagcttggtgggcatcaagaagacatgtggagaagcgccttgcggattctcagatgccaagaccagttcaatagaagctcaagagcgtgcagcatcaatgagaaagctattaatagctgttcttctctgtgccattttcatagttgtagaagtcgttggaggaatcaaggccaacagtcttgcgattctcacagatgcagctcatctgttatctgatgttgcagcctttgcaatatctttgttctcgctctgggcttcgggatggaaggcaaaccctcagcaatcttatgggtttttcagaatagagattcttggtgctcttgtctccattcaaatgatttggcttcttgctggtatcttggtttatgaagccattgttagacttaacaacggtagtggtgaagtggagggatctcttatgtttgctgtctctgcagttggcttacttgtgaacattgcaatggctattctgttaggtcatgaccatggtcatggtcatggtcatagtcatgacaatggtcacggtcatagtcatgatcatggccatggaatagccgcaaccgagcatcatcatgactctggtcatgatgaatcacaactatctgatgtcttaatcgagcaaaagaagcagcgtaatgtaaatattcaaggggcttatcttcacgtgctgggagattcgatacagagcgtaggagtgatgataggaggagcaatcatatggtataagccggagtggaagatccttgatttgatatgcacattggttttctctgtgattgtgttagggacaacaattgggatgcttaggaacattctagaggttttaatggagtcaacaccacgagagattgacccgacaatgcttgaaaagggagtgtgtgaaattgaagaagtggtggctgttcatgagcttcacatttgggcgattactgtcggcaaacttttgttggcatgtcatgttaaaatcagacctgaggcagaggcagatatggttttggacaagattatcgattacattaagagggaacacaacattagtcacgtgactattcagatcgaacgtcaatga

SEQ ID NO: 82706 - protein, 378 aa, Arabidopsis thaliana
  peptide (1)..(378): Ceres Seq. ID no. 12667018
  misc_feature (59)..(378): Pfam Name: Cation efflux family Pfam Description: Cation efflux family
  misc_feature (1)..(378): Homolog of NCBI NO: 15231581 NR Description: zinc transporter -like protein; protein id:
  misc_feature (1)..(219): Homolog of NCBI NO: 15226441 NR Description: putative zinc transporter; protein id: supported by cDNA: 207558., supported by cDNA: gi_4206639
  misc_feature (183)..(377): Homolog of NCBI NO: 15226441 NR Description: putative zinc transporter; protein id: supported by cDNA: 207558., supported by cDNA: gi_4206639
  misc_feature (1)..(221): Homolog of NCBI NO: 40287446 NR Description: heavy metal transporter MTP1 [Arabis shortii]
  misc_feature (182)..(377): Homolog of NCBI NO: 40287446 NR Description: heavy metal transporter MTP1 [Arabis shortii]
  misc_feature (1)..(219): Homolog of NCBI NO: 4206640 NR Description: zinc transporter ZAT [Arabidopsis thaliana]
  misc_feature (182)..(377): Homolog of NCBI NO: 4206640 NR Description: zinc transporter ZAT [Arabidopsis thaliana]
  misc_feature (1)..(219): Homolog of NCBI NO: 16550925 NR Description: zinc transporter [Eucalyptus grandis]
  misc_feature (183)..(378): Homolog of NCBI NO: 16550925 NR Description: zinc transporter [Eucalyptus grandis]
  misc_feature (1)..(218): Homolog of NCBI NO: 30420736 NR Description: zinc transporter [Oryza sativa (japonica
MKDHIHEHDHMVQICGEVSSGETSLVGIKKTCGEAPCGFSDAKTSSIEAQERAASMRKLLIAVLLCAIFIVVEVVGGIKANSLAILTDAAHLLSDVAAFAISLFSLWASGWKANPQQSYGFFRIEILGALVSIQMIWLLAGILVYEAIVRLNNGSGEVEGSLMFAVSAVGLLVNIAMAILLGHDHGHGHGHSHDNGHGHSHDHGHGIAATEHHHDSGHDESQLSDVLIEQKKQRNVNIQGAYLHVLGDSIQSVGVMIGGAIIWYKPEWKILDLICTLVFSVIVLGTTIGMLRNILEVLMESTPREIDPTMLEKGVCEIEEVVAVHELHIWAITVGKLLLACHVKIRPEAEADMVLDKIIDYIKREHNISHVTIQIERQ

SEQ ID NO: 82707 - protein, 368 aa, Arabidopsis thaliana
  peptide (1)..(368): Ceres Seq. ID no. 12667019
  misc_feature (49)..(368): Pfam Name: Cation efflux family Pfam Description: Cation efflux family
  misc_feature (1)..(368): Homolog of NCBI NO: 15231581 NR Description: zinc transporter -like protein; protein id:
  misc_feature (1)..(209): Homolog of NCBI NO: 15226441 NR Description: putative zinc transporter; protein id: supported by cDNA: 207558., supported by cDNA: gi_4206639
  misc_feature (173)..(367): Homolog of NCBI NO: 15226441 NR Description: putative zinc transporter; protein id: supported by cDNA: 207558., supported by cDNA: gi_4206639
  misc_feature (1)..(211): Homolog of NCBI NO: 40287446 NR Description: heavy metal transporter MTP1 [Arabis shortii]
  misc_feature (172)..(367): Homolog of NCBI NO: 40287446 NR Description: heavy metal transporter MTP1 [Arabis shortii]
  misc_feature (1)..(209): Homolog of NCBI NO: 4206640 NR Description: zinc transporter ZAT [Arabidopsis thaliana]
  misc_feature (172)..(367): Homolog of NCBI NO: 4206640 NR Description: zinc transporter ZAT [Arabidopsis thaliana]
  misc_feature (1)..(209): Homolog of NCBI NO: 16550925 NR Description: zinc transporter [Eucalyptus grandis]
  misc_feature (173)..(368): Homolog of NCBI NO: 16550925 NR Description: zinc transporter [Eucalyptus grandis]
  misc_feature (1)..(208): Homolog of NCBI NO: 30420736 NR Description: zinc transporter [Oryza sativa (japonica
MVQICGEVSSGETSLVGIKKTCGEAPCGFSDAKTSSIEAQERAASMRKLLIAVLLCAIFIVVEVVGGIKANSLAILTDAAHLLSDVAAFAISLFSLWASGWKANPQQSYGFFRIEILGALVSIQMIWLLAGILVYEAIVRLNNGSGEVEGSLMFAVSAVGLLVNIAMAILLGHDHGHGHGHSHDNGHGHSHDHGHGIAATEHHHDSGHDESQLSDVLIEQKKQRNVNIQGAYLHVLGDSIQSVGVMIGGAIIWYKPEWKILDLICTLVFSVIVLGTTIGMLRNILEVLMESTPREIDPTMLEKGVCEIEEVVAVHELHIWAITVGKLLLACHVKIRPEAEADMVLDKIIDYIKREHNISHVTIQIERQ

SEQ ID NO: 82708 - protein, 323 aa, Arabidopsis thaliana
  peptide (1)..(323): Ceres Seq. ID no. 12667020
  misc_feature (4)..(323): Pfam Name: Cation efflux family Pfam Description: Cation efflux family
  misc_feature (1)..(323): Homolog of NCBI NO: 15231581 NR Description: zinc transporter -like protein; protein id:
  misc_feature (1)..(164): Homolog of NCBI NO: 15226441 NR Description: putative zinc transporter; protein id: supported by cDNA: 207558., supported by cDNA: gi_4206639
  misc_feature (128)..(322): Homolog of NCBI NO: 15226441 NR Description: putative zinc transporter; protein id: supported by cDNA: 207558., supported by cDNA: gi_4206639
  misc_feature (1)..(166): Homolog of NCBI NO: 40287446 NR Description: heavy metal transporter MTP1 [Arabis shortii]
  misc_feature (127)..(322): Homolog of NCBI NO: 40287446 NR Description: heavy metal transporter MTP1 [Arabis shortii]
  misc_feature (1)..(164): Homolog of NCBI NO: 4206640 NR Description: zinc transporter ZAT [Arabidopsis thaliana]
  misc_feature (127)..(322): Homolog of NCBI NO: 4206640 NR Description: zinc transporter ZAT [Arabidopsis thaliana]
  misc_feature (1)..(164): Homolog of NCBI NO: 16550925 NR Description: zinc transporter [Eucalyptus grandis]
  misc_feature (128)..(323): Homolog of NCBI NO: 16550925 NR Description: zinc transporter [Eucalyptus grandis]
  misc_feature (1)..(163): Homolog of NCBI NO: 30420736 NR Description: zinc transporter [Oryza sativa (japonica
MRKLLIAVLLCAIFIVVEVVGGIKANSLAILTDAAHLLSDVAAFAISLFSLWASGWKANPQQSYGFFRIEILGALVSIQMIWLLAGILVYEAIVRLNNGSGEVEGSLMFAVSAVGLLVNIAMAILLGHDHGHGHGHSHDNGHGHSHDHGHGIAATEHHHDSGHDESQLSDVLIEQKKQRNVNIQGAYLHVLGDSIQSVGVMIGGAIIWYKPEWKILDLICTLVFSVIVLGTTIGMLRNILEVLMESTPREIDPTMLEKGVCEIEEVVAVHELHIWAITVGKLLLACHVKIRPEAEADMVLDKIIDYIKREHNISHVTIQIERQ

SEQ ID NO: 82709 - DNA, 4087 bp, Arabidopsis thaliana
  misc_feature (1)..(4087): Ceres Seq. ID no. 12667035
  misc_feature: MA Experiment ID: 20000315 Result: Down-regulated in Transcription
  misc_feature: MA Experiment 20000315 PARAMETER Experiment Name: At_14day_Shoots-Roots_Sub_P Parameter: Age (day) Value: 14
  misc_feature: MA Experiment 20000315 PARAMETER Experiment Name: At_14day_Shoots-Roots_Sub_P Parameter: Organism Value: A. thaliana
  misc_feature: MA Experiment 20000315 PARAMETER Experiment Name: At_14day_Shoots-Roots_Sub_P Parameter: Plant Line Value: WS
  misc_feature: MA Experiment 20000315 PARAMETER Experiment Name: At_14day_Shoots-Roots_Sub_P Parameter: Tissue Value: Shoots vs. Whole Plant
  misc_feature: MA Experiment ID: 20000328 Result: Down-regulated in Transcription
  misc_feature: MA Experiment 20000328 PARAMETER Experiment Name: At_42deg_Heat_Sub_P Parameter: Age (day) Value: 14
  misc_feature: MA Experiment 20000328 PARAMETER Experiment Name: At_42deg_Heat_Sub_P Parameter: Organism Value: A. thaliana
  misc_feature: MA Experiment 20000328 PARAMETER Experiment Name: At_42deg_Heat_Sub_P Parameter: Plant Line Value: WS
  misc_feature: MA Experiment 20000328 PARAMETER Experiment Name: At_42deg_Heat_Sub_P Parameter: Temperature (deg C) Value: 42 vs. 22
  misc_feature: MA Experiment 20000328 PARAMETER Experiment Name: At_42deg_Heat_Sub_P Parameter: Timepoint (hr) Value: 6
  misc_feature: MA Experiment 20000328 PARAMETER Experiment Name: At_42deg_Heat_Sub_P Parameter: Tissue Value: Aerial
  misc_feature: MA Experiment ID: 20000329 Result: Down-regulated in Transcription
  misc_feature: MA Experiment 20000329 PARAMETER Experiment Name: At_4deg_Cold_Sub_P Parameter: Age (day) Value: 14
  misc_feature: MA Experiment 20000329 PARAMETER Experiment Name: At_4deg_Cold_Sub_P Parameter: Organism Value: A. thaliana
  misc_feature: MA Experiment 20000329 PARAMETER Experiment Name: At_4deg_Cold_Sub_P Parameter: Plant Line Value: WS
  misc_feature: MA Experiment 20000329 PARAMETER Experiment Name: At_4deg_Cold_Sub_P Parameter: Temperature (deg C) Value: 4 vs. 22
  misc_feature: MA Experiment 20000329 PARAMETER Experiment Name: At_4deg_Cold_Sub_P Parameter: Timepoint (hr) Value: 6
  misc_feature: MA Experiment 20000329 PARAMETER Experiment Name: At_4deg_Cold_Sub_P Parameter: Tissue Value: Aerial
aagaagtagcagaacaatggcgacttctcagcaatttttaaaccctacactcttcaaatccttagcttcctcaaacaaaaactcatgtactctctgcccatctcctttcttgcaactcaagtccgcctccacaattttcaattacaaaccacttacttcctcctccgccacgatcatcacacgcgtcgctgcatcatcctccgattcaggcgagtcaataaccagagagactttccacggcctctgcttcgtcttgaaagacaacatcgacaccgatcaaataatccccgccgagtacggcactctcatcccttcgattccagaagatcgcgagaaactcggctctttcgcgcttaacggcttaccaaaattctacaacgaacgtttcgttgttccaggagagatgaaatcaaagtactcagtcatcatcggcggcgataatttcggttgcggatcttcccgcgaacacgctccagtttgtctcggcgcggcgggagctaaagctgtggtggcggaatcgtacgctaggatctttttcaggaactgtgtagctacaggtgagattttcccgttggaatcggaggttaggatttgcgacgagtgcaaaacaggggatgtggtgacaatcgaacacaaggaagacggtagtagtttgctgatcaatcatacgacgaggaaagaatacaaactgaaaccgctcggtgatgccggtccggtgatcgacgccggtggaatcttcgcttatgcaagaaaagccggcatgattccttctgcttgaatgtaatcggatccataatttatcggttctgagtttaatccggtttggtttatttggttcgagaaccggtactaacgaaataaattattaccaaaccaaaatttcttctggttcgactttgtttgccacgtggaaacagcgatataaacaagtgcccaaaaaggcttgcaatggtttttgtacaagaccttcgttttcttcaatgttcctcttttcttagatgcatttgcatgtcctctcgaactgaaagtttaaggttcttcttctgccttcgcatctgtactaagtgggtgaatgttagttgaatttgtggtttgaagtctcaattgaaattaactgagtagtgaaaggggttttctagggtttgacaagaggatggataggattagcaatctaccaaatgagatcatttgtcacattgtatctttcctttcggcaaaggaagctgctttcgcatcgattctgtcaaagaggtggcggaatctctttaccattgtaataaaacttcagtttgatgactcagtcaagaatgaagggagtttgaaggattttgtcgatggagtattggctctgcctaccagttctcgtgtaaggagttgctctctagaatgtcgaagagagtttgatccgactcattatgatgatttcaatcgttgtatatgtgctttgctgaagcgtggtatcttggatcttaaactagacatatgtgctgggagacgatattcactaccacttgaggttttcacttgcaaaacactcgttaagctggaacttgggagtgattttggtggctttgttgttgatcttgtccctgaggatgcttttctaccagcgcttgagaccctccttcttaactatattcggtttaaagatctccgccgttgtgcgtttgaaaagcttctttctgcttgccttgtgctcaaggaactagtcatacataatatggagtgggaacgttggaaatggtctggcaacatatccagtccaacccttgaaagacttactattagtcatgtagatctctatgagtgtgagtttacgagaataaatttagatactccgaatcttacctatttagagttgtctgatgctgtaccggatgactatccaattgttaatcttgactcccttgttgaagttaagctcgatcttacgttgatggtagatcacaagtaccatggatatgtagatgacaacgacacgatttctagcaatccaacaaatctgattaatgggttaagaaatgttgaaatcatgaacttgcaatctcctaatacttttcaggcattttcttacttccatgaagcaataccggtgtttaaaaacctttatcatttaactatcacaaataatgatactgtaattgggttctgttgggaatttctaccatttgtgataaagaagtgtccaaatctaaagactcttgtcatcgatggtccattgcactacaatgaagaccgacccaaatctgtttgccactgtttgtcgggatattctttcttattgtcatgtcctttagaggtcttacagataaccgactatagtggaactcctggagaggtggagcaattgaagcattttctagagaaactgtccggtctcaagttggtgaaacttcattctcttacaagatttggtagcgacaagaaaaagttattaatgcttcccagagcttcctctaagtgcaagatcaagcattatgattctctagagaatgctcttcttccatcgctcaagactctcattcttgattcagttaagttctatgatcgttgtggttgttgtgcattccaaaagcttctttctgcttgccctgtgcttgtggaatcagtgatgcgtaatctggaatgggaagattgggaatggtctggctgtgcgtccagtcaaacccttgagagacttactattgaccatagatattgggctgaacataacttggagagctttacttttgatactccgagtcttacctacttagactacaatgctcatgttccgggatcgtatccaactgttaatcttgactcccttgtcgaggctaagctcaatcttggttttacaactgatcttgtagaagatgatgacgatccctttaccagcgatccaaccaatctaatcaaagggttaagaaatgttgagatcttgagactatggatcgtcgtttgtaacgagtttaaatctcgtgtacagaaggtggatcttgtcagcaatctacctgaagaggttcggtgccatatcttgtccttccttcccaccaagcacgctgctttgacttcggttctctcaaagagctggctcaatctgtggaaactagtccctaatcttgacatcgatgactctgaatttcttcttccagaagaggaaatccctgagatattcctcagtaggacactagttgagctgaaaataagaagtgaacgttatgttgattggtggcgtagagatagaggcactgtcttaccaatgcttaagactcttgacattgactcagaatctattcattgtggtacgattgatatgtttctaccttctttccctgtgcttgagtatttacgaatggctaatatggagtggacagagtcggatgaaaccgtgtcaagtgcaaccatcaagctgctaagtattcatggcaccgttgccgaggactatccattagttaacatgaaggcattatttgaggctcgaatcaactttatagttactgaaaaacaaatcaagcgagtaagagcaccaaatgaagattggttacaagatgatgaagttgatgttgttctccgattcagcaatgtggtgaagctcatgaatggcatacaaaatgttcagaaactttacttaactgctgatactatcgaggtgctttctctgtgctgtgaatcggtgccgctgttcaacaacctcaaaacattaggtatcacgagtgaggagggacgaggatggcaagcgatgccagttcttggtctcttacactatatgacggataaatgtggggatgcttgtgattgcatttctcgggaagacaaaggtcgttcgcttacatcttgtccagtgaagaagttagagattcgagggtttagaggaacaatgaaagagatgacaatgataaagcatttcttggtctactttccgtgtctgaaggagatgaacatctatgttgaggagtatgatcctacagagctcagattccctcaagtgtctaaagttatcatacagatgatggaagagtacaacaagttatcgagttgcaatgttcagctccttataactgattatttgtctgaaaagtggactgcagcaggaagaattctctga

SEQ ID NO: 82710 - protein, 977 aa, Arabidopsis thaliana
  peptide (1)..(977): Ceres Seq. ID no. 12667036
  misc_feature (763)..(977): Homolog of NCBI NO: 26450586 NR Description: unknown protein [Arabidopsis thaliana]
  misc_feature (1)..(359): Homolog of NCBI NO: 15231605 NR Description: putative protein; protein id: At3g58960.1
  misc_feature (359)..(438): Homolog of NCBI NO: 15231605 NR Description: putative protein; protein id: At3g58960.1
  misc_feature (1)..(440): Homolog of NCBI NO: 15228758 NR Description: F-box protein; protein id: At3g62440.1
  misc_feature (738)..(971): Homolog of NCBI NO: 30694890 NR Description: F-box protein family [Arabidopsis thaliana] unknown protein [Arabidopsis thaliana]
  misc_feature (651)..(766): Homolog of NCBI NO: 30694890 NR Description: F-box protein family [Arabidopsis thaliana] unknown protein [Arabidopsis thaliana]
  misc_feature (756)..(977): Homolog of NCBI NO: 15231582 NR Description: putative protein; protein id: At3g58820.1
  misc_feature (1)..(166): Homolog of NCBI NO: 15231582 NR Description: putative protein; protein id: At3g58820.1
  misc_feature (1)..(442): Homolog of NCBI NO: 15242348 NR Description: putative protein (fragment at BAC end); protein
  misc_feature (1)..(440): Homolog of NCBI NO: 11358129 NR Description: hypothetical protein T20K14_230 - Arabidopsis (fragment) >gi|9755817|emb|CAC01761.1| putative protein (fragment
MDRISNLPNEIICHIVSFLSAKEAAFASILSKRWRNLFTIVIKLQFDDSVKNEGSLKDFVDGVLALPTSSRVRSCSLECRREFDPTHYDDFNRCICALLKRGILDLKLDICAGRRYSLPLEVFTCKTLVKLELGSDFGGFVVDLVPEDAFLPALETLLLNYIRFKDLRRCAFEKLLSACLVLKELVIHNMEWERWKWSGNISSPTLERLTISHVDLYECEFTRINLDTPNLTYLELSDAVPDDYPIVNLDSLVEVKLDLTLMVDHKYHGYVDDNDTISSNPTNLINGLRNVEIMNLQSPNTFQAFSYFHEAIPVFKNLYHLTITNNDTVIGFCWEFLPFVIKKCPNLKTLVIDGPLHYNEDRPKSVCHCLSGYSFLLSCPLEVLQITDYSGTPGEVEQLKHFLEKLSGLKLVKLHSLTRFGSDKKKLLMLPRASSKCKIKHYDSLENALLPSLKTLILDSVKFYDRCGCCAFQKLLSACPVLVESVMRNLEWEDWEWSGCASSQTLERLTIDHRYWAEHNLESFTFDTPSLTYLDYNAHVPGSYPTVNLDSLVEAKLNLGFTTDLVEDDDDPFTSDPTNLIKGLRNVEILRLWIVVCNEFKSRVQKVDLVSNLPEEVRCHILSFLPTKHAALTSVLSKSWLNLWKLVPNLDIDDSEFLLPEEEIPEIFLSRTLVELKIRSERYVDWWRRDRGTVLPMLKTLDIDSESIHCGTIDMFLPSFPVLEYLRMANMEWTESDETVSSATIKLLSIHGTVAEDYPLVNMKALFEARINFIVTEKQIKRVRAPNEDWLQDDEVDVVLRFSNVVKLMNGIQNVQKLYLTADTIEVLSLCCESVPLFNNLKTLGITSEEGRGWQAMPVLGLLHYMTDKCGDACDCISREDKGRSLTSCPVKKLEIRGFRGTMKEMTMIKHFLVYFPCLKEMNIYVEEYDPTELRFPQVSKVIIQMMEEYNKLSSCNVQLLITDYLSEKWTAAGRIL

SEQ ID NO: 82711 - protein, 788 aa, Arabidopsis thaliana
  peptide (1)..(788): Ceres Seq. ID no. 12667037
  misc_feature (574)..(788): Homolog of NCBI NO: 26450586 NR Description: unknown protein [Arabidopsis thaliana]
  misc_feature (1)..(170): Homolog of NCBI NO: 15231605 NR Description: putative protein; protein id: At3g58960.1
  misc_feature (170)..(249): Homolog of NCBI NO: 15231605 NR Description: putative protein; protein id: At3g58960.1
  misc_feature (1)..(251): Homolog of NCBI NO: 15228758 NR Description: F-box protein; protein id: At3g62440.1
  misc_feature (549)..(782): Homolog of NCBI NO: 30694890 NR Description: F-box protein family [Arabidopsis thaliana] unknown protein [Arabidopsis thaliana]
  misc_feature (462)..(577): Homolog of NCBI NO: 30694890 NR Description: F-box protein family [Arabidopsis thaliana] unknown protein [Arabidopsis thaliana]
  misc_feature (567)..(788): Homolog of NCBI NO: 15231582 NR Description: putative protein; protein id: At3g58820.1
  misc_feature (1)..(253): Homolog of NCBI NO: 15242348 NR Description: putative protein (fragment at BAC end); protein
  misc_feature (1)..(251): Homolog of NCBI NO: 11358129 NR Description: hypothetical protein T20K14_230 - Arabidopsis (fragment) >gi|9755817|emb|CAC01761.1| putative protein (fragment
  misc_feature (1)..(172): Homolog of NCBI NO: 15231601 NR Description: putative protein; protein id: At3g58920.1
MEWERWKWSGNISSPTLERLTISHVDLYECEFTRINLDTPNLTYLELSDAVPDDYPIVNLDSLVEVKLDLTLMVDHKYHGYVDDNDTISSNPTNLINGLRNVEIMNLQSPNTFQAFSYFHEAIPVFKNLYHLTITNNDTVIGFCWEFLPFVIKKCPNLKTLVIDGPLHYNEDRPKSVCHCLSGYSFLLSCPLEVLQITDYSGTPGEVEQLKHFLEKLSGLKLVKLHSLTRFGSDKKKLLMLPRASSKCKIKHYDSLENALLPSLKTLILDSVKFYDRCGCCAFQKLLSACPVLVESVMRNLEWEDWEWSGCASSQTLERLTIDHRYWAEHNLESFTFDTPSLTYLDYNAHVPGSYPTVNLDSLVEAKLNLGFTTDLVEDDDDPFTSDPTNLIKGLRNVEILRLWIVVCNEFKSRVQKVDLVSNLPEEVRCHILSFLPTKHAALTSVLSKSWLNLWKLVPNLDIDDSEFLLPEEEIPEIFLSRTLVELKIRSERYVDWWRRDRGTVLPMLKTLDIDSESIHCGTIDMFLPSFPVLEYLRMANMEWTESDETVSSATIKLLSIHGTVAEDYPLVNMKALFEARINFIVTEKQIKRVRAPNEDWLQDDEVDVVLRFSNVVKLMNGIQNVQKLYLTADTIEVLSLCCESVPLFNNLKTLGITSEEGRGWQAMPVLGLLHYMTDKCGDACDCISREDKGRSLTSCPVKKLEIRGFRGTMKEMTMIKHFLVYFPCLKEMNIYVEEYDPTELRFPQVSKVIIQMMEEYNKLSSCNVQLLITDYLSEKWTAAGRIL

SEQ ID NO: 82712 - protein, 716 aa, Arabidopsis thaliana
  peptide (1)..(716): Ceres Seq. ID no. 12667038
  misc_feature (502)..(716): Homolog of NCBI NO: 26450586 NR Description: unknown protein [Arabidopsis thaliana]
  misc_feature (1)..(98): Homolog of NCBI NO: 15231605 NR Description: putative protein; protein id: At3g58960.1
  misc_feature (98)..(177): Homolog of NCBI NO: 15231605 NR Description: putative protein; protein id: At3g58960.1
  misc_feature (1)..(179): Homolog of NCBI NO: 15228758 NR Description: F-box protein; protein id: At3g62440.1
  misc_feature (477)..(710): Homolog of NCBI NO: 30694890 NR Description: F-box protein family [Arabidopsis thaliana] unknown protein [Arabidopsis thaliana]
  misc_feature (390)..(505): Homolog of NCBI NO: 30694890 NR Description: F-box protein family [Arabidopsis thaliana] unknown protein [Arabidopsis thaliana]
  misc_feature (495)..(716): Homolog of NCBI NO: 15231582 NR Description: putative protein; protein id: At3g58820.1
  misc_feature (1)..(181): Homolog of NCBI NO: 15242348 NR Description: putative protein (fragment at BAC end); protein
  misc_feature (1)..(179): Homolog of NCBI NO: 11358129 NR Description: hypothetical protein T20K14_230 - Arabidopsis (fragment) >gi|9755817|emb|CAC01761.1| putative protein (fragment
  misc_feature (1)..(100): Homolog of NCBI NO: 15231601 NR Description: putative protein; protein id: At3g58920.1
MVDHKYHGYVDDNDTISSNPTNLINGLRNVEIMNLQSPNTFQAFSYFHEAIPVFKNLYHLTITNNDTVIGFCWEFLPFVIKKCPNLKTLVIDGPLHYNEDRPKSVCHCLSGYSFLLSCPLEVLQITDYSGTPGEVEQLKHFLEKLSGLKLVKLHSLTRFGSDKKKLLMLPRASSKCKIKHYDSLENALLPSLKTLILDSVKFYDRCGCCAFQKLLSACPVLVESVMRNLEWEDWEWSGCASSQTLERLTIDHRYWAEHNLESFTFDTPSLTYLDYNAHVPGSYPTVNLDSLVEAKLNLGFTTDLVEDDDDPFTSDPTNLIKGLRNVEILRLWIVVCNEFKSRVQKVDLVSNLPEEVRCHILSFLPTKHAALTSVLSKSWLNLWKLVPNLDIDDSEFLLPEEEIPEIFLSRTLVELKIRSERYVDWWRRDRGTVLPMLKTLDIDSESIHCGTIDMFLPSFPVLEYLRMANMEWTESDETVSSATIKLLSIHGTVAEDYPLVNMKALFEARINFIVTEKQIKRVRAPNEDWLQDDEVDVVLRFSNVVKLMNGIQNVQKLYLTADTIEVLSLCCESVPLFNNLKTLGITSEEGRGWQAMPVLGLLHYMTDKCGDACDCISREDKGRSLTSCPVKKLEIRGFRGTMKEMTMIKHFLVYFPCLKEMNIYVEEYDPTELRFPQVSKVIIQMMEEYNKLSSCNVQLLITDYLSEKWTAAGRIL

SEQ ID NO: 82713 - DNA, 2032 bp, Arabidopsis thaliana
  misc_feature (1)..(2032): Ceres Seq. ID no. 12667043
  misc_feature: MA Experiment ID: 20000185 Result: Down-regulated in Transcription
  misc_feature: MA Experiment 20000185 PARAMETER Experiment Name: At_Roots__P Parameter: Age (day) Value: 7 vs. 21
  misc_feature: MA Experiment 20000185 PARAMETER Experiment Name: At_Roots__P Parameter: Organism Value: A. thaliana
  misc_feature: MA Experiment 20000185 PARAMETER Experiment Name: At_Roots__P Parameter: Tissue Value: Roots vs. Whole Plant
  misc_feature: MA Experiment ID: 20000227 Result: Down-regulated in Transcription
  misc_feature: MA Experiment 20000227 PARAMETER Experiment Name: At_Root-Tips-vs-Tops_P Parameter: Tissue Value: Root Tips vs. Root Tops
  misc_feature: MA Experiment ID: 20000234 Result: Down-regulated in Transcription
  misc_feature: MA Experiment 20000234 PARAMETER Experiment Name: At_Siliques_P Parameter: Age (day) Value: 21
  misc_feature: MA Experiment 20000234 PARAMETER Experiment Name: At_Siliques_P Parameter: Organism Value: A. thaliana
  misc_feature: MA Experiment 20000234 PARAMETER Experiment Name: At_Siliques_P Parameter: Plant Line Value: WS
  misc_feature: MA Experiment 20000234 PARAMETER Experiment Name: At_Siliques_P Parameter: Tissue Value: Less Than 5mm Siliques vs. Whole Plant
  misc_feature: MA Experiment ID: 20000235 Result: Down-regulated in Transcription
  misc_feature: MA Experiment 20000235 PARAMETER Experiment Name: At_Siliques_P Parameter: Age (day) Value: 21
  misc_feature: MA Experiment 20000235 PARAMETER Experiment Name: At_Siliques_P Parameter: Organism Value: A. thaliana
  misc_feature: MA Experiment 20000235 PARAMETER Experiment Name: At_Siliques_P Parameter: Plant Line Value: WS
  misc_feature: MA Experiment 20000235 PARAMETER Experiment Name: At_Siliques_P Parameter: Tissue Value: 5-10mm Siliques vs. Whole Plant
  misc_feature: MA Experiment ID: 20000264 Result: Down-regulated in Transcription
  misc_feature: MA Experiment 20000264 PARAMETER Experiment Name: At_Open_Flower_P Parameter: Age (day) Value: 21
  misc_feature: MA Experiment 20000264 PARAMETER Experiment Name: At_Open_Flower_P Parameter: Plant Line Value: WS
  misc_feature: MA Experiment 20000264 PARAMETER Experiment Name: At_Open_Flower_P Parameter: Tissue Value: Open Flower vs. Whole Plant
  misc_feature: MA Experiment ID: 20000265 Result: Down-regulated in Transcription
  misc_feature: MA Experiment 20000265 PARAMETER Experiment Name: At_Open_Flower_P Parameter: Age (day) Value: 21
  misc_feature: MA Experiment 20000265 PARAMETER Experiment Name: At_Open_Flower_P Parameter: Plant Line Value: WS
  misc_feature: MA Experiment 20000265 PARAMETER Experiment Name: At_Open_Flower_P Parameter: Tissue Value: Closed Flower vs. Whole Plant
  misc_feature: MA Experiment ID: 20000268 Result: Down-regulated in Transcription
  misc_feature: MA Experiment 20000268 PARAMETER Experiment Name: At_100mM_NaCl__P Parameter: Age (day) Value: 14
  misc_feature: MA Experiment 20000268 PARAMETER Experiment Name: At_100mM_NaCl__P Parameter: Organism Value: A. thaliana
  misc_feature: MA Experiment 20000268 PARAMETER Experiment Name: At_100mM_NaCl__P Parameter: Plant Line Value: WS
  misc_feature: MA Experiment 20000268 PARAMETER Experiment Name: At_100mM_NaCl__P Parameter: Timepoint (hr) Value: 6
  misc_feature: MA Experiment 20000268 PARAMETER Experiment Name: At_100mM_NaCl__P Parameter: Tissue Value: Whole Plant
  misc_feature: MA Experiment 20000268 PARAMETER Experiment Name: At_100mM_NaCl__P Parameter: Treatment Value: 100mM NaCl vs. No Treatment
  misc_feature: MA Experiment ID: 20000286 Result: Down-regulated in Transcription
  misc_feature: MA Experiment 20000286 PARAMETER Experiment Name: At_Open_Flower_P Parameter: Age (day) Value: 21
  misc_feature: MA Experiment 20000286 PARAMETER Experiment Name: At_Open_Flower_P Parameter: Plant Line Value: WS
  misc_feature: MA Experiment 20000286 PARAMETER Experiment Name: At_Open_Flower_P Parameter: Tissue Value: Half Open vs. Whole Plant
  misc_feature: MA Experiment ID: 20000437 Result: Down-regulated in Transcription
  misc_feature: MA Experiment 20000437 PARAMETER Experiment Name: At_Drought_P Parameter: Age (day) Value: 8
  misc_feature: MA Experiment 20000437 PARAMETER Experiment Name: At_Drought_P Parameter: Organism Value: A. thaliana
  misc_feature: MA Experiment 20000437 PARAMETER Experiment Name: At_Drought_P Parameter: Plant Line Value: WS
  misc_feature: MA Experiment 20000437 PARAMETER Experiment Name: At_Drought_P Parameter: Timepoint (hr) Value: 24
  misc_feature: MA Experiment 20000437 PARAMETER Experiment Name: At_Drought_P Parameter: Tissue Value: Whole Plant
  misc_feature: MA Experiment 20000437 PARAMETER Experiment Name: At_Drought_P Parameter: Treatment Value: Drought vs. No Drought
  misc_feature: MA Experiment ID: 20000438 Result: Down-regulated in Transcription
  misc_feature: MA Experiment 20000438 PARAMETER Experiment Name: At_Shoots__P Parameter: Age (day) Value: 14
  misc_feature: MA Experiment 20000438 PARAMETER Experiment Name: At_Shoots__P Parameter: Tissue Value: Shoots vs. Whole Plant
  misc_feature: MA Experiment ID: 20000439 Result: Down-regulated in Transcription
  misc_feature: MA Experiment 20000439 PARAMETER Experiment Name: At_Roots__P Parameter: Age (day) Value: 14 vs. 21
  misc_feature: MA Experiment 20000439 PARAMETER Experiment Name: At_Roots__P Parameter: Organism Value: A. thaliana
  misc_feature: MA Experiment 20000439 PARAMETER Experiment Name: At_Roots__P Parameter: Tissue Value: Roots vs. Whole Plant
  misc_feature: MA Experiment ID: 20000441 Result: Up-regulated in Transcription
  misc_feature: MA Experiment 20000441 PARAMETER Experiment Name: At_1uM_BR-BRZ__P Parameter: Tissue Value: Shoot Apices
  misc_feature: MA Experiment 20000441 PARAMETER Experiment Name: At_1uM_BR-BRZ__P Parameter: Treatment Value: 1uM BR vs. No Treatment
  misc_feature: MA Experiment ID: 20000443 Result: Up-regulated in Transcription
  misc_feature: MA Experiment 20000443 PARAMETER Experiment Name: At_1uM_BR-BRZ__P Parameter: Tissue Value: Shoot Apices
  misc_feature: MA Experiment 20000443 PARAMETER Experiment Name: At_1uM_BR-BRZ__P Parameter: Treatment Value: 1uM BRZ vs. No Treatment
  misc_feature: MA Experiment ID: 20000460 Result: Up-regulated in Transcription
  misc_feature: MA Experiment 20000460 PARAMETER Experiment Name: At_10percent_PEG_P Parameter: Age (day) Value: 12
  misc_feature: MA Experiment 20000460 PARAMETER Experiment Name: At_10percent_PEG_P Parameter: Organism Value: A. thaliana
  misc_feature: MA Experiment 20000460 PARAMETER Experiment Name: At_10percent_PEG_P Parameter: Plant Line Value: WS
  misc_feature: MA Experiment 20000460 PARAMETER Experiment Name: At_10percent_PEG_P Parameter: Timepoint (day) Value: 12
  misc_feature: MA Experiment 20000460 PARAMETER Experiment Name: At_10percent_PEG_P Parameter: Tissue Value: Whole Plant
  misc_feature: MA Experiment 20000460 PARAMETER Experiment Name: At_10percent_PEG_P Parameter: Treatment Value: 10percent PEG vs. No Treatment
  misc_feature: MA Experiment ID: 20000495 Result: Down-regulated in Transcription
  misc_feature: MA Experiment 20000495 PARAMETER Experiment Name: At_Guard_Cells_P Parameter: Harvest Date Value: 8/2/2002
  misc_feature: MA Experiment 20000495 PARAMETER Experiment Name: At_Guard_Cells_P Parameter: Organism Value: A. thaliana
  misc_feature: MA Experiment 20000495 PARAMETER Experiment Name: At_Guard_Cells_P Parameter: Tissue Value: Guard Cells vs. Leaves
  misc_feature: MA Experiment ID: 20000527 Result: Up-regulated in Transcription
  misc_feature: MA Experiment 20000527 PARAMETER Experiment Name: At_10percent_PEG_P Parameter: Age (day) Value: 20
  misc_feature: MA Experiment 20000527 PARAMETER Experiment Name: At_10percent_PEG_P Parameter: Organism Value: A. thaliana
  misc_feature: MA Experiment 20000527 PARAMETER Experiment Name: At_10percent_PEG_P Parameter: Plant Line Value: WS
  misc_feature: MA Experiment 20000527 PARAMETER Experiment Name: At_10percent_PEG_P Parameter: Timepoint (day) Value: 20
  misc_feature: MA Experiment 20000527 PARAMETER Experiment Name: At_10percent_PEG_P Parameter: Tissue Value: Whole Plant
  misc_feature: MA Experiment 20000527 PARAMETER Experiment Name: At_10percent_PEG_P Parameter: Treatment Value: 10percent PEG vs. No Treatment
  misc_feature: MA Experiment ID: 20000794 Result: Down-regulated in Transcription
  misc_feature: MA Experiment 20000794 PARAMETER Experiment Name: At_Petals_P Parameter: Age (day) Value: 23-25 days
  misc_feature: MA Experiment 20000794 PARAMETER Experiment Name: At_Petals_P Parameter: Plant Line Value: WS
  misc_feature: MA Experiment 20000794 PARAMETER Experiment Name: At_Petals_P Parameter: Tissue Value: Petals vs. Whole plant
  misc_feature: MA Experiment ID: 20001247 Result: Up-regulated in Transcription
  misc_feature: MA Experiment 20001247 PARAMETER Experiment Name: At_Far-red-induction_P Parameter: Age (day) Value: 7
  misc_feature: MA Experiment 20001247 PARAMETER Experiment Name: At_Far-red-induction_P Parameter: Light Value: Far-red vs. White
  misc_feature: MA Experiment 20001247 PARAMETER Experiment Name: At_Far-red-induction_P Parameter: Organism Value: A. thaliana
  misc_feature: MA Experiment 20001247 PARAMETER Experiment Name: At_Far-red-induction_P Parameter: Plant Line Value: Columbia
  misc_feature: MA Experiment 20001247 PARAMETER Experiment Name: At_Far-red-induction_P Parameter: Timepoint (hr) Value: 1
  misc_feature: MA Experiment 20001247 PARAMETER Experiment Name: At_Far-red-induction_P Parameter: Tissue Value: Whole Plant
  misc_feature: MA Experiment ID: 20001904 Result: Down-regulated in Transcription
  misc_feature: MA Experiment 20001904 PARAMETER Experiment Name: At_Drought_Reproduction_P Parameter: Age (day) Value: 37
  misc_feature: MA Experiment 20001904 PARAMETER Experiment Name: At_Drought_Reproduction_P Parameter: Organism Value: A. thaliana
  misc_feature: MA Experiment 20001904 PARAMETER Experiment Name: At_Drought_Reproduction_P Parameter: Plant Line Value: WS
  misc_feature: MA Experiment 20001904 PARAMETER Experiment Name: At_Drought_Reproduction_P Parameter: Timepoint (day) Value: 7
  misc_feature: MA Experiment 20001904 PARAMETER Experiment Name: At_Drought_Reproduction_P Parameter: Tissue Value: Rosettes
  misc_feature: MA Experiment 20001904 PARAMETER Experiment Name: At_Drought_Reproduction_P Parameter: Treatment Value: Drought vs. No Drought
actctgttctttcctcttcttcttcttcttcttcttcttccctctctctaagctttcttaattctcctctattccttcagaaatcaaaatcttaacagtcgaaactaattaaatctttccgaagtaaagacaacttctgcttctgattctgtcacttttagttaacttttctttcccggcgactcaaagcttaattgtcgccggcgattttttgttctcaagcattgatcctaatgttttccaagtacagtttcattctttgtcttattttcttcttcgtcacagcattttccggcgactccagagctcttgctggaaacaatgagcagaagaacatctctggcttttctgggattgactttccaaatccaatgcgtttcggttctgcttcttcttccacaagcaacgattgcggcttctcttcccctgagaaagaacccaccaaggaacggaccggagaaaacaagacggtgaagtttcacttaaagcgccgggagactacgactacagagaaggcaacaacaaattcagttcttgagcttcaaatccgagatctcacaagaattcagacgcttcacaaaagagttttggagaagaacaaccaaaacactgtttcgcagaagcagaagaagaatgataaagaagttgttaccactactccggtggcttcttccgtggaggagcaggctggtcaattggtggcaacacttgagtctggtatgactctcggttctggcgagtacttcatggacgtgttggttggttcgccaccaaaacacttctccttgattcttgatacagggagtgacttaaactggattcaatgcttgccttgctacgactgtttccagcaaaacggtgcgttttatgaccctaaagcctctgcttcttacaagaacataacttgcaatgaccaaagatgcaacctagtctcatcacctgaccctccaatgccctgcaaatcagataaccaatcatgcccttactactactggtatggggatagctccaacactaccggagattttgcagtagagactttcacggttaacctcacgacaaatggagggagctcggagttgtataatgttgaaaatatgatgttcggttgcggtcattggaaccgaggtctcttccatggtgctgcaggcttgcttggtttaggaagaggcccgctttcgttttcctctcagcttcagtctctttatggtcattccttctcttattgccttgtcgacagaaacagcgataccaacgttagtagcaaactgattttcggagaagacaaggatttgttaagtcacccgaatctgaacttcacttcttttgtcgctgggaaagaaaacctcgtcgacacattttactacgtacaaatcaaatccattctagtcgcgggagaagttctaaacatacctgaagaaacatggaatatctcatcagatggagctggagggacgatcattgattcaggtacaaccttaagttacttcgcagaacctgcatatgaattcatcaagaacaagattgctgagaaagctaaagggaagtatccggtctatagagattttccaatcctagatccttgcttcaacgtctctggcattcataacgttcagctgccagagcttgggattgcttttgcagatggcgctgtttggaacttcccgacagagaattctttcatatggttgaatgaggatttggtttgcttggcaatgctaggaactcccaaatcagcattttcaatcattggaaactaccagcagcagaattttcatatactctatgatacaaagaggtctaggctcgggtatgcacctacaaagtgtgcagatatataatctttcttgtcgatttttaagtccatcaaagcaactgaacacacaataagaacagattcatttttttccctttagattttttcattctttaggatattccttcaaacatgtaatgtatttgctgtagaacaaagatcataccaaactaatgtacttattcaaattcatttctgaatacaaagtgatttaat

SEQ ID NO: 82714 - protein, 535 aa, Arabidopsis thaliana
  peptide (1)..(535): Ceres Seq. ID no. 12667044
  misc_feature (114)..(530): Pfam Name: Eukaryotic aspartyl protease Pfam Description: Eukaryotic aspartyl protease
  misc_feature (1)..(535): Homolog of NCBI NO: 15231625 NR Description: putative protein; protein id: At3g59080.1, by cDNA: gi_15983375, supported by cDNA: gi_20466703 [Arabidopsis
  misc_feature (1)..(535): Homolog of NCBI NO: 15228044 NR Description: putative chloroplast nucleoid DNA binding protein id: At2g42980.1 [Arabidopsis thaliana] putative chloroplast nucleoid DNA binding protein [Arabidopsis
  misc_feature (47)..(535): Homolog of NCBI NO: 25408826 NR Description: hypothetical protein At2g42980 [imported] -
  misc_feature (161)..(533): Homolog of NCBI NO: 15230868 NR Description: hypothetical protein; protein id: At3g25700.1
  misc_feature (156)..(532): Homolog of NCBI NO: 15290061 NR Description: nucleoid DNA-binding protein cnd41-like protein
  misc_feature (152)..(532): Homolog of NCBI NO: 15228618 NR Description: putative protein; protein id: At3g61820.1, by cDNA: gi_14532549 [Arabidopsis thaliana]
  misc_feature (146)..(532): Homolog of NCBI NO: 34910676 NR Description: P0690B02.2 [Oryza sativa (japonica
  misc_feature (144)..(338): Homolog of NCBI NO: 38344196 NR Description: OSJNBa0064G10.12 [Oryza sativa (japonica
  misc_feature (368)..(532): Homolog of NCBI NO: 38344196 NR Description: OSJNBa0064G10.12 [Oryza sativa (japonica
  misc_feature (166)..(535): Homolog of NCBI NO: 30678047 NR Description: chloroplast nucleoid DNA binding protein -related
MFSKYSFILCLIFFFVTAFSGDSRALAGNNEQKNISGFSGIDFPNPMRFGSASSSTSNDCGFSSPEKEPTKERTGENKTVKFHLKRRETTTTEKATTNSVLELQIRDLTRIQTLHKRVLEKNNQNTVSQKQKKNDKEVVTTTPVASSVEEQAGQLVATLESGMTLGSGEYFMDVLVGSPPKHFSLILDTGSDLNWIQCLPCYDCFQQNGAFYDPKASASYKNITCNDQRCNLVSSPDPPMPCKSDNQSCPYYYWYGDSSNTTGDFAVETFTVNLTTNGGSSELYNVENMMFGCGHWNRGLFHGAAGLLGLGRGPLSFSSQLQSLYGHSFSYCLVDRNSDTNVSSKLIFGEDKDLLSHPNLNFTSFVAGKENLVDTFYYVQIKSILVAGEVLNIPEETWNISSDGAGGTIIDSGTTLSYFAEPAYEFIKNKIAEKAKGKYPVYRDFPILDPCFNVSGIHNVQLPELGIAFADGAVWNFPTENSFIWLNEDLVCLAMLGTPKSAFSIIGNYQQQNFHILYDTKRSRLGYAPTKCADI

SEQ ID NO: 82715 - protein, 489 aa, Arabidopsis thaliana
  peptide (1)..(489): Ceres Seq. ID no. 12667045
  misc_feature (68)..(484): Pfam Name: Eukaryotic aspartyl protease Pfam Description: Eukaryotic aspartyl protease
  misc_feature (1)..(489): Homolog of NCBI NO: 15231625 NR Description: putative protein; protein id: At3g59080.1, by cDNA: gi_15983375, supported by cDNA: gi_20466703 [Arabidopsis
  misc_feature (1)..(489): Homolog of NCBI NO: 15228044 NR Description: putative chloroplast nucleoid DNA binding protein id: At2g42980.1 [Arabidopsis thaliana] putative chloroplast nucleoid DNA binding protein [Arabidopsis
  misc_feature (1)..(489): Homolog of NCBI NO: 25408826 NR Description: hypothetical protein At2g42980 [imported] -
  misc_feature (115)..(487): Homolog of NCBI NO: 15230868 NR Description: hypothetical protein; protein id: At3g25700.1
  misc_feature (110)..(486): Homolog of NCBI NO: 15290061 NR Description: nucleoid DNA-binding protein cnd41-like protein
  misc_feature (106)..(486): Homolog of NCBI NO: 15228618 NR Description: putative protein; protein id: At3g61820.1, by cDNA: gi_14532549 [Arabidopsis thaliana]
  misc_feature (100)..(486): Homolog of NCBI NO: 34910676 NR Description: P0690B02.2 [Oryza sativa (japonica
  misc_feature (98)..(292): Homolog of NCBI NO: 38344196 NR Description: OSJNBa0064G10.12 [Oryza sativa (japonica
  misc_feature (322)..(486): Homolog of NCBI NO: 38344196 NR Description: OSJNBa0064G10.12 [Oryza sativa (japonica
  misc_feature (120)..(489): Homolog of NCBI NO: 30678047 NR Description: chloroplast nucleoid DNA binding protein -related
MRFGSASSSTSNDCGFSSPEKEPTKERTGENKTVKFHLKRRETTTTEKATTNSVLELQIRDLTRIQTLHKRVLEKNNQNTVSQKQKKNDKEVVTTTPVASSVEEQAGQLVATLESGMTLGSGEYFMDVLVGSPPKHFSLILDTGSDLNWIQCLPCYDCFQQNGAFYDPKASASYKNITCNDQRCNLVSSPDPPMPCKSDNQSCPYYYWYGDSSNTTGDFAVETFTVNLTTNGGSSELYNVENMMFGCGHWNRGLFHGAAGLLGLGRGPLSFSSQLQSLYGHSFSYCLVDRNSDTNVSSKLIFGEDKDLLSHPNLNFTSFVAGKENLVDTFYYVQIKSILVAGEVLNIPEETWNISSDGAGGTIIDSGTTLSYFAEPAYEFIKNKIAEKAKGKYPVYRDFPILDPCFNVSGIHNVQLPELGIAFADGAVWNFPTENSFIWLNEDLVCLAMLGTPKSAFSIIGNYQQQNFHILYDTKRSRLGYAPTKCADI

SEQ ID NO: 82716 - protein, 373 aa, Arabidopsis thaliana
  peptide (1)..(373): Ceres Seq. ID no. 12667046
  misc_feature (1)..(368): Pfam Name: Eukaryotic aspartyl protease Pfam Description: Eukaryotic aspartyl protease
  misc_feature (1)..(373): Homolog of NCBI NO: 15231625 NR Description: putative protein; protein id: At3g59080.1, by cDNA: gi_15983375, supported by cDNA: gi_20466703 [Arabidopsis
  misc_feature (1)..(373): Homolog of NCBI NO: 15228044 NR Description: putative chloroplast nucleoid DNA binding protein id: At2g42980.1 [Arabidopsis thaliana] putative chloroplast nucleoid DNA binding protein [Arabidopsis
  misc_feature (1)..(373): Homolog of NCBI NO: 25408826 NR Description: hypothetical protein At2g42980 [imported] -
  misc_feature (1)..(371): Homolog of NCBI NO: 15230868 NR Description: hypothetical protein; protein id: At3g25700.1
  misc_feature (1)..(370): Homolog of NCBI NO: 15290061 NR Description: nucleoid DNA-binding protein cnd41-like protein
  misc_feature (1)..(370): Homolog of NCBI NO: 15228618 NR Description: putative protein; protein id: At3g61820.1, by cDNA: gi_14532549 [Arabidopsis thaliana]
  misc_feature (1)..(370): Homolog of NCBI NO: 34910676 NR Description: P0690B02.2 [Oryza sativa (japonica
  misc_feature (1)..(176): Homolog of NCBI NO: 38344196 NR Description: OSJNBa0064G10.12 [Oryza sativa (japonica
  misc_feature (206)..(370): Homolog of NCBI NO: 38344196 NR Description: OSJNBa0064G10.12 [Oryza sativa (japonica
  misc_feature (4)..(373): Homolog of NCBI NO: 30678047 NR Description: chloroplast nucleoid DNA binding protein -related
MTLGSGEYFMDVLVGSPPKHFSLILDTGSDLNWIQCLPCYDCFQQNGAFYDPKASASYKNITCNDQRCNLVSSPDPPMPCKSDNQSCPYYYWYGDSSNTTGDFAVETFTVNLTTNGGSSELYNVENMMFGCGHWNRGLFHGAAGLLGLGRGPLSFSSQLQSLYGHSFSYCLVDRNSDTNVSSKLIFGEDKDLLSHPNLNFTSFVAGKENLVDTFYYVQIKSILVAGEVLNIPEETWNISSDGAGGTIIDSGTTLSYFAEPAYEFIKNKIAEKAKGKYPVYRDFPILDPCFNVSGIHNVQLPELGIAFADGAVWNFPTENSFIWLNEDLVCLAMLGTPKSAFSIIGNYQQQNFHILYDTKRSRLGYAPTKCADI

SEQ ID NO: 82717 - DNA, 3392 bp, Arabidopsis thaliana
  misc_feature (1)..(3392): Ceres Seq. ID no. 12667101
  misc_feature: MA Experiment ID: 20000234 Result: Up-regulated in Transcription
  misc_feature: MA Experiment 20000234 PARAMETER Experiment Name: At_Siliques_P Parameter: Age (day) Value: 21
  misc_feature: MA Experiment 20000234 PARAMETER Experiment Name: At_Siliques_P Parameter: Organism Value: A. thaliana
  misc_feature: MA Experiment 20000234 PARAMETER Experiment Name: At_Siliques_P Parameter: Plant Line Value: WS
  misc_feature: MA Experiment 20000234 PARAMETER Experiment Name: At_Siliques_P Parameter: Tissue Value: Less Than 5mm Siliques vs. Whole Plant
  misc_feature: MA Experiment ID: 20000235 Result: Up-regulated in Transcription
  misc_feature: MA Experiment 20000235 PARAMETER Experiment Name: At_Siliques_P Parameter: Age (day) Value: 21
  misc_feature: MA Experiment 20000235 PARAMETER Experiment Name: At_Siliques_P Parameter: Organism Value: A. thaliana
  misc_feature: MA Experiment 20000235 PARAMETER Experiment Name: At_Siliques_P Parameter: Plant Line Value: WS
  misc_feature: MA Experiment 20000235 PARAMETER Experiment Name: At_Siliques_P Parameter: Tissue Value: 5-10mm Siliques vs. Whole Plant
  misc_feature: MA Experiment ID: 20000264 Result: Up-regulated in Transcription
  misc_feature: MA Experiment 20000264 PARAMETER Experiment Name: At_Open_Flower_P Parameter: Age (day) Value: 21
  misc_feature: MA Experiment 20000264 PARAMETER Experiment Name: At_Open_Flower_P Parameter: Plant Line Value: WS
  misc_feature: MA Experiment 20000264 PARAMETER Experiment Name: At_Open_Flower_P Parameter: Tissue Value: Open Flower vs. Whole Plant
  misc_feature: MA Experiment ID: 20000265 Result: Up-regulated in Transcription
  misc_feature: MA Experiment 20000265 PARAMETER Experiment Name: At_Open_Flower_P Parameter: Age (day) Value: 21
  misc_feature: MA Experiment 20000265 PARAMETER Experiment Name: At_Open_Flower_P Parameter: Plant Line Value: WS
  misc_feature: MA Experiment 20000265 PARAMETER Experiment Name: At_Open_Flower_P Parameter: Tissue Value: Closed Flower vs. Whole Plant
  misc_feature: MA Experiment ID: 20000286 Result: Up-regulated in Transcription
  misc_feature: MA Experiment 20000286 PARAMETER Experiment Name: At_Open_Flower_P Parameter: Age (day) Value: 21
  misc_feature: MA Experiment 20000286 PARAMETER Experiment Name: At_Open_Flower_P Parameter: Plant Line Value: WS
  misc_feature: MA Experiment 20000286 PARAMETER Experiment Name: At_Open_Flower_P Parameter: Tissue Value: Half Open vs. Whole Plant
  misc_feature: MA Experiment ID: 20000437 Result: Down-regulated in Transcription
  misc_feature: MA Experiment 20000437 PARAMETER Experiment Name: At_Drought_P Parameter: Age (day) Value: 8
  misc_feature: MA Experiment 20000437 PARAMETER Experiment Name: At_Drought_P Parameter: Organism Value: A. thaliana
  misc_feature: MA Experiment 20000437 PARAMETER Experiment Name: At_Drought_P Parameter: Plant Line Value: WS
  misc_feature: MA Experiment 20000437 PARAMETER Experiment Name: At_Drought_P Parameter: Timepoint (hr) Value: 24
  misc_feature: MA Experiment 20000437 PARAMETER Experiment Name: At_Drought_P Parameter: Tissue Value: Whole Plant
  misc_feature: MA Experiment 20000437 PARAMETER Experiment Name: At_Drought_P Parameter: Treatment Value: Drought vs. No Drought
  misc_feature: MA Experiment ID: 20000496 Result: Up-regulated in Transcription
  misc_feature: MA Experiment 20000496 PARAMETER Experiment Name: At_Guard_Cells_P Parameter: Harvest Date Value: 7/19/2002
  misc_feature: MA Experiment 20000496 PARAMETER Experiment Name: At_Guard_Cells_P Parameter: Organism Value: Canola
  misc_feature: MA Experiment 20000496 PARAMETER Experiment Name: At_Guard_Cells_P Parameter: Tissue Value: Guard Cells vs. Leaves
  misc_feature: MA Experiment ID: 20000794 Result: Up-regulated in Transcription
  misc_feature: MA Experiment 20000794 PARAMETER Experiment Name: At_Petals_P Parameter: Age (day) Value: 23-25 days
  misc_feature: MA Experiment 20000794 PARAMETER Experiment Name: At_Petals_P Parameter: Plant Line Value: WS
  misc_feature: MA Experiment 20000794 PARAMETER Experiment Name: At_Petals_P Parameter: Tissue Value: Petals vs. Whole plant
ctctagctcctactttcattacccaattactctctcaacacttctttagtcggcagaaaagattttttttttgagaagcttagcttcaaagggtctttggaggatgttatgatgttgttaccttgcggtctgagatctgaaaggagtaagtgtttttgttttcgttgcagaagaacagagagacaagaggtccttctttgacttggttgtctgaattttccacttcaagattgtttcctacatctccggagattgtctggctgacgagtcctttgtttcttcgtcactaattcagctctcattgtttgtaatttctattcttttagttattgcatgcccttgattgcagttccacagtttttgtgaacttcgtgtgactcgtttgctatttactaatcaagggtcatactcttagtcactctgtggaatgtctcagaaagtgaagacagtaactaagaagcgtgtgtgttgactttgaaaagaatgagaatgttcgaaacgagagcaagggaatggattctccttgtaaagcttgtgcttttcactagtatatggcagcttgcttcagctcttggttcaatgtcttcaattgcaatttcttatggagaaggtggttctgtattctgtggtctgaagtctgatgggtctcatcttgtggtttgctacggatcgaactcagcaatcctctatgggactcctggtcatctccagttcatcggtttaacgggtggagatgggtttatgtgtgggcttctgatgctatctcatcagccttattgttggggaaacagtgcatttattcaaatgggagttcctcaaccaatgaccaaaggagctgagtatttagaagttagtgctggtgattaccatctttgtggtttgaggaagccaatagtgggaagaagaaagaacagcaacattatttcctcttctcttgttgattgttggggttacaatatgacaagaaactttgtctttgataagcagttacattcgctttcggctggttcggagttcaactgcgcgctgtcctctaaagataagtcggttttctgttggggagatgagaatagtagtcaagtaatcagtttaatccccaaggaaaaaaagtttcagaaaattgcagctggtggataccatgtttgtggcattcttgacgggttggaatcgcgagtgctatgttggggaaagagcttagagttcgaagaggaggttacagggacttctacagaagaaaagattcttgatttaccaccaaaagagccactcttagcagtggtaggtgggaagttttatgcttgtggaatcaaacgctatgatcatagtgcggtctgttggggttttttcgtgaacaggagtacacctgctcctacaggtatcggcttttatgatcttgcagcggggaattacttcacttgcggagttctcacagggacttctatgtcacctgtttgttggggtcttggtttccctgcttctatccctttagctgtctcaccaggactctgtatagacactccttgtccaccaggaactcatgaactcagtaaccaagaaaactcgccttgcaaatttactggctctcacatttgcttgccctgtagcaccagttgccctcctggaatgtatcagaaaagcgtatgcacagagagatctgatcaagtttgtgtttacaactgctccagttgttcctcacatgattgctcctcaaactgctcttcttcggctaccagtggaggcaaggaaaaaggaaagttttggtcactgcagctacctattgcaactgcagagattggatttgctctatttttggtagcggttgtctcgataacagcggctttatacattaggtacagattgaggaattgtaggtgctcagaaaatgatacaaggtcttctaaagattcagcctttacgaaagataatggcaaaatccgtccggatcttgatgagctgcaaaagcgcagaagggctagagttttcacttatgaggaacttgaaaaagccgctgatggattcaaagaagaatcaatagtggggaaagggagtttctcatgtgtgtacaaaggagtactgagagatggaaccactgttgcagtgaagagagcgataatgtcatcagacaaacagaagaattcaaatgagtttcgcacggagcttgatctgttatcaagactcaaccatgctcatcttcttagccttcttggatactgtgaagaatgtggagaaaggcttttagtttatgagtttatggcacacggctcactgcacaaccatcttcatggaaagaacaaggccttgaaagagcaactagattgggtcaaaagagtaacgattgctgtccaagctgctagaggaatcgaatacttgcatggttacgcttgccctcccgtgattcaccgggatattaaatcatcaaacattcttatagatgaagaacacaatgctcgagtagctgattttggtctctccttacttggtcctgtcgatagcggctctcctttggcagaactaccagcaggaactctcggttaccttgatcccgagtactatcgacttcactatctcacaaccaaatccgatgtctacagctttggagtcctgcttctcgagatcctaagcggaagaaaagccattgacatgcactacgaagaagggaacatagtagaatgggcagttcctttgatcaaagcaggagatataaacgcactcttggacccggtcttgaaacatccatctgaaatcgaagctttgaaaagaatcgtgagtgtggcttgcaaatgcgtgagaatgagagggaaagatagaccatcaatggataaagtgacaacagcattggaacgagcgcttgcacagctaatgggaaacccgagcagtgagcagccaatattaccaacagaagtggttcttgggagcagcagaatgcacaagaagtcatggaggatcggttcaaaaaggtctggttccgagaacacggaattcagaggcggatcatggataacattcccgagcgtgacatcatcgcagaggaggaaatcatcggcatctgaaggagatgtcgcagaggaggaggatgaagggaggaagcaacaagaagcattgaggagtcttgaggaagagatagggccagcttctcctggacagagcttgttcttgcatcataatttctgaaaacaagtgtctgttttctcaagtctttagtaactaatgacatatataagatattttactctgatgtataatgtgttccttaaggcaggaaagtaacaaagaggcagagagactcttcaagcaagaatgtatcaagtttttttttcaactaattattacaaagttcttttgtataagtgaacctggttatttattattgtactagtggtttttacctgttg

SEQ ID NO: 82718 - protein, 895 aa, Arabidopsis thaliana
  peptide (1)..(895): Ceres Seq. ID no. 12667102
  misc_feature (17)..(895): Homolog of NCBI NO: 15721862 NR Description: CR4 [Oryza sativa]
  misc_feature (27)..(895): Homolog of NCBI NO: 3913366 NR Description: Putative receptor protein kinase CRINKLY4
  misc_feature (5)..(662): Homolog of NCBI NO: 15232759 NR Description: putative protein kinase; protein id: At3g09780.1 thaliana] >gi|6681340|gb|AAF23257.1|AC015985_15 putative protein
  misc_feature (695)..(786): Homolog of NCBI NO: 15232759 NR Description: putative protein kinase; protein id: At3g09780.1 thaliana] >gi|6681340|gb|AAF23257.1|AC015985_15 putative protein
  misc_feature (485)..(795): Homolog of NCBI NO: 15228781 NR Description: receptor kinase - like protein; protein id:
  misc_feature (44)..(133): Homolog of NCBI NO: 15228781 NR Description: receptor kinase - like protein; protein id:
  misc_feature (251)..(799): Homolog of NCBI NO: 15238823 NR Description: receptor kinase-like protein; protein id:
  misc_feature (500)..(796): Homolog of NCBI NO: 10998537 NR Description: cytokinin-regulated kinase 1 [Nicotiana tabacum]
  misc_feature (332)..(672): Homolog of NCBI NO: 15225044 NR Description: putative protein kinase; protein id: At2g39180.1 thaliana] >gi|7487054|pir||T02584 probable protein kinase
  misc_feature (698)..(786): Homolog of NCBI NO: 15225044 NR Description: putative protein kinase; protein id: At2g39180.1 thaliana] >gi|7487054|pir||T02584 probable protein kinase
MRMFETRAREWILLVKLVLFTSIWQLASALGSMSSIAISYGEGGSVFCGLKSDGSHLVVCYGSNSAILYGTPGHLQFIGLTGGDGFMCGLLMLSHQPYCWGNSAFIQMGVPQPMTKGAEYLEVSAGDYHLCGLRKPIVGRRKNSNIISSSLVDCWGYNMTRNFVFDKQLHSLSAGSEFNCALSSKDKSVFCWGDENSSQVISLIPKEKKFQKIAAGGYHVCGILDGLESRVLCWGKSLEFEEEVTGTSTEEKILDLPPKEPLLAVVGGKFYACGIKRYDHSAVCWGFFVNRSTPAPTGIGFYDLAAGNYFTCGVLTGTSMSPVCWGLGFPASIPLAVSPGLCIDTPCPPGTHELSNQENSPCKFTGSHICLPCSTSCPPGMYQKSVCTERSDQVCVYNCSSCSSHDCSSNCSSSATSGGKEKGKFWSLQLPIATAEIGFALFLVAVVSITAALYIRYRLRNCRCSENDTRSSKDSAFTKDNGKIRPDLDELQKRRRARVFTYEELEKAADGFKEESIVGKGSFSCVYKGVLRDGTTVAVKRAIMSSDKQKNSNEFRTELDLLSRLNHAHLLSLLGYCEECGERLLVYEFMAHGSLHNHLHGKNKALKEQLDWVKRVTIAVQAARGIEYLHGYACPPVIHRDIKSSNILIDEEHNARVADFGLSLLGPVDSGSPLAELPAGTLGYLDPEYYRLHYLTTKSDVYSFGVLLLEILSGRKAIDMHYEEGNIVEWAVPLIKAGDINALLDPVLKHPSEIEALKRIVSVACKCVRMRGKDRPSMDKVTTALERALAQLMGNPSSEQPILPTEVVLGSSRMHKKSWRIGSKRSGSENTEFRGGSWITFPSVTSSQRRKSSASEGDVAEEEDEGRKQQEALRSLEEEIGPASPGQSLFLHHNF

SEQ ID NO: 82719 - protein, 893 aa, Arabidopsis thaliana
  peptide (1)..(893): Ceres Seq. ID no. 12667103
  misc_feature (15)..(893): Homolog of NCBI NO: 15721862 NR Description: CR4 [Oryza sativa]
  misc_feature (25)..(893): Homolog of NCBI NO: 3913366 NR Description: Putative receptor protein kinase CRINKLY4
  misc_feature (3)..(660): Homolog of NCBI NO: 15232759 NR Description: putative protein kinase; protein id: At3g09780.1 thaliana] >gi|6681340|gb|AAF23257.1|AC015985_15 putative protein
  misc_feature (693)..(784): Homolog of NCBI NO: 15232759 NR Description: putative protein kinase; protein id: At3g09780.1 thaliana] >gi|6681340|gb|AAF23257.1|AC015985_15 putative protein
  misc_feature (483)..(793): Homolog of NCBI NO: 15228781 NR Description: receptor kinase - like protein; protein id:
  misc_feature (42)..(131): Homolog of NCBI NO: 15228781 NR Description: receptor kinase - like protein; protein id:
  misc_feature (249)..(797): Homolog of NCBI NO: 15238823 NR Description: receptor kinase-like protein; protein id:
  misc_feature (498)..(794): Homolog of NCBI NO: 10998537 NR Description: cytokinin-regulated kinase 1 [Nicotiana tabacum]
  misc_feature (330)..(670): Homolog of NCBI NO: 15225044 NR Description: putative protein kinase; protein id: At2g39180.1 thaliana] >gi|7487054|pir||T02584 probable protein kinase
  misc_feature (696)..(784): Homolog of NCBI NO: 15225044 NR Description: putative protein kinase; protein id: At2g39180.1 thaliana] >gi|7487054|pir||T02584 probable protein kinase
MFETRAREWILLVKLVLFTSIWQLASALGSMSSIAISYGEGGSVFCGLKSDGSHLVVCYGSNSAILYGTPGHLQFIGLTGGDGFMCGLLMLSHQPYCWGNSAFIQMGVPQPMTKGAEYLEVSAGDYHLCGLRKPIVGRRKNSNIISSSLVDCWGYNMTRNFVFDKQLHSLSAGSEFNCALSSKDKSVFCWGDENSSQVISLIPKEKKFQKIAAGGYHVCGILDGLESRVLCWGKSLEFEEEVTGTSTEEKILDLPPKEPLLAVVGGKFYACGIKRYDHSAVCWGFFVNRSTPAPTGIGFYDLAAGNYFTCGVLTGTSMSPVCWGLGFPASIPLAVSPGLCIDTPCPPGTHELSNQENSPCKFTGSHICLPCSTSCPPGMYQKSVCTERSDQVCVYNCSSCSSHDCSSNCSSSATSGGKEKGKFWSLQLPIATAEIGFALFLVAVVSITAALYIRYRLRNCRCSENDTRSSKDSAFTKDNGKIRPDLDELQKRRRARVFTYEELEKAADGFKEESIVGKGSFSCVYKGVLRDGTTVAVKRAIMSSDKQKNSNEFRTELDLLSRLNHAHLLSLLGYCEECGERLLVYEFMAHGSLHNHLHGKNKALKEQLDWVKRVTIAVQAARGIEYLHGYACPPVIHRDIKSSNILIDEEHNARVADFGLSLLGPVDSGSPLAELPAGTLGYLDPEYYRLHYLTTKSDVYSFGVLLLEILSGRKAIDMHYEEGNIVEWAVPLIKAGDINALLDPVLKHPSEIEALKRIVSVACKCVRMRGKDRPSMDKVTTALERALAQLMGNPSSEQPILPTEVVLGSSRMHKKSWRIGSKRSGSENTEFRGGSWITFPSVTSSQRRKSSASEGDVAEEEDEGRKQQEALRSLEEEIGPASPGQSLFLHHNF

SEQ ID NO: 82720 - protein, 863 aa, Arabidopsis thaliana
  peptide (1)..(863): Ceres Seq. ID no. 12667104
  misc_feature (1)..(863): Homolog of NCBI NO: 15721862 NR Description: CR4 [Oryza sativa]
  misc_feature (1)..(863): Homolog of NCBI NO: 3913366 NR Description: Putative receptor protein kinase CRINKLY4
  misc_feature (1)..(630): Homolog of NCBI NO: 15232759 NR Description: putative protein kinase; protein id: At3g09780.1 thaliana] >gi|6681340|gb|AAF23257.1|AC015985_15 putative protein
  misc_feature (663)..(754): Homolog of NCBI NO: 15232759 NR Description: putative protein kinase; protein id: At3g09780.1 thaliana] >gi|6681340|gb|AAF23257.1|AC015985_15 putative protein
  misc_feature (453)..(763): Homolog of NCBI NO: 15228781 NR Description: receptor kinase - like protein; protein id:
  misc_feature (12)..(101): Homolog of NCBI NO: 15228781 NR Description: receptor kinase - like protein; protein id:
  misc_feature (219)..(767): Homolog of NCBI NO: 15238823 NR Description: receptor kinase-like protein; protein id:
  misc_feature (468)..(764): Homolog of NCBI NO: 10998537 NR Description: cytokinin-regulated kinase 1 [Nicotiana tabacum]
  misc_feature (300)..(640): Homolog of NCBI NO: 15225044 NR Description: putative protein kinase; protein id: At2g39180.1 thaliana] >gi|7487054|pir||T02584 probable protein kinase
  misc_feature (666)..(754): Homolog of NCBI NO: 15225044 NR Description: putative protein kinase; protein id: At2g39180.1 thaliana] >gi|7487054|pir||T02584 probable protein kinase
MSSIAISYGEGGSVFCGLKSDGSHLVVCYGSNSAILYGTPGHLQFIGLTGGDGFMCGLLMLSHQPYCWGNSAFIQMGVPQPMTKGAEYLEVSAGDYHLCGLRKPIVGRRKNSNIISSSLVDCWGYNMTRNFVFDKQLHSLSAGSEFNCALSSKDKSVFCWGDENSSQVISLIPKEKKFQKIAAGGYHVCGILDGLESRVLCWGKSLEFEEEVTGTSTEEKILDLPPKEPLLAVVGGKFYACGIKRYDHSAVCWGFFVNRSTPAPTGIGFYDLAAGNYFTCGVLTGTSMSPVCWGLGFPASIPLAVSPGLCIDTPCPPGTHELSNQENSPCKFTGSHICLPCSTSCPPGMYQKSVCTERSDQVCVYNCSSCSSHDCSSNCSSSATSGGKEKGKFWSLQLPIATAEIGFALFLVAVVSITAALYIRYRLRNCRCSENDTRSSKDSAFTKDNGKIRPDLDELQKRRRARVFTYEELEKAADGFKEESIVGKGSFSCVYKGVLRDGTTVAVKRAIMSSDKQKNSNEFRTELDLLSRLNHAHLLSLLGYCEECGERLLVYEFMAHGSLHNHLHGKNKALKEQLDWVKRVTIAVQAARGIEYLHGYACPPVIHRDIKSSNILIDEEHNARVADFGLSLLGPVDSGSPLAELPAGTLGYLDPEYYRLHYLTTKSDVYSFGVLLLEILSGRKAIDMHYEEGNIVEWAVPLIKAGDINALLDPVLKHPSEIEALKRIVSVACKCVRMRGKDRPSMDKVTTALERALAQLMGNPSSEQPILPTEVVLGSSRMHKKSWRIGSKRSGSENTEFRGGSWITFPSVTSSQRRKSSASEGDVAEEEDEGRKQQEALRSLEEEIGPASPGQSLFLHHNF

SEQ ID NO: 82721 - DNA, 588 bp, Arabidopsis thaliana
  misc_feature (1)..(588): Ceres Seq. ID no. 12667105
  misc_feature: MA Experiment ID: 20000314 Result: Down-regulated in Transcription
  misc_feature: MA Experiment 20000314 PARAMETER Experiment Name: At_14day_Shoots-Roots_Sub_P Parameter: Age (day) Value: 14
  misc_feature: MA Experiment 20000314 PARAMETER Experiment Name: At_14day_Shoots-Roots_Sub_P Parameter: Organism Value: A. thaliana
  misc_feature: MA Experiment 20000314 PARAMETER Experiment Name: At_14day_Shoots-Roots_Sub_P Parameter: Plant Line Value: WS
  misc_feature: MA Experiment 20000314 PARAMETER Experiment Name: At_14day_Shoots-Roots_Sub_P Parameter: Tissue Value: Roots vs. Whole Plant
  misc_feature: MA Experiment ID: 20000327 Result: Down-regulated in Transcription
  misc_feature: MA Experiment 20000327 PARAMETER Experiment Name: At_42deg_Heat_Sub_P Parameter: Age (day) Value: 14
  misc_feature: MA Experiment 20000327 PARAMETER Experiment Name: At_42deg_Heat_Sub_P Parameter: Organism Value: A. thaliana
  misc_feature: MA Experiment 20000327 PARAMETER Experiment Name: At_42deg_Heat_Sub_P Parameter: Plant Line Value: WS
  misc_feature: MA Experiment 20000327 PARAMETER Experiment Name: At_42deg_Heat_Sub_P Parameter: Temperature (deg C) Value: 42 vs. 22
  misc_feature: MA Experiment 20000327 PARAMETER Experiment Name: At_42deg_Heat_Sub_P Parameter: Timepoint (hr) Value: 1
  misc_feature: MA Experiment 20000327 PARAMETER Experiment Name: At_42deg_Heat_Sub_P Parameter: Tissue Value: Aerial
  misc_feature: MA Experiment ID: 20000328 Result: Down-regulated in Transcription
  misc_feature: MA Experiment 20000328 PARAMETER Experiment Name: At_42deg_Heat_Sub_P Parameter: Age (day) Value: 14
  misc_feature: MA Experiment 20000328 PARAMETER Experiment Name: At_42deg_Heat_Sub_P Parameter: Organism Value: A. thaliana
  misc_feature: MA Experiment 20000328 PARAMETER Experiment Name: At_42deg_Heat_Sub_P Parameter: Plant Line Value: WS
  misc_feature: MA Experiment 20000328 PARAMETER Experiment Name: At_42deg_Heat_Sub_P Parameter: Temperature (deg C) Value: 42 vs. 22
  misc_feature: MA Experiment 20000328 PARAMETER Experiment Name: At_42deg_Heat_Sub_P Parameter: Timepoint (hr) Value: 6
  misc_feature: MA Experiment 20000328 PARAMETER Experiment Name: At_42deg_Heat_Sub_P Parameter: Tissue Value: Aerial
  misc_feature: MA Experiment ID: 20000329 Result: Up-regulated in Transcription
  misc_feature: MA Experiment 20000329 PARAMETER Experiment Name: At_4deg_Cold_Sub_P Parameter: Age (day) Value: 14
  misc_feature: MA Experiment 20000329 PARAMETER Experiment Name: At_4deg_Cold_Sub_P Parameter: Organism Value: A. thaliana
  misc_feature: MA Experiment 20000329 PARAMETER Experiment Name: At_4deg_Cold_Sub_P Parameter: Plant Line Value: WS
  misc_feature: MA Experiment 20000329 PARAMETER Experiment Name: At_4deg_Cold_Sub_P Parameter: Temperature (deg C) Value: 4 vs. 22
  misc_feature: MA Experiment 20000329 PARAMETER Experiment Name: At_4deg_Cold_Sub_P Parameter: Timepoint (hr) Value: 6
  misc_feature: MA Experiment 20000329 PARAMETER Experiment Name: At_4deg_Cold_Sub_P Parameter: Tissue Value: Aerial
  misc_feature: MA Experiment ID: 20000332 Result: Up-regulated in Transcription
  misc_feature: MA Experiment 20000332 PARAMETER Experiment Name: At_4deg_Cold_Sub_P Parameter: Age (day) Value: 14
  misc_feature: MA Experiment 20000332 PARAMETER Experiment Name: At_4deg_Cold_Sub_P Parameter: Organism Value: A. thaliana
  misc_feature: MA Experiment 20000332 PARAMETER Experiment Name: At_4deg_Cold_Sub_P Parameter: Plant Line Value: WS
  misc_feature: MA Experiment 20000332 PARAMETER Experiment Name: At_4deg_Cold_Sub_P Parameter: Temperature (deg C) Value: 4 vs. 22
  misc_feature: MA Experiment 20000332 PARAMETER Experiment Name: At_4deg_Cold_Sub_P Parameter: Timepoint (hr) Value: 2
  misc_feature: MA Experiment 20000332 PARAMETER Experiment Name: At_4deg_Cold_Sub_P Parameter: Tissue Value: Aerial
  misc_feature: MA Experiment ID: 20000355 Result: Down-regulated in Transcription
  misc_feature: MA Experiment 20000355 PARAMETER Experiment Name: At_Siliques_Sub_P Parameter: Age (day) Value: 21
  misc_feature: MA Experiment 20000355 PARAMETER Experiment Name: At_Siliques_Sub_P Parameter: Organism Value: A. thaliana
  misc_feature: MA Experiment 20000355 PARAMETER Experiment Name: At_Siliques_Sub_P Parameter: Plant Line Value: WS
  misc_feature: MA Experiment 20000355 PARAMETER Experiment Name: At_Siliques_Sub_P Parameter: Tissue Value: Less Than 5mm Siliques vs. Whole Plant
atggtgagagtctttcttctctacaacctctttaactcctttcttctttgtttagttcccaagaagcttagagttttcttccctccttcttggtacatcgacgacaagaacccaccaccgcctgatgaatcggaaactgaatctccggtagatctaaaacgagtgtttcagatgttcgacaagaacggagatggacgcatcacaaaggaagagctgaacgattctctagagaatctaggaatctttatgcctgacaaagatctgatccagatgatccagaagatggatgcaaatggagatgggtgtgtagacataaacgagtttgagtctctttatggttcgattgtggaggaaaaggaggaaggggacatgagagacgcgttcaatgtgtttgatcaagacggtgatggatttatcactgttgaggagttgaattctgtgatgacttccttggggctcaagcaaggtaaaaccctagaatgttgtaaagagatgattatgcaagtggatgaagatggagatggtagagtcaattacaaggaattccttcagatgatgaaaagtggtgactttagcaatagatcatga

SEQ ID NO: 82722 - protein, 195 aa, Arabidopsis thaliana
  peptide (1)..(195): Ceres Seq. ID no. 12667106
  misc_feature (161)..(189): Pfam Name: EF hand Pfam Description: EF hand
  misc_feature (1)..(195): Homolog of NCBI NO: 15231685 NR Description: calmodulin-like protein; protein id: At3g59440.1
  misc_feature (14)..(193): Homolog of NCBI NO: 18406202 NR Description: putative calcium binding protein; protein id: supported by cDNA: 31535., supported by cDNA: gi_17065477, by cDNA: gi_20148490, supported by cDNA: gi_9965746 [Arabidopsis
  misc_feature (39)..(193): Homolog of NCBI NO: 25295758 NR Description: probable calcium binding protein [imported] -
  misc_feature (49)..(192): Homolog of NCBI NO: 28301674 NR Description: calcium-binding protein [Lotus japonicus]
  misc_feature (51)..(192): Homolog of NCBI NO: 15231470 NR Description: putative calmodulin; protein id: At3g07490.1 thaliana] >gi|6041859|gb|AAF02168.1|AC009853_28 putative
  misc_feature (49)..(193): Homolog of NCBI NO: 15221358 NR Description: calcium-binding protein, putative; protein id: supported by cDNA: gi_12083339 [Arabidopsis thaliana]
  misc_feature (51)..(191): Homolog of NCBI NO: 15236276 NR Description: putative calmodulin; protein id: At4g03290.1
  misc_feature (51)..(192): Homolog of NCBI NO: 15235516 NR Description: putative calmodulin; protein id: At4g12860.1
  misc_feature (43)..(192): Homolog of NCBI NO: 21740787 NR Description: OSJNBb0091E11.1 [Oryza sativa (japonica
  misc_feature (1)..(126): Homolog of NCBI NO: 18406202 NR Description: putative calcium binding protein; protein id: supported by cDNA: 31535., supported by cDNA: gi_17065477, by cDNA: gi_20148490, supported by cDNA: gi_9965746 [Arabidopsis
MVRVFLLYNLFNSFLLCLVPKKLRVFFPPSWYIDDKNPPPPDESETESPVDLKRVFQMFDKNGDGRITKEELNDSLENLGIFMPDKDLIQMIQKMDANGDGCVDINEFESLYGSIVEEKEEGDMRDAFNVFDQDGDGFITVEELNSVMTSLGLKQGKTLECCKEMIMQVDEDGDGRVNYKEFLQMMKSGDFSNRS

SEQ ID NO: 82723 - protein, 138 aa, Arabidopsis thaliana
  peptide (1)..(138): Ceres Seq. ID no. 12667107
  misc_feature (104)..(132): Pfam Name: EF hand Pfam Description: EF hand
  misc_feature (1)..(138): Homolog of NCBI NO: 15231685 NR Description: calmodulin-like protein; protein id: At3g59440.1
  misc_feature (1)..(136): Homolog of NCBI NO: 18406202 NR Description: putative calcium binding protein; protein id: supported by cDNA: 31535., supported by cDNA: gi_17065477, by cDNA: gi_20148490, supported by cDNA: gi_9965746 [Arabidopsis
  misc_feature (1)..(136): Homolog of NCBI NO: 25295758 NR Description: probable calcium binding protein [imported] -
  misc_feature (1)..(135): Homolog of NCBI NO: 28301674 NR Description: calcium-binding protein [Lotus japonicus]
  misc_feature (1)..(135): Homolog of NCBI NO: 15231470 NR Description: putative calmodulin; protein id: At3g07490.1 thaliana] >gi|6041859|gb|AAF02168.1|AC009853_28 putative
  misc_feature (1)..(136): Homolog of NCBI NO: 15221358 NR Description: calcium-binding protein, putative; protein id: supported by cDNA: gi_12083339 [Arabidopsis thaliana]
  misc_feature (1)..(134): Homolog of NCBI NO: 15236276 NR Description: putative calmodulin; protein id: At4g03290.1
  misc_feature (1)..(135): Homolog of NCBI NO: 15235516 NR Description: putative calmodulin; protein id: At4g12860.1
  misc_feature (1)..(135): Homolog of NCBI NO: 21740787 NR Description: OSJNBb0091E11.1 [Oryza sativa (japonica
  misc_feature (1)..(69): Homolog of NCBI NO: 18406202 NR Description: putative calcium binding protein; protein id: supported by cDNA: 31535., supported by cDNA: gi_17065477, by cDNA: gi_20148490, supported by cDNA: gi_9965746 [Arabidopsis
MFDKNGDGRITKEELNDSLENLGIFMPDKDLIQMIQKMDANGDGCVDINEFESLYGSIVEEKEEGDMRDAFNVFDQDGDGFITVEELNSVMTSLGLKQGKTLECCKEMIMQVDEDGDGRVNYKEFLQMMKSGDFSNRS

SEQ ID NO: 82724 - protein, 113 aa, Arabidopsis thaliana
  peptide (1)..(113): Ceres Seq. ID no. 12667108
  misc_feature (79)..(107): Pfam Name: EF hand Pfam Description: EF hand
  misc_feature (1)..(113): Homolog of NCBI NO: 15231685 NR Description: calmodulin-like protein; protein id: At3g59440.1
  misc_feature (1)..(111): Homolog of NCBI NO: 18406202 NR Description: putative calcium binding protein; protein id: supported by cDNA: 31535., supported by cDNA: gi_17065477, by cDNA: gi_20148490, supported by cDNA: gi_9965746 [Arabidopsis
  misc_feature (1)..(111): Homolog of NCBI NO: 25295758 NR Description: probable calcium binding protein [imported] -
  misc_feature (1)..(110): Homolog of NCBI NO: 28301674 NR Description: calcium-binding protein [Lotus japonicus]
  misc_feature (1)..(110): Homolog of NCBI NO: 15231470 NR Description: putative calmodulin; protein id: At3g07490.1 thaliana] >gi|6041859|gb|AAF02168.1|AC009853_28 putative
  misc_feature (1)..(111): Homolog of NCBI NO: 15221358 NR Description: calcium-binding protein, putative; protein id: supported by cDNA: gi_12083339 [Arabidopsis thaliana]
  misc_feature (1)..(109): Homolog of NCBI NO: 15236276 NR Description: putative calmodulin; protein id: At4g03290.1
  misc_feature (1)..(110): Homolog of NCBI NO: 15235516 NR Description: putative calmodulin; protein id: At4g12860.1
  misc_feature (1)..(110): Homolog of NCBI NO: 21740787 NR Description: OSJNBb0091E11.1 [Oryza sativa (japonica
  misc_feature (1)..(44): Homolog of NCBI NO: 18406202 NR Description: putative calcium binding protein; protein id: supported by cDNA: 31535., supported by cDNA: gi_17065477, by cDNA: gi_20148490, supported by cDNA: gi_9965746 [Arabidopsis
MPDKDLIQMIQKMDANGDGCVDINEFESLYGSIVEEKEEGDMRDAFNVFDQDGDGFITVEELNSVMTSLGLKQGKTLECCKEMIMQVDEDGDGRVNYKEFLQMMKSGDFSNRS

SEQ ID NO: 82725 - DNA, 1260 bp, Arabidopsis thaliana
  misc_feature (1)..(1260): Ceres Seq. ID no. 12667113
  misc_feature: MA Experiment ID: 20000265 Result: Up-regulated in Transcription
  misc_feature: MA Experiment 20000265 PARAMETER Experiment Name: At_Open_Flower_P Parameter: Age (day) Value: 21
  misc_feature: MA Experiment 20000265 PARAMETER Experiment Name: At_Open_Flower_P Parameter: Plant Line Value: WS
  misc_feature: MA Experiment 20000265 PARAMETER Experiment Name: At_Open_Flower_P Parameter: Tissue Value: Closed Flower vs. Whole Plant
  misc_feature: MA Experiment ID: 20000286 Result: Up-regulated in Transcription
  misc_feature: MA Experiment 20000286 PARAMETER Experiment Name: At_Open_Flower_P Parameter: Age (day) Value: 21
  misc_feature: MA Experiment 20000286 PARAMETER Experiment Name: At_Open_Flower_P Parameter: Plant Line Value: WS
  misc_feature: MA Experiment 20000286 PARAMETER Experiment Name: At_Open_Flower_P Parameter: Tissue Value: Half Open vs. Whole Plant
  misc_feature: MA Experiment ID: 20000709 Result: Down-regulated in Transcription
  misc_feature: MA Experiment 20000709 PARAMETER Experiment Name: At_15mM_NH4NO3_L-to-H_P Parameter: Age (hr) Value: 14
  misc_feature: MA Experiment 20000709 PARAMETER Experiment Name: At_15mM_NH4NO3_L-to-H_P Parameter: Organism Value: A. thaliana
  misc_feature: MA Experiment 20000709 PARAMETER Experiment Name: At_15mM_NH4NO3_L-to-H_P Parameter: Plant Line Value: WS
  misc_feature: MA Experiment 20000709 PARAMETER Experiment Name: At_15mM_NH4NO3_L-to-H_P Parameter: Timepoint (hr) Value: 4
  misc_feature: MA Experiment 20000709 PARAMETER Experiment Name: At_15mM_NH4NO3_L-to-H_P Parameter: Tissue Value: Aerial
  misc_feature: MA Experiment 20000709 PARAMETER Experiment Name: At_15mM_NH4NO3_L-to-H_P Parameter: Treatment Value: 15mM NH4NO3 vs. 30mM Mannitol
  misc_feature: MA Experiment ID: 20001910 Result: Down-regulated in Transcription
  misc_feature: MA Experiment 20001910 PARAMETER Experiment Name: At_Drought_Reproduction_P Parameter: Age (day) Value: 37
  misc_feature: MA Experiment 20001910 PARAMETER Experiment Name: At_Drought_Reproduction_P Parameter: Organism Value: A. thaliana
  misc_feature: MA Experiment 20001910 PARAMETER Experiment Name: At_Drought_Reproduction_P Parameter: Plant Line Value: WS
  misc_feature: MA Experiment 20001910 PARAMETER Experiment Name: At_Drought_Reproduction_P Parameter: Timepoint (day) Value: 7
  misc_feature: MA Experiment 20001910 PARAMETER Experiment Name: At_Drought_Reproduction_P Parameter: Tissue Value: Flowers
  misc_feature: MA Experiment 20001910 PARAMETER Experiment Name: At_Drought_Reproduction_P Parameter: Treatment Value: Drought vs. No Drought
atggctgtcaaaatactaccatcttcttcttctgcttcttcttccttagtattcatcatgtccttgttctttctacttctttcacttattgtcccttcatcagttctatcagccactcttcgatctgatattcaagctctagagtctataatacgcagcgttgatccaagttccatctctccatcctcttacctcagcacatgggacttctctgaagacccgtgtgaaggctcagggacgttcttgggagttatgtgttctttccctctggagaacacaactagccgggttatagagatcgatcttgatgatgacggttatgacggtttcctctctgatgaagtaggaaacctaactgagctcactgtccttagcctcaacaaaaacagattccgcggtccagtaccagaatctgtgttccagctccggaaacttaccaaactctcactagcagaaaatttcttcactggagacataccagcagaaatcacgcggctcaaggagctcaaaaccatcgacctgtcgaaaaacagtatcgccggtgaaatccctccaaggatctcagccttgagaagtttgactcacctggtcctatcaaacaaccatctcgatggaagaatacctgcgctcaacggcttgtggaagctacaagtattagaactcggtaacaatcatctttatggaatgcttcctaagcttcccccaagtctaagaactctatcactctgtttcaatagccttgcaggacgtatatcacccttgcataggctaaaacagcttgtgtctttagatgtgagccagaacagattctcaggcaccgttggccatgaaatcctaacattccctgagattgcacgcatcaatgtgtcttttaaccagttcatatccatagaggttattaaagttacaggatcacgcctgcgcatgcttgatgctgaaggaaaccatttacaggggcaccttccgctgaacctggcaacttatgaaaacctaaaggatatcaatctacggagcaacatgttctctggcgatattcctaggatttatgggaaaagactggagaattcatggagaagcttatacttggagaacaactacctgtcaggtatacttcctgaggagtttcaaaagattaccaaacagatcagaggaaacctatcgaacaactgtctgcaatgtcctaagaatgttcaaatctgccaaggaacacaaaagccaaaatcacaatgcaccaatgcaatgctggggagcttggagtag

SEQ ID NO: 82726 - protein, 419 aa, Arabidopsis thaliana
  peptide (1)..(419): Ceres Seq. ID no. 12667114
  misc_feature (192)..(214): Pfam Name: Leucine Rich Repeat Pfam Description: Leucine Rich Repeat
  misc_feature (1)..(419): Homolog of NCBI NO: 15231699 NR Description: leucine rich repeat protein family; protein id:
  misc_feature (25)..(410): Homolog of NCBI NO: 15239346 NR Description: leucine rich repeat protein family; protein id:
  misc_feature (17)..(411): Homolog of NCBI NO: 15236232 NR Description: leucine rich repeat protein family; protein id:
  misc_feature (19)..(411): Homolog of NCBI NO: 25406734 NR Description: protein F21B7.6 [imported] - Arabidopsis thaliana F21B7.6 [Arabidopsis thaliana]
  misc_feature (19)..(411): Homolog of NCBI NO: 30678566 NR Description: leucine rich repeat protein family [Arabidopsis
  misc_feature (119)..(416): Homolog of NCBI NO: 15226087 NR Description: leucine rich repeat protein family; protein id: supported by cDNA: 20900., supported by cDNA: gi_15292804, by cDNA: gi_20258860 [Arabidopsis thaliana]
  misc_feature (119)..(416): Homolog of NCBI NO: 21554189 NR Description: putative leucine-rich repeat disease resistance
  misc_feature (21)..(411): Homolog of NCBI NO: 15229088 NR Description: leucine rich repeat protein family; protein id:
  misc_feature (99)..(391): Homolog of NCBI NO: 7488988 NR Description: disease resistance protein Hcr2-5D - tomato
  misc_feature (22)..(404): Homolog of NCBI NO: 37573126 NR Description: CLAVATA1 receptor kinase( CLV1)-like protein
MAVKILPSSSSASSSLVFIMSLFFLLLSLIVPSSVLSATLRSDIQALESIIRSVDPSSISPSSYLSTWDFSEDPCEGSGTFLGVMCSFPLENTTSRVIEIDLDDDGYDGFLSDEVGNLTELTVLSLNKNRFRGPVPESVFQLRKLTKLSLAENFFTGDIPAEITRLKELKTIDLSKNSIAGEIPPRISALRSLTHLVLSNNHLDGRIPALNGLWKLQVLELGNNHLYGMLPKLPPSLRTLSLCFNSLAGRISPLHRLKQLVSLDVSQNRFSGTVGHEILTFPEIARINVSFNQFISIEVIKVTGSRLRMLDAEGNHLQGHLPLNLATYENLKDINLRSNMFSGDIPRIYGKRLENSWRSLYLENNYLSGILPEEFQKITKQIRGNLSNNCLQCPKNVQICQGTQKPKSQCTNAMLGSLE

SEQ ID NO: 82727 - protein, 400 aa, Arabidopsis thaliana
  peptide (1)..(400): Ceres Seq. ID no. 12667115
  misc_feature (173)..(195): Pfam Name: Leucine Rich Repeat Pfam Description: Leucine Rich Repeat
  misc_feature (1)..(400): Homolog of NCBI NO: 15231699 NR Description: leucine rich repeat protein family; protein id:
  misc_feature (6)..(391): Homolog of NCBI NO: 15239346 NR Description: leucine rich repeat protein family; protein id:
  misc_feature (1)..(392): Homolog of NCBI NO: 15236232 NR Description: leucine rich repeat protein family; protein id:
  misc_feature (1)..(392): Homolog of NCBI NO: 25406734 NR Description: protein F21B7.6 [imported] - Arabidopsis thaliana F21B7.6 [Arabidopsis thaliana]
  misc_feature (1)..(392): Homolog of NCBI NO: 30678566 NR Description: leucine rich repeat protein family [Arabidopsis
  misc_feature (100)..(397): Homolog of NCBI NO: 15226087 NR Description: leucine rich repeat protein family; protein id: supported by cDNA: 20900., supported by cDNA: gi_15292804, by cDNA: gi_20258860 [Arabidopsis thaliana]
  misc_feature (100)..(397): Homolog of NCBI NO: 21554189 NR Description: putative leucine-rich repeat disease resistance
  misc_feature (2)..(392): Homolog of NCBI NO: 15229088 NR Description: leucine rich repeat protein family; protein id:
  misc_feature (80)..(372): Homolog of NCBI NO: 7488988 NR Description: disease resistance protein Hcr2-5D - tomato
  misc_feature (3)..(385): Homolog of NCBI NO: 37573126 NR Description: CLAVATA1 receptor kinase( CLV1)-like protein
MSLFFLLLSLIVPSSVLSATLRSDIQALESIIRSVDPSSISPSSYLSTWDFSEDPCEGSGTFLGVMCSFPLENTTSRVIEIDLDDDGYDGFLSDEVGNLTELTVLSLNKNRFRGPVPESVFQLRKLTKLSLAENFFTGDIPAEITRLKELKTIDLSKNSIAGEIPPRISALRSLTHLVLSNNHLDGRIPALNGLWKLQVLELGNNHLYGMLPKLPPSLRTLSLCFNSLAGRISPLHRLKQLVSLDVSQNRFSGTVGHEILTFPEIARINVSFNQFISIEVIKVTGSRLRMLDAEGNHLQGHLPLNLATYENLKDINLRSNMFSGDIPRIYGKRLENSWRSLYLENNYLSGILPEEFQKITKQIRGNLSNNCLQCPKNVQICQGTQKPKSQCTNAMLGSLE

SEQ ID NO: 82728 - protein, 335 aa, Arabidopsis thaliana
  peptide (1)..(335): Ceres Seq. ID no. 12667116
  misc_feature (108)..(130): Pfam Name: Leucine Rich Repeat Pfam Description: Leucine Rich Repeat
  misc_feature (1)..(335): Homolog of NCBI NO: 15231699 NR Description: leucine rich repeat protein family; protein id:
  misc_feature (1)..(326): Homolog of NCBI NO: 15239346 NR Description: leucine rich repeat protein family; protein id:
  misc_feature (1)..(327): Homolog of NCBI NO: 15236232 NR Description: leucine rich repeat protein family; protein id:
  misc_feature (1)..(327): Homolog of NCBI NO: 25406734 NR Description: protein F21B7.6 [imported] - Arabidopsis thaliana F21B7.6 [Arabidopsis thaliana]
  misc_feature (1)..(327): Homolog of NCBI NO: 30678566 NR Description: leucine rich repeat protein family [Arabidopsis
  misc_feature (35)..(332): Homolog of NCBI NO: 15226087 NR Description: leucine rich repeat protein family; protein id: supported by cDNA: 20900., supported by cDNA: gi_15292804, by cDNA: gi_20258860 [Arabidopsis thaliana]
  misc_feature (35)..(332): Homolog of NCBI NO: 21554189 NR Description: putative leucine-rich repeat disease resistance
  misc_feature (1)..(327): Homolog of NCBI NO: 15229088 NR Description: leucine rich repeat protein family; protein id:
  misc_feature (15)..(307): Homolog of NCBI NO: 7488988 NR Description: disease resistance protein Hcr2-5D - tomato
  misc_feature (1)..(320): Homolog of NCBI NO: 37573126 NR Description: CLAVATA1 receptor kinase( CLV1)-like protein
MCSFPLENTTSRVIEIDLDDDGYDGFLSDEVGNLTELTVLSLNKNRFRGPVPESVFQLRKLTKLSLAENFFTGDIPAEITRLKELKTIDLSKNSIAGEIPPRISALRSLTHLVLSNNHLDGRIPALNGLWKLQVLELGNNHLYGMLPKLPPSLRTLSLCFNSLAGRISPLHRLKQLVSLDVSQNRFSGTVGHEILTFPEIARINVSFNQFISIEVIKVTGSRLRMLDAEGNHLQGHLPLNLATYENLKDINLRSNMFSGDIPRIYGKRLENSWRSLYLENNYLSGILPEEFQKITKQIRGNLSNNCLQCPKNVQICQGTQKPKSQCTNAMLGSLE

SEQ ID NO: 82729 - DNA, 1212 bp, Arabidopsis thaliana
  misc_feature (1)..(1212): Ceres Seq. ID no. 12667121
  misc_feature: MA Experiment ID: 20000171 Result: Up-regulated in Transcription
  misc_feature: MA Experiment 20000171 PARAMETER Experiment Name: At_42deg_Heat_P Parameter: Age (day) Value: 14
  misc_feature: MA Experiment 20000171 PARAMETER Experiment Name: At_42deg_Heat_P Parameter: Organism Value: A. thaliana
  misc_feature: MA Experiment 20000171 PARAMETER Experiment Name: At_42deg_Heat_P Parameter: Plant Line Value: WS
  misc_feature: MA Experiment 20000171 PARAMETER Experiment Name: At_42deg_Heat_P Parameter: Temperature (deg C) Value: 42 vs. 22
  misc_feature: MA Experiment 20000171 PARAMETER Experiment Name: At_42deg_Heat_P Parameter: Timepoint (hr) Value: 1
  misc_feature: MA Experiment 20000171 PARAMETER Experiment Name: At_42deg_Heat_P Parameter: Tissue Value: Aerial
  misc_feature: MA Experiment ID: 20000173 Result: Up-regulated in Transcription
  misc_feature: MA Experiment 20000173 PARAMETER Experiment Name: At_42deg_Heat_P Parameter: Age (day) Value: 14
  misc_feature: MA Experiment 20000173 PARAMETER Experiment Name: At_42deg_Heat_P Parameter: Organism Value: A. thaliana
  misc_feature: MA Experiment 20000173 PARAMETER Experiment Name: At_42deg_Heat_P Parameter: Plant Line Value: WS
  misc_feature: MA Experiment 20000173 PARAMETER Experiment Name: At_42deg_Heat_P Parameter: Temperature (deg C) Value: 42 vs. 22
  misc_feature: MA Experiment 20000173 PARAMETER Experiment Name: At_42deg_Heat_P Parameter: Timepoint (hr) Value: 6
  misc_feature: MA Experiment 20000173 PARAMETER Experiment Name: At_42deg_Heat_P Parameter: Tissue Value: Aerial
  misc_feature: MA Experiment ID: 20000185 Result: Down-regulated in Transcription
  misc_feature: MA Experiment 20000185 PARAMETER Experiment Name: At_Roots__P Parameter: Age (day) Value: 7 vs. 21
  misc_feature: MA Experiment 20000185 PARAMETER Experiment Name: At_Roots__P Parameter: Organism Value: A. thaliana
  misc_feature: MA Experiment 20000185 PARAMETER Experiment Name: At_Roots__P Parameter: Tissue Value: Roots vs. Whole Plant
  misc_feature: MA Experiment ID: 20000234 Result: Up-regulated in Transcription
  misc_feature: MA Experiment 20000234 PARAMETER Experiment Name: At_Siliques_P Parameter: Age (day) Value: 21
  misc_feature: MA Experiment 20000234 PARAMETER Experiment Name: At_Siliques_P Parameter: Organism Value: A. thaliana
  misc_feature: MA Experiment 20000234 PARAMETER Experiment Name: At_Siliques_P Parameter: Plant Line Value: WS
  misc_feature: MA Experiment 20000234 PARAMETER Experiment Name: At_Siliques_P Parameter: Tissue Value: Less Than 5mm Siliques vs. Whole Plant
  misc_feature: MA Experiment ID: 20000264 Result: Up-regulated in Transcription
  misc_feature: MA Experiment 20000264 PARAMETER Experiment Name: At_Open_Flower_P Parameter: Age (day) Value: 21
  misc_feature: MA Experiment 20000264 PARAMETER Experiment Name: At_Open_Flower_P Parameter: Plant Line Value: WS
  misc_feature: MA Experiment 20000264 PARAMETER Experiment Name: At_Open_Flower_P Parameter: Tissue Value: Open Flower vs. Whole Plant
  misc_feature: MA Experiment ID: 20000265 Result: Up-regulated in Transcription
  misc_feature: MA Experiment 20000265 PARAMETER Experiment Name: At_Open_Flower_P Parameter: Age (day) Value: 21
  misc_feature: MA Experiment 20000265 PARAMETER Experiment Name: At_Open_Flower_P Parameter: Plant Line Value: WS
  misc_feature: MA Experiment 20000265 PARAMETER Experiment Name: At_Open_Flower_P Parameter: Tissue Value: Closed Flower vs. Whole Plant
  misc_feature: MA Experiment ID: 20000286 Result: Up-regulated in Transcription
  misc_feature: MA Experiment 20000286 PARAMETER Experiment Name: At_Open_Flower_P Parameter: Age (day) Value: 21
  misc_feature: MA Experiment 20000286 PARAMETER Experiment Name: At_Open_Flower_P Parameter: Plant Line Value: WS
  misc_feature: MA Experiment 20000286 PARAMETER Experiment Name: At_Open_Flower_P Parameter: Tissue Value: Half Open vs. Whole Plant
  misc_feature: MA Experiment ID: 20000495 Result: Up-regulated in Transcription
  misc_feature: MA Experiment 20000495 PARAMETER Experiment Name: At_Guard_Cells_P Parameter: Harvest Date Value: 8/2/2002
  misc_feature: MA Experiment 20000495 PARAMETER Experiment Name: At_Guard_Cells_P Parameter: Organism Value: A. thaliana
  misc_feature: MA Experiment 20000495 PARAMETER Experiment Name: At_Guard_Cells_P Parameter: Tissue Value: Guard Cells vs. Leaves
  misc_feature: MA Experiment ID: 20000496 Result: Up-regulated in Transcription
  misc_feature: MA Experiment 20000496 PARAMETER Experiment Name: At_Guard_Cells_P Parameter: Harvest Date Value: 7/19/2002
  misc_feature: MA Experiment 20000496 PARAMETER Experiment Name: At_Guard_Cells_P Parameter: Organism Value: Canola
  misc_feature: MA Experiment 20000496 PARAMETER Experiment Name: At_Guard_Cells_P Parameter: Tissue Value: Guard Cells vs. Leaves
  misc_feature: MA Experiment ID: 20001560 Result: Up-regulated in Transcription
  misc_feature: MA Experiment 20001560 PARAMETER Experiment Name: At_Drought_Soil_Dry_P Parameter: Age (day) Value: 28
  misc_feature: MA Experiment 20001560 PARAMETER Experiment Name: At_Drought_Soil_Dry_P Parameter: Organism Value: A. thaliana
  misc_feature: MA Experiment 20001560 PARAMETER Experiment Name: At_Drought_Soil_Dry_P Parameter: Plant Line Value: WS
  misc_feature: MA Experiment 20001560 PARAMETER Experiment Name: At_Drought_Soil_Dry_P Parameter: Post Timepoint (hr) Value: None
  misc_feature: MA Experiment 20001560 PARAMETER Experiment Name: At_Drought_Soil_Dry_P Parameter: Post-Treatment Value: None
  misc_feature: MA Experiment 20001560 PARAMETER Experiment Name: At_Drought_Soil_Dry_P Parameter: Timepoint (day) Value: 14
  misc_feature: MA Experiment 20001560 PARAMETER Experiment Name: At_Drought_Soil_Dry_P Parameter: Treatment Value: Drought vs. No Drought
  misc_feature: MA Experiment ID: 20001905 Result: Up-regulated in Transcription
  misc_feature: MA Experiment 20001905 PARAMETER Experiment Name: At_Drought_Reproduction_P Parameter: Age (day) Value: 40
  misc_feature: MA Experiment 20001905 PARAMETER Experiment Name: At_Drought_Reproduction_P Parameter: Organism Value: A. thaliana
  misc_feature: MA Experiment 20001905 PARAMETER Experiment Name: At_Drought_Reproduction_P Parameter: Plant Line Value: WS
  misc_feature: MA Experiment 20001905 PARAMETER Experiment Name: At_Drought_Reproduction_P Parameter: Timepoint (day) Value: 10
  misc_feature: MA Experiment 20001905 PARAMETER Experiment Name: At_Drought_Reproduction_P Parameter: Tissue Value: Rosettes
  misc_feature: MA Experiment 20001905 PARAMETER Experiment Name: At_Drought_Reproduction_P Parameter: Treatment Value: Drought vs. No Drought
  misc_feature: MA Experiment ID: 20001910 Result: Down-regulated in Transcription
  misc_feature: MA Experiment 20001910 PARAMETER Experiment Name: At_Drought_Reproduction_P Parameter: Age (day) Value: 37
  misc_feature: MA Experiment 20001910 PARAMETER Experiment Name: At_Drought_Reproduction_P Parameter: Organism Value: A. thaliana
  misc_feature: MA Experiment 20001910 PARAMETER Experiment Name: At_Drought_Reproduction_P Parameter: Plant Line Value: WS
  misc_feature: MA Experiment 20001910 PARAMETER Experiment Name: At_Drought_Reproduction_P Parameter: Timepoint (day) Value: 7
  misc_feature: MA Experiment 20001910 PARAMETER Experiment Name: At_Drought_Reproduction_P Parameter: Tissue Value: Flowers
  misc_feature: MA Experiment 20001910 PARAMETER Experiment Name: At_Drought_Reproduction_P Parameter: Treatment Value: Drought vs. No Drought
atggagaagaaaggccagcatggtacatatgaatcaatgatgactcatcatccgatcctctgtatcattgctttatctgtacttttcatagcaatcgacccctttcacatgagtccaatcgggggtcgtgagttcaaacccgtgaagcatgaggttgctccatataaggaagtcatgggaagctggcctagagacaaccttagtcgactgggtaatcatgggaaactggagttcgtggaccaagtctttggtccagagtcattagagtttgatagtttaggtcgtggtccatacacagggttggctgatggaagagtggttagatggatgggtgaagcaatcggatgggagacattttcggtggtaacatcaaaatggtcagaggaagcttgtgtgagaggtgtggattcaacaacaaacaagcaatggaagcacgagaagctgtgtgggaggcctcttggactgagatttcataaagagacaggaaatttgtatattgcagacgcttactatggtctacttgtggttggtcctgaaggagggattgctacgcctttagctactcatgtggaaggaaagcctatactctttgccaatgaccttgacatccatagaaatggctccatcttcttcactgacaccagcaaaagatatgacagagcgaatcatttctttatattactggaaggagaatcaacaggaaggcttctaagatatgacccacctaccaaaacaacacacattgtgctggagggtttggcttttcccaatggaattcaactctctaaagaccaatctttcctcctcttcaccgaaacaaccaattgcagattggtgaagtactggctggagggtccaaagatgggtgaagtcgaggtggtggcagatctcccgggattcccagacaatgtaagaataaatgaagagggtcagttttgggttgcaattgattgttgcagaacaccggcacaagaggttcttacaaacaacccttggataagaagcatctactttcggttgccaataccgatgaagctgcttgcgaaaacgatggggatgagaatgtacactgtgatatcgagattcgacgaggaaggtaaagtcctggaggtgctcgaggatagacaagggaaggtaatgaagctttggattggaacagtggctcataaccacattgccactctaccttatcctttgacaatgaatcaatga

SEQ ID NO: 82730 - protein, 403 aa, Arabidopsis thaliana
  peptide (1)..(403): Ceres Seq. ID no. 12667122
  misc_feature (78)..(392): Pfam Name: Strictosidine synthase Pfam Description: Strictosidine synthase
  misc_feature (1)..(403): Homolog of NCBI NO: 15231703 NR Description: strictosidine synthase-related; protein id:
  misc_feature (1)..(403): Homolog of NCBI NO: 28393615 NR Description: putative strictosidine synthase [Arabidopsis >gi|28973541|gb|AAO64095.1| putative strictosidine synthase
  misc_feature (17)..(399): Homolog of NCBI NO: 34902140 NR Description: putative male fertility protein [Zea mays] [Oryza
  misc_feature (1)..(399): Homolog of NCBI NO: 14028757 NR Description: male fertility protein [Zea mays]
  misc_feature (20)..(393): Homolog of NCBI NO: 22326950 NR Description: similar to strictosidine synthase-related; id: At5g22020.1 [Arabidopsis thaliana]
  misc_feature (22)..(398): Homolog of NCBI NO: 18390900 NR Description: strictosidine synthase-related; protein id: supported by cDNA: gi_16930480, supported by cDNA: gi_17381181 thaliana] >gi|16930481|gb|AAL31926.1|AF419594_1 At1g08470/T27G7_9
  misc_feature (23)..(397): Homolog of NCBI NO: 40538997 NR Description: putative strictosidine synthase [Oryza sativa
  misc_feature (22)..(272): Homolog of NCBI NO: 25335889 NR Description: protein T27G7.16 [imported] - Arabidopsis >gi|6664319|gb|AAF22901.1|AC006932_18 T27G7.16 [Arabidopsis
  misc_feature (277)..(398): Homolog of NCBI NO: 25335889 NR Description: protein T27G7.16 [imported] - Arabidopsis >gi|6664319|gb|AAF22901.1|AC006932_18 T27G7.16 [Arabidopsis
  misc_feature (84)..(387): Homolog of NCBI NO: 11280567 NR Description: hypothetical protein F24I3.110 - Arabidopsis >gi|6911873|emb|CAB72173.1| putative protein [Arabidopsis
MEKKGQHGTYESMMTHHPILCIIALSVLFIAIDPFHMSPIGGREFKPVKHEVAPYKEVMGSWPRDNLSRLGNHGKLEFVDQVFGPESLEFDSLGRGPYTGLADGRVVRWMGEAIGWETFSVVTSKWSEEACVRGVDSTTNKQWKHEKLCGRPLGLRFHKETGNLYIADAYYGLLVVGPEGGIATPLATHVEGKPILFANDLDIHRNGSIFFTDTSKRYDRANHFFILLEGESTGRLLRYDPPTKTTHIVLEGLAFPNGIQLSKDQSFLLFTETTNCRLVKYWLEGPKMGEVEVVADLPGFPDNVRINEEGQFWVAIDCCRTPAQEVLTNNPWIRSIYFRLPIPMKLLAKTMGMRMYTVISRFDEEGKVLEVLEDRQGKVMKLWIGTVAHNHIATLPYPLTMNQ

SEQ ID NO: 82731 - protein, 391 aa, Arabidopsis thaliana
  peptide (1)..(391): Ceres Seq. ID no. 12667123
  misc_feature (66)..(380): Pfam Name: Strictosidine synthase Pfam Description: Strictosidine synthase
  misc_feature (1)..(391): Homolog of NCBI NO: 15231703 NR Description: strictosidine synthase-related; protein id:
  misc_feature (1)..(391): Homolog of NCBI NO: 28393615 NR Description: putative strictosidine synthase [Arabidopsis >gi|28973541|gb|AAO64095.1| putative strictosidine synthase
  misc_feature (5)..(387): Homolog of NCBI NO: 34902140 NR Description: putative male fertility protein [Zea mays] [Oryza
  misc_feature (1)..(387): Homolog of NCBI NO: 14028757 NR Description: male fertility protein [Zea mays]
  misc_feature (8)..(381): Homolog of NCBI NO: 22326950 NR Description: similar to strictosidine synthase-related; id: At5g22020.1 [Arabidopsis thaliana]
  misc_feature (10)..(386): Homolog of NCBI NO: 18390900 NR Description: strictosidine synthase-related; protein id: supported by cDNA: gi_16930480, supported by cDNA: gi_17381181 thaliana] >gi|16930481|gb|AAL31926.1|AF419594_1 At1g08470/T27G7_9
  misc_feature (11)..(385): Homolog of NCBI NO: 40538997 NR Description: putative strictosidine synthase [Oryza sativa
  misc_feature (10)..(260): Homolog of NCBI NO: 25335889 NR Description: protein T27G7.16 [imported] - Arabidopsis >gi|6664319|gb|AAF22901.1|AC006932_18 T27G7.16 [Arabidopsis
  misc_feature (265)..(386): Homolog of NCBI NO: 25335889 NR Description: protein T27G7.16 [imported] - Arabidopsis >gi|6664319|gb|AAF22901.1|AC006932_18 T27G7.16 [Arabidopsis
  misc_feature (72)..(375): Homolog of NCBI NO: 11280567 NR Description: hypothetical protein F24I3.110 - Arabidopsis >gi|6911873|emb|CAB72173.1| putative protein [Arabidopsis
MMTHHPILCIIALSVLFIAIDPFHMSPIGGREFKPVKHEVAPYKEVMGSWPRDNLSRLGNHGKLEFVDQVFGPESLEFDSLGRGPYTGLADGRVVRWMGEAIGWETFSVVTSKWSEEACVRGVDSTTNKQWKHEKLCGRPLGLRFHKETGNLYIADAYYGLLVVGPEGGIATPLATHVEGKPILFANDLDIHRNGSIFFTDTSKRYDRANHFFILLEGESTGRLLRYDPPTKTTHIVLEGLAFPNGIQLSKDQSFLLFTETTNCRLVKYWLEGPKMGEVEVVADLPGFPDNVRINEEGQFWVAIDCCRTPAQEVLTNNPWIRSIYFRLPIPMKLLAKTMGMRMYTVISRFDEEGKVLEVLEDRQGKVMKLWIGTVAHNHIATLPYPLTMNQ

SEQ ID NO: 82732 - protein, 390 aa, Arabidopsis thaliana
  peptide (1)..(390): Ceres Seq. ID no. 12667124
  misc_feature (65)..(379): Pfam Name: Strictosidine synthase Pfam Description: Strictosidine synthase
  misc_feature (1)..(390): Homolog of NCBI NO: 15231703 NR Description: strictosidine synthase-related; protein id:
  misc_feature (1)..(390): Homolog of NCBI NO: 28393615 NR Description: putative strictosidine synthase [Arabidopsis >gi|28973541|gb|AAO64095.1| putative strictosidine synthase
  misc_feature (4)..(386): Homolog of NCBI NO: 34902140 NR Description: putative male fertility protein [Zea mays] [Oryza
  misc_feature (1)..(386): Homolog of NCBI NO: 14028757 NR Description: male fertility protein [Zea mays]
  misc_feature (7)..(380): Homolog of NCBI NO: 22326950 NR Description: similar to strictosidine synthase-related; id: At5g22020.1 [Arabidopsis thaliana]
  misc_feature (9)..(385): Homolog of NCBI NO: 18390900 NR Description: strictosidine synthase-related; protein id: supported by cDNA: gi_16930480, supported by cDNA: gi_17381181 thaliana] >gi|16930481|gb|AAL31926.1|AF419594_1 At1g08470/T27G7_9
  misc_feature (10)..(384): Homolog of NCBI NO: 40538997 NR Description: putative strictosidine synthase [Oryza sativa
  misc_feature (9)..(259): Homolog of NCBI NO: 25335889 NR Description: protein T27G7.16 [imported] - Arabidopsis >gi|6664319|gb|AAF22901.1|AC006932_18 T27G7.16 [Arabidopsis
  misc_feature (264)..(385): Homolog of NCBI NO: 25335889 NR Description: protein T27G7.16 [imported] - Arabidopsis >gi|6664319|gb|AAF22901.1|AC006932_18 T27G7.16 [Arabidopsis
  misc_feature (71)..(374): Homolog of NCBI NO: 11280567 NR Description: hypothetical protein F24I3.110 - Arabidopsis >gi|6911873|emb|CAB72173.1| putative protein [Arabidopsis
MTHHPILCIIALSVLFIAIDPFHMSPIGGREFKPVKHEVAPYKEVMGSWPRDNLSRLGNHGKLEFVDQVFGPESLEFDSLGRGPYTGLADGRVVRWMGEAIGWETFSVVTSKWSEEACVRGVDSTTNKQWKHEKLCGRPLGLRFHKETGNLYIADAYYGLLVVGPEGGIATPLATHVEGKPILFANDLDIHRNGSIFFTDTSKRYDRANHFFILLEGESTGRLLRYDPPTKTTHIVLEGLAFPNGIQLSKDQSFLLFTETTNCRLVKYWLEGPKMGEVEVVADLPGFPDNVRINEEGQFWVAIDCCRTPAQEVLTNNPWIRSIYFRLPIPMKLLAKTMGMRMYTVISRFDEEGKVLEVLEDRQGKVMKLWIGTVAHNHIATLPYPLTMNQ

SEQ ID NO: 82733 - DNA, 909 bp, Arabidopsis thaliana
  misc_feature (1)..(909): Ceres Seq. ID no. 12667146
  misc_feature: MA Experiment ID: 20000182 Result: Up-regulated in Transcription
  misc_feature: MA Experiment 20000182 PARAMETER Experiment Name: At_2mM_SA_P Parameter: Age (day) Value: 14
  misc_feature: MA Experiment 20000182 PARAMETER Experiment Name: At_2mM_SA_P Parameter: Organism Value: A. thaliana
  misc_feature: MA Experiment 20000182 PARAMETER Experiment Name: At_2mM_SA_P Parameter: Plant Line Value: WS
  misc_feature: MA Experiment 20000182 PARAMETER Experiment Name: At_2mM_SA_P Parameter: Timepoint (hr) Value: 6
  misc_feature: MA Experiment 20000182 PARAMETER Experiment Name: At_2mM_SA_P Parameter: Tissue Value: Aerial
  misc_feature: MA Experiment 20000182 PARAMETER Experiment Name: At_2mM_SA_P Parameter: Treatment Value: 2mM SA vs. No Treatment
  misc_feature: MA Experiment ID: 20000185 Result: Up-regulated in Transcription
  misc_feature: MA Experiment 20000185 PARAMETER Experiment Name: At_Roots__P Parameter: Age (day) Value: 7 vs. 21
  misc_feature: MA Experiment 20000185 PARAMETER Experiment Name: At_Roots__P Parameter: Organism Value: A. thaliana
  misc_feature: MA Experiment 20000185 PARAMETER Experiment Name: At_Roots__P Parameter: Tissue Value: Roots vs. Whole Plant
  misc_feature: MA Experiment ID: 20000439 Result: Up-regulated in Transcription
  misc_feature: MA Experiment 20000439 PARAMETER Experiment Name: At_Roots__P Parameter: Age (day) Value: 14 vs. 21
  misc_feature: MA Experiment 20000439 PARAMETER Experiment Name: At_Roots__P Parameter: Organism Value: A. thaliana
  misc_feature: MA Experiment 20000439 PARAMETER Experiment Name: At_Roots__P Parameter: Tissue Value: Roots vs. Whole Plant
atggacgttgtcacgttgatgtatggtttgataacttacatcatttacgcttacggcattattcacgagtggtggtcggaagaaacaacagcggtcgtgaccggagcaaacaaaggtataggttttgcggtggtgaagaggttattagagcttggactaactgtagttttaactgcccgaaacgccgaaaatggaagccaagccgctgaatccctccgccgcattggctttggaaacgttcatttttgctgcctcgacatctccgatccttcttccatcgccgcgttcgcctcttggttcggtcgcaacttaggaatactcgacattctggtgaacaatgccgccgtttcatttaacgcggtgggcgagaatttaatcaaagagccagagacaatcatcaagaccaatttctacggtgccaagcttttaacggaggcgcttttgccgttgtttcggcgttccgtctccgttagtcgcatccttaacatgagttcaaggcttggcacattaaataaactgagaagccctagtataagacgaatcctagaaagtgaagaccttaccaatgaacaaatcgatgcgacattgactcaatttctgcaggacgtgaagagcgggacttgggagaagcaaggatggccggagaactggccggactacgccatctcaaagttggccttaaacgcttactctagggttttggctcgacgttacgacggcaaaaaactgagtgtgaattgtttatgccctggtttcactcgtacgtctatgaccggtggtcaggggactcacacggcggatgaggctgctgccattgtagccaagttggtgttgcttcctccggagaagctggctaccggaaagttctatatatgcgtagagtctaaaaaacttatttccaagttgtga

SEQ ID NO: 82734 - protein, 302 aa, Arabidopsis thaliana
  peptide (1)..(302): Ceres Seq. ID no. 12667147
  misc_feature (1)..(302): Homolog of NCBI NO: 15231739 NR Description: putative protein; protein id: At3g59710.1
  misc_feature (24)..(302): Homolog of NCBI NO: 21740778 NR Description: OSJNBa0067K08.19 [Oryza sativa (japonica
  misc_feature (22)..(290): Homolog of NCBI NO: 15241346 NR Description: carbonyl reductase-like protein; protein id:
  misc_feature (18)..(290): Homolog of NCBI NO: 15240361 NR Description: carbonyl reductase - like protein; protein id:
  misc_feature (18)..(290): Homolog of NCBI NO: 10176876 NR Description: carbonyl reductase-like protein [Arabidopsis
  misc_feature (31)..(290): Homolog of NCBI NO: 34907100 NR Description: putative carbonyl reductase-like protein [Oryza
  misc_feature (119)..(290): Homolog of NCBI NO: 38346768 NR Description: OSJNBa0081C01.19 [Oryza sativa (japonica
  misc_feature (31)..(117): Homolog of NCBI NO: 38346768 NR Description: OSJNBa0081C01.19 [Oryza sativa (japonica
  misc_feature (130)..(301): Homolog of NCBI NO: 15233062 NR Description: putative protein; protein id: At3g61220.1, by cDNA: gi_15028054, supported by cDNA: gi_20259056 [Arabidopsis
  misc_feature (26)..(116): Homolog of NCBI NO: 15233062 NR Description: putative protein; protein id: At3g61220.1, by cDNA: gi_15028054, supported by cDNA: gi_20259056 [Arabidopsis
MDVVTLMYGLITYIIYAYGIIHEWWSEETTAVVTGANKGIGFAVVKRLLELGLTVVLTARNAENGSQAAESLRRIGFGNVHFCCLDISDPSSIAAFASWFGRNLGILDILVNNAAVSFNAVGENLIKEPETIIKTNFYGAKLLTEALLPLFRRSVSVSRILNMSSRLGTLNKLRSPSIRRILESEDLTNEQIDATLTQFLQDVKSGTWEKQGWPENWPDYAISKLALNAYSRVLARRYDGKKLSVNCLCPGFTRTSMTGGQGTHTADEAAAIVAKLVLLPPEKLATGKFYICVESKKLISKL

SEQ ID NO: 82735 - protein, 296 aa, Arabidopsis thaliana
  peptide (1)..(296): Ceres Seq. ID no. 12667148
  misc_feature (1)..(296): Homolog of NCBI NO: 15231739 NR Description: putative protein; protein id: At3g59710.1
  misc_feature (18)..(296): Homolog of NCBI NO: 21740778 NR Description: OSJNBa0067K08.19 [Oryza sativa (japonica
  misc_feature (16)..(284): Homolog of NCBI NO: 15241346 NR Description: carbonyl reductase-like protein; protein id:
  misc_feature (12)..(284): Homolog of NCBI NO: 15240361 NR Description: carbonyl reductase - like protein; protein id:
  misc_feature (12)..(284): Homolog of NCBI NO: 10176876 NR Description: carbonyl reductase-like protein [Arabidopsis
  misc_feature (25)..(284): Homolog of NCBI NO: 34907100 NR Description: putative carbonyl reductase-like protein [Oryza
  misc_feature (113)..(284): Homolog of NCBI NO: 38346768 NR Description: OSJNBa0081C01.19 [Oryza sativa (japonica
  misc_feature (25)..(111): Homolog of NCBI NO: 38346768 NR Description: OSJNBa0081C01.19 [Oryza sativa (japonica
  misc_feature (124)..(295): Homolog of NCBI NO: 15233062 NR Description: putative protein; protein id: At3g61220.1, by cDNA: gi_15028054, supported by cDNA: gi_20259056 [Arabidopsis
  misc_feature (20)..(110): Homolog of NCBI NO: 15233062 NR Description: putative protein; protein id: At3g61220.1, by cDNA: gi_15028054, supported by cDNA: gi_20259056 [Arabidopsis
MYGLITYIIYAYGIIHEWWSEETTAVVTGANKGIGFAVVKRLLELGLTVVLTARNAENGSQAAESLRRIGFGNVHFCCLDISDPSSIAAFASWFGRNLGILDILVNNAAVSFNAVGENLIKEPETIIKTNFYGAKLLTEALLPLFRRSVSVSRILNMSSRLGTLNKLRSPSIRRILESEDLTNEQIDATLTQFLQDVKSGTWEKQGWPENWPDYAISKLALNAYSRVLARRYDGKKLSVNCLCPGFTRTSMTGGQGTHTADEAAAIVAKLVLLPPEKLATGKFYICVESKKLISKL

SEQ ID NO: 82736 - DNA, 1881 bp, Arabidopsis thaliana
  misc_feature (1)..(1881): Ceres Seq. ID no. 12667153
  misc_feature: MA Experiment ID: 20000306 Result: Up-regulated in Transcription
  misc_feature: MA Experiment 20000306 PARAMETER Experiment Name: At_Germinating_Seeds_Sub_P Parameter: Age (hr) Value: 6 vs. 0
  misc_feature: MA Experiment 20000306 PARAMETER Experiment Name: At_Germinating_Seeds_Sub_P Parameter: Organism Value: A. thaliana
  misc_feature: MA Experiment 20000306 PARAMETER Experiment Name: At_Germinating_Seeds_Sub_P Parameter: Plant Line Value: WS
  misc_feature: MA Experiment 20000306 PARAMETER Experiment Name: At_Germinating_Seeds_Sub_P Parameter: Tissue Value: Germinating Seeds
  misc_feature: MA Experiment ID: 20000307 Result: Up-regulated in Transcription
  misc_feature: MA Experiment 20000307 PARAMETER Experiment Name: At_Germinating_Seeds_Sub_P Parameter: Age (hr) Value: 24 vs. 0
  misc_feature: MA Experiment 20000307 PARAMETER Experiment Name: At_Germinating_Seeds_Sub_P Parameter: Organism Value: A. thaliana
  misc_feature: MA Experiment 20000307 PARAMETER Experiment Name: At_Germinating_Seeds_Sub_P Parameter: Plant Line Value: WS
  misc_feature: MA Experiment 20000307 PARAMETER Experiment Name: At_Germinating_Seeds_Sub_P Parameter: Tissue Value: Germinating Seeds
  misc_feature: MA Experiment ID: 20000315 Result: Down-regulated in Transcription
  misc_feature: MA Experiment 20000315 PARAMETER Experiment Name: At_14day_Shoots-Roots_Sub_P Parameter: Age (day) Value: 14
  misc_feature: MA Experiment 20000315 PARAMETER Experiment Name: At_14day_Shoots-Roots_Sub_P Parameter: Organism Value: A. thaliana
  misc_feature: MA Experiment 20000315 PARAMETER Experiment Name: At_14day_Shoots-Roots_Sub_P Parameter: Plant Line Value: WS
  misc_feature: MA Experiment 20000315 PARAMETER Experiment Name: At_14day_Shoots-Roots_Sub_P Parameter: Tissue Value: Shoots vs. Whole Plant
atgcctagtgaactcaaagtcttgcatatagttcttgttctgctctatactctgtcttcatctacttacaactccaatggaaactggaccctggagggctctgcagctgacaactccattggtgacaccattttaacgaacaccaagaagcattcctgcggtcaaactttcaacaacgaatccattcccataaaagattcgtctttcagcttccacttcctctttggaatagtacctgagcatacacagtccggttcacatggcatgtctttcgttatctctcctacagcaggccttccaggagcttcctccgatcagtacctcggattattcaatgaaacaaccaacggtaaatcatcaaaccacgttatagctatcgagttagatatacaaaaagaccaagagttcggagatattgatgataatcatgttgcaatggtaatgcggctttctatcgtttatagtcatcctgatcaacagctcaatgttactttattcccggctgagatccctgttccgccacggaaaccactgctgtctttgaatcgagatctctccccgtattttttggaggagatgtattatggctacacggcatcgactggatccattggagcatttcattatatgttgagttcgtacgctactccaaaagttgagaatccaacatgggagttcatcgtagtcccaacccttcctccatatccgaagaaatcgtctgacagaacaaagaagattttagcggtctgcttaacgcttgctgtgttcgctgtgtttgtcgcctcgggaatctgttttgtcttctatacgaggcataagaaggttaaggaggttcttgaggaatgggagattcaatatggacctcataggtttgcctataaggagcttctcaatgccacaaaggatttcaaggagaaacaacttcttggaaaaggaggctttggtcaagtctttaaaggaacgctcccgggttccaatgcagagatcgctgtaaaacggacttctcatgattcaagacaaggcatgagcgagtttctagccgagatatcgaccattggtcgtctcaggcatccaaatctagtcaggcttctgggatattgtaggcataaggagaatctctacttggtttatgactttacgcccaatggaagccttgacaagtatctagaccgtaatgagaatcaagaacggctcacttgggaacaacgtttcaagatcatcaaagatgttgcatctgctctactacacctgcatcaagaatgggtacaaatcatcattcatagagatatcaaaccagctaatgtcctaatcgaccacgaaatgaatgcaaggatcggggatttcggattggcaaagctgtatgatcagggacttgaccctcagacatctagagtagcgggaacatttggttatatcgcacctgagctcctaagaacaggaagagcgaccacaagcactgatgtttatgcctttgggttggtaatgcttgaagttgtttgtggtagaagaatgattgagcgacgtgcaccggaaaatgaagaagttcttgtggattggatcttagagctttgggaaagtgggaaacttttcgatgcagctgaggaaagtatccgtcaagaacaaaacaggggagaaatcgagcttcttttgaagctaggtctgttgtgtgcacatcacactgaactgattagaccgaacatgagtgcggttatgcagatcttgaatggcgtttcgcagcttccagataatcttcttgatgtcgtaagagctgagaacttgagaggaatgcctgaaacatcaatcgaagtactacttggtcttaatctgtattcagttggtacaatgacattaacaaattctttcttgtcccatggacgctga

SEQ ID NO: 82737 - protein, 626 aa, Arabidopsis thaliana
  peptide (1)..(626): Ceres Seq. ID no. 12667154
  misc_feature (147)..(626): Homolog of NCBI NO: 15231745 NR Description: receptor lectin kinase 3; protein id: At3g59740.1
  misc_feature (6)..(146): Homolog of NCBI NO: 15231745 NR Description: receptor lectin kinase 3; protein id: At3g59740.1
  misc_feature (147)..(626): Homolog of NCBI NO: 4100060 NR Description: receptor lectin kinase 3 [Arabidopsis thaliana]
  misc_feature (6)..(146): Homolog of NCBI NO: 4100060 NR Description: receptor lectin kinase 3 [Arabidopsis thaliana]
  misc_feature (147)..(596): Homolog of NCBI NO: 11346429 NR Description: receptor lectin kinase 3 - Arabidopsis thaliana >gi|7019668|emb|CAB75793.1| receptor lectin kinase 3 [Arabidopsis
  misc_feature (6)..(146): Homolog of NCBI NO: 11346429 NR Description: receptor lectin kinase 3 - Arabidopsis thaliana >gi|7019668|emb|CAB75793.1| receptor lectin kinase 3 [Arabidopsis
  misc_feature (147)..(626): Homolog of NCBI NO: 15231734 NR Description: serine/threonine-specific kinase lecRK1
  misc_feature (1)..(146): Homolog of NCBI NO: 15231734 NR Description: serine/threonine-specific kinase lecRK1
  misc_feature (147)..(626): Homolog of NCBI NO: 11346416 NR Description: receptor lectin kinase 3 - Arabidopsis thaliana
  misc_feature (89)..(146): Homolog of NCBI NO: 11346416 NR Description: receptor lectin kinase 3 - Arabidopsis thaliana
MPSELKVLHIVLVLLYTLSSSTYNSNGNWTLEGSAADNSIGDTILTNTKKHSCGQTFNNESIPIKDSSFSFHFLFGIVPEHTQSGSHGMSFVISPTAGLPGASSDQYLGLFNETTNGKSSNHVIAIELDIQKDQEFGDIDDNHVAMVMRLSIVYSHPDQQLNVTLFPAEIPVPPRKPLLSLNRDLSPYFLEEMYYGYTASTGSIGAFHYMLSSYATPKVENPTWEFIVVPTLPPYPKKSSDRTKKILAVCLTLAVFAVFVASGICFVFYTRHKKVKEVLEEWEIQYGPHRFAYKELLNATKDFKEKQLLGKGGFGQVFKGTLPGSNAEIAVKRTSHDSRQGMSEFLAEISTIGRLRHPNLVRLLGYCRHKENLYLVYDFTPNGSLDKYLDRNENQERLTWEQRFKIIKDVASALLHLHQEWVQIIIHRDIKPANVLIDHEMNARIGDFGLAKLYDQGLDPQTSRVAGTFGYIAPELLRTGRATTSTDVYAFGLVMLEVVCGRRMIERRAPENEEVLVDWILELWESGKLFDAAEESIRQEQNRGEIELLLKLGLLCAHHTELIRPNMSAVMQILNGVSQLPDNLLDVVRAENLRGMPETSIEVLLGLNLYSVGTMTLTNSFLSHGR

SEQ ID NO: 82738 - protein, 538 aa, Arabidopsis thaliana
  peptide (1)..(538): Ceres Seq. ID no. 12667155
  misc_feature (59)..(538): Homolog of NCBI NO: 15231745 NR Description: receptor lectin kinase 3; protein id: At3g59740.1
  misc_feature (1)..(58): Homolog of NCBI NO: 15231745 NR Description: receptor lectin kinase 3; protein id: At3g59740.1
  misc_feature (59)..(538): Homolog of NCBI NO: 4100060 NR Description: receptor lectin kinase 3 [Arabidopsis thaliana]
  misc_feature (1)..(58): Homolog of NCBI NO: 4100060 NR Description: receptor lectin kinase 3 [Arabidopsis thaliana]
  misc_feature (59)..(508): Homolog of NCBI NO: 11346429 NR Description: receptor lectin kinase 3 - Arabidopsis thaliana >gi|7019668|emb|CAB75793.1| receptor lectin kinase 3 [Arabidopsis
  misc_feature (1)..(58): Homolog of NCBI NO: 11346429 NR Description: receptor lectin kinase 3 - Arabidopsis thaliana >gi|7019668|emb|CAB75793.1| receptor lectin kinase 3 [Arabidopsis
  misc_feature (59)..(538): Homolog of NCBI NO: 15231734 NR Description: serine/threonine-specific kinase lecRK1
  misc_feature (1)..(58): Homolog of NCBI NO: 15231734 NR Description: serine/threonine-specific kinase lecRK1
  misc_feature (59)..(538): Homolog of NCBI NO: 11346416 NR Description: receptor lectin kinase 3 - Arabidopsis thaliana
  misc_feature (1)..(58): Homolog of NCBI NO: 11346416 NR Description: receptor lectin kinase 3 - Arabidopsis thaliana
MSFVISPTAGLPGASSDQYLGLFNETTNGKSSNHVIAIELDIQKDQEFGDIDDNHVAMVMRLSIVYSHPDQQLNVTLFPAEIPVPPRKPLLSLNRDLSPYFLEEMYYGYTASTGSIGAFHYMLSSYATPKVENPTWEFIVVPTLPPYPKKSSDRTKKILAVCLTLAVFAVFVASGICFVFYTRHKKVKEVLEEWEIQYGPHRFAYKELLNATKDFKEKQLLGKGGFGQVFKGTLPGSNAEIAVKRTSHDSRQGMSEFLAEISTIGRLRHPNLVRLLGYCRHKENLYLVYDFTPNGSLDKYLDRNENQERLTWEQRFKIIKDVASALLHLHQEWVQIIIHRDIKPANVLIDHEMNARIGDFGLAKLYDQGLDPQTSRVAGTFGYIAPELLRTGRATTSTDVYAFGLVMLEVVCGRRMIERRAPENEEVLVDWILELWESGKLFDAAEESIRQEQNRGEIELLLKLGLLCAHHTELIRPNMSAVMQILNGVSQLPDNLLDVVRAENLRGMPETSIEVLLGLNLYSVGTMTLTNSFLSHGR

SEQ ID NO: 82739 - protein, 481 aa, Arabidopsis thaliana
  peptide (1)..(481): Ceres Seq. ID no. 12667156
  misc_feature (2)..(481): Homolog of NCBI NO: 15231745 NR Description: receptor lectin kinase 3; protein id: At3g59740.1
  misc_feature (2)..(481): Homolog of NCBI NO: 4100060 NR Description: receptor lectin kinase 3 [Arabidopsis thaliana]
  misc_feature (2)..(451): Homolog of NCBI NO: 11346429 NR Description: receptor lectin kinase 3 - Arabidopsis thaliana >gi|7019668|emb|CAB75793.1| receptor lectin kinase 3 [Arabidopsis
  misc_feature (2)..(481): Homolog of NCBI NO: 15231734 NR Description: serine/threonine-specific kinase lecRK1
  misc_feature (2)..(481): Homolog of NCBI NO: 11346416 NR Description: receptor lectin kinase 3 - Arabidopsis thaliana
  misc_feature (1)..(481): Homolog of NCBI NO: 15224335 NR Description: putative receptor protein kinase; protein id: supported by cDNA: gi_18491244 [Arabidopsis thaliana]
  misc_feature (2)..(337): Homolog of NCBI NO: 15231743 NR Description: receptor lectin kinase-like protein (fragment); id: At3g59730.1 [Arabidopsis thaliana] >gi|11358748|pir||T49314
  misc_feature (2)..(481): Homolog of NCBI NO: 15224334 NR Description: putative receptor protein kinase; protein id: [Arabidopsis thaliana] >gi|25387039|pir||C84869 probable receptor
  misc_feature (7)..(481): Homolog of NCBI NO: 15235547 NR Description: serine threonine-specific kinase like protein;
  misc_feature (9)..(439): Homolog of NCBI NO: 38112429 NR Description: lectin-like receptor kinase 7;3 [Medicago
MVMRLSIVYSHPDQQLNVTLFPAEIPVPPRKPLLSLNRDLSPYFLEEMYYGYTASTGSIGAFHYMLSSYATPKVENPTWEFIVVPTLPPYPKKSSDRTKKILAVCLTLAVFAVFVASGICFVFYTRHKKVKEVLEEWEIQYGPHRFAYKELLNATKDFKEKQLLGKGGFGQVFKGTLPGSNAEIAVKRTSHDSRQGMSEFLAEISTIGRLRHPNLVRLLGYCRHKENLYLVYDFTPNGSLDKYLDRNENQERLTWEQRFKIIKDVASALLHLHQEWVQIIIHRDIKPANVLIDHEMNARIGDFGLAKLYDQGLDPQTSRVAGTFGYIAPELLRTGRATTSTDVYAFGLVMLEVVCGRRMIERRAPENEEVLVDWILELWESGKLFDAAEESIRQEQNRGEIELLLKLGLLCAHHTELIRPNMSAVMQILNGVSQLPDNLLDVVRAENLRGMPETSIEVLLGLNLYSVGTMTLTNSFLSHGR

SEQ ID NO: 82740 - DNA, 944 bp, Arabidopsis thaliana
  misc_feature (1)..(944): Ceres Seq. ID no. 12667157
  misc_feature: MA Experiment ID: 20000182 Result: Down-regulated in Transcription
  misc_feature: MA Experiment 20000182 PARAMETER Experiment Name: At_2mM_SA_P Parameter: Age (day) Value: 14
  misc_feature: MA Experiment 20000182 PARAMETER Experiment Name: At_2mM_SA_P Parameter: Organism Value: A. thaliana
  misc_feature: MA Experiment 20000182 PARAMETER Experiment Name: At_2mM_SA_P Parameter: Plant Line Value: WS
  misc_feature: MA Experiment 20000182 PARAMETER Experiment Name: At_2mM_SA_P Parameter: Timepoint (hr) Value: 6
  misc_feature: MA Experiment 20000182 PARAMETER Experiment Name: At_2mM_SA_P Parameter: Tissue Value: Aerial
  misc_feature: MA Experiment 20000182 PARAMETER Experiment Name: At_2mM_SA_P Parameter: Treatment Value: 2mM SA vs. No Treatment
  misc_feature: MA Experiment ID: 20000184 Result: Down-regulated in Transcription
  misc_feature: MA Experiment 20000184 PARAMETER Experiment Name: At_Shoots__P Parameter: Age (day) Value: 7
  misc_feature: MA Experiment 20000184 PARAMETER Experiment Name: At_Shoots__P Parameter: Tissue Value: Shoots vs. Whole Plant
  misc_feature: MA Experiment ID: 20000185 Result: Down-regulated in Transcription
  misc_feature: MA Experiment 20000185 PARAMETER Experiment Name: At_Roots__P Parameter: Age (day) Value: 7 vs. 21
  misc_feature: MA Experiment 20000185 PARAMETER Experiment Name: At_Roots__P Parameter: Organism Value: A. thaliana
  misc_feature: MA Experiment 20000185 PARAMETER Experiment Name: At_Roots__P Parameter: Tissue Value: Roots vs. Whole Plant
  misc_feature: MA Experiment ID: 20000234 Result: Down-regulated in Transcription
  misc_feature: MA Experiment 20000234 PARAMETER Experiment Name: At_Siliques_P Parameter: Age (day) Value: 21
  misc_feature: MA Experiment 20000234 PARAMETER Experiment Name: At_Siliques_P Parameter: Organism Value: A. thaliana
  misc_feature: MA Experiment 20000234 PARAMETER Experiment Name: At_Siliques_P Parameter: Plant Line Value: WS
  misc_feature: MA Experiment 20000234 PARAMETER Experiment Name: At_Siliques_P Parameter: Tissue Value: Less Than 5mm Siliques vs. Whole Plant
  misc_feature: MA Experiment ID: 20000235 Result: Down-regulated in Transcription
  misc_feature: MA Experiment 20000235 PARAMETER Experiment Name: At_Siliques_P Parameter: Age (day) Value: 21
  misc_feature: MA Experiment 20000235 PARAMETER Experiment Name: At_Siliques_P Parameter: Organism Value: A. thaliana
  misc_feature: MA Experiment 20000235 PARAMETER Experiment Name: At_Siliques_P Parameter: Plant Line Value: WS
  misc_feature: MA Experiment 20000235 PARAMETER Experiment Name: At_Siliques_P Parameter: Tissue Value: 5-10mm Siliques vs. Whole Plant
  misc_feature: MA Experiment ID: 20000264 Result: Down-regulated in Transcription
  misc_feature: MA Experiment 20000264 PARAMETER Experiment Name: At_Open_Flower_P Parameter: Age (day) Value: 21
  misc_feature: MA Experiment 20000264 PARAMETER Experiment Name: At_Open_Flower_P Parameter: Plant Line Value: WS
  misc_feature: MA Experiment 20000264 PARAMETER Experiment Name: At_Open_Flower_P Parameter: Tissue Value: Open Flower vs. Whole Plant
  misc_feature: MA Experiment ID: 20000265 Result: Down-regulated in Transcription
  misc_feature: MA Experiment 20000265 PARAMETER Experiment Name: At_Open_Flower_P Parameter: Age (day) Value: 21
  misc_feature: MA Experiment 20000265 PARAMETER Experiment Name: At_Open_Flower_P Parameter: Plant Line Value: WS
  misc_feature: MA Experiment 20000265 PARAMETER Experiment Name: At_Open_Flower_P Parameter: Tissue Value: Closed Flower vs. Whole Plant
  misc_feature: MA Experiment ID: 20000286 Result: Down-regulated in Transcription
  misc_feature: MA Experiment 20000286 PARAMETER Experiment Name: At_Open_Flower_P Parameter: Age (day) Value: 21
  misc_feature: MA Experiment 20000286 PARAMETER Experiment Name: At_Open_Flower_P Parameter: Plant Line Value: WS
  misc_feature: MA Experiment 20000286 PARAMETER Experiment Name: At_Open_Flower_P Parameter: Tissue Value: Half Open vs. Whole Plant
  misc_feature: MA Experiment ID: 20000437 Result: Up-regulated in Transcription
  misc_feature: MA Experiment 20000437 PARAMETER Experiment Name: At_Drought_P Parameter: Age (day) Value: 8
  misc_feature: MA Experiment 20000437 PARAMETER Experiment Name: At_Drought_P Parameter: Organism Value: A. thaliana
  misc_feature: MA Experiment 20000437 PARAMETER Experiment Name: At_Drought_P Parameter: Plant Line Value: WS
  misc_feature: MA Experiment 20000437 PARAMETER Experiment Name: At_Drought_P Parameter: Timepoint (hr) Value: 24
  misc_feature: MA Experiment 20000437 PARAMETER Experiment Name: At_Drought_P Parameter: Tissue Value: Whole Plant
  misc_feature: MA Experiment 20000437 PARAMETER Experiment Name: At_Drought_P Parameter: Treatment Value: Drought vs. No Drought
  misc_feature: MA Experiment ID: 20000438 Result: Down-regulated in Transcription
  misc_feature: MA Experiment 20000438 PARAMETER Experiment Name: At_Shoots__P Parameter: Age (day) Value: 14
  misc_feature: MA Experiment 20000438 PARAMETER Experiment Name: At_Shoots__P Parameter: Tissue Value: Shoots vs. Whole Plant
  misc_feature: MA Experiment ID: 20000439 Result: Down-regulated in Transcription
  misc_feature: MA Experiment 20000439 PARAMETER Experiment Name: At_Roots__P Parameter: Age (day) Value: 14 vs. 21
  misc_feature: MA Experiment 20000439 PARAMETER Experiment Name: At_Roots__P Parameter: Organism Value: A. thaliana
  misc_feature: MA Experiment 20000439 PARAMETER Experiment Name: At_Roots__P Parameter: Tissue Value: Roots vs. Whole Plant
  misc_feature: MA Experiment ID: 20000794 Result: Down-regulated in Transcription
  misc_feature: MA Experiment 20000794 PARAMETER Experiment Name: At_Petals_P Parameter: Age (day) Value: 23-25 days
  misc_feature: MA Experiment 20000794 PARAMETER Experiment Name: At_Petals_P Parameter: Plant Line Value: WS
  misc_feature: MA Experiment 20000794 PARAMETER Experiment Name: At_Petals_P Parameter: Tissue Value: Petals vs. Whole plant
  misc_feature: MA Experiment ID: 20001247 Result: Up-regulated in Transcription
  misc_feature: MA Experiment 20001247 PARAMETER Experiment Name: At_Far-red-induction_P Parameter: Age (day) Value: 7
  misc_feature: MA Experiment 20001247 PARAMETER Experiment Name: At_Far-red-induction_P Parameter: Light Value: Far-red vs. White
  misc_feature: MA Experiment 20001247 PARAMETER Experiment Name: At_Far-red-induction_P Parameter: Organism Value: A. thaliana
  misc_feature: MA Experiment 20001247 PARAMETER Experiment Name: At_Far-red-induction_P Parameter: Plant Line Value: Columbia
  misc_feature: MA Experiment 20001247 PARAMETER Experiment Name: At_Far-red-induction_P Parameter: Timepoint (hr) Value: 1
  misc_feature: MA Experiment 20001247 PARAMETER Experiment Name: At_Far-red-induction_P Parameter: Tissue Value: Whole Plant
  misc_feature: MA Experiment ID: 20001248 Result: Up-regulated in Transcription
  misc_feature: MA Experiment 20001248 PARAMETER Experiment Name: At_Far-red-induction_P Parameter: Age (day) Value: 7
  misc_feature: MA Experiment 20001248 PARAMETER Experiment Name: At_Far-red-induction_P Parameter: Light Value: Far-red vs. White
  misc_feature: MA Experiment 20001248 PARAMETER Experiment Name: At_Far-red-induction_P Parameter: Organism Value: A. thaliana
  misc_feature: MA Experiment 20001248 PARAMETER Experiment Name: At_Far-red-induction_P Parameter: Plant Line Value: Columbia
  misc_feature: MA Experiment 20001248 PARAMETER Experiment Name: At_Far-red-induction_P Parameter: Timepoint (hr) Value: 4
  misc_feature: MA Experiment 20001248 PARAMETER Experiment Name: At_Far-red-induction_P Parameter: Tissue Value: Whole Plant
  misc_feature: MA Experiment ID: 20001450 Result: Up-regulated in Transcription
  misc_feature: MA Experiment 20001450 PARAMETER Experiment Name: At_Far-red-induction_P Parameter: Age (day) Value: 7
  misc_feature: MA Experiment 20001450 PARAMETER Experiment Name: At_Far-red-induction_P Parameter: Light Value: Far-red vs. White
  misc_feature: MA Experiment 20001450 PARAMETER Experiment Name: At_Far-red-induction_P Parameter: Organism Value: A. thaliana
  misc_feature: MA Experiment 20001450 PARAMETER Experiment Name: At_Far-red-induction_P Parameter: Plant Line Value: Columbia
  misc_feature: MA Experiment 20001450 PARAMETER Experiment Name: At_Far-red-induction_P Parameter: Timepoint (hr) Value: 8
  misc_feature: MA Experiment 20001450 PARAMETER Experiment Name: At_Far-red-induction_P Parameter: Tissue Value: Whole Plant
  misc_feature: MA Experiment ID: 20001451 Result: Up-regulated in Transcription
  misc_feature: MA Experiment 20001451 PARAMETER Experiment Name: At_Far-red-induction_P Parameter: Age (day) Value: 7
  misc_feature: MA Experiment 20001451 PARAMETER Experiment Name: At_Far-red-induction_P Parameter: Light Value: Far-red vs. White
  misc_feature: MA Experiment 20001451 PARAMETER Experiment Name: At_Far-red-induction_P Parameter: Organism Value: A. thaliana
  misc_feature: MA Experiment 20001451 PARAMETER Experiment Name: At_Far-red-induction_P Parameter: Plant Line Value: Columbia
  misc_feature: MA Experiment 20001451 PARAMETER Experiment Name: At_Far-red-induction_P Parameter: Timepoint (hr) Value: 24
  misc_feature: MA Experiment 20001451 PARAMETER Experiment Name: At_Far-red-induction_P Parameter: Tissue Value: Whole Plant
  misc_feature: MA Experiment ID: 20001556 Result: Down-regulated in Transcription
  misc_feature: MA Experiment 20001556 PARAMETER Experiment Name: At_Drought_Soil_Dry_P Parameter: Age (day) Value: 26
  misc_feature: MA Experiment 20001556 PARAMETER Experiment Name: At_Drought_Soil_Dry_P Parameter: Organism Value: A. thaliana
  misc_feature: MA Experiment 20001556 PARAMETER Experiment Name: At_Drought_Soil_Dry_P Parameter: Plant Line Value: WS
  misc_feature: MA Experiment 20001556 PARAMETER Experiment Name: At_Drought_Soil_Dry_P Parameter: Post Timepoint (hr) Value: None
  misc_feature: MA Experiment 20001556 PARAMETER Experiment Name: At_Drought_Soil_Dry_P Parameter: Post-Treatment Value: None
  misc_feature: MA Experiment 20001556 PARAMETER Experiment Name: At_Drought_Soil_Dry_P Parameter: Timepoint (day) Value: 12
  misc_feature: MA Experiment 20001556 PARAMETER Experiment Name: At_Drought_Soil_Dry_P Parameter: Treatment Value: Drought vs. No Drought
  misc_feature: MA Experiment ID: 20001557 Result: Down-regulated in Transcription
  misc_feature: MA Experiment 20001557 PARAMETER Experiment Name: At_Drought_Soil_Dry_P Parameter: Age (day) Value: 27
  misc_feature: MA Experiment 20001557 PARAMETER Experiment Name: At_Drought_Soil_Dry_P Parameter: Organism Value: A. thaliana
  misc_feature: MA Experiment 20001557 PARAMETER Experiment Name: At_Drought_Soil_Dry_P Parameter: Plant Line Value: WS
  misc_feature: MA Experiment 20001557 PARAMETER Experiment Name: At_Drought_Soil_Dry_P Parameter: Post Timepoint (hr) Value: 3
  misc_feature: MA Experiment 20001557 PARAMETER Experiment Name: At_Drought_Soil_Dry_P Parameter: Post-Treatment Value: Re-Water vs. No Drought
  misc_feature: MA Experiment 20001557 PARAMETER Experiment Name: At_Drought_Soil_Dry_P Parameter: Timepoint (day) Value: 13
  misc_feature: MA Experiment 20001557 PARAMETER Experiment Name: At_Drought_Soil_Dry_P Parameter: Treatment Value: Drought vs. No Drought
  misc_feature: MA Experiment ID: 20001558 Result: Down-regulated in Transcription
  misc_feature: MA Experiment 20001558 PARAMETER Experiment Name: At_Drought_Soil_Dry_P Parameter: Age (day) Value: 27
  misc_feature: MA Experiment 20001558 PARAMETER Experiment Name: At_Drought_Soil_Dry_P Parameter: Organism Value: A. thaliana
  misc_feature: MA Experiment 20001558 PARAMETER Experiment Name: At_Drought_Soil_Dry_P Parameter: Plant Line Value: WS
  misc_feature: MA Experiment 20001558 PARAMETER Experiment Name: At_Drought_Soil_Dry_P Parameter: Post Timepoint (hr) Value: 6
  misc_feature: MA Experiment 20001558 PARAMETER Experiment Name: At_Drought_Soil_Dry_P Parameter: Post-Treatment Value: Re-Water vs. No Drought
  misc_feature: MA Experiment 20001558 PARAMETER Experiment Name: At_Drought_Soil_Dry_P Parameter: Timepoint (day) Value: 13
  misc_feature: MA Experiment 20001558 PARAMETER Experiment Name: At_Drought_Soil_Dry_P Parameter: Treatment Value: Drought vs. No Drought
  misc_feature: MA Experiment ID: 20001904 Result: Down-regulated in Transcription
  misc_feature: MA Experiment 20001904 PARAMETER Experiment Name: At_Drought_Reproduction_P Parameter: Age (day) Value: 37
  misc_feature: MA Experiment 20001904 PARAMETER Experiment Name: At_Drought_Reproduction_P Parameter: Organism Value: A. thaliana
  misc_feature: MA Experiment 20001904 PARAMETER Experiment Name: At_Drought_Reproduction_P Parameter: Plant Line Value: WS
  misc_feature: MA Experiment 20001904 PARAMETER Experiment Name: At_Drought_Reproduction_P Parameter: Timepoint (day) Value: 7
  misc_feature: MA Experiment 20001904 PARAMETER Experiment Name: At_Drought_Reproduction_P Parameter: Tissue Value: Rosettes
  misc_feature: MA Experiment 20001904 PARAMETER Experiment Name: At_Drought_Reproduction_P Parameter: Treatment Value: Drought vs. No Drought
  misc_feature: MA Experiment ID: 20001905 Result: Down-regulated in Transcription
  misc_feature: MA Experiment 20001905 PARAMETER Experiment Name: At_Drought_Reproduction_P Parameter: Age (day) Value: 40
  misc_feature: MA Experiment 20001905 PARAMETER Experiment Name: At_Drought_Reproduction_P Parameter: Organism Value: A. thaliana
  misc_feature: MA Experiment 20001905 PARAMETER Experiment Name: At_Drought_Reproduction_P Parameter: Plant Line Value: WS
  misc_feature: MA Experiment 20001905 PARAMETER Experiment Name: At_Drought_Reproduction_P Parameter: Timepoint (day) Value: 10
  misc_feature: MA Experiment 20001905 PARAMETER Experiment Name: At_Drought_Reproduction_P Parameter: Tissue Value: Rosettes
  misc_feature: MA Experiment 20001905 PARAMETER Experiment Name: At_Drought_Reproduction_P Parameter: Treatment Value: Drought vs. No Drought
  misc_feature: MA Experiment ID: 20001906 Result: Down-regulated in Transcription
  misc_feature: MA Experiment 20001906 PARAMETER Experiment Name: At_Drought_Reproduction_P Parameter: Age (day) Value: 35
  misc_feature: MA Experiment 20001906 PARAMETER Experiment Name: At_Drought_Reproduction_P Parameter: Organism Value: A. thaliana
  misc_feature: MA Experiment 20001906 PARAMETER Experiment Name: At_Drought_Reproduction_P Parameter: Plant Line Value: WS
  misc_feature: MA Experiment 20001906 PARAMETER Experiment Name: At_Drought_Reproduction_P Parameter: Timepoint (day) Value: 5
  misc_feature: MA Experiment 20001906 PARAMETER Experiment Name: At_Drought_Reproduction_P Parameter: Tissue Value: Siliques
  misc_feature: MA Experiment 20001906 PARAMETER Experiment Name: At_Drought_Reproduction_P Parameter: Treatment Value: Drought vs. No Drought
ctttttttagttcccaaaagatcgaacttggcgctactttcattttctcatctctgtttttccaacatcctaagaacagagttcgttgctccttttgttttctttaaagaaaaagtcagattcagatacatacatactctgaagaacatgtcgacgcgaagacgaactttactcaaagttataattcttggagacagcggggttggcaaaacatcgttgatgaatcaatatgtgaataacaagtttagtcaacagtacaaagctacgatcggagctgattttgtcactaaggagcttcaaattgatgacaggcttgtcacattgcaaatatgggacactgctgggcaagagaggtttcaaagtcttggtgttgctttctatagaggtgcagattgttgtgttcttgtctatgatgtgaatcacttgaagtcatttgaatctctcgacaattggcacaacgagtttcttacacgggctagtccacgtgacccaatggcattcccttttatacttcttggtaataaggttgatattgatggaggaaatagccgagtggtatctgagaagaaggctagagaatggtgtgctgaaaagggaaacatagtctatttcgagacatcggctaaagaagattacaatgtcgatgactccttcttgtgcatcacaaaacttgcccttgcaaatgaacgcgaccaagatatatatttccagccagatactggttcggtgcctgagcaaagaggaggttgtgcttgctgaatgctgaagaaacatttcttactctcttgatttatgcattacttgttgtgtgtgtctataatcttaatgctgagaaggaccaataaaacttgtattgttccctaagtaaggttttgttacctttctggttcttcatctttgacatttggtggttcacgatttgtatgtaacaacagttcaagtgt

SEQ ID NO: 82741 - protein, 252 aa, Arabidopsis thaliana
  peptide (1)..(252): Ceres Seq. ID no. 12667158
  misc_feature (59)..(227): Pfam Name: Ras family Pfam Description: Ras family
  misc_feature (50)..(252): Homolog of NCBI NO: 15219943 NR Description: Ras-related GTP-binding protein (Rab7); protein At1g22740.1, supported by cDNA: gi_15718415 [Arabidopsis
  misc_feature (50)..(252): Homolog of NCBI NO: 1370182 NR Description: RAB7A [Lotus japonicus]
  misc_feature (50)..(252): Homolog of NCBI NO: 3914559 NR Description: RAS-RELATED PROTEIN RAB7
  misc_feature (50)..(252): Homolog of NCBI NO: 541949 NR Description: rab7 protein - Soybean
  misc_feature (50)..(252): Homolog of NCBI NO: 3914558 NR Description: RAS-RELATED PROTEIN RAB7 >gi|629657|pir||S39567
  misc_feature (50)..(252): Homolog of NCBI NO: 7438410 NR Description: GTP-binding protein Rab7c - common tobacco
  misc_feature (50)..(251): Homolog of NCBI NO: 1370184 NR Description: RAB7B [Lotus japonicus]
  misc_feature (50)..(252): Homolog of NCBI NO: 15234026 NR Description: GTP-binding protein, putative; protein id: supported by cDNA: gi_15718417 [Arabidopsis thaliana]
  misc_feature (50)..(252): Homolog of NCBI NO: 7438424 NR Description: rab7 protein homolog F17A8.70 - Arabidopsis
  misc_feature (50)..(252): Homolog of NCBI NO: 3914550 NR Description: RAS-RELATED PROTEIN RAB7
LFLVPKRSNLALLSFSHLCFSNILRTEFVAPFVFFKEKVRFRYIHTLKNMSTRRRTLLKVIILGDSGVGKTSLMNQYVNNKFSQQYKATIGADFVTKELQIDDRLVTLQIWDTAGQERFQSLGVAFYRGADCCVLVYDVNHLKSFESLDNWHNEFLTRASPRDPMAFPFILLGNKVDIDGGNSRVVSEKKAREWCAEKGNIVYFETSAKEDYNVDDSFLCITKLALANERDQDIYFQPDTGSVPEQRGGCAC

SEQ ID NO: 82742 - protein, 203 aa, Arabidopsis thaliana
  peptide (1)..(203): Ceres Seq. ID no. 12667159
  misc_feature (10)..(178): Pfam Name: Ras family Pfam Description: Ras family
  misc_feature (1)..(203): Homolog of NCBI NO: 15219943 NR Description: Ras-related GTP-binding protein (Rab7); protein At1g22740.1, supported by cDNA: gi_15718415 [Arabidopsis
  misc_feature (1)..(203): Homolog of NCBI NO: 1370182 NR Description: RAB7A [Lotus japonicus]
  misc_feature (1)..(203): Homolog of NCBI NO: 3914559 NR Description: RAS-RELATED PROTEIN RAB7
  misc_feature (1)..(203): Homolog of NCBI NO: 541949 NR Description: rab7 protein - Soybean
  misc_feature (1)..(203): Homolog of NCBI NO: 3914558 NR Description: RAS-RELATED PROTEIN RAB7 >gi|629657|pir||S39567
  misc_feature (1)..(203): Homolog of NCBI NO: 7438410 NR Description: GTP-binding protein Rab7c - common tobacco
  misc_feature (1)..(202): Homolog of NCBI NO: 1370184 NR Description: RAB7B [Lotus japonicus]
  misc_feature (1)..(203): Homolog of NCBI NO: 15234026 NR Description: GTP-binding protein, putative; protein id: supported by cDNA: gi_15718417 [Arabidopsis thaliana]
  misc_feature (1)..(203): Homolog of NCBI NO: 7438424 NR Description: rab7 protein homolog F17A8.70 - Arabidopsis
  misc_feature (1)..(203): Homolog of NCBI NO: 3914550 NR Description: RAS-RELATED PROTEIN RAB7
MSTRRRTLLKVIILGDSGVGKTSLMNQYVNNKFSQQYKATIGADFVTKELQIDDRLVTLQIWDTAGQERFQSLGVAFYRGADCCVLVYDVNHLKSFESLDNWHNEFLTRASPRDPMAFPFILLGNKVDIDGGNSRVVSEKKAREWCAEKGNIVYFETSAKEDYNVDDSFLCITKLALANERDQDIYFQPDTGSVPEQRGGCAC

SEQ ID NO: 82743 - protein, 179 aa, Arabidopsis thaliana
  peptide (1)..(179): Ceres Seq. ID no. 12667160
  misc_feature (1)..(154): Pfam Name: Ras family Pfam Description: Ras family
  misc_feature (1)..(179): Homolog of NCBI NO: 15219943 NR Description: Ras-related GTP-binding protein (Rab7); protein At1g22740.1, supported by cDNA: gi_15718415 [Arabidopsis
  misc_feature (1)..(179): Homolog of NCBI NO: 1370182 NR Description: RAB7A [Lotus japonicus]
  misc_feature (1)..(179): Homolog of NCBI NO: 3914559 NR Description: RAS-RELATED PROTEIN RAB7
  misc_feature (1)..(179): Homolog of NCBI NO: 541949 NR Description: rab7 protein - Soybean
  misc_feature (1)..(179): Homolog of NCBI NO: 3914558 NR Description: RAS-RELATED PROTEIN RAB7 >gi|629657|pir||S39567
  misc_feature (1)..(179): Homolog of NCBI NO: 7438410 NR Description: GTP-binding protein Rab7c - common tobacco
  misc_feature (1)..(178): Homolog of NCBI NO: 1370184 NR Description: RAB7B [Lotus japonicus]
  misc_feature (1)..(179): Homolog of NCBI NO: 15234026 NR Description: GTP-binding protein, putative; protein id: supported by cDNA: gi_15718417 [Arabidopsis thaliana]
  misc_feature (1)..(179): Homolog of NCBI NO: 7438424 NR Description: rab7 protein homolog F17A8.70 - Arabidopsis
  misc_feature (1)..(179): Homolog of NCBI NO: 3914550 NR Description: RAS-RELATED PROTEIN RAB7
MNQYVNNKFSQQYKATIGADFVTKELQIDDRLVTLQIWDTAGQERFQSLGVAFYRGADCCVLVYDVNHLKSFESLDNWHNEFLTRASPRDPMAFPFILLGNKVDIDGGNSRVVSEKKAREWCAEKGNIVYFETSAKEDYNVDDSFLCITKLALANERDQDIYFQPDTGSVPEQRGGCAC

SEQ ID NO: 82744 - DNA, 1474 bp, Arabidopsis thaliana
  misc_feature (1)..(1474): Ceres Seq. ID no. 12667177
aaaaaaaacttatcttatgaatctattaagtagatctctaatctctttcctactatttatatagactccttttgttgtagcctacttcttgcatattaaccccttgtgtctctcacaatcccactagtactgaaacatagagatagacttagctcaagataagctaatttgttttcactctaatatagagagagagagaaagagatcggagaggaaaaaatggcgggaggaatagggctgggagacacgacatacacgaaggtgtttgtgggaggattagcttgggagacgcataaggagacgatgaagaagcactttgagcagtttggagagattttggaagccgtagtcatcaccgacaaggcctccggtagatccaagggctacggattcgtgacattcagggaagcggaggcggcgaggagtgcttgtgtggatgctactccggtgatcgacgggagaagagcaaattgcaacctcgcctctctcggtcttcaaagatccaaaccctccactcctaaccatggaggaggaggcaggattaacaatatgagagtgatgatgagcacaatgcagactggttttggaccacctccaccaccacaaccacccaccttcactcactatccccatctccctctcaatctctttgggtactctccatactcgccagactactcatcattccctacgaacttatacggcatgtacggctgcacttctggaggacaatacggagtctatggaaacagaaacagcggaggcggtggactaaccgcagcagccgcatccgctactcctttttatccttgtggtggaggacatggtggggtccagttctctcaaccacaaccattttatcatcacttgtcttcttataaccctcaccattactctcctccgaccttttctatgcaacaaggcgtaacaggctttccgcttcaaccacctcttattccttaccgttaaagaagcttagagtctttggtagctatcaagcttcatatcatcatcttcttcttctcaggtcaagagccattctatggtttaaaggatgctcctggctaatctcagcacttagtttctctccctctgctctaaaagctaccccattttatggaatttggaggtggctttttaagcagatcccaatgggatctcctgtttcagatggtgatcatgtcgtatttgtcatctctcaccttcttgcaattgcatcttctcgagagaatgggtttctctttgagagatattgctaatggagcatcatcatcatcaatcactcatgtgccaatctcaagctgatgcatgtatcagcttaattagtttatgttgttttagcctaaggatggctaatcaacaagacaaagaaaatgtctgttaggataatgtaaaaaaaaaatcaagcaccaaaacaattttctgtttgaaagactgaaaaaacgattgcataattaagcaaaatgatcagcac

SEQ ID NO: 82745 - protein, 249 aa, Arabidopsis thaliana
  peptide (1)..(249): Ceres Seq. ID no. 12667178
  misc_feature (15)..(70): Pfam Name: RNA recognition motif. (a.k.a. RRM, RBD, or RNP domain) Pfam Description: RNA recognition motif. (a.k.a. RRM, RBD, or RNP
  misc_feature (1)..(206): Homolog of NCBI NO: 25518372 NR Description: hypothetical protein F19G10.13 - Arabidopsis
  misc_feature (1)..(249): Homolog of NCBI NO: 18395177 NR Description: RRM-containing protein; protein id: At1g22910.1, by cDNA: gi_13605870, supported by cDNA: gi_16323281 [Arabidopsis >gi|13605871|gb|AAK32921.1|AF367334_1 At1g22910/F19G10_13
  misc_feature (5)..(242): Homolog of NCBI NO: 34907334 NR Description: P0698A10.29 [Oryza sativa (japonica
  misc_feature (9)..(228): Homolog of NCBI NO: 14532532 NR Description: At1g33470/F10C21_14 [Arabidopsis thaliana]
  misc_feature (3)..(201): Homolog of NCBI NO: 34905758 NR Description: similar to RNA-binding protein [Oryza sativa
  misc_feature (8)..(222): Homolog of NCBI NO: 15010636 NR Description: At1g20880/F9H16_14 [Arabidopsis thaliana]
  misc_feature (8)..(202): Homolog of NCBI NO: 18394923 NR Description: RRM-containing protein; protein id: At1g20880.1,
  misc_feature (8)..(202): Homolog of NCBI NO: 23505939 NR Description: At1g20880/F9H16_14 [Arabidopsis thaliana]
  misc_feature (8)..(245): Homolog of NCBI NO: 18411885 NR Description: RRM-containing protein; protein id: At1g78260.1, by cDNA: 123429. [Arabidopsis thaliana]
  misc_feature (8)..(234): Homolog of NCBI NO: 25518109 NR Description: T16E15.6 protein - Arabidopsis thaliana Contains similarity to seb4D protein from Mus musculus gb|X75316
MAGGIGLGDTTYTKVFVGGLAWETHKETMKKHFEQFGEILEAVVITDKASGRSKGYGFVTFREAEAARSACVDATPVIDGRRANCNLASLGLQRSKPSTPNHGGGGRINNMRVMMSTMQTGFGPPPPPQPPTFTHYPHLPLNLFGYSPYSPDYSSFPTNLYGMYGCTSGGQYGVYGNRNSGGGGLTAAAASATPFYPCGGGHGGVQFSQPQPFYHHLSSYNPHHYSPPTFSMQQGVTGFPLQPPLIPYR

SEQ ID NO: 82746 - protein, 221 aa, Arabidopsis thaliana
  peptide (1)..(221): Ceres Seq. ID no. 12667179
  misc_feature (1)..(42): Pfam Name: RNA recognition motif. (a.k.a. RRM, RBD, or RNP domain) Pfam Description: RNA recognition motif. (a.k.a. RRM, RBD, or RNP
  misc_feature (1)..(178): Homolog of NCBI NO: 25518372 NR Description: hypothetical protein F19G10.13 - Arabidopsis
  misc_feature (1)..(221): Homolog of NCBI NO: 18395177 NR Description: RRM-containing protein; protein id: At1g22910.1, by cDNA: gi_13605870, supported by cDNA: gi_16323281 [Arabidopsis >gi|13605871|gb|AAK32921.1|AF367334_1 At1g22910/F19G10_13
  misc_feature (1)..(214): Homolog of NCBI NO: 34907334 NR Description: P0698A10.29 [Oryza sativa (japonica
  misc_feature (1)..(200): Homolog of NCBI NO: 14532532 NR Description: At1g33470/F10C21_14 [Arabidopsis thaliana]
  misc_feature (1)..(173): Homolog of NCBI NO: 34905758 NR Description: similar to RNA-binding protein [Oryza sativa
  misc_feature (1)..(194): Homolog of NCBI NO: 15010636 NR Description: At1g20880/F9H16_14 [Arabidopsis thaliana]
  misc_feature (1)..(174): Homolog of NCBI NO: 18394923 NR Description: RRM-containing protein; protein id: At1g20880.1,
  misc_feature (1)..(174): Homolog of NCBI NO: 23505939 NR Description: At1g20880/F9H16_14 [Arabidopsis thaliana]
  misc_feature (1)..(217): Homolog of NCBI NO: 18411885 NR Description: RRM-containing protein; protein id: At1g78260.1, by cDNA: 123429. [Arabidopsis thaliana]
  misc_feature (1)..(206): Homolog of NCBI NO: 25518109 NR Description: T16E15.6 protein - Arabidopsis thaliana Contains similarity to seb4D protein from Mus musculus gb|X75316
MKKHFEQFGEILEAVVITDKASGRSKGYGFVTFREAEAARSACVDATPVIDGRRANCNLASLGLQRSKPSTPNHGGGGRINNMRVMMSTMQTGFGPPPPPQPPTFTHYPHLPLNLFGYSPYSPDYSSFPTNLYGMYGCTSGGQYGVYGNRNSGGGGLTAAAASATPFYPCGGGHGGVQFSQPQPFYHHLSSYNPHHYSPPTFSMQQGVTGFPLQPPLIPYR

SEQ ID NO: 82747 - protein, 139 aa, Arabidopsis thaliana
  peptide (1)..(139): Ceres Seq. ID no. 12667180
  misc_feature (1)..(96): Homolog of NCBI NO: 25518372 NR Description: hypothetical protein F19G10.13 - Arabidopsis
  misc_feature (1)..(139): Homolog of NCBI NO: 18395177 NR Description: RRM-containing protein; protein id: At1g22910.1, by cDNA: gi_13605870, supported by cDNA: gi_16323281 [Arabidopsis >gi|13605871|gb|AAK32921.1|AF367334_1 At1g22910/F19G10_13
  misc_feature (1)..(132): Homolog of NCBI NO: 34907334 NR Description: P0698A10.29 [Oryza sativa (japonica
  misc_feature (1)..(118): Homolog of NCBI NO: 14532532 NR Description: At1g33470/F10C21_14 [Arabidopsis thaliana]
  misc_feature (1)..(91): Homolog of NCBI NO: 34905758 NR Description: similar to RNA-binding protein [Oryza sativa
  misc_feature (1)..(112): Homolog of NCBI NO: 15010636 NR Description: At1g20880/F9H16_14 [Arabidopsis thaliana]
  misc_feature (1)..(92): Homolog of NCBI NO: 18394923 NR Description: RRM-containing protein; protein id: At1g20880.1,
  misc_feature (1)..(92): Homolog of NCBI NO: 23505939 NR Description: At1g20880/F9H16_14 [Arabidopsis thaliana]
  misc_feature (1)..(135): Homolog of NCBI NO: 18411885 NR Description: RRM-containing protein; protein id: At1g78260.1, by cDNA: 123429. [Arabidopsis thaliana]
  misc_feature (1)..(124): Homolog of NCBI NO: 25518109 NR Description: T16E15.6 protein - Arabidopsis thaliana Contains similarity to seb4D protein from Mus musculus gb|X75316
MRVMMSTMQTGFGPPPPPQPPTFTHYPHLPLNLFGYSPYSPDYSSFPTNLYGMYGCTSGGQYGVYGNRNSGGGGLTAAAASATPFYPCGGGHGGVQFSQPQPFYHHLSSYNPHHYSPPTFSMQQGVTGFPLQPPLIPYR

SEQ ID NO: 82748 - DNA, 2157 bp, Arabidopsis thaliana
  misc_feature (1)..(2157): Ceres Seq. ID no. 12667185
  misc_feature: MA Experiment ID: 20001451 Result: Down-regulated in Transcription
  misc_feature: MA Experiment 20001451 PARAMETER Experiment Name: At_Far-red-induction_P Parameter: Age (day) Value: 7
  misc_feature: MA Experiment 20001451 PARAMETER Experiment Name: At_Far-red-induction_P Parameter: Light Value: Far-red vs. White
  misc_feature: MA Experiment 20001451 PARAMETER Experiment Name: At_Far-red-induction_P Parameter: Organism Value: A. thaliana
  misc_feature: MA Experiment 20001451 PARAMETER Experiment Name: At_Far-red-induction_P Parameter: Plant Line Value: Columbia
  misc_feature: MA Experiment 20001451 PARAMETER Experiment Name: At_Far-red-induction_P Parameter: Timepoint (hr) Value: 24
  misc_feature: MA Experiment 20001451 PARAMETER Experiment Name: At_Far-red-induction_P Parameter: Tissue Value: Whole Plant
  misc_feature: MA Experiment ID: 20001558 Result: Up-regulated in Transcription
  misc_feature: MA Experiment 20001558 PARAMETER Experiment Name: At_Drought_Soil_Dry_P Parameter: Age (day) Value: 27
  misc_feature: MA Experiment 20001558 PARAMETER Experiment Name: At_Drought_Soil_Dry_P Parameter: Organism Value: A. thaliana
  misc_feature: MA Experiment 20001558 PARAMETER Experiment Name: At_Drought_Soil_Dry_P Parameter: Plant Line Value: WS
  misc_feature: MA Experiment 20001558 PARAMETER Experiment Name: At_Drought_Soil_Dry_P Parameter: Post Timepoint (hr) Value: 6
  misc_feature: MA Experiment 20001558 PARAMETER Experiment Name: At_Drought_Soil_Dry_P Parameter: Post-Treatment Value: Re-Water vs. No Drought
  misc_feature: MA Experiment 20001558 PARAMETER Experiment Name: At_Drought_Soil_Dry_P Parameter: Timepoint (day) Value: 13
  misc_feature: MA Experiment 20001558 PARAMETER Experiment Name: At_Drought_Soil_Dry_P Parameter: Treatment Value: Drought vs. No Drought
atgatcctatgtctccgtctctgtctcagagcttcgagatctttcttctctatttctactaccaacaacaacaataacctctcacgcttcctctttcgattctctactcttcctcattgcgctgcatcgtcttcttcttcatcttccaatctcgagtcttattacgctaatctcattttgagctctcacggagatagtaataaacctaatcggaagtggtcttctcatcagtttcgtcttcttctaactgatccaaatttgcttattagagtcctcaatatgattcgggtcaaacccgaaatcgcgtttcggtttttcaattggatacagagacagagcgatgtgaagcagtcaaggcaagcttttgctgcgatgttggagattttagctgagaatgatttgatgagtgaagcttatttggttgctgagaggagtattgatcttggtatgcacgaaattgatgatcttttgattgatgggagctttgataagttgattgctctcaagcttttagatctgttgttgtgggtttacactaagaaatctatggcggagaagtttttgttgagttttgagaagatgattaggaaagggtttttacctagtgttagaaattgtaacatagttttgaaggttcttagggattcaaggatgatgaataaggcttcagcggtttatgagacgatgattgagcatggtattatgcctacggttattacatttaatactatgttggattcttgtttcaaggctggtgatttggagcgagttgacaagatttggttagagatgaagagaagaaatattgaatttagtgaggtgacttacaatatactgatcaatggattttccaagaatggtaaaatggaggaagctagacggtttcatggagatatgcggagatcggggttcgctgttacaccttactcgtttaacccgttgattgaagggtattgcaaacaaggcttgtttgatgatgcttggggagttacagacgaaatgctcaatgcgggtatttatccaaccacatccacgtataatatttatatatgtgctctctgcgattttggaagaatagatgatgccagagagctgttatctagtatggctgctccagatgttgtgtcttataacactctgatgcatggatacatcaagatggggaagtttgtagaggcttctctcttgtttgatgacttgagagctggggatatccatcccagtattgtgacctataatactctaatagatggtctttgtgagtcagggaacttggaaggtgctcagcggttaaaagaagagatgaccacccaactgatatttcctgatgtgattacgtacacaactcttgtaaaaggatttgttaagaatgggaatctttccatggctactgaagtttatgacgagatgctgaggaaagggattaaacctgatggttatgcatacactacaagggctgttggtgaattgcgacttggagattcagacaaagcatttcgtctgcacgaagagatggtggcaacggatcatcatgctccagatctgaccatctataacgttcgtatagatggactctgcaaggttgggaatctggtaaaagcgattgagtttcagcgtaagattttcagagttggtcttgtcccagatcatgttacttacaccacggttattcgcggttatttggagaatggccagtttaagatggccagaaacttgtatgatgaaatgctgagaaaaaggttatatccctctgtgattacctactttgtgttgatttatggtcatgcaaaagctggaaggctagaacaggccttccagtactccaccgagatgaaaaagagaggcgttcgtccaaatgtcatgacgcacaatgctcttttatatggcatgtgcaaagctggtaatatagatgaagcttacagatacttgtgcaagatggaagaagaagggattccaccaaataaatatagctacactatgcttataagcaagaactgtgattttgaaaagtgggaagaggttgttaaattgtataaagagatgctagataaagagattgagccagatggttacacacatagagccttgttcaaacatttggagaaagaccacgagtcacgagaggttgagttccttgaaaggctattactcagttga

SEQ ID NO: 82749 - protein, 718 aa, Arabidopsis thaliana
  peptide (1)..(718): Ceres Seq. ID no. 12667186
  misc_feature (309)..(343): Pfam Name: PPR repeat Pfam Description: PPR repeat
  misc_feature (38)..(696): Homolog of NCBI NO: 15240891 NR Description: putative protein; protein id: At5g01110.1
  misc_feature (187)..(718): Homolog of NCBI NO: 30840327 NR Description: fertility restorer homologue [Raphanus sativus]
  misc_feature (187)..(718): Homolog of NCBI NO: 30840221 NR Description: fertility restorer [Raphanus sativus]
  misc_feature (96)..(702): Homolog of NCBI NO: 34394343 NR Description: putative fertility restorer homologue [Oryza
  misc_feature (169)..(716): Homolog of NCBI NO: 34902570 NR Description: Putative indole-3-acetate
  misc_feature (82)..(712): Homolog of NCBI NO: 15227316 NR Description: putative salt-inducible protein; protein id: supported by cDNA: gi_20465656 [Arabidopsis thaliana]
  misc_feature (191)..(715): Homolog of NCBI NO: 15221691 NR Description: unknown protein; protein id: At1g63130.1
  misc_feature (207)..(679): Homolog of NCBI NO: 15242446 NR Description: putative protein; protein id: At5g39710.1
  misc_feature (220)..(689): Homolog of NCBI NO: 34902570 NR Description: Putative indole-3-acetate
  misc_feature (172)..(635): Homolog of NCBI NO: 15221515 NR Description: putative membrane-associated salt-inducible (AL021637); similar to EST gb|AA728420; protein id: At1g62590.1
MILCLRLCLRASRSFFSISTTNNNNNLSRFLFRFSTLPHCAASSSSSSSNLESYYANLILSSHGDSNKPNRKWSSHQFRLLLTDPNLLIRVLNMIRVKPEIAFRFFNWIQRQSDVKQSRQAFAAMLEILAENDLMSEAYLVAERSIDLGMHEIDDLLIDGSFDKLIALKLLDLLLWVYTKKSMAEKFLLSFEKMIRKGFLPSVRNCNIVLKVLRDSRMMNKASAVYETMIEHGIMPTVITFNTMLDSCFKAGDLERVDKIWLEMKRRNIEFSEVTYNILINGFSKNGKMEEARRFHGDMRRSGFAVTPYSFNPLIEGYCKQGLFDDAWGVTDEMLNAGIYPTTSTYNIYICALCDFGRIDDARELLSSMAAPDVVSYNTLMHGYIKMGKFVEASLLFDDLRAGDIHPSIVTYNTLIDGLCESGNLEGAQRLKEEMTTQLIFPDVITYTTLVKGFVKNGNLSMATEVYDEMLRKGIKPDGYAYTTRAVGELRLGDSDKAFRLHEEMVATDHHAPDLTIYNVRIDGLCKVGNLVKAIEFQRKIFRVGLVPDHVTYTTVIRGYLENGQFKMARNLYDEMLRKRLYPSVITYFVLIYGHAKAGRLEQAFQYSTEMKKRGVRPNVMTHNALLYGMCKAGNIDEAYRYLCKMEEEGIPPNKYSYTMLISKNCDFEKWEEVVKLYKEMLDKEIEPDGYTHRALFKHLEKDHESREVEFLERLLLS

SEQ ID NO: 82750 - protein, 625 aa, Arabidopsis thaliana
  peptide (1)..(625): Ceres Seq. ID no. 12667187
  misc_feature (216)..(250): Pfam Name: PPR repeat Pfam Description: PPR repeat
  misc_feature (1)..(603): Homolog of NCBI NO: 15240891 NR Description: putative protein; protein id: At5g01110.1
  misc_feature (94)..(625): Homolog of NCBI NO: 30840327 NR Description: fertility restorer homologue [Raphanus sativus]
  misc_feature (94)..(625): Homolog of NCBI NO: 30840221 NR Description: fertility restorer [Raphanus sativus]
  misc_feature (3)..(609): Homolog of NCBI NO: 34394343 NR Description: putative fertility restorer homologue [Oryza
  misc_feature (76)..(623): Homolog of NCBI NO: 34902570 NR Description: Putative indole-3-acetate
  misc_feature (1)..(619): Homolog of NCBI NO: 15227316 NR Description: putative salt-inducible protein; protein id: supported by cDNA: gi_20465656 [Arabidopsis thaliana]
  misc_feature (98)..(622): Homolog of NCBI NO: 15221691 NR Description: unknown protein; protein id: At1g63130.1
  misc_feature (114)..(586): Homolog of NCBI NO: 15242446 NR Description: putative protein; protein id: At5g39710.1
  misc_feature (127)..(596): Homolog of NCBI NO: 34902570 NR Description: Putative indole-3-acetate
  misc_feature (79)..(542): Homolog of NCBI NO: 15221515 NR Description: putative membrane-associated salt-inducible (AL021637); similar to EST gb|AA728420; protein id: At1g62590.1
MIRVKPEIAFRFFNWIQRQSDVKQSRQAFAAMLEILAENDLMSEAYLVAERSIDLGMHEIDDLLIDGSFDKLIALKLLDLLLWVYTKKSMAEKFLLSFEKMIRKGFLPSVRNCNIVLKVLRDSRMMNKASAVYETMIEHGIMPTVITFNTMLDSCFKAGDLERVDKIWLEMKRRNIEFSEVTYNILINGFSKNGKMEEARRFHGDMRRSGFAVTPYSFNPLIEGYCKQGLFDDAWGVTDEMLNAGIYPTTSTYNIYICALCDFGRIDDARELLSSMAAPDVVSYNTLMHGYIKMGKFVEASLLFDDLRAGDIHPSIVTYNTLIDGLCESGNLEGAQRLKEEMTTQLIFPDVITYTTLVKGFVKNGNLSMATEVYDEMLRKGIKPDGYAYTTRAVGELRLGDSDKAFRLHEEMVATDHHAPDLTIYNVRIDGLCKVGNLVKAIEFQRKIFRVGLVPDHVTYTTVIRGYLENGQFKMARNLYDEMLRKRLYPSVITYFVLIYGHAKAGRLEQAFQYSTEMKKRGVRPNVMTHNALLYGMCKAGNIDEAYRYLCKMEEEGIPPNKYSYTMLISKNCDFEKWEEVVKLYKEMLDKEIEPDGYTHRALFKHLEKDHESREVEFLERLLLS

SEQ ID NO: 82751 - protein, 594 aa, Arabidopsis thaliana
  peptide (1)..(594): Ceres Seq. ID no. 12667188
  misc_feature (185)..(219): Pfam Name: PPR repeat Pfam Description: PPR repeat
  misc_feature (1)..(572): Homolog of NCBI NO: 15240891 NR Description: putative protein; protein id: At5g01110.1
  misc_feature (63)..(594): Homolog of NCBI NO: 30840327 NR Description: fertility restorer homologue [Raphanus sativus]
  misc_feature (63)..(594): Homolog of NCBI NO: 30840221 NR Description: fertility restorer [Raphanus sativus]
  misc_feature (1)..(578): Homolog of NCBI NO: 34394343 NR Description: putative fertility restorer homologue [Oryza
  misc_feature (45)..(592): Homolog of NCBI NO: 34902570 NR Description: Putative indole-3-acetate
  misc_feature (1)..(588): Homolog of NCBI NO: 15227316 NR Description: putative salt-inducible protein; protein id: supported by cDNA: gi_20465656 [Arabidopsis thaliana]
  misc_feature (67)..(591): Homolog of NCBI NO: 15221691 NR Description: unknown protein; protein id: At1g63130.1
  misc_feature (83)..(555): Homolog of NCBI NO: 15242446 NR Description: putative protein; protein id: At5g39710.1
  misc_feature (96)..(565): Homolog of NCBI NO: 34902570 NR Description: Putative indole-3-acetate
  misc_feature (48)..(511): Homolog of NCBI NO: 15221515 NR Description: putative membrane-associated salt-inducible (AL021637); similar to EST gb|AA728420; protein id: At1g62590.1
MLEILAENDLMSEAYLVAERSIDLGMHEIDDLLIDGSFDKLIALKLLDLLLWVYTKKSMAEKFLLSFEKMIRKGFLPSVRNCNIVLKVLRDSRMMNKASAVYETMIEHGIMPTVITFNTMLDSCFKAGDLERVDKIWLEMKRRNIEFSEVTYNILINGFSKNGKMEEARRFHGDMRRSGFAVTPYSFNPLIEGYCKQGLFDDAWGVTDEMLNAGIYPTTSTYNIYICALCDFGRIDDARELLSSMAAPDVVSYNTLMHGYIKMGKFVEASLLFDDLRAGDIHPSIVTYNTLIDGLCESGNLEGAQRLKEEMTTQLIFPDVITYTTLVKGFVKNGNLSMATEVYDEMLRKGIKPDGYAYTTRAVGELRLGDSDKAFRLHEEMVATDHHAPDLTIYNVRIDGLCKVGNLVKAIEFQRKIFRVGLVPDHVTYTTVIRGYLENGQFKMARNLYDEMLRKRLYPSVITYFVLIYGHAKAGRLEQAFQYSTEMKKRGVRPNVMTHNALLYGMCKAGNIDEAYRYLCKMEEEGIPPNKYSYTMLISKNCDFEKWEEVVKLYKEMLDKEIEPDGYTHRALFKHLEKDHESREVEFLERLLLS

SEQ ID NO: 82752 - DNA, 672 bp, Arabidopsis thaliana
  misc_feature (1)..(672): Ceres Seq. ID no. 12667197
  misc_feature: MA Experiment ID: 20000169 Result: Up-regulated in Transcription
  misc_feature: MA Experiment 20000169 PARAMETER Experiment Name: At_100uM_ABA_P Parameter: Age (day) Value: 14
  misc_feature: MA Experiment 20000169 PARAMETER Experiment Name: At_100uM_ABA_P Parameter: Organism Value: A. thaliana
  misc_feature: MA Experiment 20000169 PARAMETER Experiment Name: At_100uM_ABA_P Parameter: Plant Line Value: WS
  misc_feature: MA Experiment 20000169 PARAMETER Experiment Name: At_100uM_ABA_P Parameter: Timepoint (hr) Value: 6
  misc_feature: MA Experiment 20000169 PARAMETER Experiment Name: At_100uM_ABA_P Parameter: Tissue Value: Aerial
  misc_feature: MA Experiment 20000169 PARAMETER Experiment Name: At_100uM_ABA_P Parameter: Treatment Value: 100uM ABA vs. No Treatment
  misc_feature: MA Experiment ID: 20000184 Result: Down-regulated in Transcription
  misc_feature: MA Experiment 20000184 PARAMETER Experiment Name: At_Shoots__P Parameter: Age (day) Value: 7
  misc_feature: MA Experiment 20000184 PARAMETER Experiment Name: At_Shoots__P Parameter: Tissue Value: Shoots vs. Whole Plant
  misc_feature: MA Experiment ID: 20000227 Result: Down-regulated in Transcription
  misc_feature: MA Experiment 20000227 PARAMETER Experiment Name: At_Root-Tips-vs-Tops_P Parameter: Tissue Value: Root Tips vs. Root Tops
  misc_feature: MA Experiment ID: 20000234 Result: Down-regulated in Transcription
  misc_feature: MA Experiment 20000234 PARAMETER Experiment Name: At_Siliques_P Parameter: Age (day) Value: 21
  misc_feature: MA Experiment 20000234 PARAMETER Experiment Name: At_Siliques_P Parameter: Organism Value: A. thaliana
  misc_feature: MA Experiment 20000234 PARAMETER Experiment Name: At_Siliques_P Parameter: Plant Line Value: WS
  misc_feature: MA Experiment 20000234 PARAMETER Experiment Name: At_Siliques_P Parameter: Tissue Value: Less Than 5mm Siliques vs. Whole Plant
  misc_feature: MA Experiment ID: 20000235 Result: Down-regulated in Transcription
  misc_feature: MA Experiment 20000235 PARAMETER Experiment Name: At_Siliques_P Parameter: Age (day) Value: 21
  misc_feature: MA Experiment 20000235 PARAMETER Experiment Name: At_Siliques_P Parameter: Organism Value: A. thaliana
  misc_feature: MA Experiment 20000235 PARAMETER Experiment Name: At_Siliques_P Parameter: Plant Line Value: WS
  misc_feature: MA Experiment 20000235 PARAMETER Experiment Name: At_Siliques_P Parameter: Tissue Value: 5-10mm Siliques vs. Whole Plant
  misc_feature: MA Experiment ID: 20000265 Result: Down-regulated in Transcription
  misc_feature: MA Experiment 20000265 PARAMETER Experiment Name: At_Open_Flower_P Parameter: Age (day) Value: 21
  misc_feature: MA Experiment 20000265 PARAMETER Experiment Name: At_Open_Flower_P Parameter: Plant Line Value: WS
  misc_feature: MA Experiment 20000265 PARAMETER Experiment Name: At_Open_Flower_P Parameter: Tissue Value: Closed Flower vs. Whole Plant
  misc_feature: MA Experiment ID: 20000267 Result: Up-regulated in Transcription
  misc_feature: MA Experiment 20000267 PARAMETER Experiment Name: At_Drought_P Parameter: Age (day) Value: 7
  misc_feature: MA Experiment 20000267 PARAMETER Experiment Name: At_Drought_P Parameter: Organism Value: A. thaliana
  misc_feature: MA Experiment 20000267 PARAMETER Experiment Name: At_Drought_P Parameter: Plant Line Value: WS
  misc_feature: MA Experiment 20000267 PARAMETER Experiment Name: At_Drought_P Parameter: Timepoint (hr) Value: 6
  misc_feature: MA Experiment 20000267 PARAMETER Experiment Name: At_Drought_P Parameter: Tissue Value: Whole Plant
  misc_feature: MA Experiment 20000267 PARAMETER Experiment Name: At_Drought_P Parameter: Treatment Value: Drought vs. No Drought
  misc_feature: MA Experiment ID: 20000268 Result: Up-regulated in Transcription
  misc_feature: MA Experiment 20000268 PARAMETER Experiment Name: At_100mM_NaCl__P Parameter: Age (day) Value: 14
  misc_feature: MA Experiment 20000268 PARAMETER Experiment Name: At_100mM_NaCl__P Parameter: Organism Value: A. thaliana
  misc_feature: MA Experiment 20000268 PARAMETER Experiment Name: At_100mM_NaCl__P Parameter: Plant Line Value: WS
  misc_feature: MA Experiment 20000268 PARAMETER Experiment Name: At_100mM_NaCl__P Parameter: Timepoint (hr) Value: 6
  misc_feature: MA Experiment 20000268 PARAMETER Experiment Name: At_100mM_NaCl__P Parameter: Tissue Value: Whole Plant
  misc_feature: MA Experiment 20000268 PARAMETER Experiment Name: At_100mM_NaCl__P Parameter: Treatment Value: 100mM NaCl vs. No Treatment
  misc_feature: MA Experiment ID: 20000269 Result: Down-regulated in Transcription
  misc_feature: MA Experiment 20000269 PARAMETER Experiment Name: At_1mM_KNO3_L-vs-H_Roots_P Parameter: Age (day) Value: 7,10,12
  misc_feature: MA Experiment 20000269 PARAMETER Experiment Name: At_1mM_KNO3_L-vs-H_Roots_P Parameter: Organism Value: A. thaliana
  misc_feature: MA Experiment 20000269 PARAMETER Experiment Name: At_1mM_KNO3_L-vs-H_Roots_P Parameter: Plant Line Value: WS
  misc_feature: MA Experiment 20000269 PARAMETER Experiment Name: At_1mM_KNO3_L-vs-H_Roots_P Parameter: Timepoint (day) Value: 7,10,12
  misc_feature: MA Experiment 20000269 PARAMETER Experiment Name: At_1mM_KNO3_L-vs-H_Roots_P Parameter: Tissue Value: Roots
  misc_feature: MA Experiment 20000269 PARAMETER Experiment Name: At_1mM_KNO3_L-vs-H_Roots_P Parameter: Treatment Value: 1mM KNO3 vs. 50mM KNO3
  misc_feature: MA Experiment ID: 20000436 Result: Up-regulated in Transcription
  misc_feature: MA Experiment 20000436 PARAMETER Experiment Name: At_Drought_P Parameter: Age (day) Value: 7
  misc_feature: MA Experiment 20000436 PARAMETER Experiment Name: At_Drought_P Parameter: Organism Value: A. thaliana
  misc_feature: MA Experiment 20000436 PARAMETER Experiment Name: At_Drought_P Parameter: Plant Line Value: WS
  misc_feature: MA Experiment 20000436 PARAMETER Experiment Name: At_Drought_P Parameter: Timepoint (hr) Value: 12
  misc_feature: MA Experiment 20000436 PARAMETER Experiment Name: At_Drought_P Parameter: Tissue Value: Whole Plant
  misc_feature: MA Experiment 20000436 PARAMETER Experiment Name: At_Drought_P Parameter: Treatment Value: Drought vs. No Drought
  misc_feature: MA Experiment ID: 20000437 Result: Up-regulated in Transcription
  misc_feature: MA Experiment 20000437 PARAMETER Experiment Name: At_Drought_P Parameter: Age (day) Value: 8
  misc_feature: MA Experiment 20000437 PARAMETER Experiment Name: At_Drought_P Parameter: Organism Value: A. thaliana
  misc_feature: MA Experiment 20000437 PARAMETER Experiment Name: At_Drought_P Parameter: Plant Line Value: WS
  misc_feature: MA Experiment 20000437 PARAMETER Experiment Name: At_Drought_P Parameter: Timepoint (hr) Value: 24
  misc_feature: MA Experiment 20000437 PARAMETER Experiment Name: At_Drought_P Parameter: Tissue Value: Whole Plant
  misc_feature: MA Experiment 20000437 PARAMETER Experiment Name: At_Drought_P Parameter: Treatment Value: Drought vs. No Drought
  misc_feature: MA Experiment ID: 20000438 Result: Down-regulated in Transcription
  misc_feature: MA Experiment 20000438 PARAMETER Experiment Name: At_Shoots__P Parameter: Age (day) Value: 14
  misc_feature: MA Experiment 20000438 PARAMETER Experiment Name: At_Shoots__P Parameter: Tissue Value: Shoots vs. Whole Plant
  misc_feature: MA Experiment ID: 20000439 Result: Up-regulated in Transcription
  misc_feature: MA Experiment 20000439 PARAMETER Experiment Name: At_Roots__P Parameter: Age (day) Value: 14 vs. 21
  misc_feature: MA Experiment 20000439 PARAMETER Experiment Name: At_Roots__P Parameter: Organism Value: A. thaliana
  misc_feature: MA Experiment 20000439 PARAMETER Experiment Name: At_Roots__P Parameter: Tissue Value: Roots vs. Whole Plant
  misc_feature: MA Experiment ID: 20000453 Result: Up-regulated in Transcription
  misc_feature: MA Experiment 20000453 PARAMETER Experiment Name: At_100uM_ABA_P Parameter: Age (day) Value: 15
  misc_feature: MA Experiment 20000453 PARAMETER Experiment Name: At_100uM_ABA_P Parameter: Organism Value: A. thaliana
  misc_feature: MA Experiment 20000453 PARAMETER Experiment Name: At_100uM_ABA_P Parameter: Plant Line Value: WS
  misc_feature: MA Experiment 20000453 PARAMETER Experiment Name: At_100uM_ABA_P Parameter: Timepoint (hr) Value: 24
  misc_feature: MA Experiment 20000453 PARAMETER Experiment Name: At_100uM_ABA_P Parameter: Tissue Value: Aerial
  misc_feature: MA Experiment 20000453 PARAMETER Experiment Name: At_100uM_ABA_P Parameter: Treatment Value: 100uM ABA vs. No Treatment
  misc_feature: MA Experiment ID: 20000794 Result: Up-regulated in Transcription
  misc_feature: MA Experiment 20000794 PARAMETER Experiment Name: At_Petals_P Parameter: Age (day) Value: 23-25 days
  misc_feature: MA Experiment 20000794 PARAMETER Experiment Name: At_Petals_P Parameter: Plant Line Value: WS
  misc_feature: MA Experiment 20000794 PARAMETER Experiment Name: At_Petals_P Parameter: Tissue Value: Petals vs. Whole plant
  misc_feature: MA Experiment ID: 20001451 Result: Up-regulated in Transcription
  misc_feature: MA Experiment 20001451 PARAMETER Experiment Name: At_Far-red-induction_P Parameter: Age (day) Value: 7
  misc_feature: MA Experiment 20001451 PARAMETER Experiment Name: At_Far-red-induction_P Parameter: Light Value: Far-red vs. White
  misc_feature: MA Experiment 20001451 PARAMETER Experiment Name: At_Far-red-induction_P Parameter: Organism Value: A. thaliana
  misc_feature: MA Experiment 20001451 PARAMETER Experiment Name: At_Far-red-induction_P Parameter: Plant Line Value: Columbia
  misc_feature: MA Experiment 20001451 PARAMETER Experiment Name: At_Far-red-induction_P Parameter: Timepoint (hr) Value: 24
  misc_feature: MA Experiment 20001451 PARAMETER Experiment Name: At_Far-red-induction_P Parameter: Tissue Value: Whole Plant
  misc_feature: MA Experiment ID: 20001554 Result: Up-regulated in Transcription
  misc_feature: MA Experiment 20001554 PARAMETER Experiment Name: At_Drought_Soil_Dry_P Parameter: Age (day) Value: 21
  misc_feature: MA Experiment 20001554 PARAMETER Experiment Name: At_Drought_Soil_Dry_P Parameter: Organism Value: A. thaliana
  misc_feature: MA Experiment 20001554 PARAMETER Experiment Name: At_Drought_Soil_Dry_P Parameter: Plant Line Value: WS
  misc_feature: MA Experiment 20001554 PARAMETER Experiment Name: At_Drought_Soil_Dry_P Parameter: Post Timepoint (hr) Value: None
  misc_feature: MA Experiment 20001554 PARAMETER Experiment Name: At_Drought_Soil_Dry_P Parameter: Post-Treatment Value: None
  misc_feature: MA Experiment 20001554 PARAMETER Experiment Name: At_Drought_Soil_Dry_P Parameter: Timepoint (day) Value: 7
  misc_feature: MA Experiment 20001554 PARAMETER Experiment Name: At_Drought_Soil_Dry_P Parameter: Treatment Value: Drought vs. No Drought
  misc_feature: MA Experiment ID: 20001555 Result: Up-regulated in Transcription
  misc_feature: MA Experiment 20001555 PARAMETER Experiment Name: At_Drought_Soil_Dry_P Parameter: Age (day) Value: 24
  misc_feature: MA Experiment 20001555 PARAMETER Experiment Name: At_Drought_Soil_Dry_P Parameter: Organism Value: A. thaliana
  misc_feature: MA Experiment 20001555 PARAMETER Experiment Name: At_Drought_Soil_Dry_P Parameter: Plant Line Value: WS
  misc_feature: MA Experiment 20001555 PARAMETER Experiment Name: At_Drought_Soil_Dry_P Parameter: Post Timepoint (hr) Value: None
  misc_feature: MA Experiment 20001555 PARAMETER Experiment Name: At_Drought_Soil_Dry_P Parameter: Post-Treatment Value: None
  misc_feature: MA Experiment 20001555 PARAMETER Experiment Name: At_Drought_Soil_Dry_P Parameter: Timepoint (day) Value: 10
  misc_feature: MA Experiment 20001555 PARAMETER Experiment Name: At_Drought_Soil_Dry_P Parameter: Treatment Value: Drought vs. No Drought
  misc_feature: MA Experiment ID: 20001556 Result: Up-regulated in Transcription
  misc_feature: MA Experiment 20001556 PARAMETER Experiment Name: At_Drought_Soil_Dry_P Parameter: Age (day) Value: 26
  misc_feature: MA Experiment 20001556 PARAMETER Experiment Name: At_Drought_Soil_Dry_P Parameter: Organism Value: A. thaliana
  misc_feature: MA Experiment 20001556 PARAMETER Experiment Name: At_Drought_Soil_Dry_P Parameter: Plant Line Value: WS
  misc_feature: MA Experiment 20001556 PARAMETER Experiment Name: At_Drought_Soil_Dry_P Parameter: Post Timepoint (hr) Value: None
  misc_feature: MA Experiment 20001556 PARAMETER Experiment Name: At_Drought_Soil_Dry_P Parameter: Post-Treatment Value: None
  misc_feature: MA Experiment 20001556 PARAMETER Experiment Name: At_Drought_Soil_Dry_P Parameter: Timepoint (day) Value: 12
  misc_feature: MA Experiment 20001556 PARAMETER Experiment Name: At_Drought_Soil_Dry_P Parameter: Treatment Value: Drought vs. No Drought
  misc_feature: MA Experiment ID: 20001559 Result: Up-regulated in Transcription
  misc_feature: MA Experiment 20001559 PARAMETER Experiment Name: At_Drought_Soil_Dry_P Parameter: Age (day) Value: 28
  misc_feature: MA Experiment 20001559 PARAMETER Experiment Name: At_Drought_Soil_Dry_P Parameter: Organism Value: A. thaliana
  misc_feature: MA Experiment 20001559 PARAMETER Experiment Name: At_Drought_Soil_Dry_P Parameter: Plant Line Value: WS
  misc_feature: MA Experiment 20001559 PARAMETER Experiment Name: At_Drought_Soil_Dry_P Parameter: Post Timepoint (hr) Value: 29
  misc_feature: MA Experiment 20001559 PARAMETER Experiment Name: At_Drought_Soil_Dry_P Parameter: Post-Treatment Value: Re-Water vs. No Drought
  misc_feature: MA Experiment 20001559 PARAMETER Experiment Name: At_Drought_Soil_Dry_P Parameter: Timepoint (day) Value: 14
  misc_feature: MA Experiment 20001559 PARAMETER Experiment Name: At_Drought_Soil_Dry_P Parameter: Treatment Value: Drought vs. No Drought
  misc_feature: MA Experiment ID: 20001560 Result: Down-regulated in Transcription
  misc_feature: MA Experiment 20001560 PARAMETER Experiment Name: At_Drought_Soil_Dry_P Parameter: Age (day) Value: 28
  misc_feature: MA Experiment 20001560 PARAMETER Experiment Name: At_Drought_Soil_Dry_P Parameter: Organism Value: A. thaliana
  misc_feature: MA Experiment 20001560 PARAMETER Experiment Name: At_Drought_Soil_Dry_P Parameter: Plant Line Value: WS
  misc_feature: MA Experiment 20001560 PARAMETER Experiment Name: At_Drought_Soil_Dry_P Parameter: Post Timepoint (hr) Value: None
  misc_feature: MA Experiment 20001560 PARAMETER Experiment Name: At_Drought_Soil_Dry_P Parameter: Post-Treatment Value: None
  misc_feature: MA Experiment 20001560 PARAMETER Experiment Name: At_Drought_Soil_Dry_P Parameter: Timepoint (day) Value: 14
  misc_feature: MA Experiment 20001560 PARAMETER Experiment Name: At_Drought_Soil_Dry_P Parameter: Treatment Value: Drought vs. No Drought
  misc_feature: MA Experiment ID: 20001904 Result: Up-regulated in Transcription
  misc_feature: MA Experiment 20001904 PARAMETER Experiment Name: At_Drought_Reproduction_P Parameter: Age (day) Value: 37
  misc_feature: MA Experiment 20001904 PARAMETER Experiment Name: At_Drought_Reproduction_P Parameter: Organism Value: A. thaliana
  misc_feature: MA Experiment 20001904 PARAMETER Experiment Name: At_Drought_Reproduction_P Parameter: Plant Line Value: WS
  misc_feature: MA Experiment 20001904 PARAMETER Experiment Name: At_Drought_Reproduction_P Parameter: Timepoint (day) Value: 7
  misc_feature: MA Experiment 20001904 PARAMETER Experiment Name: At_Drought_Reproduction_P Parameter: Tissue Value: Rosettes
  misc_feature: MA Experiment 20001904 PARAMETER Experiment Name: At_Drought_Reproduction_P Parameter: Treatment Value: Drought vs. No Drought
  misc_feature: MA Experiment ID: 20001906 Result: Up-regulated in Transcription
  misc_feature: MA Experiment 20001906 PARAMETER Experiment Name: At_Drought_Reproduction_P Parameter: Age (day) Value: 35
  misc_feature: MA Experiment 20001906 PARAMETER Experiment Name: At_Drought_Reproduction_P Parameter: Organism Value: A. thaliana
  misc_feature: MA Experiment 20001906 PARAMETER Experiment Name: At_Drought_Reproduction_P Parameter: Plant Line Value: WS
  misc_feature: MA Experiment 20001906 PARAMETER Experiment Name: At_Drought_Reproduction_P Parameter: Timepoint (day) Value: 5
  misc_feature: MA Experiment 20001906 PARAMETER Experiment Name: At_Drought_Reproduction_P Parameter: Tissue Value: Siliques
  misc_feature: MA Experiment 20001906 PARAMETER Experiment Name: At_Drought_Reproduction_P Parameter: Treatment Value: Drought vs. No Drought
  misc_feature: MA Experiment ID: 20001907 Result: Up-regulated in Transcription
  misc_feature: MA Experiment 20001907 PARAMETER Experiment Name: At_Drought_Reproduction_P Parameter: Age (day) Value: 37
  misc_feature: MA Experiment 20001907 PARAMETER Experiment Name: At_Drought_Reproduction_P Parameter: Organism Value: A. thaliana
  misc_feature: MA Experiment 20001907 PARAMETER Experiment Name: At_Drought_Reproduction_P Parameter: Plant Line Value: WS
  misc_feature: MA Experiment 20001907 PARAMETER Experiment Name: At_Drought_Reproduction_P Parameter: Timepoint (day) Value: 7
  misc_feature: MA Experiment 20001907 PARAMETER Experiment Name: At_Drought_Reproduction_P Parameter: Tissue Value: Siliques
  misc_feature: MA Experiment 20001907 PARAMETER Experiment Name: At_Drought_Reproduction_P Parameter: Treatment Value: Drought vs. No Drought
  misc_feature: MA Experiment ID: 20001908 Result: Up-regulated in Transcription
  misc_feature: MA Experiment 20001908 PARAMETER Experiment Name: At_Drought_Reproduction_P Parameter: Age (day) Value: 40
  misc_feature: MA Experiment 20001908 PARAMETER Experiment Name: At_Drought_Reproduction_P Parameter: Organism Value: A. thaliana
  misc_feature: MA Experiment 20001908 PARAMETER Experiment Name: At_Drought_Reproduction_P Parameter: Plant Line Value: WS
  misc_feature: MA Experiment 20001908 PARAMETER Experiment Name: At_Drought_Reproduction_P Parameter: Timepoint (day) Value: 10
  misc_feature: MA Experiment 20001908 PARAMETER Experiment Name: At_Drought_Reproduction_P Parameter: Tissue Value: Siliques
  misc_feature: MA Experiment 20001908 PARAMETER Experiment Name: At_Drought_Reproduction_P Parameter: Treatment Value: Drought vs. No Drought
  misc_feature: MA Experiment ID: 20001909 Result: Up-regulated in Transcription
  misc_feature: MA Experiment 20001909 PARAMETER Experiment Name: At_Drought_Reproduction_P Parameter: Age (day) Value: 35
  misc_feature: MA Experiment 20001909 PARAMETER Experiment Name: At_Drought_Reproduction_P Parameter: Organism Value: A. thaliana
  misc_feature: MA Experiment 20001909 PARAMETER Experiment Name: At_Drought_Reproduction_P Parameter: Plant Line Value: WS
  misc_feature: MA Experiment 20001909 PARAMETER Experiment Name: At_Drought_Reproduction_P Parameter: Timepoint (day) Value: 5
  misc_feature: MA Experiment 20001909 PARAMETER Experiment Name: At_Drought_Reproduction_P Parameter: Tissue Value: Flowers
  misc_feature: MA Experiment 20001909 PARAMETER Experiment Name: At_Drought_Reproduction_P Parameter: Treatment Value: Drought vs. No Drought
  misc_feature: MA Experiment ID: 20001910 Result: Up-regulated in Transcription
  misc_feature: MA Experiment 20001910 PARAMETER Experiment Name: At_Drought_Reproduction_P Parameter: Age (day) Value: 37
  misc_feature: MA Experiment 20001910 PARAMETER Experiment Name: At_Drought_Reproduction_P Parameter: Organism Value: A. thaliana
  misc_feature: MA Experiment 20001910 PARAMETER Experiment Name: At_Drought_Reproduction_P Parameter: Plant Line Value: WS
  misc_feature: MA Experiment 20001910 PARAMETER Experiment Name: At_Drought_Reproduction_P Parameter: Timepoint (day) Value: 7
  misc_feature: MA Experiment 20001910 PARAMETER Experiment Name: At_Drought_Reproduction_P Parameter: Tissue Value: Flowers
  misc_feature: MA Experiment 20001910 PARAMETER Experiment Name: At_Drought_Reproduction_P Parameter: Treatment Value: Drought vs. No Drought
  misc_feature: MA Experiment ID: 20001911 Result: Up-regulated in Transcription
  misc_feature: MA Experiment 20001911 PARAMETER Experiment Name: At_Drought_Reproduction_P Parameter: Age (day) Value: 40
  misc_feature: MA Experiment 20001911 PARAMETER Experiment Name: At_Drought_Reproduction_P Parameter: Organism Value: A. thaliana
  misc_feature: MA Experiment 20001911 PARAMETER Experiment Name: At_Drought_Reproduction_P Parameter: Plant Line Value: WS
  misc_feature: MA Experiment 20001911 PARAMETER Experiment Name: At_Drought_Reproduction_P Parameter: Timepoint (day) Value: 10
  misc_feature: MA Experiment 20001911 PARAMETER Experiment Name: At_Drought_Reproduction_P Parameter: Tissue Value: Flowers
  misc_feature: MA Experiment 20001911 PARAMETER Experiment Name: At_Drought_Reproduction_P Parameter: Treatment Value: Drought vs. No Drought
agctctctccctctccctctccctctccatctctctgctcgcttgtgacagtaaacatgggagctctcaattatctttctgagtatttctctaaccatttctacgtctcaatacgaaaacggaagaaacgtaaagtcatgcagacggtgaatattaaggtgaagatcgactgtgacggatgcgaacgcaaaatcaagaacgctgtttcctccatcaaaggagcaaaatcagtggaagtgaacagaaagatgcacaaagtaacggtgagtggctacgttgatcccaagaaagtgctgaagacagtgcagagcactgggaaaaagaaagctgagctgtggccgtatgttccatacacaatggtggcttatccatatgccgccggagcttacgacaagagagccccgccgggttttgtgaggaagtcggagcaggctcaggcgcagccgggaagtactgacgataagctcatgtccctctttagcgacgagaaccctaacgcctgcaccgttatgtgaataagtatagatagcatgagccgatgttataatttgtaatgtataacgttttatgaagttaaagtactggaaccttttttgttactgtattatgtgagaagcaacgcaacatatagtaattactctgcgtttaactagtagattatttaatgatata

SEQ ID NO: 82753 - protein, 170 aa, Arabidopsis thaliana
  peptide (1)..(170): Ceres Seq. ID no. 12667198
  misc_feature (50)..(110): Pfam Name: Heavy-metal-associated domain Pfam Description: Heavy-metal-associated domain
  misc_feature (19)..(170): Homolog of NCBI NO: 15219990 NR Description: copper chaperone (CCH)-related; protein id: supported by cDNA: gi_13899062, supported by cDNA: gi_15450582, by cDNA: gi_17386147, supported by cDNA: gi_18377445
  misc_feature (19)..(170): Homolog of NCBI NO: 15223925 NR Description: copper chaperone (CCH)-related; protein id: supported by cDNA: 39127. [Arabidopsis thaliana]
  misc_feature (59)..(170): Homolog of NCBI NO: 4097555 NR Description: ATFP7 [Arabidopsis thaliana]
  misc_feature (19)..(170): Homolog of NCBI NO: 28866019 NR Description: farnesylated protein 3 [Hordeum vulgare subsp.
  misc_feature (19)..(170): Homolog of NCBI NO: 28866017 NR Description: farnesylated protein 2 [Hordeum vulgare subsp.
  misc_feature (20)..(170): Homolog of NCBI NO: 15235984 NR Description: copper chaperone (CCH)-related; protein id:
  misc_feature (27)..(170): Homolog of NCBI NO: 15236529 NR Description: copper chaperone (CCH)-related; protein id: supported by cDNA: gi_17979352, supported by cDNA: gi_20465504
  misc_feature (19)..(170): Homolog of NCBI NO: 34914538 NR Description: OSJNBa0094H06.16 [Oryza sativa (japonica
  misc_feature (19)..(170): Homolog of NCBI NO: 15237967 NR Description: copper chaperone (CCH)-related; protein id:
  misc_feature (19)..(170): Homolog of NCBI NO: 38346843 NR Description: OSJNBa0091C12.3 [Oryza sativa (japonica
LSPSPSPSPSLCSLVTVNMGALNYLSEYFSNHFYVSIRKRKKRKVMQTVNIKVKIDCDGCERKIKNAVSSIKGAKSVEVNRKMHKVTVSGYVDPKKVLKTVQSTGKKKAELWPYVPYTMVAYPYAAGAYDKRAPPGFVRKSEQAQAQPGSTDDKLMSLFSDENPNACTVM

SEQ ID NO: 82754 - protein, 152 aa, Arabidopsis thaliana
  peptide (1)..(152): Ceres Seq. ID no. 12667199
  misc_feature (32)..(92): Pfam Name: Heavy-metal-associated domain Pfam Description: Heavy-metal-associated domain
  misc_feature (1)..(152): Homolog of NCBI NO: 15219990 NR Description: copper chaperone (CCH)-related; protein id: supported by cDNA: gi_13899062, supported by cDNA: gi_15450582, by cDNA: gi_17386147, supported by cDNA: gi_18377445
  misc_feature (1)..(152): Homolog of NCBI NO: 15223925 NR Description: copper chaperone (CCH)-related; protein id: supported by cDNA: 39127. [Arabidopsis thaliana]
  misc_feature (41)..(152): Homolog of NCBI NO: 4097555 NR Description: ATFP7 [Arabidopsis thaliana]
  misc_feature (1)..(152): Homolog of NCBI NO: 28866019 NR Description: farnesylated protein 3 [Hordeum vulgare subsp.
  misc_feature (1)..(152): Homolog of NCBI NO: 28866017 NR Description: farnesylated protein 2 [Hordeum vulgare subsp.
  misc_feature (2)..(152): Homolog of NCBI NO: 15235984 NR Description: copper chaperone (CCH)-related; protein id:
  misc_feature (9)..(152): Homolog of NCBI NO: 15236529 NR Description: copper chaperone (CCH)-related; protein id: supported by cDNA: gi_17979352, supported by cDNA: gi_20465504
  misc_feature (1)..(152): Homolog of NCBI NO: 34914538 NR Description: OSJNBa0094H06.16 [Oryza sativa (japonica
  misc_feature (1)..(152): Homolog of NCBI NO: 15237967 NR Description: copper chaperone (CCH)-related; protein id:
  misc_feature (1)..(152): Homolog of NCBI NO: 38346843 NR Description: OSJNBa0091C12.3 [Oryza sativa (japonica
MGALNYLSEYFSNHFYVSIRKRKKRKVMQTVNIKVKIDCDGCERKIKNAVSSIKGAKSVEVNRKMHKVTVSGYVDPKKVLKTVQSTGKKKAELWPYVPYTMVAYPYAAGAYDKRAPPGFVRKSEQAQAQPGSTDDKLMSLFSDENPNACTVM

SEQ ID NO: 82755 - protein, 125 aa, Arabidopsis thaliana
  peptide (1)..(125): Ceres Seq. ID no. 12667200
  misc_feature (5)..(65): Pfam Name: Heavy-metal-associated domain Pfam Description: Heavy-metal-associated domain
  misc_feature (1)..(125): Homolog of NCBI NO: 15219990 NR Description: copper chaperone (CCH)-related; protein id: supported by cDNA: gi_13899062, supported by cDNA: gi_15450582, by cDNA: gi_17386147, supported by cDNA: gi_18377445
  misc_feature (1)..(125): Homolog of NCBI NO: 15223925 NR Description: copper chaperone (CCH)-related; protein id: supported by cDNA: 39127. [Arabidopsis thaliana]
  misc_feature (14)..(125): Homolog of NCBI NO: 4097555 NR Description: ATFP7 [Arabidopsis thaliana]
  misc_feature (1)..(125): Homolog of NCBI NO: 28866019 NR Description: farnesylated protein 3 [Hordeum vulgare subsp.
  misc_feature (1)..(125): Homolog of NCBI NO: 28866017 NR Description: farnesylated protein 2 [Hordeum vulgare subsp.
  misc_feature (1)..(125): Homolog of NCBI NO: 15235984 NR Description: copper chaperone (CCH)-related; protein id:
  misc_feature (1)..(125): Homolog of NCBI NO: 15236529 NR Description: copper chaperone (CCH)-related; protein id: supported by cDNA: gi_17979352, supported by cDNA: gi_20465504
  misc_feature (1)..(125): Homolog of NCBI NO: 34914538 NR Description: OSJNBa0094H06.16 [Oryza sativa (japonica
  misc_feature (1)..(125): Homolog of NCBI NO: 15237967 NR Description: copper chaperone (CCH)-related; protein id:
  misc_feature (1)..(125): Homolog of NCBI NO: 38346843 NR Description: OSJNBa0091C12.3 [Oryza sativa (japonica
MQTVNIKVKIDCDGCERKIKNAVSSIKGAKSVEVNRKMHKVTVSGYVDPKKVLKTVQSTGKKKAELWPYVPYTMVAYPYAAGAYDKRAPPGFVRKSEQAQAQPGSTDDKLMSLFSDENPNACTVM

SEQ ID NO: 82756 - DNA, 498 bp, Arabidopsis thaliana
  misc_feature (1)..(498): Ceres Seq. ID no. 12667216
  misc_feature: MA Experiment ID: 20000315 Result: Down-regulated in Transcription
  misc_feature: MA Experiment 20000315 PARAMETER Experiment Name: At_14day_Shoots-Roots_Sub_P Parameter: Age (day) Value: 14
  misc_feature: MA Experiment 20000315 PARAMETER Experiment Name: At_14day_Shoots-Roots_Sub_P Parameter: Organism Value: A. thaliana
  misc_feature: MA Experiment 20000315 PARAMETER Experiment Name: At_14day_Shoots-Roots_Sub_P Parameter: Plant Line Value: WS
  misc_feature: MA Experiment 20000315 PARAMETER Experiment Name: At_14day_Shoots-Roots_Sub_P Parameter: Tissue Value: Shoots vs. Whole Plant
  misc_feature: MA Experiment ID: 20000327 Result: Up-regulated in Transcription
  misc_feature: MA Experiment 20000327 PARAMETER Experiment Name: At_42deg_Heat_Sub_P Parameter: Age (day) Value: 14
  misc_feature: MA Experiment 20000327 PARAMETER Experiment Name: At_42deg_Heat_Sub_P Parameter: Organism Value: A. thaliana
  misc_feature: MA Experiment 20000327 PARAMETER Experiment Name: At_42deg_Heat_Sub_P Parameter: Plant Line Value: WS
  misc_feature: MA Experiment 20000327 PARAMETER Experiment Name: At_42deg_Heat_Sub_P Parameter: Temperature (deg C) Value: 42 vs. 22
  misc_feature: MA Experiment 20000327 PARAMETER Experiment Name: At_42deg_Heat_Sub_P Parameter: Timepoint (hr) Value: 1
  misc_feature: MA Experiment 20000327 PARAMETER Experiment Name: At_42deg_Heat_Sub_P Parameter: Tissue Value: Aerial
  misc_feature: MA Experiment ID: 20000355 Result: Down-regulated in Transcription
  misc_feature: MA Experiment 20000355 PARAMETER Experiment Name: At_Siliques_Sub_P Parameter: Age (day) Value: 21
  misc_feature: MA Experiment 20000355 PARAMETER Experiment Name: At_Siliques_Sub_P Parameter: Organism Value: A. thaliana
  misc_feature: MA Experiment 20000355 PARAMETER Experiment Name: At_Siliques_Sub_P Parameter: Plant Line Value: WS
  misc_feature: MA Experiment 20000355 PARAMETER Experiment Name: At_Siliques_Sub_P Parameter: Tissue Value: Less Than 5mm Siliques vs. Whole Plant
  misc_feature: MA Experiment ID: 20000440 Result: Down-regulated in Transcription
  misc_feature: MA Experiment 20000440 PARAMETER Experiment Name: At_Closed-Flower__Sub_P Parameter: Tissue Value: Closed Flower vs. Whole Plant
atggagaatctggtgggacttcttagaatcagagtgaaaagagggattaatcttgttagtcgtgattctaataccagcgaccctttcgtcgtcgtaaccatgggttctcagaaattgaagacacgtggtgtggaaaatagctgcaaccctgagtgggacgatgaattgacgcttggaatcaatgatcctaatcaacatgtgactctcgaagtgtatgataaagatacgttcacttcccatgacccgatgggagatgcggaaatagacatcaagccgtttttcgaggttcaaggaacggatattcaagaactcactaatggaaccgagatccgtagagtgaagccgagtggagataactgtttggctgaagagagtaggatcatcttcagtaatggaaagattcttcaagacatgattctccagctgagaaatgtagagagtggtgaggttgagatccaaatcgagtggatcaatgttactggttcaagcgatttttga

SEQ ID NO: 82757 - protein, 165 aa, Arabidopsis thaliana
  peptide (1)..(165): Ceres Seq. ID no. 12667217
  misc_feature (8)..(87): Pfam Name: C2 domain Pfam Description: C2 domain
  misc_feature (1)..(165): Homolog of NCBI NO: 15220022 NR Description: unknown protein; protein id: At1g23140.1
  misc_feature (1)..(162): Homolog of NCBI NO: 18409682 NR Description: expressed protein; protein id: At1g70810.1, by cDNA: 23322., supported by cDNA: gi_13430459 [Arabidopsis
  misc_feature (1)..(162): Homolog of NCBI NO: 13430460 NR Description: unknown protein [Arabidopsis thaliana]
  misc_feature (1)..(163): Homolog of NCBI NO: 15223248 NR Description: unknown protein; protein id: At1g70800.1
  misc_feature (1)..(161): Homolog of NCBI NO: 15221907 NR Description: unknown protein; protein id: At1g48590.1
  misc_feature (1)..(161): Homolog of NCBI NO: 25405940 NR Description: protein T1N15.21 [imported] - Arabidopsis >gi|8778695|gb|AAF79703.1|AC020889_11 T1N15.21 [Arabidopsis
  misc_feature (5)..(161): Homolog of NCBI NO: 18409675 NR Description: zinc finger and C2 domain protein, putative; id: At1g70790.1, supported by cDNA: 148076. [Arabidopsis
  misc_feature (1)..(162): Homolog of NCBI NO: 30684739 NR Description: C2 domain-containing protein [Arabidopsis
  misc_feature (1)..(161): Homolog of NCBI NO: 33146442 NR Description: zinc finger and C2 domain protein-like [Oryza
  misc_feature (1)..(162): Homolog of NCBI NO: 15240322 NR Description: putative protein; protein id: At5g37740.1, by cDNA: gi_18377800, supported by cDNA: gi_21281220 [Arabidopsis
MENLVGLLRIRVKRGINLVSRDSNTSDPFVVVTMGSQKLKTRGVENSCNPEWDDELTLGINDPNQHVTLEVYDKDTFTSHDPMGDAEIDIKPFFEVQGTDIQELTNGTEIRRVKPSGDNCLAEESRIIFSNGKILQDMILQLRNVESGEVEIQIEWINVTGSSDF

SEQ ID NO: 82758 - protein, 132 aa, Arabidopsis thaliana
  peptide (1)..(132): Ceres Seq. ID no. 12667218
  misc_feature (1)..(54): Pfam Name: C2 domain Pfam Description: C2 domain
  misc_feature (1)..(132): Homolog of NCBI NO: 15220022 NR Description: unknown protein; protein id: At1g23140.1
  misc_feature (1)..(129): Homolog of NCBI NO: 18409682 NR Description: expressed protein; protein id: At1g70810.1, by cDNA: 23322., supported by cDNA: gi_13430459 [Arabidopsis
  misc_feature (1)..(129): Homolog of NCBI NO: 13430460 NR Description: unknown protein [Arabidopsis thaliana]
  misc_feature (1)..(130): Homolog of NCBI NO: 15223248 NR Description: unknown protein; protein id: At1g70800.1
  misc_feature (1)..(128): Homolog of NCBI NO: 15221907 NR Description: unknown protein; protein id: At1g48590.1
  misc_feature (1)..(128): Homolog of NCBI NO: 25405940 NR Description: protein T1N15.21 [imported] - Arabidopsis >gi|8778695|gb|AAF79703.1|AC020889_11 T1N15.21 [Arabidopsis
  misc_feature (1)..(128): Homolog of NCBI NO: 18409675 NR Description: zinc finger and C2 domain protein, putative; id: At1g70790.1, supported by cDNA: 148076. [Arabidopsis
  misc_feature (1)..(129): Homolog of NCBI NO: 30684739 NR Description: C2 domain-containing protein [Arabidopsis
  misc_feature (1)..(128): Homolog of NCBI NO: 33146442 NR Description: zinc finger and C2 domain protein-like [Oryza
  misc_feature (1)..(129): Homolog of NCBI NO: 15240322 NR Description: putative protein; protein id: At5g37740.1, by cDNA: gi_18377800, supported by cDNA: gi_21281220 [Arabidopsis
MGSQKLKTRGVENSCNPEWDDELTLGINDPNQHVTLEVYDKDTFTSHDPMGDAEIDIKPFFEVQGTDIQELTNGTEIRRVKPSGDNCLAEESRIIFSNGKILQDMILQLRNVESGEVEIQIEWINVTGSSDF

SEQ ID NO: 82759 - protein, 83 aa, Arabidopsis thaliana
  peptide (1)..(83): Ceres Seq. ID no. 12667219
  misc_feature (1)..(83): Homolog of NCBI NO: 15220022 NR Description: unknown protein; protein id: At1g23140.1
  misc_feature (1)..(80): Homolog of NCBI NO: 18409682 NR Description: expressed protein; protein id: At1g70810.1, by cDNA: 23322., supported by cDNA: gi_13430459 [Arabidopsis
  misc_feature (1)..(80): Homolog of NCBI NO: 13430460 NR Description: unknown protein [Arabidopsis thaliana]
  misc_feature (1)..(81): Homolog of NCBI NO: 15223248 NR Description: unknown protein; protein id: At1g70800.1
  misc_feature (1)..(79): Homolog of NCBI NO: 15221907 NR Description: unknown protein; protein id: At1g48590.1
  misc_feature (1)..(79): Homolog of NCBI NO: 25405940 NR Description: protein T1N15.21 [imported] - Arabidopsis >gi|8778695|gb|AAF79703.1|AC020889_11 T1N15.21 [Arabidopsis
  misc_feature (1)..(79): Homolog of NCBI NO: 18409675 NR Description: zinc finger and C2 domain protein, putative; id: At1g70790.1, supported by cDNA: 148076. [Arabidopsis
  misc_feature (1)..(80): Homolog of NCBI NO: 30684739 NR Description: C2 domain-containing protein [Arabidopsis
  misc_feature (1)..(79): Homolog of NCBI NO: 33146442 NR Description: zinc finger and C2 domain protein-like [Oryza
  misc_feature (1)..(80): Homolog of NCBI NO: 15240322 NR Description: putative protein; protein id: At5g37740.1, by cDNA: gi_18377800, supported by cDNA: gi_21281220 [Arabidopsis
MGDAEIDIKPFFEVQGTDIQELTNGTEIRRVKPSGDNCLAEESRIIFSNGKILQDMILQLRNVESGEVEIQIEWINVTGSSDF

SEQ ID NO: 82760 - DNA, 1821 bp, Arabidopsis thaliana
  misc_feature (1)..(1821): Ceres Seq. ID no. 12667224
  misc_feature: MA Experiment ID: 20000314 Result: Down-regulated in Transcription
  misc_feature: MA Experiment 20000314 PARAMETER Experiment Name: At_14day_Shoots-Roots_Sub_P Parameter: Age (day) Value: 14
  misc_feature: MA Experiment 20000314 PARAMETER Experiment Name: At_14day_Shoots-Roots_Sub_P Parameter: Organism Value: A. thaliana
  misc_feature: MA Experiment 20000314 PARAMETER Experiment Name: At_14day_Shoots-Roots_Sub_P Parameter: Plant Line Value: WS
  misc_feature: MA Experiment 20000314 PARAMETER Experiment Name: At_14day_Shoots-Roots_Sub_P Parameter: Tissue Value: Roots vs. Whole Plant
  misc_feature: MA Experiment ID: 20000315 Result: Down-regulated in Transcription
  misc_feature: MA Experiment 20000315 PARAMETER Experiment Name: At_14day_Shoots-Roots_Sub_P Parameter: Age (day) Value: 14
  misc_feature: MA Experiment 20000315 PARAMETER Experiment Name: At_14day_Shoots-Roots_Sub_P Parameter: Organism Value: A. thaliana
  misc_feature: MA Experiment 20000315 PARAMETER Experiment Name: At_14day_Shoots-Roots_Sub_P Parameter: Plant Line Value: WS
  misc_feature: MA Experiment 20000315 PARAMETER Experiment Name: At_14day_Shoots-Roots_Sub_P Parameter: Tissue Value: Shoots vs. Whole Plant
  misc_feature: MA Experiment ID: 20000328 Result: Down-regulated in Transcription
  misc_feature: MA Experiment 20000328 PARAMETER Experiment Name: At_42deg_Heat_Sub_P Parameter: Age (day) Value: 14
  misc_feature: MA Experiment 20000328 PARAMETER Experiment Name: At_42deg_Heat_Sub_P Parameter: Organism Value: A. thaliana
  misc_feature: MA Experiment 20000328 PARAMETER Experiment Name: At_42deg_Heat_Sub_P Parameter: Plant Line Value: WS
  misc_feature: MA Experiment 20000328 PARAMETER Experiment Name: At_42deg_Heat_Sub_P Parameter: Temperature (deg C) Value: 42 vs. 22
  misc_feature: MA Experiment 20000328 PARAMETER Experiment Name: At_42deg_Heat_Sub_P Parameter: Timepoint (hr) Value: 6
  misc_feature: MA Experiment 20000328 PARAMETER Experiment Name: At_42deg_Heat_Sub_P Parameter: Tissue Value: Aerial
  misc_feature: MA Experiment ID: 20000347 Result: Up-regulated in Transcription
  misc_feature: MA Experiment 20000347 PARAMETER Experiment Name: At_2mM_SA_Sub_P Parameter: Age (day) Value: 14
  misc_feature: MA Experiment 20000347 PARAMETER Experiment Name: At_2mM_SA_Sub_P Parameter: Organism Value: A. thaliana
  misc_feature: MA Experiment 20000347 PARAMETER Experiment Name: At_2mM_SA_Sub_P Parameter: Plant Line Value: WS
  misc_feature: MA Experiment 20000347 PARAMETER Experiment Name: At_2mM_SA_Sub_P Parameter: Timepoint (hr) Value: 6
  misc_feature: MA Experiment 20000347 PARAMETER Experiment Name: At_2mM_SA_Sub_P Parameter: Tissue Value: Aerial
  misc_feature: MA Experiment 20000347 PARAMETER Experiment Name: At_2mM_SA_Sub_P Parameter: Treatment Value: 2mM SA vs. No Treatment
  misc_feature: MA Experiment ID: 20000348 Result: Up-regulated in Transcription
  misc_feature: MA Experiment 20000348 PARAMETER Experiment Name: At_100uM_ABA_Sub_P Parameter: Age (day) Value: 14
  misc_feature: MA Experiment 20000348 PARAMETER Experiment Name: At_100uM_ABA_Sub_P Parameter: Organism Value: A. thaliana
  misc_feature: MA Experiment 20000348 PARAMETER Experiment Name: At_100uM_ABA_Sub_P Parameter: Plant Line Value: WS
  misc_feature: MA Experiment 20000348 PARAMETER Experiment Name: At_100uM_ABA_Sub_P Parameter: Timepoint (hr) Value: 1
  misc_feature: MA Experiment 20000348 PARAMETER Experiment Name: At_100uM_ABA_Sub_P Parameter: Tissue Value: Aerial
  misc_feature: MA Experiment 20000348 PARAMETER Experiment Name: At_100uM_ABA_Sub_P Parameter: Treatment Value: 100uM ABA vs. No Treatment
  misc_feature: MA Experiment ID: 20000349 Result: Up-regulated in Transcription
  misc_feature: MA Experiment 20000349 PARAMETER Experiment Name: At_100uM_ABA_Sub_P Parameter: Age (day) Value: 14
  misc_feature: MA Experiment 20000349 PARAMETER Experiment Name: At_100uM_ABA_Sub_P Parameter: Organism Value: A. thaliana
  misc_feature: MA Experiment 20000349 PARAMETER Experiment Name: At_100uM_ABA_Sub_P Parameter: Plant Line Value: WS
  misc_feature: MA Experiment 20000349 PARAMETER Experiment Name: At_100uM_ABA_Sub_P Parameter: Timepoint (hr) Value: 6
  misc_feature: MA Experiment 20000349 PARAMETER Experiment Name: At_100uM_ABA_Sub_P Parameter: Tissue Value: Aerial
  misc_feature: MA Experiment 20000349 PARAMETER Experiment Name: At_100uM_ABA_Sub_P Parameter: Treatment Value: 100uM ABA vs. No Treatment
  misc_feature: MA Experiment ID: 20000352 Result: Up-regulated in Transcription
  misc_feature: MA Experiment 20000352 PARAMETER Experiment Name: At_Drought_Sub_P Parameter: Age (day) Value: 7
  misc_feature: MA Experiment 20000352 PARAMETER Experiment Name: At_Drought_Sub_P Parameter: Organism Value: A. thaliana
  misc_feature: MA Experiment 20000352 PARAMETER Experiment Name: At_Drought_Sub_P Parameter: Plant Line Value: WS
  misc_feature: MA Experiment 20000352 PARAMETER Experiment Name: At_Drought_Sub_P Parameter: Timepoint (hr) Value: 6
  misc_feature: MA Experiment 20000352 PARAMETER Experiment Name: At_Drought_Sub_P Parameter: Tissue Value: Whole Plant
  misc_feature: MA Experiment 20000352 PARAMETER Experiment Name: At_Drought_Sub_P Parameter: Treatment Value: Drought vs. No Drought
  misc_feature: MA Experiment ID: 20000355 Result: Down-regulated in Transcription
  misc_feature: MA Experiment 20000355 PARAMETER Experiment Name: At_Siliques_Sub_P Parameter: Age (day) Value: 21
  misc_feature: MA Experiment 20000355 PARAMETER Experiment Name: At_Siliques_Sub_P Parameter: Organism Value: A. thaliana
  misc_feature: MA Experiment 20000355 PARAMETER Experiment Name: At_Siliques_Sub_P Parameter: Plant Line Value: WS
  misc_feature: MA Experiment 20000355 PARAMETER Experiment Name: At_Siliques_Sub_P Parameter: Tissue Value: Less Than 5mm Siliques vs. Whole Plant
aatatcccacatctctactcatccacattagtcaaagatctctattggtacttctcaaatggatcacaaaatcctactaacacctcccaaatctttatacaccaaatgtatcataaccatcatttacgtcgtatcaatatctcatctaaatgcccatttcataacttcatgcaaacaaaccccataccctagcgtctgcgaccaccacatgtctaattcacctctcaaaactttagacgaccaaacggatgggttcactttccacgaccttgtggtcagctccaccatggaccaggccgtgcaactacaccgccttgtctcttccttgaaacagcatcattctctccacaaacacgcaacatcagctttgtttgactgcttggagctctacgaagacactatagaccaactcaaccactctcggagatcgtacggtcaatattcttcgccacatgatagacaaacctcgttaagcgcggccatagctaatcaagacacttgcagaaacggatttagagattttaagttaacctcttcgtattcaaagtatttcccggtacaatttcacaggaatctcactaagtctattagcaactctttggcagttactaaggctgctgctgaggctgaggcggttgccgagaaatatccatcgacggggttcactaaattcagcaaacaaagaagtagtgccggaggtggtagccaccggagattattgttgttttccgacgagaaatttccatcgtggttccctctttccgaccgtaaactactggaagattccaaaactacggcaaaagccgatcttgtggtggctaaggacggttcgggtcactacacaagcattcaacaagcggtaaacgcagctgccaaacttcctcggagaaaccagagacttgtgatatacgttaaagccggcgtttacagagaaaacgtggtaatcaagaaatcgatcaagaacgtgatggttatcggagatggcatcgattctaccatcgtcaccggtaataggaacgttcaagatggcacgacgacgtttaggtccgcaacttttgctgtttccggcaacggttttatcgcacaaggcataacattcgagaacacggcaggaccggagaaacatcaggcggtggctctccgatcaagttcagacttctccgtcttctacgcctgctctttcaaaggctatcaagacactctctaccttcattctagtcgtcagttcttgagaaactgcaatatttacggaaccgtcgatttcatcttcggagacgcaaccgccatcctccaaaactgtaacatctacgctcgtaagccgatgagcggccagaaaaacacgatcaccgctcaatcacgcaaagaacccgacgagactactggcttcgtcatccagagctcgacggtggctactgcgtcggaaacttatttaggacggccgtggagatcgcattcgaggacggttttcatgaaatgtaatcttggagcgttggtgagtccggcgggatggttgccttggagtggtagttttgctcttagcactctttattacggtgagtatggtaataccggcgccggagcaagtgtctccggtagagttaagtggccaggttatcatgttataaagacggtgacagaggcggaaaaattcacggtggagaatttcttggacggaaactattggattacggctacgggagtaccggtcaacgatggactttgatttttttcttaaaagaattaattttgttagtgtggtctttgttgattttatgttttttttgtttgttggcgtataattgttatatatagctttatttc

SEQ ID NO: 82761 - protein, 554 aa, Arabidopsis thaliana
  peptide (1)..(554): Ceres Seq. ID no. 12667225
  misc_feature (250)..(540): Pfam Name: Pectinesterase Pfam Description: Pectinesterase
  misc_feature (1)..(554): Homolog of NCBI NO: 15220671 NR Description: pectinesterase family; protein id: At1g23200.1, by cDNA: gi_17529057, supported by cDNA: gi_20259096 [Arabidopsis
  misc_feature (26)..(549): Homolog of NCBI NO: 15220955 NR Description: pectin methylesterase (PMEU1), putative; protein At1g53830.1, supported by cDNA: gi_13605622 [Arabidopsis >gi|17865767|sp|Q42534|PME2_ARATH Pectinesterase 2 precursor
  misc_feature (216)..(554): Homolog of NCBI NO: 15238729 NR Description: pectinesterase; protein id: At5g53370.1, by cDNA: gi_13507548, supported by cDNA: gi_15293286 [Arabidopsis >gi|9759184|dbj|BAB09799.1| pectinesterase [Arabidopsis thaliana]
  misc_feature (37)..(183): Homolog of NCBI NO: 15238729 NR Description: pectinesterase; protein id: At5g53370.1, by cDNA: gi_13507548, supported by cDNA: gi_15293286 [Arabidopsis >gi|9759184|dbj|BAB09799.1| pectinesterase [Arabidopsis thaliana]
  misc_feature (227)..(554): Homolog of NCBI NO: 30690925 NR Description: pectinesterase family [Arabidopsis thaliana]
  misc_feature (36)..(554): Homolog of NCBI NO: 15231828 NR Description: putative pectin methylesterase; protein id: supported by cDNA: 13261., supported by cDNA: gi_14335009, by cDNA: gi_15529255, supported by cDNA: gi_16604544 [Arabidopsis
  misc_feature (19)..(549): Homolog of NCBI NO: 2129667 NR Description: pectinesterase (EC 3.1.1.11) 2 precursor - thaliana (fragment) >gi|903894|gb|AAC50023.1| ATPME2 precursor
  misc_feature (36)..(554): Homolog of NCBI NO: 2895510 NR Description: putative pectin methylesterase [Arabidopsis
  misc_feature (36)..(554): Homolog of NCBI NO: 2098711 NR Description: pectinesterase [Citrus sinensis]
  misc_feature (75)..(554): Homolog of NCBI NO: 14190429 NR Description: AT4g33220/F4I10_150 [Arabidopsis thaliana]
MDHKILLTPPKSLYTKCIITIIYVVSISHLNAHFITSCKQTPYPSVCDHHMSNSPLKTLDDQTDGFTFHDLVVSSTMDQAVQLHRLVSSLKQHHSLHKHATSALFDCLELYEDTIDQLNHSRRSYGQYSSPHDRQTSLSAAIANQDTCRNGFRDFKLTSSYSKYFPVQFHRNLTKSISNSLAVTKAAAEAEAVAEKYPSTGFTKFSKQRSSAGGGSHRRLLLFSDEKFPSWFPLSDRKLLEDSKTTAKADLVVAKDGSGHYTSIQQAVNAAAKLPRRNQRLVIYVKAGVYRENVVIKKSIKNVMVIGDGIDSTIVTGNRNVQDGTTTFRSATFAVSGNGFIAQGITFENTAGPEKHQAVALRSSSDFSVFYACSFKGYQDTLYLHSSRQFLRNCNIYGTVDFIFGDATAILQNCNIYARKPMSGQKNTITAQSRKEPDETTGFVIQSSTVATASETYLGRPWRSHSRTVFMKCNLGALVSPAGWLPWSGSFALSTLYYGEYGNTGAGASVSGRVKWPGYHVIKTVTEAEKFTVENFLDGNYWITATGVPVNDGL

SEQ ID NO: 82762 - protein, 504 aa, Arabidopsis thaliana
  peptide (1)..(504): Ceres Seq. ID no. 12667226
  misc_feature (200)..(490): Pfam Name: Pectinesterase Pfam Description: Pectinesterase
  misc_feature (1)..(504): Homolog of NCBI NO: 15220671 NR Description: pectinesterase family; protein id: At1g23200.1, by cDNA: gi_17529057, supported by cDNA: gi_20259096 [Arabidopsis
  misc_feature (1)..(499): Homolog of NCBI NO: 15220955 NR Description: pectin methylesterase (PMEU1), putative; protein At1g53830.1, supported by cDNA: gi_13605622 [Arabidopsis >gi|17865767|sp|Q42534|PME2_ARATH Pectinesterase 2 precursor
  misc_feature (166)..(504): Homolog of NCBI NO: 15238729 NR Description: pectinesterase; protein id: At5g53370.1, by cDNA: gi_13507548, supported by cDNA: gi_15293286 [Arabidopsis >gi|9759184|dbj|BAB09799.1| pectinesterase [Arabidopsis thaliana]
  misc_feature (1)..(133): Homolog of NCBI NO: 15238729 NR Description: pectinesterase; protein id: At5g53370.1, by cDNA: gi_13507548, supported by cDNA: gi_15293286 [Arabidopsis >gi|9759184|dbj|BAB09799.1| pectinesterase [Arabidopsis thaliana]
  misc_feature (177)..(504): Homolog of NCBI NO: 30690925 NR Description: pectinesterase family [Arabidopsis thaliana]
  misc_feature (1)..(504): Homolog of NCBI NO: 15231828 NR Description: putative pectin methylesterase; protein id: supported by cDNA: 13261., supported by cDNA: gi_14335009, by cDNA: gi_15529255, supported by cDNA: gi_16604544 [Arabidopsis
  misc_feature (1)..(499): Homolog of NCBI NO: 2129667 NR Description: pectinesterase (EC 3.1.1.11) 2 precursor - thaliana (fragment) >gi|903894|gb|AAC50023.1| ATPME2 precursor
  misc_feature (1)..(504): Homolog of NCBI NO: 2895510 NR Description: putative pectin methylesterase [Arabidopsis
  misc_feature (1)..(504): Homolog of NCBI NO: 2098711 NR Description: pectinesterase [Citrus sinensis]
  misc_feature (25)..(504): Homolog of NCBI NO: 14190429 NR Description: AT4g33220/F4I10_150 [Arabidopsis thaliana]
MSNSPLKTLDDQTDGFTFHDLVVSSTMDQAVQLHRLVSSLKQHHSLHKHATSALFDCLELYEDTIDQLNHSRRSYGQYSSPHDRQTSLSAAIANQDTCRNGFRDFKLTSSYSKYFPVQFHRNLTKSISNSLAVTKAAAEAEAVAEKYPSTGFTKFSKQRSSAGGGSHRRLLLFSDEKFPSWFPLSDRKLLEDSKTTAKADLVVAKDGSGHYTSIQQAVNAAAKLPRRNQRLVIYVKAGVYRENVVIKKSIKNVMVIGDGIDSTIVTGNRNVQDGTTTFRSATFAVSGNGFIAQGITFENTAGPEKHQAVALRSSSDFSVFYACSFKGYQDTLYLHSSRQFLRNCNIYGTVDFIFGDATAILQNCNIYARKPMSGQKNTITAQSRKEPDETTGFVIQSSTVATASETYLGRPWRSHSRTVFMKCNLGALVSPAGWLPWSGSFALSTLYYGEYGNTGAGASVSGRVKWPGYHVIKTVTEAEKFTVENFLDGNYWITATGVPVNDGL

SEQ ID NO: 82763 - protein, 478 aa, Arabidopsis thaliana
  peptide (1)..(478): Ceres Seq. ID no. 12667227
  misc_feature (174)..(464): Pfam Name: Pectinesterase Pfam Description: Pectinesterase
  misc_feature (1)..(478): Homolog of NCBI NO: 15220671 NR Description: pectinesterase family; protein id: At1g23200.1, by cDNA: gi_17529057, supported by cDNA: gi_20259096 [Arabidopsis
  misc_feature (1)..(473): Homolog of NCBI NO: 15220955 NR Description: pectin methylesterase (PMEU1), putative; protein At1g53830.1, supported by cDNA: gi_13605622 [Arabidopsis >gi|17865767|sp|Q42534|PME2_ARATH Pectinesterase 2 precursor
  misc_feature (140)..(478): Homolog of NCBI NO: 15238729 NR Description: pectinesterase; protein id: At5g53370.1, by cDNA: gi_13507548, supported by cDNA: gi_15293286 [Arabidopsis >gi|9759184|dbj|BAB09799.1| pectinesterase [Arabidopsis thaliana]
  misc_feature (1)..(107): Homolog of NCBI NO: 15238729 NR Description: pectinesterase; protein id: At5g53370.1, by cDNA: gi_13507548, supported by cDNA: gi_15293286 [Arabidopsis >gi|9759184|dbj|BAB09799.1| pectinesterase [Arabidopsis thaliana]
  misc_feature (151)..(478): Homolog of NCBI NO: 30690925 NR Description: pectinesterase family [Arabidopsis thaliana]
  misc_feature (1)..(478): Homolog of NCBI NO: 15231828 NR Description: putative pectin methylesterase; protein id: supported by cDNA: 13261., supported by cDNA: gi_14335009, by cDNA: gi_15529255, supported by cDNA: gi_16604544 [Arabidopsis
  misc_feature (1)..(473): Homolog of NCBI NO: 2129667 NR Description: pectinesterase (EC 3.1.1.11) 2 precursor - thaliana (fragment) >gi|903894|gb|AAC50023.1| ATPME2 precursor
  misc_feature (1)..(478): Homolog of NCBI NO: 2895510 NR Description: putative pectin methylesterase [Arabidopsis
  misc_feature (1)..(478): Homolog of NCBI NO: 2098711 NR Description: pectinesterase [Citrus sinensis]
  misc_feature (1)..(478): Homolog of NCBI NO: 14190429 NR Description: AT4g33220/F4I10_150 [Arabidopsis thaliana]
MDQAVQLHRLVSSLKQHHSLHKHATSALFDCLELYEDTIDQLNHSRRSYGQYSSPHDRQTSLSAAIANQDTCRNGFRDFKLTSSYSKYFPVQFHRNLTKSISNSLAVTKAAAEAEAVAEKYPSTGFTKFSKQRSSAGGGSHRRLLLFSDEKFPSWFPLSDRKLLEDSKTTAKADLVVAKDGSGHYTSIQQAVNAAAKLPRRNQRLVIYVKAGVYRENVVIKKSIKNVMVIGDGIDSTIVTGNRNVQDGTTTFRSATFAVSGNGFIAQGITFENTAGPEKHQAVALRSSSDFSVFYACSFKGYQDTLYLHSSRQFLRNCNIYGTVDFIFGDATAILQNCNIYARKPMSGQKNTITAQSRKEPDETTGFVIQSSTVATASETYLGRPWRSHSRTVFMKCNLGALVSPAGWLPWSGSFALSTLYYGEYGNTGAGASVSGRVKWPGYHVIKTVTEAEKFTVENFLDGNYWITATGVPVNDGL

SEQ ID NO: 82764 - DNA, 528 bp, Arabidopsis thaliana
  misc_feature (1)..(528): Ceres Seq. ID no. 12667232
  misc_feature: MA Experiment ID: 20000440 Result: Up-regulated in Transcription
  misc_feature: MA Experiment 20000440 PARAMETER Experiment Name: At_Closed-Flower__Sub_P Parameter: Tissue Value: Closed Flower vs. Whole Plant
atgtgtccttctttgaccgaaacggtgacggcattgtttatccatgagaaacctaccaagggatttagagcactcgggacagggcgtttcatgtcggcttttgttgctgtcttcttcaacatgggactcagccagaaaactcgtccggttcaactattcggatatatcttaccattgtttttgaaaccatttgtatgcacggtagtgacaaccgacgtctacgacaaagacggaagatttgtggaatcaaaattcgaggagatattcaacaagcatgctcgcacacataaagatgctctcactgcaaaggaaattaaacaaatgcttaagactaacagagaaccttacgatttcatcggatggctttcagattttatagaatggaaaatattacatacgttagctcaagacaatggtttgttgacggaagatgcagtaagaggcgtctacgatggtagccttttccaacaactggagaaaaaaagatcatcttcttcatctcgtggcaagaaacaaaaactaccttaa

SEQ ID NO: 82765 - protein, 175 aa, Arabidopsis thaliana
  peptide (1)..(175): Ceres Seq. ID no. 12667233
  misc_feature (20)..(160): Pfam Name: Caleosin related protein Pfam Description: Caleosin related protein
  misc_feature (1)..(175): Homolog of NCBI NO: 15220688 NR Description: Ca2+-binding EF-hand common family protein,
  misc_feature (20)..(175): Homolog of NCBI NO: 15220687 NR Description: pollen coat EF-hand protein; protein id: supported by cDNA: 16644. [Arabidopsis thaliana]
  misc_feature (28)..(175): Homolog of NCBI NO: 9295714 NR Description: F26F24.9 [Arabidopsis thaliana]
  misc_feature (28)..(130): Homolog of NCBI NO: 9295714 NR Description: F26F24.9 [Arabidopsis thaliana]
  misc_feature (20)..(166): Homolog of NCBI NO: 18409651 NR Description: Ca2+-binding EF-hand common family protein, protein id: At1g70680.1, supported by cDNA: 9200. [Arabidopsis
  misc_feature (20)..(166): Homolog of NCBI NO: 21617961 NR Description: unknown [Arabidopsis thaliana]
  misc_feature (20)..(168): Homolog of NCBI NO: 18409649 NR Description: Ca2+-binding EF-hand common family protein, protein id: At1g70670.1, supported by cDNA: 5143., supported by gi_15810176 [Arabidopsis thaliana] >gi|25406062|pir||A96731
  misc_feature (20)..(168): Homolog of NCBI NO: 21593851 NR Description: unknown [Arabidopsis thaliana]
  misc_feature (20)..(165): Homolog of NCBI NO: 34902470 NR Description: Putative abscisic acid-induced protein - rice
  misc_feature (20)..(165): Homolog of NCBI NO: 15226103 NR Description: RD20 protein; protein id: At2g33380.1, supported cDNA: gi_10862967, supported by cDNA: gi_17065169, supported by
MCPSLTETVTALFIHEKPTKGFRALGTGRFMSAFVAVFFNMGLSQKTRPVQLFGYILPLFLKPFVCTVVTTDVYDKDGRFVESKFEEIFNKHARTHKDALTAKEIKQMLKTNREPYDFIGWLSDFIEWKILHTLAQDNGLLTEDAVRGVYDGSLFQQLEKKRSSSSSRGKKQKLP

SEQ ID NO: 82766 - protein, 145 aa, Arabidopsis thaliana
  peptide (1)..(145): Ceres Seq. ID no. 12667234
  misc_feature (1)..(130): Pfam Name: Caleosin related protein Pfam Description: Caleosin related protein
  misc_feature (1)..(145): Homolog of NCBI NO: 15220688 NR Description: Ca2+-binding EF-hand common family protein,
  misc_feature (1)..(145): Homolog of NCBI NO: 15220687 NR Description: pollen coat EF-hand protein; protein id: supported by cDNA: 16644. [Arabidopsis thaliana]
  misc_feature (1)..(145): Homolog of NCBI NO: 9295714 NR Description: F26F24.9 [Arabidopsis thaliana]
  misc_feature (1)..(100): Homolog of NCBI NO: 9295714 NR Description: F26F24.9 [Arabidopsis thaliana]
  misc_feature (1)..(136): Homolog of NCBI NO: 18409651 NR Description: Ca2+-binding EF-hand common family protein, protein id: At1g70680.1, supported by cDNA: 9200. [Arabidopsis
  misc_feature (1)..(136): Homolog of NCBI NO: 21617961 NR Description: unknown [Arabidopsis thaliana]
  misc_feature (1)..(138): Homolog of NCBI NO: 18409649 NR Description: Ca2+-binding EF-hand common family protein, protein id: At1g70670.1, supported by cDNA: 5143., supported by gi_15810176 [Arabidopsis thaliana] >gi|25406062|pir||A96731
  misc_feature (1)..(138): Homolog of NCBI NO: 21593851 NR Description: unknown [Arabidopsis thaliana]
  misc_feature (1)..(135): Homolog of NCBI NO: 34902470 NR Description: Putative abscisic acid-induced protein - rice
  misc_feature (1)..(135): Homolog of NCBI NO: 15226103 NR Description: RD20 protein; protein id: At2g33380.1, supported cDNA: gi_10862967, supported by cDNA: gi_17065169, supported by
MSAFVAVFFNMGLSQKTRPVQLFGYILPLFLKPFVCTVVTTDVYDKDGRFVESKFEEIFNKHARTHKDALTAKEIKQMLKTNREPYDFIGWLSDFIEWKILHTLAQDNGLLTEDAVRGVYDGSLFQQLEKKRSSSSSRGKKQKLP

SEQ ID NO: 82767 - protein, 135 aa, Arabidopsis thaliana
  peptide (1)..(135): Ceres Seq. ID no. 12667235
  misc_feature (1)..(120): Pfam Name: Caleosin related protein Pfam Description: Caleosin related protein
  misc_feature (1)..(135): Homolog of NCBI NO: 15220688 NR Description: Ca2+-binding EF-hand common family protein,
  misc_feature (1)..(135): Homolog of NCBI NO: 15220687 NR Description: pollen coat EF-hand protein; protein id: supported by cDNA: 16644. [Arabidopsis thaliana]
  misc_feature (1)..(135): Homolog of NCBI NO: 9295714 NR Description: F26F24.9 [Arabidopsis thaliana]
  misc_feature (1)..(90): Homolog of NCBI NO: 9295714 NR Description: F26F24.9 [Arabidopsis thaliana]
  misc_feature (1)..(126): Homolog of NCBI NO: 18409651 NR Description: Ca2+-binding EF-hand common family protein, protein id: At1g70680.1, supported by cDNA: 9200. [Arabidopsis
  misc_feature (1)..(126): Homolog of NCBI NO: 21617961 NR Description: unknown [Arabidopsis thaliana]
  misc_feature (1)..(128): Homolog of NCBI NO: 18409649 NR Description: Ca2+-binding EF-hand common family protein, protein id: At1g70670.1, supported by cDNA: 5143., supported by gi_15810176 [Arabidopsis thaliana] >gi|25406062|pir||A96731
  misc_feature (1)..(128): Homolog of NCBI NO: 21593851 NR Description: unknown [Arabidopsis thaliana]
  misc_feature (1)..(125): Homolog of NCBI NO: 34902470 NR Description: Putative abscisic acid-induced protein - rice
  misc_feature (1)..(125): Homolog of NCBI NO: 15226103 NR Description: RD20 protein; protein id: At2g33380.1, supported cDNA: gi_10862967, supported by cDNA: gi_17065169, supported by
MGLSQKTRPVQLFGYILPLFLKPFVCTVVTTDVYDKDGRFVESKFEEIFNKHARTHKDALTAKEIKQMLKTNREPYDFIGWLSDFIEWKILHTLAQDNGLLTEDAVRGVYDGSLFQQLEKKRSSSSSRGKKQKLP

SEQ ID NO: 82768 - DNA, 1794 bp, Arabidopsis thaliana
  misc_feature (1)..(1794): Ceres Seq. ID no. 12667271
  misc_feature: MA Experiment ID: 20000185 Result: Down-regulated in Transcription
  misc_feature: MA Experiment 20000185 PARAMETER Experiment Name: At_Roots__P Parameter: Age (day) Value: 7 vs. 21
  misc_feature: MA Experiment 20000185 PARAMETER Experiment Name: At_Roots__P Parameter: Organism Value: A. thaliana
  misc_feature: MA Experiment 20000185 PARAMETER Experiment Name: At_Roots__P Parameter: Tissue Value: Roots vs. Whole Plant
  misc_feature: MA Experiment ID: 20000439 Result: Down-regulated in Transcription
  misc_feature: MA Experiment 20000439 PARAMETER Experiment Name: At_Roots__P Parameter: Age (day) Value: 14 vs. 21
  misc_feature: MA Experiment 20000439 PARAMETER Experiment Name: At_Roots__P Parameter: Organism Value: A. thaliana
  misc_feature: MA Experiment 20000439 PARAMETER Experiment Name: At_Roots__P Parameter: Tissue Value: Roots vs. Whole Plant
atcaatggcgattgtagcatcactaagagatattaatctcttctcttcacttccttcaacgcctccaatggcggattcatcatcaggaacattccggccagctccgccgataccgattcccaaatacgcaccatccaatagaaatcgtaatcagaaaactaatcatcaaaccgatacaaacccgaagaaaccacaatcaaatccagctcttaagcttccgcatcaccgaaccagatactacaaaccggttaaggaaggagttatctcctcagacggtgaccgcacaatcttaatcggcgattccggcgtctcgtatcagcttcccggtgcaccgttcgagtttcaattcagctattctgagacaccgaaagttaaaccggttgggattcgtgaaccggcttttatgccgtttgctccaccgacgatgccgagaccgtggactgggaaagcaccgttgaagaaatcgaagaagaagattccattgtttgattcttttaatccaccgccggcgggaaaatctggagttaagtatgtagaaatgcctgggccgttaccgtttgggaggtatccaaaggaaggaatgaatagagaagaggttttaggagagccattgaagagatgggagaaaggaatgttgattaagcctcatatgcatgataatcgtcaggttaatttgggtagagatggatttacacataatatgttggaattgatacattcgcattggaagagacgacgtgtttgtaaagttcgatgtaaaggagttcctactgtggatatgaataacgtgtgtcgtgttcttgaggaaaagacaggaggagagatcattcatagagttggaggtgtggtgtaccttttcaggggtaggaattacaattaccgtacacgtccgcagtacccattgatgttgtggaaaccagcagctcctgtttatccaaagcttattcaagaagttcctgaaggattgacgaaagaggaagctcatgagttcagggtgaagggaaagtctcttaggcctatatgcaagttgtctaaaaatggagtttacgtgtcgctagtcaaagatgtgagggatgcctttgaactgagttcattggtgaaagtcgactgcccagggcttgaaccaagtgattataagaaaattggcgctaagctcaaggagttagttccttgtgtgcttctgtctttcgatgatgagcaaatactcatgtggagaggacgagaatggaagtcgcggtttgtagacaatcctctaattccaagcctttctgagaccaacacaacgaacgaacttgatccctcagacaaacctagtgaagaacaaactgtggctaatccaagtacaacgatctcaagccccaaaatgatctcgctctggcaacgagcgttggaatcgtcgaaggctgtgattcttgaagagcttgacctcggtccagacgatctattgaagaaggtggaagagttagaaggcacttcactggctgcagaacacacttacacagctatggtcttgtcaaatactgatggtgcagcagaggattacgtggatgaaaaggaccggtccgaagagtattatagtgacatagacgatgactttgatgacgagtgttccgatgatgagtcgctagatccggttggtccagtgggatctttacccgttgacaagatagttaggaagttgagggaaagactaaaatagagcaaaagtgttactgtattctcatcattgttttgtgtaaatgttgtaaacatacatactaaaaacccaagtgccataacgaagtacttctagag

SEQ ID NO: 82769 - protein, 565 aa, Arabidopsis thaliana
  peptide (1)..(565): Ceres Seq. ID no. 12667272
  misc_feature (204)..(287): Pfam Name: CRS1 / YhbY domain Pfam Description: CRS1 / YhbY domain
  misc_feature (2)..(565): Homolog of NCBI NO: 22329751 NR Description: unknown protein; protein id: At1g23400.1, by cDNA: gi_17065311 [Arabidopsis thaliana] F28C11.4 [Arabidopsis thaliana]
  misc_feature (94)..(564): Homolog of NCBI NO: 30349369 NR Description: CRS2-associated factor 2 [Zea mays]
  misc_feature (12)..(539): Homolog of NCBI NO: 34894714 NR Description: P0426D06.23 [Oryza sativa (japonica
  misc_feature (38)..(348): Homolog of NCBI NO: 34905354 NR Description: OJ1126_G08.1 [Oryza sativa (japonica
  misc_feature (345)..(411): Homolog of NCBI NO: 34905354 NR Description: OJ1126_G08.1 [Oryza sativa (japonica
  misc_feature (54)..(457): Homolog of NCBI NO: 30349367 NR Description: CRS2-associated factor 1 [Zea mays]
  misc_feature (59)..(446): Homolog of NCBI NO: 18399222 NR Description: expressed protein; protein id: At2g20020.1, by cDNA: gi_15028050 [Arabidopsis thaliana] unknown protein [Arabidopsis thaliana]
  misc_feature (111)..(441): Homolog of NCBI NO: 40253285 NR Description: putative CRS2-associated factor 1 [Oryza sativa
  misc_feature (196)..(410): Homolog of NCBI NO: 22329043 NR Description: hypothetical protein; protein id: At4g31010.1, by cDNA: gi_18176014, supported by cDNA: gi_20465408 [Arabidopsis >gi|18176015|gb|AAL59968.1| unknown protein [Arabidopsis
  misc_feature (111)..(156): Homolog of NCBI NO: 22329043 NR Description: hypothetical protein; protein id: At4g31010.1, by cDNA: gi_18176014, supported by cDNA: gi_20465408 [Arabidopsis >gi|18176015|gb|AAL59968.1| unknown protein [Arabidopsis
SMAIVASLRDINLFSSLPSTPPMADSSSGTFRPAPPIPIPKYAPSNRNRNQKTNHQTDTNPKKPQSNPALKLPHHRTRYYKPVKEGVISSDGDRTILIGDSGVSYQLPGAPFEFQFSYSETPKVKPVGIREPAFMPFAPPTMPRPWTGKAPLKKSKKKIPLFDSFNPPPAGKSGVKYVEMPGPLPFGRYPKEGMNREEVLGEPLKRWEKGMLIKPHMHDNRQVNLGRDGFTHNMLELIHSHWKRRRVCKVRCKGVPTVDMNNVCRVLEEKTGGEIIHRVGGVVYLFRGRNYNYRTRPQYPLMLWKPAAPVYPKLIQEVPEGLTKEEAHEFRVKGKSLRPICKLSKNGVYVSLVKDVRDAFELSSLVKVDCPGLEPSDYKKIGAKLKELVPCVLLSFDDEQILMWRGREWKSRFVDNPLIPSLSETNTTNELDPSDKPSEEQTVANPSTTISSPKMISLWQRALESSKAVILEELDLGPDDLLKKVEELEGTSLAAEHTYTAMVLSNTDGAAEDYVDEKDRSEEYYSDIDDDFDDECSDDESLDPVGPVGSLPVDKIVRKLRERLK

SEQ ID NO: 82770 - protein, 564 aa, Arabidopsis thaliana
  peptide (1)..(564): Ceres Seq. ID no. 12667273
  misc_feature (203)..(286): Pfam Name: CRS1 / YhbY domain Pfam Description: CRS1 / YhbY domain
  misc_feature (1)..(564): Homolog of NCBI NO: 22329751 NR Description: unknown protein; protein id: At1g23400.1, by cDNA: gi_17065311 [Arabidopsis thaliana] F28C11.4 [Arabidopsis thaliana]
  misc_feature (93)..(563): Homolog of NCBI NO: 30349369 NR Description: CRS2-associated factor 2 [Zea mays]
  misc_feature (11)..(538): Homolog of NCBI NO: 34894714 NR Description: P0426D06.23 [Oryza sativa (japonica
  misc_feature (37)..(347): Homolog of NCBI NO: 34905354 NR Description: OJ1126_G08.1 [Oryza sativa (japonica
  misc_feature (344)..(410): Homolog of NCBI NO: 34905354 NR Description: OJ1126_G08.1 [Oryza sativa (japonica
  misc_feature (53)..(456): Homolog of NCBI NO: 30349367 NR Description: CRS2-associated factor 1 [Zea mays]
  misc_feature (58)..(445): Homolog of NCBI NO: 18399222 NR Description: expressed protein; protein id: At2g20020.1, by cDNA: gi_15028050 [Arabidopsis thaliana] unknown protein [Arabidopsis thaliana]
  misc_feature (110)..(440): Homolog of NCBI NO: 40253285 NR Description: putative CRS2-associated factor 1 [Oryza sativa
  misc_feature (195)..(409): Homolog of NCBI NO: 22329043 NR Description: hypothetical protein; protein id: At4g31010.1, by cDNA: gi_18176014, supported by cDNA: gi_20465408 [Arabidopsis >gi|18176015|gb|AAL59968.1| unknown protein [Arabidopsis
  misc_feature (110)..(155): Homolog of NCBI NO: 22329043 NR Description: hypothetical protein; protein id: At4g31010.1, by cDNA: gi_18176014, supported by cDNA: gi_20465408 [Arabidopsis >gi|18176015|gb|AAL59968.1| unknown protein [Arabidopsis
MAIVASLRDINLFSSLPSTPPMADSSSGTFRPAPPIPIPKYAPSNRNRNQKTNHQTDTNPKKPQSNPALKLPHHRTRYYKPVKEGVISSDGDRTILIGDSGVSYQLPGAPFEFQFSYSETPKVKPVGIREPAFMPFAPPTMPRPWTGKAPLKKSKKKIPLFDSFNPPPAGKSGVKYVEMPGPLPFGRYPKEGMNREEVLGEPLKRWEKGMLIKPHMHDNRQVNLGRDGFTHNMLELIHSHWKRRRVCKVRCKGVPTVDMNNVCRVLEEKTGGEIIHRVGGVVYLFRGRNYNYRTRPQYPLMLWKPAAPVYPKLIQEVPEGLTKEEAHEFRVKGKSLRPICKLSKNGVYVSLVKDVRDAFELSSLVKVDCPGLEPSDYKKIGAKLKELVPCVLLSFDDEQILMWRGREWKSRFVDNPLIPSLSETNTTNELDPSDKPSEEQTVANPSTTISSPKMISLWQRALESSKAVILEELDLGPDDLLKKVEELEGTSLAAEHTYTAMVLSNTDGAAEDYVDEKDRSEEYYSDIDDDFDDECSDDESLDPVGPVGSLPVDKIVRKLRERLK

SEQ ID NO: 82771 - protein, 543 aa, Arabidopsis thaliana
  peptide (1)..(543): Ceres Seq. ID no. 12667274
  misc_feature (182)..(265): Pfam Name: CRS1 / YhbY domain Pfam Description: CRS1 / YhbY domain
  misc_feature (1)..(543): Homolog of NCBI NO: 22329751 NR Description: unknown protein; protein id: At1g23400.1, by cDNA: gi_17065311 [Arabidopsis thaliana] F28C11.4 [Arabidopsis thaliana]
  misc_feature (72)..(542): Homolog of NCBI NO: 30349369 NR Description: CRS2-associated factor 2 [Zea mays]
  misc_feature (1)..(517): Homolog of NCBI NO: 34894714 NR Description: P0426D06.23 [Oryza sativa (japonica
  misc_feature (16)..(326): Homolog of NCBI NO: 34905354 NR Description: OJ1126_G08.1 [Oryza sativa (japonica
  misc_feature (323)..(389): Homolog of NCBI NO: 34905354 NR Description: OJ1126_G08.1 [Oryza sativa (japonica
  misc_feature (32)..(435): Homolog of NCBI NO: 30349367 NR Description: CRS2-associated factor 1 [Zea mays]
  misc_feature (37)..(424): Homolog of NCBI NO: 18399222 NR Description: expressed protein; protein id: At2g20020.1, by cDNA: gi_15028050 [Arabidopsis thaliana] unknown protein [Arabidopsis thaliana]
  misc_feature (89)..(419): Homolog of NCBI NO: 40253285 NR Description: putative CRS2-associated factor 1 [Oryza sativa
  misc_feature (174)..(388): Homolog of NCBI NO: 22329043 NR Description: hypothetical protein; protein id: At4g31010.1, by cDNA: gi_18176014, supported by cDNA: gi_20465408 [Arabidopsis >gi|18176015|gb|AAL59968.1| unknown protein [Arabidopsis
  misc_feature (89)..(134): Homolog of NCBI NO: 22329043 NR Description: hypothetical protein; protein id: At4g31010.1, by cDNA: gi_18176014, supported by cDNA: gi_20465408 [Arabidopsis >gi|18176015|gb|AAL59968.1| unknown protein [Arabidopsis
MADSSSGTFRPAPPIPIPKYAPSNRNRNQKTNHQTDTNPKKPQSNPALKLPHHRTRYYKPVKEGVISSDGDRTILIGDSGVSYQLPGAPFEFQFSYSETPKVKPVGIREPAFMPFAPPTMPRPWTGKAPLKKSKKKIPLFDSFNPPPAGKSGVKYVEMPGPLPFGRYPKEGMNREEVLGEPLKRWEKGMLIKPHMHDNRQVNLGRDGFTHNMLELIHSHWKRRRVCKVRCKGVPTVDMNNVCRVLEEKTGGEIIHRVGGVVYLFRGRNYNYRTRPQYPLMLWKPAAPVYPKLIQEVPEGLTKEEAHEFRVKGKSLRPICKLSKNGVYVSLVKDVRDAFELSSLVKVDCPGLEPSDYKKIGAKLKELVPCVLLSFDDEQILMWRGREWKSRFVDNPLIPSLSETNTTNELDPSDKPSEEQTVANPSTTISSPKMISLWQRALESSKAVILEELDLGPDDLLKKVEELEGTSLAAEHTYTAMVLSNTDGAAEDYVDEKDRSEEYYSDIDDDFDDECSDDESLDPVGPVGSLPVDKIVRKLRERLK

SEQ ID NO: 82772 - DNA, 1925 bp, Arabidopsis thaliana
  misc_feature (1)..(1925): Ceres Seq. ID no. 12667275
  misc_feature: MA Experiment ID: 20000180 Result: Up-regulated in Transcription
  misc_feature: MA Experiment 20000180 PARAMETER Experiment Name: At_Germinating_Seeds_P Parameter: Age (hr) Value: 24 vs. 0
  misc_feature: MA Experiment 20000180 PARAMETER Experiment Name: At_Germinating_Seeds_P Parameter: Tissue Value: Germinating Seeds
  misc_feature: MA Experiment ID: 20000268 Result: Down-regulated in Transcription
  misc_feature: MA Experiment 20000268 PARAMETER Experiment Name: At_100mM_NaCl__P Parameter: Age (day) Value: 14
  misc_feature: MA Experiment 20000268 PARAMETER Experiment Name: At_100mM_NaCl__P Parameter: Organism Value: A. thaliana
  misc_feature: MA Experiment 20000268 PARAMETER Experiment Name: At_100mM_NaCl__P Parameter: Plant Line Value: WS
  misc_feature: MA Experiment 20000268 PARAMETER Experiment Name: At_100mM_NaCl__P Parameter: Timepoint (hr) Value: 6
  misc_feature: MA Experiment 20000268 PARAMETER Experiment Name: At_100mM_NaCl__P Parameter: Tissue Value: Whole Plant
  misc_feature: MA Experiment 20000268 PARAMETER Experiment Name: At_100mM_NaCl__P Parameter: Treatment Value: 100mM NaCl vs. No Treatment
  misc_feature: MA Experiment ID: 20000794 Result: Down-regulated in Transcription
  misc_feature: MA Experiment 20000794 PARAMETER Experiment Name: At_Petals_P Parameter: Age (day) Value: 23-25 days
  misc_feature: MA Experiment 20000794 PARAMETER Experiment Name: At_Petals_P Parameter: Plant Line Value: WS
  misc_feature: MA Experiment 20000794 PARAMETER Experiment Name: At_Petals_P Parameter: Tissue Value: Petals vs. Whole plant
  misc_feature: MA Experiment ID: 20001554 Result: Down-regulated in Transcription
  misc_feature: MA Experiment 20001554 PARAMETER Experiment Name: At_Drought_Soil_Dry_P Parameter: Age (day) Value: 21
  misc_feature: MA Experiment 20001554 PARAMETER Experiment Name: At_Drought_Soil_Dry_P Parameter: Organism Value: A. thaliana
  misc_feature: MA Experiment 20001554 PARAMETER Experiment Name: At_Drought_Soil_Dry_P Parameter: Plant Line Value: WS
  misc_feature: MA Experiment 20001554 PARAMETER Experiment Name: At_Drought_Soil_Dry_P Parameter: Post Timepoint (hr) Value: None
  misc_feature: MA Experiment 20001554 PARAMETER Experiment Name: At_Drought_Soil_Dry_P Parameter: Post-Treatment Value: None
  misc_feature: MA Experiment 20001554 PARAMETER Experiment Name: At_Drought_Soil_Dry_P Parameter: Timepoint (day) Value: 7
  misc_feature: MA Experiment 20001554 PARAMETER Experiment Name: At_Drought_Soil_Dry_P Parameter: Treatment Value: Drought vs. No Drought
  misc_feature: MA Experiment ID: 20001555 Result: Down-regulated in Transcription
  misc_feature: MA Experiment 20001555 PARAMETER Experiment Name: At_Drought_Soil_Dry_P Parameter: Age (day) Value: 24
  misc_feature: MA Experiment 20001555 PARAMETER Experiment Name: At_Drought_Soil_Dry_P Parameter: Organism Value: A. thaliana
  misc_feature: MA Experiment 20001555 PARAMETER Experiment Name: At_Drought_Soil_Dry_P Parameter: Plant Line Value: WS
  misc_feature: MA Experiment 20001555 PARAMETER Experiment Name: At_Drought_Soil_Dry_P Parameter: Post Timepoint (hr) Value: None
  misc_feature: MA Experiment 20001555 PARAMETER Experiment Name: At_Drought_Soil_Dry_P Parameter: Post-Treatment Value: None
  misc_feature: MA Experiment 20001555 PARAMETER Experiment Name: At_Drought_Soil_Dry_P Parameter: Timepoint (day) Value: 10
  misc_feature: MA Experiment 20001555 PARAMETER Experiment Name: At_Drought_Soil_Dry_P Parameter: Treatment Value: Drought vs. No Drought
  misc_feature: MA Experiment ID: 20001556 Result: Down-regulated in Transcription
  misc_feature: MA Experiment 20001556 PARAMETER Experiment Name: At_Drought_Soil_Dry_P Parameter: Age (day) Value: 26
  misc_feature: MA Experiment 20001556 PARAMETER Experiment Name: At_Drought_Soil_Dry_P Parameter: Organism Value: A. thaliana
  misc_feature: MA Experiment 20001556 PARAMETER Experiment Name: At_Drought_Soil_Dry_P Parameter: Plant Line Value: WS
  misc_feature: MA Experiment 20001556 PARAMETER Experiment Name: At_Drought_Soil_Dry_P Parameter: Post Timepoint (hr) Value: None
  misc_feature: MA Experiment 20001556 PARAMETER Experiment Name: At_Drought_Soil_Dry_P Parameter: Post-Treatment Value: None
  misc_feature: MA Experiment 20001556 PARAMETER Experiment Name: At_Drought_Soil_Dry_P Parameter: Timepoint (day) Value: 12
  misc_feature: MA Experiment 20001556 PARAMETER Experiment Name: At_Drought_Soil_Dry_P Parameter: Treatment Value: Drought vs. No Drought
  misc_feature: MA Experiment ID: 20001558 Result: Up-regulated in Transcription
  misc_feature: MA Experiment 20001558 PARAMETER Experiment Name: At_Drought_Soil_Dry_P Parameter: Age (day) Value: 27
  misc_feature: MA Experiment 20001558 PARAMETER Experiment Name: At_Drought_Soil_Dry_P Parameter: Organism Value: A. thaliana
  misc_feature: MA Experiment 20001558 PARAMETER Experiment Name: At_Drought_Soil_Dry_P Parameter: Plant Line Value: WS
  misc_feature: MA Experiment 20001558 PARAMETER Experiment Name: At_Drought_Soil_Dry_P Parameter: Post Timepoint (hr) Value: 6
  misc_feature: MA Experiment 20001558 PARAMETER Experiment Name: At_Drought_Soil_Dry_P Parameter: Post-Treatment Value: Re-Water vs. No Drought
  misc_feature: MA Experiment 20001558 PARAMETER Experiment Name: At_Drought_Soil_Dry_P Parameter: Timepoint (day) Value: 13
  misc_feature: MA Experiment 20001558 PARAMETER Experiment Name: At_Drought_Soil_Dry_P Parameter: Treatment Value: Drought vs. No Drought
  misc_feature: MA Experiment ID: 20001559 Result: Down-regulated in Transcription
  misc_feature: MA Experiment 20001559 PARAMETER Experiment Name: At_Drought_Soil_Dry_P Parameter: Age (day) Value: 28
  misc_feature: MA Experiment 20001559 PARAMETER Experiment Name: At_Drought_Soil_Dry_P Parameter: Organism Value: A. thaliana
  misc_feature: MA Experiment 20001559 PARAMETER Experiment Name: At_Drought_Soil_Dry_P Parameter: Plant Line Value: WS
  misc_feature: MA Experiment 20001559 PARAMETER Experiment Name: At_Drought_Soil_Dry_P Parameter: Post Timepoint (hr) Value: 29
  misc_feature: MA Experiment 20001559 PARAMETER Experiment Name: At_Drought_Soil_Dry_P Parameter: Post-Treatment Value: Re-Water vs. No Drought
  misc_feature: MA Experiment 20001559 PARAMETER Experiment Name: At_Drought_Soil_Dry_P Parameter: Timepoint (day) Value: 14
  misc_feature: MA Experiment 20001559 PARAMETER Experiment Name: At_Drought_Soil_Dry_P Parameter: Treatment Value: Drought vs. No Drought
  misc_feature: MA Experiment ID: 20001904 Result: Down-regulated in Transcription
  misc_feature: MA Experiment 20001904 PARAMETER Experiment Name: At_Drought_Reproduction_P Parameter: Age (day) Value: 37
  misc_feature: MA Experiment 20001904 PARAMETER Experiment Name: At_Drought_Reproduction_P Parameter: Organism Value: A. thaliana
  misc_feature: MA Experiment 20001904 PARAMETER Experiment Name: At_Drought_Reproduction_P Parameter: Plant Line Value: WS
  misc_feature: MA Experiment 20001904 PARAMETER Experiment Name: At_Drought_Reproduction_P Parameter: Timepoint (day) Value: 7
  misc_feature: MA Experiment 20001904 PARAMETER Experiment Name: At_Drought_Reproduction_P Parameter: Tissue Value: Rosettes
  misc_feature: MA Experiment 20001904 PARAMETER Experiment Name: At_Drought_Reproduction_P Parameter: Treatment Value: Drought vs. No Drought
  misc_feature: MA Experiment ID: 20001907 Result: Down-regulated in Transcription
  misc_feature: MA Experiment 20001907 PARAMETER Experiment Name: At_Drought_Reproduction_P Parameter: Age (day) Value: 37
  misc_feature: MA Experiment 20001907 PARAMETER Experiment Name: At_Drought_Reproduction_P Parameter: Organism Value: A. thaliana
  misc_feature: MA Experiment 20001907 PARAMETER Experiment Name: At_Drought_Reproduction_P Parameter: Plant Line Value: WS
  misc_feature: MA Experiment 20001907 PARAMETER Experiment Name: At_Drought_Reproduction_P Parameter: Timepoint (day) Value: 7
  misc_feature: MA Experiment 20001907 PARAMETER Experiment Name: At_Drought_Reproduction_P Parameter: Tissue Value: Siliques
  misc_feature: MA Experiment 20001907 PARAMETER Experiment Name: At_Drought_Reproduction_P Parameter: Treatment Value: Drought vs. No Drought
  misc_feature: MA Experiment ID: 20001910 Result: Down-regulated in Transcription
  misc_feature: MA Experiment 20001910 PARAMETER Experiment Name: At_Drought_Reproduction_P Parameter: Age (day) Value: 37
  misc_feature: MA Experiment 20001910 PARAMETER Experiment Name: At_Drought_Reproduction_P Parameter: Organism Value: A. thaliana
  misc_feature: MA Experiment 20001910 PARAMETER Experiment Name: At_Drought_Reproduction_P Parameter: Plant Line Value: WS
  misc_feature: MA Experiment 20001910 PARAMETER Experiment Name: At_Drought_Reproduction_P Parameter: Timepoint (day) Value: 7
  misc_feature: MA Experiment 20001910 PARAMETER Experiment Name: At_Drought_Reproduction_P Parameter: Tissue Value: Flowers
  misc_feature: MA Experiment 20001910 PARAMETER Experiment Name: At_Drought_Reproduction_P Parameter: Treatment Value: Drought vs. No Drought
  misc_feature: MA Experiment ID: 20001911 Result: Down-regulated in Transcription
  misc_feature: MA Experiment 20001911 PARAMETER Experiment Name: At_Drought_Reproduction_P Parameter: Age (day) Value: 40
  misc_feature: MA Experiment 20001911 PARAMETER Experiment Name: At_Drought_Reproduction_P Parameter: Organism Value: A. thaliana
  misc_feature: MA Experiment 20001911 PARAMETER Experiment Name: At_Drought_Reproduction_P Parameter: Plant Line Value: WS
  misc_feature: MA Experiment 20001911 PARAMETER Experiment Name: At_Drought_Reproduction_P Parameter: Timepoint (day) Value: 10
  misc_feature: MA Experiment 20001911 PARAMETER Experiment Name: At_Drought_Reproduction_P Parameter: Tissue Value: Flowers
  misc_feature: MA Experiment 20001911 PARAMETER Experiment Name: At_Drought_Reproduction_P Parameter: Treatment Value: Drought vs. No Drought
actcaggacacaaaccaagatctcgtgtagaggaaaaaaaacctttcctccatgtttaagttttgagcttctggttggtttcaagtcctgtggagaaaaatgtcaccatttttgaagttctttctctttctctatgattatctttcaccttcctctttctttctggtccaaagaaataccttaggagcatcattagatactacagatggggttgtgagaagtggcataattggagagattatatacatttggaagcagacaagaatctttgtctttataccaatcttgaaatgcttagtgacaatatgtttggtaatgtcccttttgttgttcatagaaagagtttatatgagcatagtagtagtgtttgtgaaattacttagacgaacacctgagaaagtacacaagtgggaacctataaacgatgatgaccttgagcttgccaatacaaactacccaatggttctcattcagatcccaatgtacaatgaaaaagaggtttgtcagttatctataggagcagcctgtagactttcttggccattggatcgaatgatagttcaagtacttgatgattccacagatccagctagtaaggaattggtgaatgcggaatgtgataaatgggcgaggaaaggtataaacataatgtcagagattagagacaacagaattggatacaaagcaggagcattaaaggcaggaatgatgcacaactatgtgaaacaatgcgaattcgtcgccattttcgatgctgattttcagcctgatcctgactttcttgaacgaaccattccttttcttattcacaaccatgaaatctctcttgttcaatgccgttggaagtttgtgaatgcaaacgagtgcttaatgacaagaatgcaagagatgtcactaaactaccattttgtggctgagcaagaatctggatcttcaatacatgctttctttggattcaatggaaccgcgggtgtatggagaatcgcagctttaaacgaagctggaggatggaaagatcgaacaaccgtagaagatatggatttagcagtaagagcttgtcttcatggttggaaatttgtctatgtccatgacgtcgaggtgaaaaatgaattgccaagtacattcaaagcatacaggtttcagcaacatagatggtcttgtggaccagctaatctatggaggaagatgacaatggaaatcttacagaacaagaaagtgtcggcctggaagaaattgtatctcatatacaatttcttcttcataaggaagattgtagtacacatcttcacatttgtcttctactgtctgatattaccaacaactgtgctattccctgagctccaagttcctaaatgggcaactgtttattttcctactacaatcactatccttaacgcaatcgctacacctcgatcactccatcttcttgtcttttggatcttattcgagaatgtaatgtcgatgcatcgcacaaaagcgacattcatcgggttactagaggcaggacgggttaacgaatgggttgttactgaaaaattaggtgacactctcaagtctaagttaataggtaaagctacaactaagctttataccagatttggacaaagactcaactggagagaactcgttgttggattatatatattcttctgcggatgttacgatttcgcatatggaggatcatacttttatgtttatctgtttttacagtcttgtgcattttttgttgctggagttggttatattggcacatttgttccaactgtttagattagacttttgtatttgagagcaaatgtgtttttgctatttgattagaccaaattagagattggatcttggttacttaaaccaagttaactcttccaatattcatactcaaaatgtaattttttaaatggtgttatgatcttaaaatttggtta

SEQ ID NO: 82773 - protein, 556 aa, Arabidopsis thaliana
  peptide (1)..(556): Ceres Seq. ID no. 12667276
  misc_feature (123)..(298): Pfam Name: Glycosyl transferase Pfam Description: Glycosyl transferase
  misc_feature (1)..(556): Homolog of NCBI NO: 30688411 NR Description: glycosyltransferase family 2 [Arabidopsis >gi|8778578|gb|AAF79586.1|AC007945_6 F28C11.11 [Arabidopsis >gi|20466606|gb|AAM20620.1| unknown protein [Arabidopsis
  misc_feature (73)..(556): Homolog of NCBI NO: 30688416 NR Description: glycosyltransferase family 2 [Arabidopsis
  misc_feature (121)..(556): Homolog of NCBI NO: 25518505 NR Description: hypothetical protein F5O8.4 [imported] - thaliana >gi|4056432|gb|AAC98005.1| Similar to gi|2245014 homolog from Arabidopsis thaliana chromosome 4 contig gb|Z97341.
  misc_feature (46)..(554): Homolog of NCBI NO: 16519223 NR Description: cellulose synthase-like protein OsCslA9 [Oryza
  misc_feature (1)..(551): Homolog of NCBI NO: 15221657 NR Description: glucosyltransferase, putative; protein id:
  misc_feature (35)..(555): Homolog of NCBI NO: 30694359 NR Description: glycosyltransferase family 2 [Arabidopsis
  misc_feature (35)..(555): Homolog of NCBI NO: 28416569 NR Description: At3g56000 [Arabidopsis thaliana]
  misc_feature (40)..(554): Homolog of NCBI NO: 15237519 NR Description: putative protein; protein id: At5g03760.1, by cDNA: gi_16974551 [Arabidopsis thaliana]
  misc_feature (33)..(555): Homolog of NCBI NO: 15242959 NR Description: glucosyltransferase-like protein; protein id: supported by cDNA: gi_16648763, supported by cDNA: gi_16648964, by cDNA: gi_20259889 [Arabidopsis thaliana]
  misc_feature (35)..(555): Homolog of NCBI NO: 11357694 NR Description: hypothetical protein F27K19.180 - Arabidopsis >gi|7573495|emb|CAB87854.1| putative protein [Arabidopsis
MSPFLKFFLFLYDYLSPSSFFLVQRNTLGASLDTTDGVVRSGIIGEIIYIWKQTRIFVFIPILKCLVTICLVMSLLLFIERVYMSIVVVFVKLLRRTPEKVHKWEPINDDDLELANTNYPMVLIQIPMYNEKEVCQLSIGAACRLSWPLDRMIVQVLDDSTDPASKELVNAECDKWARKGINIMSEIRDNRIGYKAGALKAGMMHNYVKQCEFVAIFDADFQPDPDFLERTIPFLIHNHEISLVQCRWKFVNANECLMTRMQEMSLNYHFVAEQESGSSIHAFFGFNGTAGVWRIAALNEAGGWKDRTTVEDMDLAVRACLHGWKFVYVHDVEVKNELPSTFKAYRFQQHRWSCGPANLWRKMTMEILQNKKVSAWKKLYLIYNFFFIRKIVVHIFTFVFYCLILPTTVLFPELQVPKWATVYFPTTITILNAIATPRSLHLLVFWILFENVMSMHRTKATFIGLLEAGRVNEWVVTEKLGDTLKSKLIGKATTKLYTRFGQRLNWRELVVGLYIFFCGCYDFAYGGSYFYVYLFLQSCAFFVAGVGYIGTFVPTV

SEQ ID NO: 82774 - protein, 484 aa, Arabidopsis thaliana
  peptide (1)..(484): Ceres Seq. ID no. 12667277
  misc_feature (51)..(226): Pfam Name: Glycosyl transferase Pfam Description: Glycosyl transferase
  misc_feature (1)..(484): Homolog of NCBI NO: 30688411 NR Description: glycosyltransferase family 2 [Arabidopsis >gi|8778578|gb|AAF79586.1|AC007945_6 F28C11.11 [Arabidopsis >gi|20466606|gb|AAM20620.1| unknown protein [Arabidopsis
  misc_feature (1)..(484): Homolog of NCBI NO: 30688416 NR Description: glycosyltransferase family 2 [Arabidopsis
  misc_feature (49)..(484): Homolog of NCBI NO: 25518505 NR Description: hypothetical protein F5O8.4 [imported] - thaliana >gi|4056432|gb|AAC98005.1| Similar to gi|2245014 homolog from Arabidopsis thaliana chromosome 4 contig gb|Z97341.
  misc_feature (1)..(482): Homolog of NCBI NO: 16519223 NR Description: cellulose synthase-like protein OsCslA9 [Oryza
  misc_feature (1)..(479): Homolog of NCBI NO: 15221657 NR Description: glucosyltransferase, putative; protein id:
  misc_feature (1)..(483): Homolog of NCBI NO: 30694359 NR Description: glycosyltransferase family 2 [Arabidopsis
  misc_feature (1)..(483): Homolog of NCBI NO: 28416569 NR Description: At3g56000 [Arabidopsis thaliana]
  misc_feature (1)..(482): Homolog of NCBI NO: 15237519 NR Description: putative protein; protein id: At5g03760.1, by cDNA: gi_16974551 [Arabidopsis thaliana]
  misc_feature (1)..(483): Homolog of NCBI NO: 15242959 NR Description: glucosyltransferase-like protein; protein id: supported by cDNA: gi_16648763, supported by cDNA: gi_16648964, by cDNA: gi_20259889 [Arabidopsis thaliana]
  misc_feature (1)..(483): Homolog of NCBI NO: 11357694 NR Description: hypothetical protein F27K19.180 - Arabidopsis >gi|7573495|emb|CAB87854.1| putative protein [Arabidopsis
MSLLLFIERVYMSIVVVFVKLLRRTPEKVHKWEPINDDDLELANTNYPMVLIQIPMYNEKEVCQLSIGAACRLSWPLDRMIVQVLDDSTDPASKELVNAECDKWARKGINIMSEIRDNRIGYKAGALKAGMMHNYVKQCEFVAIFDADFQPDPDFLERTIPFLIHNHEISLVQCRWKFVNANECLMTRMQEMSLNYHFVAEQESGSSIHAFFGFNGTAGVWRIAALNEAGGWKDRTTVEDMDLAVRACLHGWKFVYVHDVEVKNELPSTFKAYRFQQHRWSCGPANLWRKMTMEILQNKKVSAWKKLYLIYNFFFIRKIVVHIFTFVFYCLILPTTVLFPELQVPKWATVYFPTTITILNAIATPRSLHLLVFWILFENVMSMHRTKATFIGLLEAGRVNEWVVTEKLGDTLKSKLIGKATTKLYTRFGQRLNWRELVVGLYIFFCGCYDFAYGGSYFYVYLFLQSCAFFVAGVGYIGTFVPTV

SEQ ID NO: 82775 - protein, 473 aa, Arabidopsis thaliana
  peptide (1)..(473): Ceres Seq. ID no. 12667278
  misc_feature (40)..(215): Pfam Name: Glycosyl transferase Pfam Description: Glycosyl transferase
  misc_feature (1)..(473): Homolog of NCBI NO: 30688411 NR Description: glycosyltransferase family 2 [Arabidopsis >gi|8778578|gb|AAF79586.1|AC007945_6 F28C11.11 [Arabidopsis >gi|20466606|gb|AAM20620.1| unknown protein [Arabidopsis
  misc_feature (1)..(473): Homolog of NCBI NO: 30688416 NR Description: glycosyltransferase family 2 [Arabidopsis
  misc_feature (38)..(473): Homolog of NCBI NO: 25518505 NR Description: hypothetical protein F5O8.4 [imported] - thaliana >gi|4056432|gb|AAC98005.1| Similar to gi|2245014 homolog from Arabidopsis thaliana chromosome 4 contig gb|Z97341.
  misc_feature (1)..(471): Homolog of NCBI NO: 16519223 NR Description: cellulose synthase-like protein OsCslA9 [Oryza
  misc_feature (1)..(468): Homolog of NCBI NO: 15221657 NR Description: glucosyltransferase, putative; protein id:
  misc_feature (1)..(472): Homolog of NCBI NO: 30694359 NR Description: glycosyltransferase family 2 [Arabidopsis
  misc_feature (1)..(472): Homolog of NCBI NO: 28416569 NR Description: At3g56000 [Arabidopsis thaliana]
  misc_feature (1)..(471): Homolog of NCBI NO: 15237519 NR Description: putative protein; protein id: At5g03760.1, by cDNA: gi_16974551 [Arabidopsis thaliana]
  misc_feature (1)..(472): Homolog of NCBI NO: 15242959 NR Description: glucosyltransferase-like protein; protein id: supported by cDNA: gi_16648763, supported by cDNA: gi_16648964, by cDNA: gi_20259889 [Arabidopsis thaliana]
  misc_feature (1)..(472): Homolog of NCBI NO: 11357694 NR Description: hypothetical protein F27K19.180 - Arabidopsis >gi|7573495|emb|CAB87854.1| putative protein [Arabidopsis
MSIVVVFVKLLRRTPEKVHKWEPINDDDLELANTNYPMVLIQIPMYNEKEVCQLSIGAACRLSWPLDRMIVQVLDDSTDPASKELVNAECDKWARKGINIMSEIRDNRIGYKAGALKAGMMHNYVKQCEFVAIFDADFQPDPDFLERTIPFLIHNHEISLVQCRWKFVNANECLMTRMQEMSLNYHFVAEQESGSSIHAFFGFNGTAGVWRIAALNEAGGWKDRTTVEDMDLAVRACLHGWKFVYVHDVEVKNELPSTFKAYRFQQHRWSCGPANLWRKMTMEILQNKKVSAWKKLYLIYNFFFIRKIVVHIFTFVFYCLILPTTVLFPELQVPKWATVYFPTTITILNAIATPRSLHLLVFWILFENVMSMHRTKATFIGLLEAGRVNEWVVTEKLGDTLKSKLIGKATTKLYTRFGQRLNWRELVVGLYIFFCGCYDFAYGGSYFYVYLFLQSCAFFVAGVGYIGTFVPTV

SEQ ID NO: 82776 - DNA, 972 bp, Arabidopsis thaliana
  misc_feature (1)..(972): Ceres Seq. ID no. 12667287
  misc_feature: MA Experiment ID: 20000307 Result: Down-regulated in Transcription
  misc_feature: MA Experiment 20000307 PARAMETER Experiment Name: At_Germinating_Seeds_Sub_P Parameter: Age (hr) Value: 24 vs. 0
  misc_feature: MA Experiment 20000307 PARAMETER Experiment Name: At_Germinating_Seeds_Sub_P Parameter: Organism Value: A. thaliana
  misc_feature: MA Experiment 20000307 PARAMETER Experiment Name: At_Germinating_Seeds_Sub_P Parameter: Plant Line Value: WS
  misc_feature: MA Experiment 20000307 PARAMETER Experiment Name: At_Germinating_Seeds_Sub_P Parameter: Tissue Value: Germinating Seeds
  misc_feature: MA Experiment ID: 20000315 Result: Down-regulated in Transcription
  misc_feature: MA Experiment 20000315 PARAMETER Experiment Name: At_14day_Shoots-Roots_Sub_P Parameter: Age (day) Value: 14
  misc_feature: MA Experiment 20000315 PARAMETER Experiment Name: At_14day_Shoots-Roots_Sub_P Parameter: Organism Value: A. thaliana
  misc_feature: MA Experiment 20000315 PARAMETER Experiment Name: At_14day_Shoots-Roots_Sub_P Parameter: Plant Line Value: WS
  misc_feature: MA Experiment 20000315 PARAMETER Experiment Name: At_14day_Shoots-Roots_Sub_P Parameter: Tissue Value: Shoots vs. Whole Plant
  misc_feature: MA Experiment ID: 20000327 Result: Up-regulated in Transcription
  misc_feature: MA Experiment 20000327 PARAMETER Experiment Name: At_42deg_Heat_Sub_P Parameter: Age (day) Value: 14
  misc_feature: MA Experiment 20000327 PARAMETER Experiment Name: At_42deg_Heat_Sub_P Parameter: Organism Value: A. thaliana
  misc_feature: MA Experiment 20000327 PARAMETER Experiment Name: At_42deg_Heat_Sub_P Parameter: Plant Line Value: WS
  misc_feature: MA Experiment 20000327 PARAMETER Experiment Name: At_42deg_Heat_Sub_P Parameter: Temperature (deg C) Value: 42 vs. 22
  misc_feature: MA Experiment 20000327 PARAMETER Experiment Name: At_42deg_Heat_Sub_P Parameter: Timepoint (hr) Value: 1
  misc_feature: MA Experiment 20000327 PARAMETER Experiment Name: At_42deg_Heat_Sub_P Parameter: Tissue Value: Aerial
  misc_feature: MA Experiment ID: 20000328 Result: Up-regulated in Transcription
  misc_feature: MA Experiment 20000328 PARAMETER Experiment Name: At_42deg_Heat_Sub_P Parameter: Age (day) Value: 14
  misc_feature: MA Experiment 20000328 PARAMETER Experiment Name: At_42deg_Heat_Sub_P Parameter: Organism Value: A. thaliana
  misc_feature: MA Experiment 20000328 PARAMETER Experiment Name: At_42deg_Heat_Sub_P Parameter: Plant Line Value: WS
  misc_feature: MA Experiment 20000328 PARAMETER Experiment Name: At_42deg_Heat_Sub_P Parameter: Temperature (deg C) Value: 42 vs. 22
  misc_feature: MA Experiment 20000328 PARAMETER Experiment Name: At_42deg_Heat_Sub_P Parameter: Timepoint (hr) Value: 6
  misc_feature: MA Experiment 20000328 PARAMETER Experiment Name: At_42deg_Heat_Sub_P Parameter: Tissue Value: Aerial
  misc_feature: MA Experiment ID: 20000347 Result: Up-regulated in Transcription
  misc_feature: MA Experiment 20000347 PARAMETER Experiment Name: At_2mM_SA_Sub_P Parameter: Age (day) Value: 14
  misc_feature: MA Experiment 20000347 PARAMETER Experiment Name: At_2mM_SA_Sub_P Parameter: Organism Value: A. thaliana
  misc_feature: MA Experiment 20000347 PARAMETER Experiment Name: At_2mM_SA_Sub_P Parameter: Plant Line Value: WS
  misc_feature: MA Experiment 20000347 PARAMETER Experiment Name: At_2mM_SA_Sub_P Parameter: Timepoint (hr) Value: 6
  misc_feature: MA Experiment 20000347 PARAMETER Experiment Name: At_2mM_SA_Sub_P Parameter: Tissue Value: Aerial
  misc_feature: MA Experiment 20000347 PARAMETER Experiment Name: At_2mM_SA_Sub_P Parameter: Treatment Value: 2mM SA vs. No Treatment
atggcggcgcaggtcgaaattgaggaccaaacgtccgtcaccaaccttgataatggcgaaatattcgattcaatctccgacgatgctgattcttctgtttctcacgccggatcttctttctcttcctcttcactgatccttctcggcgaaggaaacccagagcacgacgttatcaagacgtgtttactctcgggaatgggtgttgtttctagcgacacgacgatcgttacgattagtaaaaactcttcggaacgaggaatcacgacgagagccaagtttttggcgtttaggattttcactgacgctgttgcgaggaaacacggcggagatgctaatgtgaaatatggttggtacgctggttctagagatgagattcaaagaatcatctcttacggatttagcaatcgtgatgttggaaaatttgaaaatgatggtggttctcatggaattggaatccatttggttccttccaagtgttctctacttgcggcttcagctacagagcaagatgaagaaggtttacgatatcttctgttatgccgtgtaatcttagggaaacctgagataatcatctccggctctaaacaatcgtatccgagttctgctgagtttgattctggtgtggatgatttacacaatcctagaaactatgtgatttggagttgtaacatgaattcgtgtattcttccgagttatatcgtcagttttaggtctcctagactgagagtgagtagaggtggttttgcttcgagaccaagctcgccgtgggttagttttgcttccttgatgtcaatgttgtctacatcaatggatccttcaagaatgaacttgatcatccgaacttacgatgattttcggaaacggaagattaggagagaccaattggtaaggaagatgagagaagtggctggagataatcttttggctgagataatcaagaatcacaaaaacagaaacaaggtcacgaattaa

SEQ ID NO: 82777 - protein, 323 aa, Arabidopsis thaliana
  peptide (1)..(323): Ceres Seq. ID no. 12667288
  misc_feature (1)..(323): Homolog of NCBI NO: 15220787 NR Description: hypothetical protein; protein id: At1g23550.1
  misc_feature (1)..(323): Homolog of NCBI NO: 8778582 NR Description: F28C11.18 [Arabidopsis thaliana]
  misc_feature (1)..(316): Homolog of NCBI NO: 15223159 NR Description: hypothetical protein; protein id: At1g70440.1
  misc_feature (1)..(321): Homolog of NCBI NO: 7485680 NR Description: hypothetical protein F17O7.2 - Arabidopsis
  misc_feature (21)..(316): Homolog of NCBI NO: 15241862 NR Description: putative protein; protein id: At5g62520.1, by cDNA: 23920., supported by cDNA: gi_15450638, supported by gi_17386159 [Arabidopsis thaliana] >gi|10178083|dbj|BAB11502.1|
  misc_feature (21)..(316): Homolog of NCBI NO: 21592445 NR Description: unknown [Arabidopsis thaliana]
  misc_feature (1)..(152): Homolog of NCBI NO: 12325040 NR Description: hypothetical protein, 3' partial; 433-1
  misc_feature (9)..(254): Homolog of NCBI NO: 18398335 NR Description: expressed protein; protein id: At1g32230.1, by cDNA: gi_11044956, supported by cDNA: gi_19715642 [Arabidopsis >gi|19715643|gb|AAL91641.1| At1g32230/F3C3_1 [Arabidopsis
  misc_feature (9)..(254): Homolog of NCBI NO: 30692664 NR Description: expressed protein [Arabidopsis thaliana] unknown protein [Arabidopsis thaliana]
  misc_feature (244)..(320): Homolog of NCBI NO: 18398335 NR Description: expressed protein; protein id: At1g32230.1, by cDNA: gi_11044956, supported by cDNA: gi_19715642 [Arabidopsis >gi|19715643|gb|AAL91641.1| At1g32230/F3C3_1 [Arabidopsis
MAAQVEIEDQTSVTNLDNGEIFDSISDDADSSVSHAGSSFSSSSLILLGEGNPEHDVIKTCLLSGMGVVSSDTTIVTISKNSSERGITTRAKFLAFRIFTDAVARKHGGDANVKYGWYAGSRDEIQRIISYGFSNRDVGKFENDGGSHGIGIHLVPSKCSLLAASATEQDEEGLRYLLLCRVILGKPEIIISGSKQSYPSSAEFDSGVDDLHNPRNYVIWSCNMNSCILPSYIVSFRSPRLRVSRGGFASRPSSPWVSFASLMSMLSTSMDPSRMNLIIRTYDDFRKRKIRRDQLVRKMREVAGDNLLAEIIKNHKNRNKVTN

SEQ ID NO: 82778 - protein, 258 aa, Arabidopsis thaliana
  peptide (1)..(258): Ceres Seq. ID no. 12667289
  misc_feature (1)..(258): Homolog of NCBI NO: 15220787 NR Description: hypothetical protein; protein id: At1g23550.1
  misc_feature (1)..(258): Homolog of NCBI NO: 8778582 NR Description: F28C11.18 [Arabidopsis thaliana]
  misc_feature (1)..(251): Homolog of NCBI NO: 15223159 NR Description: hypothetical protein; protein id: At1g70440.1
  misc_feature (1)..(256): Homolog of NCBI NO: 7485680 NR Description: hypothetical protein F17O7.2 - Arabidopsis
  misc_feature (1)..(251): Homolog of NCBI NO: 15241862 NR Description: putative protein; protein id: At5g62520.1, by cDNA: 23920., supported by cDNA: gi_15450638, supported by gi_17386159 [Arabidopsis thaliana] >gi|10178083|dbj|BAB11502.1|
  misc_feature (1)..(251): Homolog of NCBI NO: 21592445 NR Description: unknown [Arabidopsis thaliana]
  misc_feature (1)..(87): Homolog of NCBI NO: 12325040 NR Description: hypothetical protein, 3' partial; 433-1
  misc_feature (1)..(189): Homolog of NCBI NO: 18398335 NR Description: expressed protein; protein id: At1g32230.1, by cDNA: gi_11044956, supported by cDNA: gi_19715642 [Arabidopsis >gi|19715643|gb|AAL91641.1| At1g32230/F3C3_1 [Arabidopsis
  misc_feature (1)..(189): Homolog of NCBI NO: 30692664 NR Description: expressed protein [Arabidopsis thaliana] unknown protein [Arabidopsis thaliana]
  misc_feature (179)..(255): Homolog of NCBI NO: 18398335 NR Description: expressed protein; protein id: At1g32230.1, by cDNA: gi_11044956, supported by cDNA: gi_19715642 [Arabidopsis >gi|19715643|gb|AAL91641.1| At1g32230/F3C3_1 [Arabidopsis
MGVVSSDTTIVTISKNSSERGITTRAKFLAFRIFTDAVARKHGGDANVKYGWYAGSRDEIQRIISYGFSNRDVGKFENDGGSHGIGIHLVPSKCSLLAASATEQDEEGLRYLLLCRVILGKPEIIISGSKQSYPSSAEFDSGVDDLHNPRNYVIWSCNMNSCILPSYIVSFRSPRLRVSRGGFASRPSSPWVSFASLMSMLSTSMDPSRMNLIIRTYDDFRKRKIRRDQLVRKMREVAGDNLLAEIIKNHKNRNKVTN

SEQ ID NO: 82779 - DNA, 813 bp, Arabidopsis thaliana
  misc_feature (1)..(813): Ceres Seq. ID no. 12667294
  misc_feature: MA Experiment ID: 20000440 Result: Up-regulated in Transcription
  misc_feature: MA Experiment 20000440 PARAMETER Experiment Name: At_Closed-Flower__Sub_P Parameter: Tissue Value: Closed Flower vs. Whole Plant
atgaatgtgtttcctggatttggtggctggatcaatcagaacaatcaacagcccccaaagggcgagtccaagagatctgagaacgttaaatctaactcgaatacggatatggatactaataataccgaagatgatgaggagattaagcaactaaatctttggagtgatgcagagaagaagcatccatggtatgatccccctccaaaagtgaaggtgacaatgaaaaagggtctttgccatatgaacatagaattgacattaggagtgcctcctgatggagcatacgaacttttcatcaatccaaccaacataccattctttgttatagacaagtcagggcgacaacttctggcaaacaaatcaagaaagattttgaagaaagatggacctaggcagaccgtgaaggtgaagaaagctgtggcatgggacttcctttggttctctggatctctccccattaatttaattgtcaacgaaaacaaaaaagaccttgaagtaaaatataagaaagaaaaaatgatgttcatgaaagtgttcgaaggtagctggaaaatagaaccactatatgtagatgcagatcgcttatgcaagaacatgaaacctaagagtcgagaagaatacaaaaaatgtagtggcggacaaggaaaaattgcaccaaaagtgactatggaccaatattttcagccatatcctcttttaaatctgccgccgttttcttggtatattcgtaacatcaccatcaagaccaccaaaactctgctcaaaatgcttcaagatagggccaccatactgcgagagataccgtatacttag

SEQ ID NO: 82780 - protein, 270 aa, Arabidopsis thaliana
  peptide (1)..(270): Ceres Seq. ID no. 12667295
  misc_feature (147)..(248): Pfam Name: Domain of unknown function DUF220 Pfam Description: Domain of unknown function DUF220
  misc_feature (1)..(270): Homolog of NCBI NO: 15220802 NR Description: putative OBP32pep protein; protein id: At1g23600.1
  misc_feature (1)..(244): Homolog of NCBI NO: 8778583 NR Description: F28C11.19 [Arabidopsis thaliana]
  misc_feature (1)..(266): Homolog of NCBI NO: 15220845 NR Description: putative OBP32pep protein; protein id: [Arabidopsis thaliana] >gi|25373394|pir||H86370 32.2K
  misc_feature (118)..(266): Homolog of NCBI NO: 8778583 NR Description: F28C11.19 [Arabidopsis thaliana]
  misc_feature (1)..(129): Homolog of NCBI NO: 8778583 NR Description: F28C11.19 [Arabidopsis thaliana]
  misc_feature (118)..(266): Homolog of NCBI NO: 15220818 NR Description: putative OBP32pep protein; protein id: [Arabidopsis thaliana] >gi|25373393|pir||D86370 26.4K
  misc_feature (1)..(76): Homolog of NCBI NO: 15220818 NR Description: putative OBP32pep protein; protein id: [Arabidopsis thaliana] >gi|25373393|pir||D86370 26.4K
  misc_feature (1)..(265): Homolog of NCBI NO: 15220799 NR Description: putative OBP32pep protein; protein id: At1g23580.1
  misc_feature (1)..(265): Homolog of NCBI NO: 8778583 NR Description: F28C11.19 [Arabidopsis thaliana]
  misc_feature (1)..(76): Homolog of NCBI NO: 8778583 NR Description: F28C11.19 [Arabidopsis thaliana]
MNVFPGFGGWINQNNQQPPKGESKRSENVKSNSNTDMDTNNTEDDEEIKQLNLWSDAEKKHPWYDPPPKVKVTMKKGLCHMNIELTLGVPPDGAYELFINPTNIPFFVIDKSGRQLLANKSRKILKKDGPRQTVKVKKAVAWDFLWFSGSLPINLIVNENKKDLEVKYKKEKMMFMKVFEGSWKIEPLYVDADRLCKNMKPKSREEYKKCSGGQGKIAPKVTMDQYFQPYPLLNLPPFSWYIRNITIKTTKTLLKMLQDRATILREIPYT

SEQ ID NO: 82781 - protein, 234 aa, Arabidopsis thaliana
  peptide (1)..(234): Ceres Seq. ID no. 12667296
  misc_feature (111)..(212): Pfam Name: Domain of unknown function DUF220 Pfam Description: Domain of unknown function DUF220
  misc_feature (1)..(234): Homolog of NCBI NO: 15220802 NR Description: putative OBP32pep protein; protein id: At1g23600.1
  misc_feature (1)..(208): Homolog of NCBI NO: 8778583 NR Description: F28C11.19 [Arabidopsis thaliana]
  misc_feature (1)..(230): Homolog of NCBI NO: 15220845 NR Description: putative OBP32pep protein; protein id: [Arabidopsis thaliana] >gi|25373394|pir||H86370 32.2K
  misc_feature (82)..(230): Homolog of NCBI NO: 8778583 NR Description: F28C11.19 [Arabidopsis thaliana]
  misc_feature (1)..(93): Homolog of NCBI NO: 8778583 NR Description: F28C11.19 [Arabidopsis thaliana]
  misc_feature (82)..(230): Homolog of NCBI NO: 15220818 NR Description: putative OBP32pep protein; protein id: [Arabidopsis thaliana] >gi|25373393|pir||D86370 26.4K
  misc_feature (1)..(40): Homolog of NCBI NO: 15220818 NR Description: putative OBP32pep protein; protein id: [Arabidopsis thaliana] >gi|25373393|pir||D86370 26.4K
  misc_feature (1)..(229): Homolog of NCBI NO: 15220799 NR Description: putative OBP32pep protein; protein id: At1g23580.1
  misc_feature (1)..(229): Homolog of NCBI NO: 8778583 NR Description: F28C11.19 [Arabidopsis thaliana]
  misc_feature (1)..(40): Homolog of NCBI NO: 8778583 NR Description: F28C11.19 [Arabidopsis thaliana]
MDTNNTEDDEEIKQLNLWSDAEKKHPWYDPPPKVKVTMKKGLCHMNIELTLGVPPDGAYELFINPTNIPFFVIDKSGRQLLANKSRKILKKDGPRQTVKVKKAVAWDFLWFSGSLPINLIVNENKKDLEVKYKKEKMMFMKVFEGSWKIEPLYVDADRLCKNMKPKSREEYKKCSGGQGKIAPKVTMDQYFQPYPLLNLPPFSWYIRNITIKTTKTLLKMLQDRATILREIPYT

SEQ ID NO: 82782 - protein, 197 aa, Arabidopsis thaliana
  peptide (1)..(197): Ceres Seq. ID no. 12667297
  misc_feature (74)..(175): Pfam Name: Domain of unknown function DUF220 Pfam Description: Domain of unknown function DUF220
  misc_feature (1)..(197): Homolog of NCBI NO: 15220802 NR Description: putative OBP32pep protein; protein id: At1g23600.1
  misc_feature (1)..(171): Homolog of NCBI NO: 8778583 NR Description: F28C11.19 [Arabidopsis thaliana]
  misc_feature (1)..(193): Homolog of NCBI NO: 15220845 NR Description: putative OBP32pep protein; protein id: [Arabidopsis thaliana] >gi|25373394|pir||H86370 32.2K
  misc_feature (45)..(193): Homolog of NCBI NO: 8778583 NR Description: F28C11.19 [Arabidopsis thaliana]
  misc_feature (1)..(56): Homolog of NCBI NO: 8778583 NR Description: F28C11.19 [Arabidopsis thaliana]
  misc_feature (45)..(193): Homolog of NCBI NO: 15220818 NR Description: putative OBP32pep protein; protein id: [Arabidopsis thaliana] >gi|25373393|pir||D86370 26.4K
  misc_feature (1)..(192): Homolog of NCBI NO: 15220799 NR Description: putative OBP32pep protein; protein id: At1g23580.1
  misc_feature (1)..(192): Homolog of NCBI NO: 8778583 NR Description: F28C11.19 [Arabidopsis thaliana]
  misc_feature (1)..(158): Homolog of NCBI NO: 25373392 NR Description: 32.3K hypothetical protein F5O8.18 - Arabidopsis >gi|4056445|gb|AAC98018.1| Similar to OBP32pep protein gb|U37698
  misc_feature (1)..(192): Homolog of NCBI NO: 25373403 NR Description: hypothetical protein F5O8.13 - Arabidopsis >gi|4056440|gb|AAC98013.1| Similar to OBP32pep protein gb|U37698
MKKGLCHMNIELTLGVPPDGAYELFINPTNIPFFVIDKSGRQLLANKSRKILKKDGPRQTVKVKKAVAWDFLWFSGSLPINLIVNENKKDLEVKYKKEKMMFMKVFEGSWKIEPLYVDADRLCKNMKPKSREEYKKCSGGQGKIAPKVTMDQYFQPYPLLNLPPFSWYIRNITIKTTKTLLKMLQDRATILREIPYT

SEQ ID NO: 82783 - DNA, 1857 bp, Arabidopsis thaliana
  misc_feature (1)..(1857): Ceres Seq. ID no. 12667304
  misc_feature: MA Experiment ID: 20000169 Result: Up-regulated in Transcription
  misc_feature: MA Experiment 20000169 PARAMETER Experiment Name: At_100uM_ABA_P Parameter: Age (day) Value: 14
  misc_feature: MA Experiment 20000169 PARAMETER Experiment Name: At_100uM_ABA_P Parameter: Organism Value: A. thaliana
  misc_feature: MA Experiment 20000169 PARAMETER Experiment Name: At_100uM_ABA_P Parameter: Plant Line Value: WS
  misc_feature: MA Experiment 20000169 PARAMETER Experiment Name: At_100uM_ABA_P Parameter: Timepoint (hr) Value: 6
  misc_feature: MA Experiment 20000169 PARAMETER Experiment Name: At_100uM_ABA_P Parameter: Tissue Value: Aerial
  misc_feature: MA Experiment 20000169 PARAMETER Experiment Name: At_100uM_ABA_P Parameter: Treatment Value: 100uM ABA vs. No Treatment
  misc_feature: MA Experiment ID: 20000185 Result: Up-regulated in Transcription
  misc_feature: MA Experiment 20000185 PARAMETER Experiment Name: At_Roots__P Parameter: Age (day) Value: 7 vs. 21
  misc_feature: MA Experiment 20000185 PARAMETER Experiment Name: At_Roots__P Parameter: Organism Value: A. thaliana
  misc_feature: MA Experiment 20000185 PARAMETER Experiment Name: At_Roots__P Parameter: Tissue Value: Roots vs. Whole Plant
  misc_feature: MA Experiment ID: 20000234 Result: Down-regulated in Transcription
  misc_feature: MA Experiment 20000234 PARAMETER Experiment Name: At_Siliques_P Parameter: Age (day) Value: 21
  misc_feature: MA Experiment 20000234 PARAMETER Experiment Name: At_Siliques_P Parameter: Organism Value: A. thaliana
  misc_feature: MA Experiment 20000234 PARAMETER Experiment Name: At_Siliques_P Parameter: Plant Line Value: WS
  misc_feature: MA Experiment 20000234 PARAMETER Experiment Name: At_Siliques_P Parameter: Tissue Value: Less Than 5mm Siliques vs. Whole Plant
  misc_feature: MA Experiment ID: 20000265 Result: Up-regulated in Transcription
  misc_feature: MA Experiment 20000265 PARAMETER Experiment Name: At_Open_Flower_P Parameter: Age (day) Value: 21
  misc_feature: MA Experiment 20000265 PARAMETER Experiment Name: At_Open_Flower_P Parameter: Plant Line Value: WS
  misc_feature: MA Experiment 20000265 PARAMETER Experiment Name: At_Open_Flower_P Parameter: Tissue Value: Closed Flower vs. Whole Plant
  misc_feature: MA Experiment ID: 20000267 Result: Up-regulated in Transcription
  misc_feature: MA Experiment 20000267 PARAMETER Experiment Name: At_Drought_P Parameter: Age (day) Value: 7
  misc_feature: MA Experiment 20000267 PARAMETER Experiment Name: At_Drought_P Parameter: Organism Value: A. thaliana
  misc_feature: MA Experiment 20000267 PARAMETER Experiment Name: At_Drought_P Parameter: Plant Line Value: WS
  misc_feature: MA Experiment 20000267 PARAMETER Experiment Name: At_Drought_P Parameter: Timepoint (hr) Value: 6
  misc_feature: MA Experiment 20000267 PARAMETER Experiment Name: At_Drought_P Parameter: Tissue Value: Whole Plant
  misc_feature: MA Experiment 20000267 PARAMETER Experiment Name: At_Drought_P Parameter: Treatment Value: Drought vs. No Drought
  misc_feature: MA Experiment ID: 20000268 Result: Up-regulated in Transcription
  misc_feature: MA Experiment 20000268 PARAMETER Experiment Name: At_100mM_NaCl__P Parameter: Age (day) Value: 14
  misc_feature: MA Experiment 20000268 PARAMETER Experiment Name: At_100mM_NaCl__P Parameter: Organism Value: A. thaliana
  misc_feature: MA Experiment 20000268 PARAMETER Experiment Name: At_100mM_NaCl__P Parameter: Plant Line Value: WS
  misc_feature: MA Experiment 20000268 PARAMETER Experiment Name: At_100mM_NaCl__P Parameter: Timepoint (hr) Value: 6
  misc_feature: MA Experiment 20000268 PARAMETER Experiment Name: At_100mM_NaCl__P Parameter: Tissue Value: Whole Plant
  misc_feature: MA Experiment 20000268 PARAMETER Experiment Name: At_100mM_NaCl__P Parameter: Treatment Value: 100mM NaCl vs. No Treatment
  misc_feature: MA Experiment ID: 20000269 Result: Down-regulated in Transcription
  misc_feature: MA Experiment 20000269 PARAMETER Experiment Name: At_1mM_KNO3_L-vs-H_Roots_P Parameter: Age (day) Value: 7,10,12
  misc_feature: MA Experiment 20000269 PARAMETER Experiment Name: At_1mM_KNO3_L-vs-H_Roots_P Parameter: Organism Value: A. thaliana
  misc_feature: MA Experiment 20000269 PARAMETER Experiment Name: At_1mM_KNO3_L-vs-H_Roots_P Parameter: Plant Line Value: WS
  misc_feature: MA Experiment 20000269 PARAMETER Experiment Name: At_1mM_KNO3_L-vs-H_Roots_P Parameter: Timepoint (day) Value: 7,10,12
  misc_feature: MA Experiment 20000269 PARAMETER Experiment Name: At_1mM_KNO3_L-vs-H_Roots_P Parameter: Tissue Value: Roots
  misc_feature: MA Experiment 20000269 PARAMETER Experiment Name: At_1mM_KNO3_L-vs-H_Roots_P Parameter: Treatment Value: 1mM KNO3 vs. 50mM KNO3
  misc_feature: MA Experiment ID: 20000286 Result: Up-regulated in Transcription
  misc_feature: MA Experiment 20000286 PARAMETER Experiment Name: At_Open_Flower_P Parameter: Age (day) Value: 21
  misc_feature: MA Experiment 20000286 PARAMETER Experiment Name: At_Open_Flower_P Parameter: Plant Line Value: WS
  misc_feature: MA Experiment 20000286 PARAMETER Experiment Name: At_Open_Flower_P Parameter: Tissue Value: Half Open vs. Whole Plant
  misc_feature: MA Experiment ID: 20000308 Result: Up-regulated in Transcription
  misc_feature: MA Experiment 20000308 PARAMETER Experiment Name: At_100mM_NaCl__P Parameter: Age (day) Value: 17
  misc_feature: MA Experiment 20000308 PARAMETER Experiment Name: At_100mM_NaCl__P Parameter: Organism Value: A. thaliana
  misc_feature: MA Experiment 20000308 PARAMETER Experiment Name: At_100mM_NaCl__P Parameter: Plant Line Value: WS
  misc_feature: MA Experiment 20000308 PARAMETER Experiment Name: At_100mM_NaCl__P Parameter: Timepoint (hr) Value: 72
  misc_feature: MA Experiment 20000308 PARAMETER Experiment Name: At_100mM_NaCl__P Parameter: Tissue Value: Whole Plant
  misc_feature: MA Experiment 20000308 PARAMETER Experiment Name: At_100mM_NaCl__P Parameter: Treatment Value: 100mM NaCl vs. No Treatment
  misc_feature: MA Experiment ID: 20000436 Result: Up-regulated in Transcription
  misc_feature: MA Experiment 20000436 PARAMETER Experiment Name: At_Drought_P Parameter: Age (day) Value: 7
  misc_feature: MA Experiment 20000436 PARAMETER Experiment Name: At_Drought_P Parameter: Organism Value: A. thaliana
  misc_feature: MA Experiment 20000436 PARAMETER Experiment Name: At_Drought_P Parameter: Plant Line Value: WS
  misc_feature: MA Experiment 20000436 PARAMETER Experiment Name: At_Drought_P Parameter: Timepoint (hr) Value: 12
  misc_feature: MA Experiment 20000436 PARAMETER Experiment Name: At_Drought_P Parameter: Tissue Value: Whole Plant
  misc_feature: MA Experiment 20000436 PARAMETER Experiment Name: At_Drought_P Parameter: Treatment Value: Drought vs. No Drought
  misc_feature: MA Experiment ID: 20000437 Result: Up-regulated in Transcription
  misc_feature: MA Experiment 20000437 PARAMETER Experiment Name: At_Drought_P Parameter: Age (day) Value: 8
  misc_feature: MA Experiment 20000437 PARAMETER Experiment Name: At_Drought_P Parameter: Organism Value: A. thaliana
  misc_feature: MA Experiment 20000437 PARAMETER Experiment Name: At_Drought_P Parameter: Plant Line Value: WS
  misc_feature: MA Experiment 20000437 PARAMETER Experiment Name: At_Drought_P Parameter: Timepoint (hr) Value: 24
  misc_feature: MA Experiment 20000437 PARAMETER Experiment Name: At_Drought_P Parameter: Tissue Value: Whole Plant
  misc_feature: MA Experiment 20000437 PARAMETER Experiment Name: At_Drought_P Parameter: Treatment Value: Drought vs. No Drought
  misc_feature: MA Experiment ID: 20000439 Result: Up-regulated in Transcription
  misc_feature: MA Experiment 20000439 PARAMETER Experiment Name: At_Roots__P Parameter: Age (day) Value: 14 vs. 21
  misc_feature: MA Experiment 20000439 PARAMETER Experiment Name: At_Roots__P Parameter: Organism Value: A. thaliana
  misc_feature: MA Experiment 20000439 PARAMETER Experiment Name: At_Roots__P Parameter: Tissue Value: Roots vs. Whole Plant
  misc_feature: MA Experiment ID: 20000453 Result: Up-regulated in Transcription
  misc_feature: MA Experiment 20000453 PARAMETER Experiment Name: At_100uM_ABA_P Parameter: Age (day) Value: 15
  misc_feature: MA Experiment 20000453 PARAMETER Experiment Name: At_100uM_ABA_P Parameter: Organism Value: A. thaliana
  misc_feature: MA Experiment 20000453 PARAMETER Experiment Name: At_100uM_ABA_P Parameter: Plant Line Value: WS
  misc_feature: MA Experiment 20000453 PARAMETER Experiment Name: At_100uM_ABA_P Parameter: Timepoint (hr) Value: 24
  misc_feature: MA Experiment 20000453 PARAMETER Experiment Name: At_100uM_ABA_P Parameter: Tissue Value: Aerial
  misc_feature: MA Experiment 20000453 PARAMETER Experiment Name: At_100uM_ABA_P Parameter: Treatment Value: 100uM ABA vs. No Treatment
  misc_feature: MA Experiment ID: 20000495 Result: Up-regulated in Transcription
  misc_feature: MA Experiment 20000495 PARAMETER Experiment Name: At_Guard_Cells_P Parameter: Harvest Date Value: 8/2/2002
  misc_feature: MA Experiment 20000495 PARAMETER Experiment Name: At_Guard_Cells_P Parameter: Organism Value: A. thaliana
  misc_feature: MA Experiment 20000495 PARAMETER Experiment Name: At_Guard_Cells_P Parameter: Tissue Value: Guard Cells vs. Leaves
  misc_feature: MA Experiment ID: 20001904 Result: Up-regulated in Transcription
  misc_feature: MA Experiment 20001904 PARAMETER Experiment Name: At_Drought_Reproduction_P Parameter: Age (day) Value: 37
  misc_feature: MA Experiment 20001904 PARAMETER Experiment Name: At_Drought_Reproduction_P Parameter: Organism Value: A. thaliana
  misc_feature: MA Experiment 20001904 PARAMETER Experiment Name: At_Drought_Reproduction_P Parameter: Plant Line Value: WS
  misc_feature: MA Experiment 20001904 PARAMETER Experiment Name: At_Drought_Reproduction_P Parameter: Timepoint (day) Value: 7
  misc_feature: MA Experiment 20001904 PARAMETER Experiment Name: At_Drought_Reproduction_P Parameter: Tissue Value: Rosettes
  misc_feature: MA Experiment 20001904 PARAMETER Experiment Name: At_Drought_Reproduction_P Parameter: Treatment Value: Drought vs. No Drought
ataaacagagttctcacaccaatacaaaagagaccatcaccgtgagaaagagaagaagaacaaaaaaagttagccatggcatcaagaagagtttcttcgctgctctctcgctctttcatgtcctcctcacgttctatcttctctcttagaggcatgaacagaggagctcaaagatacagtaacctcgctgctgctgtcgaaaacactattactccaccagtgaaagttgaacacacacagcttctaatcggtggaagattcgttgatgcagtgtcaggaaaaactttccctactttggatccaagaaatggagaagtgattgctcaagtgtctgaaggtgatgcagaagacgtgaaccgcgcggttgcagctgcacgaaaggcttttgatgaaggaccatggcctaaaatgacagcttatgagagatcaaagatactgtttcgtttcgctgatttaatcgagaaacataatgatgagattgctgctcttgagacttgggataatgggaaaccttatgaacaatctgctcaaattgaagtaccaatgcttgctagggtgttccggtactatgctggttgggcagacaagatacatggaatgacaatgccaggagatggtccacaccatgtgcagaccttacatgagcctataggagtcgctggacaaatcatcccatggaacttccctcttctcatgctttcttggaaacttggaccagctttagcttgcggtaacaccgttgttctcaaaactgctgagcaaactcctctatctgctcttcttgttgggaaactacttcatgaggctggacttcctgatggagttgtgaatatagtttctggatttggggctactgctggtgcagctatagctagtcacatggacgttgataaggttgctttcaccgggtctactgatgttgggaagattattcttgagttagcttcaaaaagcaaccttaaggcagtgactcttgagcttggaggaaagtcaccattcattgtatgtgaagatgctgatgtggatcaggccgttgagcttgcacatttcgctttgttctttaaccagggacaatgttgttgtgctggttcgcgtacatttgtacatgaacgtgtgtatgatgagtttgtagagaaagctaaagctcgtgcactcaagcgaaatgttggagatcccttcaagtcaggcattgagcaaggtccccaggtagactcagagcaattcaacaaaatcctgaagtacatcaaacatggagttgaggctggagccacattacaagctggaggtgacaggcttggttccaagggttactacattcaacctactgtcttctcagatgtgaaagatgacatgctcatagcaacagacgagattttcgggccggttcaaaccatactgaaattcaaggatcttgatgaggtgattgcaagggccaacaactcaaggtacggtttagctgctggagtgttcacacagaatcttgacacagcacaccggctgatgcgagcactcagagttgggactgtttggatcaactgttttgatgtacttgatgcatcaattccatttggagggtataagatgagtggcattggtagagagaaaggtatctacagtctcaacaattacttgcaagtcaaggctgttgttacttccctcaagaaccctgcctggctctaaaccataccaggtggttacacttatttctcgagtttggtttatgatttgcacttttgctttgaaaacctggagttgtactgtgtctctaggatttctagattttgagagtaatttatcttcaatacattttgcaaataaagctacatgacaatgtgtgattaataaacacaaactctt

SEQ ID NO: 82784 - protein, 534 aa, Arabidopsis thaliana
  peptide (1)..(534): Ceres Seq. ID no. 12667305
  misc_feature (1)..(534): Homolog of NCBI NO: 18395300 NR Description: putative aldehyde dehydrogenase; protein id: supported by cDNA: gi_14334931, supported by cDNA: gi_19850248, by cDNA: gi_21281039 [Arabidopsis thaliana]
  misc_feature (1)..(534): Homolog of NCBI NO: 19850249 NR Description: mitochondrial aldehyde dehydrogenase [Arabidopsis
  misc_feature (27)..(534): Homolog of NCBI NO: 25284240 NR Description: hypothetical protein F5O8.35 [imported] - thaliana >gi|4056462|gb|AAC98035.1| Strong similarity to aldehyde dehydrogenase (NAD+) from Nicotiana tabacum and a member
  misc_feature (1)..(534): Homolog of NCBI NO: 29373073 NR Description: aldehyde dehydrogenase 1 precursor [Lotus
  misc_feature (1)..(534): Homolog of NCBI NO: 8163730 NR Description: aldehyde dehydrogenase [Oryza sativa]
  misc_feature (1)..(534): Homolog of NCBI NO: 7431451 NR Description: rf2 nuclear restorer protein - maize RF2 >gi|12004294|gb|AAG43988.1|AF215823_1 T cytoplasm male
  misc_feature (1)..(534): Homolog of NCBI NO: 11691926 NR Description: aldehyde dehydrogenase ALDH2b [Oryza sativa
  misc_feature (1)..(534): Homolog of NCBI NO: 20530131 NR Description: mitochondrial aldehyde dehydrogenase [Sorghum
  misc_feature (1)..(534): Homolog of NCBI NO: 15128580 NR Description: mitochondrial aldehyde dehydrogenase ALDH2
  misc_feature (1)..(534): Homolog of NCBI NO: 7431444 NR Description: aldehyde dehydrogenase (NAD) (EC 1.2.1.3) 2A
MASRRVSSLLSRSFMSSSRSIFSLRGMNRGAQRYSNLAAAVENTITPPVKVEHTQLLIGGRFVDAVSGKTFPTLDPRNGEVIAQVSEGDAEDVNRAVAAARKAFDEGPWPKMTAYERSKILFRFADLIEKHNDEIAALETWDNGKPYEQSAQIEVPMLARVFRYYAGWADKIHGMTMPGDGPHHVQTLHEPIGVAGQIIPWNFPLLMLSWKLGPALACGNTVVLKTAEQTPLSALLVGKLLHEAGLPDGVVNIVSGFGATAGAAIASHMDVDKVAFTGSTDVGKIILELASKSNLKAVTLELGGKSPFIVCEDADVDQAVELAHFALFFNQGQCCCAGSRTFVHERVYDEFVEKAKARALKRNVGDPFKSGIEQGPQVDSEQFNKILKYIKHGVEAGATLQAGGDRLGSKGYYIQPTVFSDVKDDMLIATDEIFGPVQTILKFKDLDEVIARANNSRYGLAAGVFTQNLDTAHRLMRALRVGTVWINCFDVLDASIPFGGYKMSGIGREKGIYSLNNYLQVKAVVTSLKNPAWL

SEQ ID NO: 82785 - protein, 520 aa, Arabidopsis thaliana
  peptide (1)..(520): Ceres Seq. ID no. 12667306
  misc_feature (1)..(520): Homolog of NCBI NO: 18395300 NR Description: putative aldehyde dehydrogenase; protein id: supported by cDNA: gi_14334931, supported by cDNA: gi_19850248, by cDNA: gi_21281039 [Arabidopsis thaliana]
  misc_feature (1)..(520): Homolog of NCBI NO: 19850249 NR Description: mitochondrial aldehyde dehydrogenase [Arabidopsis
  misc_feature (13)..(520): Homolog of NCBI NO: 25284240 NR Description: hypothetical protein F5O8.35 [imported] - thaliana >gi|4056462|gb|AAC98035.1| Strong similarity to aldehyde dehydrogenase (NAD+) from Nicotiana tabacum and a member
  misc_feature (1)..(520): Homolog of NCBI NO: 29373073 NR Description: aldehyde dehydrogenase 1 precursor [Lotus
  misc_feature (1)..(520): Homolog of NCBI NO: 8163730 NR Description: aldehyde dehydrogenase [Oryza sativa]
  misc_feature (1)..(520): Homolog of NCBI NO: 7431451 NR Description: rf2 nuclear restorer protein - maize RF2 >gi|12004294|gb|AAG43988.1|AF215823_1 T cytoplasm male
  misc_feature (1)..(520): Homolog of NCBI NO: 11691926 NR Description: aldehyde dehydrogenase ALDH2b [Oryza sativa
  misc_feature (1)..(520): Homolog of NCBI NO: 20530131 NR Description: mitochondrial aldehyde dehydrogenase [Sorghum
  misc_feature (1)..(520): Homolog of NCBI NO: 15128580 NR Description: mitochondrial aldehyde dehydrogenase ALDH2
  misc_feature (1)..(520): Homolog of NCBI NO: 7431444 NR Description: aldehyde dehydrogenase (NAD) (EC 1.2.1.3) 2A
MSSSRSIFSLRGMNRGAQRYSNLAAAVENTITPPVKVEHTQLLIGGRFVDAVSGKTFPTLDPRNGEVIAQVSEGDAEDVNRAVAAARKAFDEGPWPKMTAYERSKILFRFADLIEKHNDEIAALETWDNGKPYEQSAQIEVPMLARVFRYYAGWADKIHGMTMPGDGPHHVQTLHEPIGVAGQIIPWNFPLLMLSWKLGPALACGNTVVLKTAEQTPLSALLVGKLLHEAGLPDGVVNIVSGFGATAGAAIASHMDVDKVAFTGSTDVGKIILELASKSNLKAVTLELGGKSPFIVCEDADVDQAVELAHFALFFNQGQCCCAGSRTFVHERVYDEFVEKAKARALKRNVGDPFKSGIEQGPQVDSEQFNKILKYIKHGVEAGATLQAGGDRLGSKGYYIQPTVFSDVKDDMLIATDEIFGPVQTILKFKDLDEVIARANNSRYGLAAGVFTQNLDTAHRLMRALRVGTVWINCFDVLDASIPFGGYKMSGIGREKGIYSLNNYLQVKAVVTSLKNPAWL

SEQ ID NO: 82786 - protein, 508 aa, Arabidopsis thaliana
  peptide (1)..(508): Ceres Seq. ID no. 12667307
  misc_feature (1)..(508): Homolog of NCBI NO: 18395300 NR Description: putative aldehyde dehydrogenase; protein id: supported by cDNA: gi_14334931, supported by cDNA: gi_19850248, by cDNA: gi_21281039 [Arabidopsis thaliana]
  misc_feature (1)..(508): Homolog of NCBI NO: 19850249 NR Description: mitochondrial aldehyde dehydrogenase [Arabidopsis
  misc_feature (1)..(508): Homolog of NCBI NO: 25284240 NR Description: hypothetical protein F5O8.35 [imported] - thaliana >gi|4056462|gb|AAC98035.1| Strong similarity to aldehyde dehydrogenase (NAD+) from Nicotiana tabacum and a member
  misc_feature (1)..(508): Homolog of NCBI NO: 29373073 NR Description: aldehyde dehydrogenase 1 precursor [Lotus
  misc_feature (1)..(508): Homolog of NCBI NO: 8163730 NR Description: aldehyde dehydrogenase [Oryza sativa]
  misc_feature (1)..(508): Homolog of NCBI NO: 7431451 NR Description: rf2 nuclear restorer protein - maize RF2 >gi|12004294|gb|AAG43988.1|AF215823_1 T cytoplasm male
  misc_feature (1)..(508): Homolog of NCBI NO: 11691926 NR Description: aldehyde dehydrogenase ALDH2b [Oryza sativa
  misc_feature (1)..(508): Homolog of NCBI NO: 20530131 NR Description: mitochondrial aldehyde dehydrogenase [Sorghum
  misc_feature (1)..(508): Homolog of NCBI NO: 15128580 NR Description: mitochondrial aldehyde dehydrogenase ALDH2
  misc_feature (1)..(508): Homolog of NCBI NO: 7431444 NR Description: aldehyde dehydrogenase (NAD) (EC 1.2.1.3) 2A
MNRGAQRYSNLAAAVENTITPPVKVEHTQLLIGGRFVDAVSGKTFPTLDPRNGEVIAQVSEGDAEDVNRAVAAARKAFDEGPWPKMTAYERSKILFRFADLIEKHNDEIAALETWDNGKPYEQSAQIEVPMLARVFRYYAGWADKIHGMTMPGDGPHHVQTLHEPIGVAGQIIPWNFPLLMLSWKLGPALACGNTVVLKTAEQTPLSALLVGKLLHEAGLPDGVVNIVSGFGATAGAAIASHMDVDKVAFTGSTDVGKIILELASKSNLKAVTLELGGKSPFIVCEDADVDQAVELAHFALFFNQGQCCCAGSRTFVHERVYDEFVEKAKARALKRNVGDPFKSGIEQGPQVDSEQFNKILKYIKHGVEAGATLQAGGDRLGSKGYYIQPTVFSDVKDDMLIATDEIFGPVQTILKFKDLDEVIARANNSRYGLAAGVFTQNLDTAHRLMRALRVGTVWINCFDVLDASIPFGGYKMSGIGREKGIYSLNNYLQVKAVVTSLKNPAWL

SEQ ID NO: 82787 - DNA, 1388 bp, Arabidopsis thaliana
  misc_feature (1)..(1388): Ceres Seq. ID no. 12667318
  misc_feature: MA Experiment ID: 20000227 Result: Down-regulated in Transcription
  misc_feature: MA Experiment 20000227 PARAMETER Experiment Name: At_Root-Tips-vs-Tops_P Parameter: Tissue Value: Root Tips vs. Root Tops
  misc_feature: MA Experiment ID: 20000265 Result: Up-regulated in Transcription
  misc_feature: MA Experiment 20000265 PARAMETER Experiment Name: At_Open_Flower_P Parameter: Age (day) Value: 21
  misc_feature: MA Experiment 20000265 PARAMETER Experiment Name: At_Open_Flower_P Parameter: Plant Line Value: WS
  misc_feature: MA Experiment 20000265 PARAMETER Experiment Name: At_Open_Flower_P Parameter: Tissue Value: Closed Flower vs. Whole Plant
  misc_feature: MA Experiment ID: 20000439 Result: Up-regulated in Transcription
  misc_feature: MA Experiment 20000439 PARAMETER Experiment Name: At_Roots__P Parameter: Age (day) Value: 14 vs. 21
  misc_feature: MA Experiment 20000439 PARAMETER Experiment Name: At_Roots__P Parameter: Organism Value: A. thaliana
  misc_feature: MA Experiment 20000439 PARAMETER Experiment Name: At_Roots__P Parameter: Tissue Value: Roots vs. Whole Plant
agcaaaaataagtaacacaacacaagttacacagaacagtcgctttctcctctcgattttgacatggcttggggattttcgtccgtgtctctcttcttgttcgtcgttttcaatctggtgagtggtaagatagttttagaagaagggtacgaagtcacaacggtggtcgatggccataagtctggtctgaatccatacacgattcatgctttaccaggatcttctaatctgatcgtccttgattcttccggcagtacattttacactacttcctttcctttgtccgttgatagtgtgataaaccggtttgctggggatgggagttcgggtcatgtagatggtaaagctggtaacagccggttcagcaaaccccgtggttttgctgtggatgctaaagggaatgtttatgttgctgataagagtaataaagctatacggaagatcagctcttcaggttctgtaaccaccattgctggagggatctcaaaggcatttggacacagagatggacctgcacagaatgctactttctctagcgatttcgagataacttttgttcctcaaagatgttgtttgcttgtttctgatcatggaaatgaaatgattcgccagataaatcttaaggaggaggattgcctcgaaaactctcattctaatttggggacatactctctttggtcaatagggattgtcctttcctgcattctcggggtagccattggatttgctgttcgcccttacgtcatccgtcatacaggaagaagtgaaccacctctcgttcatcatgacatggaagcttctcctaaccaaattgggggaacaagttctgaccttcttctcctacattagaaaccgagttgctgaatcaaccgtttattcagtattaagtagactagttatgatgatcgtgtctcacctttccctcatgtattccgccctaagtagtttaatttgttcgatggtatctagccttttcttcatgtgtcaacccaataatgtagctattttagacaaaacagtctctgtgtctgatcccgagagtccaggttgcggcaacccaaagccgcccctttcactgaaaccctctgatgatcttattgacctaataagctttgatgatgaacaagaacctaacaatgacaaagattgcaggaatgaagagactcttcctcatgcaaccatagatgacattataaaggttcatgttgaagaattttcaaagatggctgaagaagatactgtaattcatggttcttcatctactgagtaggtttcagttaaaagcacatgaatcagagagtatgtgtcttttgtaaatgtaaagtttggttgagttgaaaaatctttgaatatttattgaagtgctcatctttttttctttatatcaa

SEQ ID NO: 82788 - protein, 261 aa, Arabidopsis thaliana
  peptide (1)..(261): Ceres Seq. ID no. 12667319
  misc_feature (100)..(127): Pfam Name: NHL repeat Pfam Description: NHL repeat
  misc_feature (1)..(199): Homolog of NCBI NO: 25402992 NR Description: protein T23E23.6 [imported] - Arabidopsis >gi|9369410|gb|AAF87158.1|AC002423_23 T23E23.6 [Arabidopsis
  misc_feature (1)..(261): Homolog of NCBI NO: 18395326 NR Description: expressed protein; protein id: At1g23890.1, by cDNA: gi_15724247, supported by cDNA: gi_16974538 [Arabidopsis >gi|15724248|gb|AAL06517.1|AF412064_1 At1g23890/T23E23_13
  misc_feature (23)..(215): Homolog of NCBI NO: 9369390 NR Description: T23E23.5 [Arabidopsis thaliana]
  misc_feature (23)..(249): Homolog of NCBI NO: 7485679 NR Description: hypothetical protein F17O7.19 - Arabidopsis >gi|3176691|gb|AAC18814.1| Contains homology to serine/threonine kinase gb|X99618 from Mycobacterium tuberculosis. ESTs gb|F14403,
  misc_feature (26)..(222): Homolog of NCBI NO: 22331093 NR Description: hypothetical protein; protein id: At3g14860.1, by cDNA: gi_20260313 [Arabidopsis thaliana] unknown protein [Arabidopsis thaliana]
  misc_feature (23)..(193): Homolog of NCBI NO: 22329761 NR Description: unknown protein; protein id: At1g23880.1, by cDNA: gi_18700090, supported by cDNA: gi_20856012 [Arabidopsis >gi|18700091|gb|AAL77657.1| At1g23880/T23E23_8 [Arabidopsis
  misc_feature (23)..(249): Homolog of NCBI NO: 30698018 NR Description: expressed protein [Arabidopsis thaliana] Unknown protein [Arabidopsis thaliana]
  misc_feature (23)..(249): Homolog of NCBI NO: 30698020 NR Description: expressed protein [Arabidopsis thaliana]
  misc_feature (26)..(191): Homolog of NCBI NO: 11994597 NR Description: gene_id:T21E2.13~pir||T01495~similar to unknown
  misc_feature (26)..(224): Homolog of NCBI NO: 11357718 NR Description: hypothetical protein F2G14_10 - Arabidopsis >gi|9755656|emb|CAC01808.1| putative protein [Arabidopsis
MAWGFSSVSLFLFVVFNLVSGKIVLEEGYEVTTVVDGHKSGLNPYTIHALPGSSNLIVLDSSGSTFYTTSFPLSVDSVINRFAGDGSSGHVDGKAGNSRFSKPRGFAVDAKGNVYVADKSNKAIRKISSSGSVTTIAGGISKAFGHRDGPAQNATFSSDFEITFVPQRCCLLVSDHGNEMIRQINLKEEDCLENSHSNLGTYSLWSIGIVLSCILGVAIGFAVRPYVIRHTGRSEPPLVHHDMEASPNQIGGTSSDLLLLH

SEQ ID NO: 82789 - protein, 161 aa, Arabidopsis thaliana
  peptide (1)..(161): Ceres Seq. ID no. 12667320
  misc_feature (1)..(161): Homolog of NCBI NO: 25402992 NR Description: protein T23E23.6 [imported] - Arabidopsis >gi|9369410|gb|AAF87158.1|AC002423_23 T23E23.6 [Arabidopsis
MTWKLLLTKLGEQVLTFFSYIRNRVAESTVYSVLSRLVMMIVSHLSLMYSALSSLICSMVSSLFFMCQPNNVAILDKTVSVSDPESPGCGNPKPPLSLKPSDDLIDLISFDDEQEPNNDKDCRNEETLPHATIDDIIKVHVEEFSKMAEEDTVIHGSSSTE

SEQ ID NO: 82790 - DNA, 981 bp, Arabidopsis thaliana
  misc_feature (1)..(981): Ceres Seq. ID no. 12667344
  misc_feature: MA Experiment ID: 20001910 Result: Up-regulated in Transcription
  misc_feature: MA Experiment 20001910 PARAMETER Experiment Name: At_Drought_Reproduction_P Parameter: Age (day) Value: 37
  misc_feature: MA Experiment 20001910 PARAMETER Experiment Name: At_Drought_Reproduction_P Parameter: Organism Value: A. thaliana
  misc_feature: MA Experiment 20001910 PARAMETER Experiment Name: At_Drought_Reproduction_P Parameter: Plant Line Value: WS
  misc_feature: MA Experiment 20001910 PARAMETER Experiment Name: At_Drought_Reproduction_P Parameter: Timepoint (day) Value: 7
  misc_feature: MA Experiment 20001910 PARAMETER Experiment Name: At_Drought_Reproduction_P Parameter: Tissue Value: Flowers
  misc_feature: MA Experiment 20001910 PARAMETER Experiment Name: At_Drought_Reproduction_P Parameter: Treatment Value: Drought vs. No Drought
atgaaatcttttggtttatgtctgtttattctcgtatcttctccatgtctccttcaagccaatctctcgtctgattattacaccaaaacatgtcctgaattcgaggaaacactcgtacaaatcgtcaccgataaacaaattgcagctccaacaacagctgtcggaacactccgtctctttttccacgattgcatggttgatggctgcgacgcctcaatcctcgttgcttctactccacgtaaaacctccgaacgtgacgccgatatcaaccgttctcttcctggagacgcattcgacgtaatcacacgtatcaaaaccgccgtcgagctaaaatgtccaaacattgtttcttgctccgatatcctcgttggtgcaacacgtagtttaatctcaatggtcggaggtccgagagttaacgttaagttcggtcggaaagatagtcttgtctctgatatgaatcgtgttgaaggaaaactagctcgacctaacatgactatggatcatatcatttctattttcgagtctagtggtctgaccgttcaagaaatggttgctcttgttggtgctcacaccattggtttctctcattgcaaagagttcgcgagtcggatctttaacaagtctgatcaaaatggtccggtggagatgaatccgaaatacgcggcggagctgaggaagttgtgtgcgaattacaccaatgatgaacagatgtctgcgtttaatgacgtttttactccagggaaatttgataatatgtattacaagaatttgaagcacggttacgggttgctccagtccgatcacgcgattgcgtttgacaacaggacgcgctcgctggtggatctttacgcggaggacgaaacggcgttctttgacgcgtttgcgaaggctatggagaaagttagtgagaagaatgtgaagacggggaagcttggagaagtaagaaggcggtgtgatcaatacaatgactacaagggataa

SEQ ID NO: 82791 - protein, 326 aa, Arabidopsis thaliana
  peptide (1)..(326): Ceres Seq. ID no. 12667345
  misc_feature (38)..(286): Pfam Name: Peroxidase Pfam Description: Peroxidase
  misc_feature (1)..(326): Homolog of NCBI NO: 15221670 NR Description: peroxidase, putative; protein id: At1g24110.1 thaliana] >gi|25453192|sp|O48677|PER6_ARATH Peroxidase 6
  misc_feature (8)..(323): Homolog of NCBI NO: 9759442 NR Description: peroxidase [Arabidopsis thaliana]
  misc_feature (8)..(323): Homolog of NCBI NO: 18422742 NR Description: peroxidase, putative; protein id: At5g47000.1, by cDNA: 41397., supported by cDNA: gi_20260463 [Arabidopsis >gi|26397788|sp|Q9FJR1|PE65_ARATH Peroxidase 65 precursor
  misc_feature (7)..(323): Homolog of NCBI NO: 21593687 NR Description: peroxidase [Arabidopsis thaliana]
  misc_feature (8)..(322): Homolog of NCBI NO: 15236620 NR Description: peroxidase, putative; protein id: At4g17690.1 thaliana] >gi|26397556|sp|O23609|PE41_ARATH Peroxidase 41
  misc_feature (8)..(322): Homolog of NCBI NO: 15232929 NR Description: peroxidase, putative; protein id: At3g28200.1, by cDNA: gi_14334599 [Arabidopsis thaliana] Peroxidase 31 precursor (Atperox P31) (ATP41)
  misc_feature (8)..(322): Homolog of NCBI NO: 14334600 NR Description: putative peroxidase [Arabidopsis thaliana]
  misc_feature (6)..(322): Homolog of NCBI NO: 15242580 NR Description: peroxidase, putative; protein id: At5g40150.1 thaliana] >gi|26397798|sp|Q9FL16|PE63_ARATH Peroxidase 63 (Atperox P63) (ATP26a) >gi|10177502|dbj|BAB10896.1| peroxidase
  misc_feature (43)..(322): Homolog of NCBI NO: 1890317 NR Description: peroxidase ATP26a [Arabidopsis thaliana]
  misc_feature (3)..(322): Homolog of NCBI NO: 17027271 NR Description: putative peroxidase [Oryza sativa (japonica
MKSFGLCLFILVSSPCLLQANLSSDYYTKTCPEFEETLVQIVTDKQIAAPTTAVGTLRLFFHDCMVDGCDASILVASTPRKTSERDADINRSLPGDAFDVITRIKTAVELKCPNIVSCSDILVGATRSLISMVGGPRVNVKFGRKDSLVSDMNRVEGKLARPNMTMDHIISIFESSGLTVQEMVALVGAHTIGFSHCKEFASRIFNKSDQNGPVEMNPKYAAELRKLCANYTNDEQMSAFNDVFTPGKFDNMYYKNLKHGYGLLQSDHAIAFDNRTRSLVDLYAEDETAFFDAFAKAMEKVSEKNVKTGKLGEVRRRCDQYNDYKG

SEQ ID NO: 82792 - protein, 262 aa, Arabidopsis thaliana
  peptide (1)..(262): Ceres Seq. ID no. 12667346
  misc_feature (1)..(222): Pfam Name: Peroxidase Pfam Description: Peroxidase
  misc_feature (1)..(262): Homolog of NCBI NO: 15221670 NR Description: peroxidase, putative; protein id: At1g24110.1 thaliana] >gi|25453192|sp|O48677|PER6_ARATH Peroxidase 6
  misc_feature (1)..(259): Homolog of NCBI NO: 9759442 NR Description: peroxidase [Arabidopsis thaliana]
  misc_feature (1)..(259): Homolog of NCBI NO: 18422742 NR Description: peroxidase, putative; protein id: At5g47000.1, by cDNA: 41397., supported by cDNA: gi_20260463 [Arabidopsis >gi|26397788|sp|Q9FJR1|PE65_ARATH Peroxidase 65 precursor
  misc_feature (1)..(259): Homolog of NCBI NO: 21593687 NR Description: peroxidase [Arabidopsis thaliana]
  misc_feature (1)..(258): Homolog of NCBI NO: 15236620 NR Description: peroxidase, putative; protein id: At4g17690.1 thaliana] >gi|26397556|sp|O23609|PE41_ARATH Peroxidase 41
  misc_feature (1)..(258): Homolog of NCBI NO: 15232929 NR Description: peroxidase, putative; protein id: At3g28200.1, by cDNA: gi_14334599 [Arabidopsis thaliana] Peroxidase 31 precursor (Atperox P31) (ATP41)
  misc_feature (1)..(258): Homolog of NCBI NO: 14334600 NR Description: putative peroxidase [Arabidopsis thaliana]
  misc_feature (1)..(258): Homolog of NCBI NO: 15242580 NR Description: peroxidase, putative; protein id: At5g40150.1 thaliana] >gi|26397798|sp|Q9FL16|PE63_ARATH Peroxidase 63 (Atperox P63) (ATP26a) >gi|10177502|dbj|BAB10896.1| peroxidase
  misc_feature (1)..(258): Homolog of NCBI NO: 1890317 NR Description: peroxidase ATP26a [Arabidopsis thaliana]
  misc_feature (1)..(258): Homolog of NCBI NO: 17027271 NR Description: putative peroxidase [Oryza sativa (japonica
MVDGCDASILVASTPRKTSERDADINRSLPGDAFDVITRIKTAVELKCPNIVSCSDILVGATRSLISMVGGPRVNVKFGRKDSLVSDMNRVEGKLARPNMTMDHIISIFESSGLTVQEMVALVGAHTIGFSHCKEFASRIFNKSDQNGPVEMNPKYAAELRKLCANYTNDEQMSAFNDVFTPGKFDNMYYKNLKHGYGLLQSDHAIAFDNRTRSLVDLYAEDETAFFDAFAKAMEKVSEKNVKTGKLGEVRRRCDQYNDYKG

SEQ ID NO: 82793 - protein, 195 aa, Arabidopsis thaliana
  peptide (1)..(195): Ceres Seq. ID no. 12667347
  misc_feature (1)..(155): Pfam Name: Peroxidase Pfam Description: Peroxidase
  misc_feature (1)..(195): Homolog of NCBI NO: 15221670 NR Description: peroxidase, putative; protein id: At1g24110.1 thaliana] >gi|25453192|sp|O48677|PER6_ARATH Peroxidase 6
  misc_feature (1)..(192): Homolog of NCBI NO: 9759442 NR Description: peroxidase [Arabidopsis thaliana]
  misc_feature (1)..(192): Homolog of NCBI NO: 18422742 NR Description: peroxidase, putative; protein id: At5g47000.1, by cDNA: 41397., supported by cDNA: gi_20260463 [Arabidopsis >gi|26397788|sp|Q9FJR1|PE65_ARATH Peroxidase 65 precursor
  misc_feature (1)..(192): Homolog of NCBI NO: 21593687 NR Description: peroxidase [Arabidopsis thaliana]
  misc_feature (1)..(191): Homolog of NCBI NO: 15236620 NR Description: peroxidase, putative; protein id: At4g17690.1 thaliana] >gi|26397556|sp|O23609|PE41_ARATH Peroxidase 41
  misc_feature (1)..(191): Homolog of NCBI NO: 15232929 NR Description: peroxidase, putative; protein id: At3g28200.1, by cDNA: gi_14334599 [Arabidopsis thaliana] Peroxidase 31 precursor (Atperox P31) (ATP41)
  misc_feature (1)..(191): Homolog of NCBI NO: 14334600 NR Description: putative peroxidase [Arabidopsis thaliana]
  misc_feature (1)..(191): Homolog of NCBI NO: 15242580 NR Description: peroxidase, putative; protein id: At5g40150.1 thaliana] >gi|26397798|sp|Q9FL16|PE63_ARATH Peroxidase 63 (Atperox P63) (ATP26a) >gi|10177502|dbj|BAB10896.1| peroxidase
  misc_feature (1)..(191): Homolog of NCBI NO: 1890317 NR Description: peroxidase ATP26a [Arabidopsis thaliana]
  misc_feature (1)..(191): Homolog of NCBI NO: 17027271 NR Description: putative peroxidase [Oryza sativa (japonica
MVGGPRVNVKFGRKDSLVSDMNRVEGKLARPNMTMDHIISIFESSGLTVQEMVALVGAHTIGFSHCKEFASRIFNKSDQNGPVEMNPKYAAELRKLCANYTNDEQMSAFNDVFTPGKFDNMYYKNLKHGYGLLQSDHAIAFDNRTRSLVDLYAEDETAFFDAFAKAMEKVSEKNVKTGKLGEVRRRCDQYNDYKG

SEQ ID NO: 82794 - DNA, 1248 bp, Arabidopsis thaliana
  misc_feature (1)..(1248): Ceres Seq. ID no. 12667348
  misc_feature: MA Experiment ID: 20000184 Result: Up-regulated in Transcription
  misc_feature: MA Experiment 20000184 PARAMETER Experiment Name: At_Shoots__P Parameter: Age (day) Value: 7
  misc_feature: MA Experiment 20000184 PARAMETER Experiment Name: At_Shoots__P Parameter: Tissue Value: Shoots vs. Whole Plant
  misc_feature: MA Experiment ID: 20000185 Result: Up-regulated in Transcription
  misc_feature: MA Experiment 20000185 PARAMETER Experiment Name: At_Roots__P Parameter: Age (day) Value: 7 vs. 21
  misc_feature: MA Experiment 20000185 PARAMETER Experiment Name: At_Roots__P Parameter: Organism Value: A. thaliana
  misc_feature: MA Experiment 20000185 PARAMETER Experiment Name: At_Roots__P Parameter: Tissue Value: Roots vs. Whole Plant
  misc_feature: MA Experiment ID: 20000439 Result: Up-regulated in Transcription
  misc_feature: MA Experiment 20000439 PARAMETER Experiment Name: At_Roots__P Parameter: Age (day) Value: 14 vs. 21
  misc_feature: MA Experiment 20000439 PARAMETER Experiment Name: At_Roots__P Parameter: Organism Value: A. thaliana
  misc_feature: MA Experiment 20000439 PARAMETER Experiment Name: At_Roots__P Parameter: Tissue Value: Roots vs. Whole Plant
atgggtttgcttccgtgttcttgtcctctgccttgcaatgaaacaagatcagaatgtgaaacgaaatcgacgcatcaccaatcagaatcctcaacgtcatcatcgcttttgtctcagccaagtcttccattggttccttcgctgtcttttcagcatcagagctccagcgtcgatcaccattgcttagccacgctcaaagataaatcctcgtacgtatcttctctcgctgtctcagataaattactctacactggctcttccaacagtgagatacgtgtatggcctcgtgaacctccgttctcaccggaatattccaccggcgatgaccgtaacgtagttgccaacggaaacggaggggttaaatcgttggtgattcttggcgacaagctaataagtgctcatcaagatcacaagattcgtgtatggaagatcatcgacgagagcaatcgcagaggtcagaagtacaagtgcgtagctactcttccgacgatgaacgaccgcttcaagactctctttagtagcaaaagctacgtggaagtccgacggcacaagaagtgcacgtgggttcaccatgtggacgccgtgtcatcactagccttgtcgcaagatggctctctgctttactctgcttcgtgggaccggagtttcaagatatggagaacatctgatttcaaatgcttggactctatcgaaaaggctcacgatgatgctattaacgccatcgtagtgtccaaagacggttttgtgtacacgggttcggcagataagaagatcaaagtgtggaacaagaaggacaagaaacactctctggtcgctacactgactaaacatctctcggcagtgaacgcgttggctattagtgaagacgggaaggttctttactccggtgcgtgtgatagatcgattcttgtgtgggagagattgattaatggagatgatgaggagttacatatgtctgtagtgggagctttaaggggacacaggaaggcgattatgtgtttagcagttgcgtctgatttggtgttgagtgggtcagcggataagagcttgagggtttggaggagaggattaatggagaaagagggttattcttgtttggcggttctggaaggacataccaagcctgttaagtctttggctgtttcagtttctgattccgattctaattctgattattcttgtatggtttatagtgggagtcttgatctttctcttaaagtttggaacttaagggtttcatctatctaa

SEQ ID NO: 82795 - protein, 415 aa, Arabidopsis thaliana
  peptide (1)..(415): Ceres Seq. ID no. 12667349
  misc_feature (1)..(415): Homolog of NCBI NO: 15221675 NR Description: G-protein beta family; protein id: At1g24130.1
  misc_feature (46)..(412): Homolog of NCBI NO: 15240616 NR Description: G-protein beta family; protein id: At5g50120.1
  misc_feature (18)..(413): Homolog of NCBI NO: 18395507 NR Description: G-protein beta family; protein id: At1g24530.1, by cDNA: gi_19310648 [Arabidopsis thaliana] F21J9.19 [Arabidopsis thaliana] >gi|15028341|gb|AAK76647.1|
  misc_feature (62)..(415): Homolog of NCBI NO: 15225317 NR Description: G-protein beta family; protein id: At2g26490.1
  misc_feature (11)..(414): Homolog of NCBI NO: 15230244 NR Description: hypothetical protein; protein id: At3g18950.1
  misc_feature (62)..(413): Homolog of NCBI NO: 15235354 NR Description: G-protein beta family; protein id: At4g34380.1
  misc_feature (62)..(414): Homolog of NCBI NO: 15229740 NR Description: G-protein beta family; protein id: At3g50390.1
  misc_feature (9)..(410): Homolog of NCBI NO: 15222143 NR Description: En/Spm-like transposon protein, putative; protein At1g49450.1, supported by cDNA: gi_17979258 [Arabidopsis >gi|25405310|pir||B96531 hypothetical protein F13F21.11
  misc_feature (9)..(410): Homolog of NCBI NO: 17979259 NR Description: At1g49450/F13F21_11 [Arabidopsis thaliana]
  misc_feature (68)..(410): Homolog of NCBI NO: 15220271 NR Description: G-protein beta family; protein id: At1g47610.1
MGLLPCSCPLPCNETRSECETKSTHHQSESSTSSSLLSQPSLPLVPSLSFQHQSSSVDHHCLATLKDKSSYVSSLAVSDKLLYTGSSNSEIRVWPREPPFSPEYSTGDDRNVVANGNGGVKSLVILGDKLISAHQDHKIRVWKIIDESNRRGQKYKCVATLPTMNDRFKTLFSSKSYVEVRRHKKCTWVHHVDAVSSLALSQDGSLLYSASWDRSFKIWRTSDFKCLDSIEKAHDDAINAIVVSKDGFVYTGSADKKIKVWNKKDKKHSLVATLTKHLSAVNALAISEDGKVLYSGACDRSILVWERLINGDDEELHMSVVGALRGHRKAIMCLAVASDLVLSGSADKSLRVWRRGLMEKEGYSCLAVLEGHTKPVKSLAVSVSDSDSNSDYSCMVYSGSLDLSLKVWNLRVSSI

SEQ ID NO: 82796 - protein, 252 aa, Arabidopsis thaliana
  peptide (1)..(252): Ceres Seq. ID no. 12667350
  misc_feature (1)..(252): Homolog of NCBI NO: 15221675 NR Description: G-protein beta family; protein id: At1g24130.1
  misc_feature (1)..(249): Homolog of NCBI NO: 15240616 NR Description: G-protein beta family; protein id: At5g50120.1
  misc_feature (1)..(250): Homolog of NCBI NO: 18395507 NR Description: G-protein beta family; protein id: At1g24530.1, by cDNA: gi_19310648 [Arabidopsis thaliana] F21J9.19 [Arabidopsis thaliana] >gi|15028341|gb|AAK76647.1|
  misc_feature (1)..(252): Homolog of NCBI NO: 15225317 NR Description: G-protein beta family; protein id: At2g26490.1
  misc_feature (1)..(251): Homolog of NCBI NO: 15230244 NR Description: hypothetical protein; protein id: At3g18950.1
  misc_feature (1)..(250): Homolog of NCBI NO: 15235354 NR Description: G-protein beta family; protein id: At4g34380.1
  misc_feature (1)..(251): Homolog of NCBI NO: 15229740 NR Description: G-protein beta family; protein id: At3g50390.1
  misc_feature (1)..(247): Homolog of NCBI NO: 15222143 NR Description: En/Spm-like transposon protein, putative; protein At1g49450.1, supported by cDNA: gi_17979258 [Arabidopsis >gi|25405310|pir||B96531 hypothetical protein F13F21.11
  misc_feature (1)..(247): Homolog of NCBI NO: 17979259 NR Description: At1g49450/F13F21_11 [Arabidopsis thaliana]
  misc_feature (1)..(247): Homolog of NCBI NO: 15220271 NR Description: G-protein beta family; protein id: At1g47610.1
MNDRFKTLFSSKSYVEVRRHKKCTWVHHVDAVSSLALSQDGSLLYSASWDRSFKIWRTSDFKCLDSIEKAHDDAINAIVVSKDGFVYTGSADKKIKVWNKKDKKHSLVATLTKHLSAVNALAISEDGKVLYSGACDRSILVWERLINGDDEELHMSVVGALRGHRKAIMCLAVASDLVLSGSADKSLRVWRRGLMEKEGYSCLAVLEGHTKPVKSLAVSVSDSDSNSDYSCMVYSGSLDLSLKVWNLRVSSI

SEQ ID NO: 82797 - DNA, 2004 bp, Arabidopsis thaliana
  misc_feature (1)..(2004): Ceres Seq. ID no. 12667371
  misc_feature: MA Experiment ID: 20000171 Result: Down-regulated in Transcription
  misc_feature: MA Experiment 20000171 PARAMETER Experiment Name: At_42deg_Heat_P Parameter: Age (day) Value: 14
  misc_feature: MA Experiment 20000171 PARAMETER Experiment Name: At_42deg_Heat_P Parameter: Organism Value: A. thaliana
  misc_feature: MA Experiment 20000171 PARAMETER Experiment Name: At_42deg_Heat_P Parameter: Plant Line Value: WS
  misc_feature: MA Experiment 20000171 PARAMETER Experiment Name: At_42deg_Heat_P Parameter: Temperature (deg C) Value: 42 vs. 22
  misc_feature: MA Experiment 20000171 PARAMETER Experiment Name: At_42deg_Heat_P Parameter: Timepoint (hr) Value: 1
  misc_feature: MA Experiment 20000171 PARAMETER Experiment Name: At_42deg_Heat_P Parameter: Tissue Value: Aerial
  misc_feature: MA Experiment ID: 20000173 Result: Down-regulated in Transcription
  misc_feature: MA Experiment 20000173 PARAMETER Experiment Name: At_42deg_Heat_P Parameter: Age (day) Value: 14
  misc_feature: MA Experiment 20000173 PARAMETER Experiment Name: At_42deg_Heat_P Parameter: Organism Value: A. thaliana
  misc_feature: MA Experiment 20000173 PARAMETER Experiment Name: At_42deg_Heat_P Parameter: Plant Line Value: WS
  misc_feature: MA Experiment 20000173 PARAMETER Experiment Name: At_42deg_Heat_P Parameter: Temperature (deg C) Value: 42 vs. 22
  misc_feature: MA Experiment 20000173 PARAMETER Experiment Name: At_42deg_Heat_P Parameter: Timepoint (hr) Value: 6
  misc_feature: MA Experiment 20000173 PARAMETER Experiment Name: At_42deg_Heat_P Parameter: Tissue Value: Aerial
  misc_feature: MA Experiment ID: 20000185 Result: Up-regulated in Transcription
  misc_feature: MA Experiment 20000185 PARAMETER Experiment Name: At_Roots__P Parameter: Age (day) Value: 7 vs. 21
  misc_feature: MA Experiment 20000185 PARAMETER Experiment Name: At_Roots__P Parameter: Organism Value: A. thaliana
  misc_feature: MA Experiment 20000185 PARAMETER Experiment Name: At_Roots__P Parameter: Tissue Value: Roots vs. Whole Plant
  misc_feature: MA Experiment ID: 20000269 Result: Up-regulated in Transcription
  misc_feature: MA Experiment 20000269 PARAMETER Experiment Name: At_1mM_KNO3_L-vs-H_Roots_P Parameter: Age (day) Value: 7,10,12
  misc_feature: MA Experiment 20000269 PARAMETER Experiment Name: At_1mM_KNO3_L-vs-H_Roots_P Parameter: Organism Value: A. thaliana
  misc_feature: MA Experiment 20000269 PARAMETER Experiment Name: At_1mM_KNO3_L-vs-H_Roots_P Parameter: Plant Line Value: WS
  misc_feature: MA Experiment 20000269 PARAMETER Experiment Name: At_1mM_KNO3_L-vs-H_Roots_P Parameter: Timepoint (day) Value: 7,10,12
  misc_feature: MA Experiment 20000269 PARAMETER Experiment Name: At_1mM_KNO3_L-vs-H_Roots_P Parameter: Tissue Value: Roots
  misc_feature: MA Experiment 20000269 PARAMETER Experiment Name: At_1mM_KNO3_L-vs-H_Roots_P Parameter: Treatment Value: 1mM KNO3 vs. 50mM KNO3
  misc_feature: MA Experiment ID: 20000436 Result: Down-regulated in Transcription
  misc_feature: MA Experiment 20000436 PARAMETER Experiment Name: At_Drought_P Parameter: Age (day) Value: 7
  misc_feature: MA Experiment 20000436 PARAMETER Experiment Name: At_Drought_P Parameter: Organism Value: A. thaliana
  misc_feature: MA Experiment 20000436 PARAMETER Experiment Name: At_Drought_P Parameter: Plant Line Value: WS
  misc_feature: MA Experiment 20000436 PARAMETER Experiment Name: At_Drought_P Parameter: Timepoint (hr) Value: 12
  misc_feature: MA Experiment 20000436 PARAMETER Experiment Name: At_Drought_P Parameter: Tissue Value: Whole Plant
  misc_feature: MA Experiment 20000436 PARAMETER Experiment Name: At_Drought_P Parameter: Treatment Value: Drought vs. No Drought
  misc_feature: MA Experiment ID: 20000437 Result: Down-regulated in Transcription
  misc_feature: MA Experiment 20000437 PARAMETER Experiment Name: At_Drought_P Parameter: Age (day) Value: 8
  misc_feature: MA Experiment 20000437 PARAMETER Experiment Name: At_Drought_P Parameter: Organism Value: A. thaliana
  misc_feature: MA Experiment 20000437 PARAMETER Experiment Name: At_Drought_P Parameter: Plant Line Value: WS
  misc_feature: MA Experiment 20000437 PARAMETER Experiment Name: At_Drought_P Parameter: Timepoint (hr) Value: 24
  misc_feature: MA Experiment 20000437 PARAMETER Experiment Name: At_Drought_P Parameter: Tissue Value: Whole Plant
  misc_feature: MA Experiment 20000437 PARAMETER Experiment Name: At_Drought_P Parameter: Treatment Value: Drought vs. No Drought
  misc_feature: MA Experiment ID: 20000439 Result: Up-regulated in Transcription
  misc_feature: MA Experiment 20000439 PARAMETER Experiment Name: At_Roots__P Parameter: Age (day) Value: 14 vs. 21
  misc_feature: MA Experiment 20000439 PARAMETER Experiment Name: At_Roots__P Parameter: Organism Value: A. thaliana
  misc_feature: MA Experiment 20000439 PARAMETER Experiment Name: At_Roots__P Parameter: Tissue Value: Roots vs. Whole Plant
  misc_feature: MA Experiment ID: 20000574 Result: Up-regulated in Transcription
  misc_feature: MA Experiment 20000574 PARAMETER Experiment Name: At_100uM_ABA_Mutants__P Parameter: Organism Value: A. thaliana
  misc_feature: MA Experiment 20000574 PARAMETER Experiment Name: At_100uM_ABA_Mutants__P Parameter: Plant Line Value: CS23 vs. Ler wt
  misc_feature: MA Experiment 20000574 PARAMETER Experiment Name: At_100uM_ABA_Mutants__P Parameter: Timepoint (hr) Value: N/A
  misc_feature: MA Experiment 20000574 PARAMETER Experiment Name: At_100uM_ABA_Mutants__P Parameter: Tissue Value: Whole Plant
  misc_feature: MA Experiment 20000574 PARAMETER Experiment Name: At_100uM_ABA_Mutants__P Parameter: Treatment Value: None
  misc_feature: MA Experiment ID: 20000709 Result: Up-regulated in Transcription
  misc_feature: MA Experiment 20000709 PARAMETER Experiment Name: At_15mM_NH4NO3_L-to-H_P Parameter: Age (hr) Value: 14
  misc_feature: MA Experiment 20000709 PARAMETER Experiment Name: At_15mM_NH4NO3_L-to-H_P Parameter: Organism Value: A. thaliana
  misc_feature: MA Experiment 20000709 PARAMETER Experiment Name: At_15mM_NH4NO3_L-to-H_P Parameter: Plant Line Value: WS
  misc_feature: MA Experiment 20000709 PARAMETER Experiment Name: At_15mM_NH4NO3_L-to-H_P Parameter: Timepoint (hr) Value: 4
  misc_feature: MA Experiment 20000709 PARAMETER Experiment Name: At_15mM_NH4NO3_L-to-H_P Parameter: Tissue Value: Aerial
  misc_feature: MA Experiment 20000709 PARAMETER Experiment Name: At_15mM_NH4NO3_L-to-H_P Parameter: Treatment Value: 15mM NH4NO3 vs. 30mM Mannitol
  misc_feature: MA Experiment ID: 20001247 Result: Down-regulated in Transcription
  misc_feature: MA Experiment 20001247 PARAMETER Experiment Name: At_Far-red-induction_P Parameter: Age (day) Value: 7
  misc_feature: MA Experiment 20001247 PARAMETER Experiment Name: At_Far-red-induction_P Parameter: Light Value: Far-red vs. White
  misc_feature: MA Experiment 20001247 PARAMETER Experiment Name: At_Far-red-induction_P Parameter: Organism Value: A. thaliana
  misc_feature: MA Experiment 20001247 PARAMETER Experiment Name: At_Far-red-induction_P Parameter: Plant Line Value: Columbia
  misc_feature: MA Experiment 20001247 PARAMETER Experiment Name: At_Far-red-induction_P Parameter: Timepoint (hr) Value: 1
  misc_feature: MA Experiment 20001247 PARAMETER Experiment Name: At_Far-red-induction_P Parameter: Tissue Value: Whole Plant
  misc_feature: MA Experiment ID: 20001248 Result: Down-regulated in Transcription
  misc_feature: MA Experiment 20001248 PARAMETER Experiment Name: At_Far-red-induction_P Parameter: Age (day) Value: 7
  misc_feature: MA Experiment 20001248 PARAMETER Experiment Name: At_Far-red-induction_P Parameter: Light Value: Far-red vs. White
  misc_feature: MA Experiment 20001248 PARAMETER Experiment Name: At_Far-red-induction_P Parameter: Organism Value: A. thaliana
  misc_feature: MA Experiment 20001248 PARAMETER Experiment Name: At_Far-red-induction_P Parameter: Plant Line Value: Columbia
  misc_feature: MA Experiment 20001248 PARAMETER Experiment Name: At_Far-red-induction_P Parameter: Timepoint (hr) Value: 4
  misc_feature: MA Experiment 20001248 PARAMETER Experiment Name: At_Far-red-induction_P Parameter: Tissue Value: Whole Plant
  misc_feature: MA Experiment ID: 20001451 Result: Down-regulated in Transcription
  misc_feature: MA Experiment 20001451 PARAMETER Experiment Name: At_Far-red-induction_P Parameter: Age (day) Value: 7
  misc_feature: MA Experiment 20001451 PARAMETER Experiment Name: At_Far-red-induction_P Parameter: Light Value: Far-red vs. White
  misc_feature: MA Experiment 20001451 PARAMETER Experiment Name: At_Far-red-induction_P Parameter: Organism Value: A. thaliana
  misc_feature: MA Experiment 20001451 PARAMETER Experiment Name: At_Far-red-induction_P Parameter: Plant Line Value: Columbia
  misc_feature: MA Experiment 20001451 PARAMETER Experiment Name: At_Far-red-induction_P Parameter: Timepoint (hr) Value: 24
  misc_feature: MA Experiment 20001451 PARAMETER Experiment Name: At_Far-red-induction_P Parameter: Tissue Value: Whole Plant
  misc_feature: MA Experiment ID: 20001457 Result: Up-regulated in Transcription
  misc_feature: MA Experiment 20001457 PARAMETER Experiment Name: At_50mM_NH4NO3_L-to-H_P Parameter: Age (day) Value: Undefined
  misc_feature: MA Experiment 20001457 PARAMETER Experiment Name: At_50mM_NH4NO3_L-to-H_P Parameter: Organism Value: Undefined
  misc_feature: MA Experiment 20001457 PARAMETER Experiment Name: At_50mM_NH4NO3_L-to-H_P Parameter: Plant Line Value: Undefined
  misc_feature: MA Experiment 20001457 PARAMETER Experiment Name: At_50mM_NH4NO3_L-to-H_P Parameter: Timepoint (hr) Value: 0.5
  misc_feature: MA Experiment 20001457 PARAMETER Experiment Name: At_50mM_NH4NO3_L-to-H_P Parameter: Tissue Value: Siliques
  misc_feature: MA Experiment 20001457 PARAMETER Experiment Name: At_50mM_NH4NO3_L-to-H_P Parameter: Treatment Value: 50mM NH4NO3 vs. 100mM Manitol
  misc_feature: MA Experiment ID: 20001458 Result: Up-regulated in Transcription
  misc_feature: MA Experiment 20001458 PARAMETER Experiment Name: At_50mM_NH4NO3_L-to-H_P Parameter: Age (day) Value: Undefined
  misc_feature: MA Experiment 20001458 PARAMETER Experiment Name: At_50mM_NH4NO3_L-to-H_P Parameter: Organism Value: Undefined
  misc_feature: MA Experiment 20001458 PARAMETER Experiment Name: At_50mM_NH4NO3_L-to-H_P Parameter: Plant Line Value: Undefined
  misc_feature: MA Experiment 20001458 PARAMETER Experiment Name: At_50mM_NH4NO3_L-to-H_P Parameter: Timepoint (hr) Value: 2
  misc_feature: MA Experiment 20001458 PARAMETER Experiment Name: At_50mM_NH4NO3_L-to-H_P Parameter: Tissue Value: Siliques
  misc_feature: MA Experiment 20001458 PARAMETER Experiment Name: At_50mM_NH4NO3_L-to-H_P Parameter: Treatment Value: 50mM NH4NO3 vs. 100mM Manitol
  misc_feature: MA Experiment ID: 20001459 Result: Up-regulated in Transcription
  misc_feature: MA Experiment 20001459 PARAMETER Experiment Name: At_50mM_NH4NO3_L-to-H_P Parameter: Age (day) Value: Undefined
  misc_feature: MA Experiment 20001459 PARAMETER Experiment Name: At_50mM_NH4NO3_L-to-H_P Parameter: Organism Value: Undefined
  misc_feature: MA Experiment 20001459 PARAMETER Experiment Name: At_50mM_NH4NO3_L-to-H_P Parameter: Plant Line Value: Undefined
  misc_feature: MA Experiment 20001459 PARAMETER Experiment Name: At_50mM_NH4NO3_L-to-H_P Parameter: Timepoint (hr) Value: 4
  misc_feature: MA Experiment 20001459 PARAMETER Experiment Name: At_50mM_NH4NO3_L-to-H_P Parameter: Tissue Value: Siliques
  misc_feature: MA Experiment 20001459 PARAMETER Experiment Name: At_50mM_NH4NO3_L-to-H_P Parameter: Treatment Value: 50mM NH4NO3 vs. 100mM Manitol
  misc_feature: MA Experiment ID: 20001557 Result: Up-regulated in Transcription
  misc_feature: MA Experiment 20001557 PARAMETER Experiment Name: At_Drought_Soil_Dry_P Parameter: Age (day) Value: 27
  misc_feature: MA Experiment 20001557 PARAMETER Experiment Name: At_Drought_Soil_Dry_P Parameter: Organism Value: A. thaliana
  misc_feature: MA Experiment 20001557 PARAMETER Experiment Name: At_Drought_Soil_Dry_P Parameter: Plant Line Value: WS
  misc_feature: MA Experiment 20001557 PARAMETER Experiment Name: At_Drought_Soil_Dry_P Parameter: Post Timepoint (hr) Value: 3
  misc_feature: MA Experiment 20001557 PARAMETER Experiment Name: At_Drought_Soil_Dry_P Parameter: Post-Treatment Value: Re-Water vs. No Drought
  misc_feature: MA Experiment 20001557 PARAMETER Experiment Name: At_Drought_Soil_Dry_P Parameter: Timepoint (day) Value: 13
  misc_feature: MA Experiment 20001557 PARAMETER Experiment Name: At_Drought_Soil_Dry_P Parameter: Treatment Value: Drought vs. No Drought
  misc_feature: MA Experiment ID: 20001755 Result: Up-regulated in Transcription
  misc_feature: MA Experiment 20001755 PARAMETER Experiment Name: At_50mM_NH4NO3_L-to-H_P Parameter: Timepoint (hr) Value: 2
  misc_feature: MA Experiment 20001755 PARAMETER Experiment Name: At_50mM_NH4NO3_L-to-H_P Parameter: Tissue Value: Leaf
  misc_feature: MA Experiment 20001755 PARAMETER Experiment Name: At_50mM_NH4NO3_L-to-H_P Parameter: Treatment Value: 50mM NH4NO3 vs 100mM Mannitol
  misc_feature: MA Experiment ID: 20001756 Result: Up-regulated in Transcription
  misc_feature: MA Experiment 20001756 PARAMETER Experiment Name: At_50mM_NH4NO3_L-to-H_P Parameter: Timepoint (hr) Value: 4
  misc_feature: MA Experiment 20001756 PARAMETER Experiment Name: At_50mM_NH4NO3_L-to-H_P Parameter: Tissue Value: Leaf
  misc_feature: MA Experiment 20001756 PARAMETER Experiment Name: At_50mM_NH4NO3_L-to-H_P Parameter: Treatment Value: 50mM NH4NO3 vs 100mM Mannitol
  misc_feature: MA Experiment ID: 20001757 Result: Up-regulated in Transcription
  misc_feature: MA Experiment 20001757 PARAMETER Experiment Name: At_50mM_NH4NO3_L-to-H_P Parameter: Timepoint (hr) Value: 6
  misc_feature: MA Experiment 20001757 PARAMETER Experiment Name: At_50mM_NH4NO3_L-to-H_P Parameter: Tissue Value: Leaf
  misc_feature: MA Experiment 20001757 PARAMETER Experiment Name: At_50mM_NH4NO3_L-to-H_P Parameter: Treatment Value: 50mM NH4NO3 vs 100mM Mannitol
  misc_feature: MA Experiment ID: 20001759 Result: Up-regulated in Transcription
  misc_feature: MA Experiment 20001759 PARAMETER Experiment Name: At_50mM_NH4NO3_L-to-H_P Parameter: Timepoint (hr) Value: 1
  misc_feature: MA Experiment 20001759 PARAMETER Experiment Name: At_50mM_NH4NO3_L-to-H_P Parameter: Tissue Value: Siliques
  misc_feature: MA Experiment 20001759 PARAMETER Experiment Name: At_50mM_NH4NO3_L-to-H_P Parameter: Treatment Value: 50mM NH4NO3 vs 100mM Mannitol
  misc_feature: MA Experiment ID: 20001760 Result: Up-regulated in Transcription
  misc_feature: MA Experiment 20001760 PARAMETER Experiment Name: At_50mM_NH4NO3_L-to-H_P Parameter: Timepoint (hr) Value: 2
  misc_feature: MA Experiment 20001760 PARAMETER Experiment Name: At_50mM_NH4NO3_L-to-H_P Parameter: Tissue Value: Siliques
  misc_feature: MA Experiment 20001760 PARAMETER Experiment Name: At_50mM_NH4NO3_L-to-H_P Parameter: Treatment Value: 50mM NH4NO3 vs 100mM Mannitol
  misc_feature: MA Experiment ID: 20001905 Result: Down-regulated in Transcription
  misc_feature: MA Experiment 20001905 PARAMETER Experiment Name: At_Drought_Reproduction_P Parameter: Age (day) Value: 40
  misc_feature: MA Experiment 20001905 PARAMETER Experiment Name: At_Drought_Reproduction_P Parameter: Organism Value: A. thaliana
  misc_feature: MA Experiment 20001905 PARAMETER Experiment Name: At_Drought_Reproduction_P Parameter: Plant Line Value: WS
  misc_feature: MA Experiment 20001905 PARAMETER Experiment Name: At_Drought_Reproduction_P Parameter: Timepoint (day) Value: 10
  misc_feature: MA Experiment 20001905 PARAMETER Experiment Name: At_Drought_Reproduction_P Parameter: Tissue Value: Rosettes
  misc_feature: MA Experiment 20001905 PARAMETER Experiment Name: At_Drought_Reproduction_P Parameter: Treatment Value: Drought vs. No Drought
  misc_feature: MA Experiment ID: 20001911 Result: Down-regulated in Transcription
  misc_feature: MA Experiment 20001911 PARAMETER Experiment Name: At_Drought_Reproduction_P Parameter: Age (day) Value: 40
  misc_feature: MA Experiment 20001911 PARAMETER Experiment Name: At_Drought_Reproduction_P Parameter: Organism Value: A. thaliana
  misc_feature: MA Experiment 20001911 PARAMETER Experiment Name: At_Drought_Reproduction_P Parameter: Plant Line Value: WS
  misc_feature: MA Experiment 20001911 PARAMETER Experiment Name: At_Drought_Reproduction_P Parameter: Timepoint (day) Value: 10
  misc_feature: MA Experiment 20001911 PARAMETER Experiment Name: At_Drought_Reproduction_P Parameter: Tissue Value: Flowers
  misc_feature: MA Experiment 20001911 PARAMETER Experiment Name: At_Drought_Reproduction_P Parameter: Treatment Value: Drought vs. No Drought
gtttgcatccaaatccaattcataactcacactcgtctcaaattcgaaaaatgtcgtctctctcctgccctacctaccgctcccgcacttcgtcttcgtctcctttcttgtcgaatcatcatcattcttcgctgatcaatgttgttgacccacgccgctcactctccttccactacgcttctcctcaggggcttaatctagctgagctctgtgttgttagatcgcagaggaggtccgttcagagttctgttgtcgtgcaagatggatcagtagccaccgagtcaagctcgtccgaggaggcgaaagatgtaggggtgttaacgattccttcacttgaagctgacaaggttgtagcagagtctgatggcggtgaacaactttcaacagttagtatcacggtggtgggagcttctggtgatcttgccaagaagaaaatattcccagctcttttcgcactttactatgaaggctgtcttcctgagcattttaccatttttggctatgcaaggagtaagatgacagatgctgaacttagagttatggtcagcaaaacattgacatgtagaattgataagagggcaaactgcggtgaaaagatggaagagtttctcaagagatgtttttaccattcgggtcagtatgattctcaggaacattttgttgcattggacgagaagctcaaggagcatgagggtggaagactttcgaaccgtcttttctatctttcaatccctccaaatatctttgttgacgcggtgaaatgtgcaagctcatctgcttcatctgtcaatggatggactagggtcattgtcgagaaaccttttggccgggactccaaaacctcggctgcattaacaaagtctcttaagcagtacctggaggaagaccaaatatttaggatagaccattacttagggaaggagctggttgagaacttgtcggttcttcgattctcaaatcttatatttgaaccgctatggtcaaggcagtatataaggaacgtgcaattcattttttctgaggatttcggcactgaaggacgcggagggtacttcgacaattacggaataataagagatataatgcagaatcatctgcttcagatattagctcttttcgccatggaaacacctgtgagtttggatgcagaggatatcagaaatgaaaaggtaaaggtactacgttcaatgagaccaataaaacttgaagatgtggtgataggacagtacaagagccacagcataggaggagtcacttatccaagctatactgatgataaaactgtgccaaaaggtagtctgaccccgacatttgcagctgctgcactcttcatcgacaatgcaagatgggatggtgtaccttttctaatgaaagctgggaaagcactaaacacccgaagtgcggagataagagtccagttcaggcatgtgcctggaaatttatataaccggaattctggtactgatcgtgatcagaccacaaatgagcttgtcatccgcgtccaacctgatgaagctatctatttgaaaatcaacaacaaggtccctggtttaggaatgagattagatcagagtaacttaaatcttctctattcagcaaggtattcaaaggagattccagatgcatatgagaggcttttgttagatgcgatcgaaggtgaacgcagattgttcataagaagcgatgaacttgacgctgcttgggcgcttttcactccattgctcaaagagatagaagaaaagaagacaaccccagaattctatccttacggcagtcgtggtccagtcggtgcccattatctagccgcaaaacacaaggtccaatggggagacctaagtcttgatcagtgaaagagtggaagaacattttttgttcatagattcacgtcttagaattttcattatttgtgtggtttatggaaactttctttcgctttcagagataggagtgagttttgttcgattttgtatctggaataataagtaagaactaccctattcttgc

SEQ ID NO: 82798 - protein, 615 aa, Arabidopsis thaliana
  peptide (1)..(615): Ceres Seq. ID no. 12667372
  misc_feature (32)..(615): Homolog of NCBI NO: 22326761 NR Description: glucose-6-phosphate 1-dehydrogenase; protein id:
  misc_feature (32)..(615): Homolog of NCBI NO: 18086448 NR Description: AT5g13110/T19L5_70 [Arabidopsis thaliana]
  misc_feature (32)..(615): Homolog of NCBI NO: 9955555 NR Description: glucose-6-phosphate 1-dehydrogenase [Arabidopsis
  misc_feature (127)..(615): Homolog of NCBI NO: 2146735 NR Description: glucose-6-phosphate 1-dehydrogenase (EC 1.1.1.49)
  misc_feature (30)..(611): Homolog of NCBI NO: 9392607 NR Description: plastidic glucose 6-phosphate dehydrogenase
  misc_feature (30)..(611): Homolog of NCBI NO: 3023817 NR Description: Glucose-6-phosphate 1-dehydrogenase, chloroplast
  misc_feature (74)..(612): Homolog of NCBI NO: 5734502 NR Description: glucose-6-phosphate 1-dehydrogenase [Solanum
  misc_feature (74)..(612): Homolog of NCBI NO: 24745908 NR Description: glucose 6-phosphate dehydrogenase [Solanum
  misc_feature (127)..(615): Homolog of NCBI NO: 33304517 NR Description: putative plastidic glucose-6-phosphate
  misc_feature (114)..(614): Homolog of NCBI NO: 3023818 NR Description: Glucose-6-phosphate 1-dehydrogenase, chloroplast
LHPNPIHNSHSSQIRKMSSLSCPTYRSRTSSSSPFLSNHHHSSLINVVDPRRSLSFHYASPQGLNLAELCVVRSQRRSVQSSVVVQDGSVATESSSSEEAKDVGVLTIPSLEADKVVAESDGGEQLSTVSITVVGASGDLAKKKIFPALFALYYEGCLPEHFTIFGYARSKMTDAELRVMVSKTLTCRIDKRANCGEKMEEFLKRCFYHSGQYDSQEHFVALDEKLKEHEGGRLSNRLFYLSIPPNIFVDAVKCASSSASSVNGWTRVIVEKPFGRDSKTSAALTKSLKQYLEEDQIFRIDHYLGKELVENLSVLRFSNLIFEPLWSRQYIRNVQFIFSEDFGTEGRGGYFDNYGIIRDIMQNHLLQILALFAMETPVSLDAEDIRNEKVKVLRSMRPIKLEDVVIGQYKSHSIGGVTYPSYTDDKTVPKGSLTPTFAAAALFIDNARWDGVPFLMKAGKALNTRSAEIRVQFRHVPGNLYNRNSGTDRDQTTNELVIRVQPDEAIYLKINNKVPGLGMRLDQSNLNLLYSARYSKEIPDAYERLLLDAIEGERRLFIRSDELDAAWALFTPLLKEIEEKKTTPEFYPYGSRGPVGAHYLAAKHKVQWGDLSLDQ

SEQ ID NO: 82799 - protein, 599 aa, Arabidopsis thaliana
  peptide (1)..(599): Ceres Seq. ID no. 12667373
  misc_feature (16)..(599): Homolog of NCBI NO: 22326761 NR Description: glucose-6-phosphate 1-dehydrogenase; protein id:
  misc_feature (16)..(599): Homolog of NCBI NO: 18086448 NR Description: AT5g13110/T19L5_70 [Arabidopsis thaliana]
  misc_feature (16)..(599): Homolog of NCBI NO: 9955555 NR Description: glucose-6-phosphate 1-dehydrogenase [Arabidopsis
  misc_feature (111)..(599): Homolog of NCBI NO: 2146735 NR Description: glucose-6-phosphate 1-dehydrogenase (EC 1.1.1.49)
  misc_feature (14)..(595): Homolog of NCBI NO: 9392607 NR Description: plastidic glucose 6-phosphate dehydrogenase
  misc_feature (14)..(595): Homolog of NCBI NO: 3023817 NR Description: Glucose-6-phosphate 1-dehydrogenase, chloroplast
  misc_feature (58)..(596): Homolog of NCBI NO: 5734502 NR Description: glucose-6-phosphate 1-dehydrogenase [Solanum
  misc_feature (58)..(596): Homolog of NCBI NO: 24745908 NR Description: glucose 6-phosphate dehydrogenase [Solanum
  misc_feature (111)..(599): Homolog of NCBI NO: 33304517 NR Description: putative plastidic glucose-6-phosphate
  misc_feature (98)..(598): Homolog of NCBI NO: 3023818 NR Description: Glucose-6-phosphate 1-dehydrogenase, chloroplast
MSSLSCPTYRSRTSSSSPFLSNHHHSSLINVVDPRRSLSFHYASPQGLNLAELCVVRSQRRSVQSSVVVQDGSVATESSSSEEAKDVGVLTIPSLEADKVVAESDGGEQLSTVSITVVGASGDLAKKKIFPALFALYYEGCLPEHFTIFGYARSKMTDAELRVMVSKTLTCRIDKRANCGEKMEEFLKRCFYHSGQYDSQEHFVALDEKLKEHEGGRLSNRLFYLSIPPNIFVDAVKCASSSASSVNGWTRVIVEKPFGRDSKTSAALTKSLKQYLEEDQIFRIDHYLGKELVENLSVLRFSNLIFEPLWSRQYIRNVQFIFSEDFGTEGRGGYFDNYGIIRDIMQNHLLQILALFAMETPVSLDAEDIRNEKVKVLRSMRPIKLEDVVIGQYKSHSIGGVTYPSYTDDKTVPKGSLTPTFAAAALFIDNARWDGVPFLMKAGKALNTRSAEIRVQFRHVPGNLYNRNSGTDRDQTTNELVIRVQPDEAIYLKINNKVPGLGMRLDQSNLNLLYSARYSKEIPDAYERLLLDAIEGERRLFIRSDELDAAWALFTPLLKEIEEKKTTPEFYPYGSRGPVGAHYLAAKHKVQWGDLSLDQ

SEQ ID NO: 82800 - protein, 444 aa, Arabidopsis thaliana
  peptide (1)..(444): Ceres Seq. ID no. 12667374
  misc_feature (1)..(444): Homolog of NCBI NO: 22326761 NR Description: glucose-6-phosphate 1-dehydrogenase; protein id:
  misc_feature (1)..(444): Homolog of NCBI NO: 18086448 NR Description: AT5g13110/T19L5_70 [Arabidopsis thaliana]
  misc_feature (1)..(444): Homolog of NCBI NO: 9955555 NR Description: glucose-6-phosphate 1-dehydrogenase [Arabidopsis
  misc_feature (1)..(444): Homolog of NCBI NO: 2146735 NR Description: glucose-6-phosphate 1-dehydrogenase (EC 1.1.1.49)
  misc_feature (1)..(440): Homolog of NCBI NO: 9392607 NR Description: plastidic glucose 6-phosphate dehydrogenase
  misc_feature (1)..(440): Homolog of NCBI NO: 3023817 NR Description: Glucose-6-phosphate 1-dehydrogenase, chloroplast
  misc_feature (1)..(441): Homolog of NCBI NO: 5734502 NR Description: glucose-6-phosphate 1-dehydrogenase [Solanum
  misc_feature (1)..(441): Homolog of NCBI NO: 24745908 NR Description: glucose 6-phosphate dehydrogenase [Solanum
  misc_feature (1)..(444): Homolog of NCBI NO: 33304517 NR Description: putative plastidic glucose-6-phosphate
  misc_feature (1)..(443): Homolog of NCBI NO: 3023818 NR Description: Glucose-6-phosphate 1-dehydrogenase, chloroplast
MTDAELRVMVSKTLTCRIDKRANCGEKMEEFLKRCFYHSGQYDSQEHFVALDEKLKEHEGGRLSNRLFYLSIPPNIFVDAVKCASSSASSVNGWTRVIVEKPFGRDSKTSAALTKSLKQYLEEDQIFRIDHYLGKELVENLSVLRFSNLIFEPLWSRQYIRNVQFIFSEDFGTEGRGGYFDNYGIIRDIMQNHLLQILALFAMETPVSLDAEDIRNEKVKVLRSMRPIKLEDVVIGQYKSHSIGGVTYPSYTDDKTVPKGSLTPTFAAAALFIDNARWDGVPFLMKAGKALNTRSAEIRVQFRHVPGNLYNRNSGTDRDQTTNELVIRVQPDEAIYLKINNKVPGLGMRLDQSNLNLLYSARYSKEIPDAYERLLLDAIEGERRLFIRSDELDAAWALFTPLLKEIEEKKTTPEFYPYGSRGPVGAHYLAAKHKVQWGDLSLDQ

SEQ ID NO: 82801 - DNA, 1495 bp, Arabidopsis thaliana
  misc_feature (1)..(1495): Ceres Seq. ID no. 12667379
  misc_feature: MA Experiment ID: 20000171 Result: Down-regulated in Transcription
  misc_feature: MA Experiment 20000171 PARAMETER Experiment Name: At_42deg_Heat_P Parameter: Age (day) Value: 14
  misc_feature: MA Experiment 20000171 PARAMETER Experiment Name: At_42deg_Heat_P Parameter: Organism Value: A. thaliana
  misc_feature: MA Experiment 20000171 PARAMETER Experiment Name: At_42deg_Heat_P Parameter: Plant Line Value: WS
  misc_feature: MA Experiment 20000171 PARAMETER Experiment Name: At_42deg_Heat_P Parameter: Temperature (deg C) Value: 42 vs. 22
  misc_feature: MA Experiment 20000171 PARAMETER Experiment Name: At_42deg_Heat_P Parameter: Timepoint (hr) Value: 1
  misc_feature: MA Experiment 20000171 PARAMETER Experiment Name: At_42deg_Heat_P Parameter: Tissue Value: Aerial
  misc_feature: MA Experiment ID: 20000794 Result: Down-regulated in Transcription
  misc_feature: MA Experiment 20000794 PARAMETER Experiment Name: At_Petals_P Parameter: Age (day) Value: 23-25 days
  misc_feature: MA Experiment 20000794 PARAMETER Experiment Name: At_Petals_P Parameter: Plant Line Value: WS
  misc_feature: MA Experiment 20000794 PARAMETER Experiment Name: At_Petals_P Parameter: Tissue Value: Petals vs. Whole plant
  misc_feature: MA Experiment ID: 20001451 Result: Down-regulated in Transcription
  misc_feature: MA Experiment 20001451 PARAMETER Experiment Name: At_Far-red-induction_P Parameter: Age (day) Value: 7
  misc_feature: MA Experiment 20001451 PARAMETER Experiment Name: At_Far-red-induction_P Parameter: Light Value: Far-red vs. White
  misc_feature: MA Experiment 20001451 PARAMETER Experiment Name: At_Far-red-induction_P Parameter: Organism Value: A. thaliana
  misc_feature: MA Experiment 20001451 PARAMETER Experiment Name: At_Far-red-induction_P Parameter: Plant Line Value: Columbia
  misc_feature: MA Experiment 20001451 PARAMETER Experiment Name: At_Far-red-induction_P Parameter: Timepoint (hr) Value: 24
  misc_feature: MA Experiment 20001451 PARAMETER Experiment Name: At_Far-red-induction_P Parameter: Tissue Value: Whole Plant
  misc_feature: MA Experiment ID: 20001557 Result: Down-regulated in Transcription
  misc_feature: MA Experiment 20001557 PARAMETER Experiment Name: At_Drought_Soil_Dry_P Parameter: Age (day) Value: 27
  misc_feature: MA Experiment 20001557 PARAMETER Experiment Name: At_Drought_Soil_Dry_P Parameter: Organism Value: A. thaliana
  misc_feature: MA Experiment 20001557 PARAMETER Experiment Name: At_Drought_Soil_Dry_P Parameter: Plant Line Value: WS
  misc_feature: MA Experiment 20001557 PARAMETER Experiment Name: At_Drought_Soil_Dry_P Parameter: Post Timepoint (hr) Value: 3
  misc_feature: MA Experiment 20001557 PARAMETER Experiment Name: At_Drought_Soil_Dry_P Parameter: Post-Treatment Value: Re-Water vs. No Drought
  misc_feature: MA Experiment 20001557 PARAMETER Experiment Name: At_Drought_Soil_Dry_P Parameter: Timepoint (day) Value: 13
  misc_feature: MA Experiment 20001557 PARAMETER Experiment Name: At_Drought_Soil_Dry_P Parameter: Treatment Value: Drought vs. No Drought
  misc_feature: MA Experiment ID: 20001560 Result: Down-regulated in Transcription
  misc_feature: MA Experiment 20001560 PARAMETER Experiment Name: At_Drought_Soil_Dry_P Parameter: Age (day) Value: 28
  misc_feature: MA Experiment 20001560 PARAMETER Experiment Name: At_Drought_Soil_Dry_P Parameter: Organism Value: A. thaliana
  misc_feature: MA Experiment 20001560 PARAMETER Experiment Name: At_Drought_Soil_Dry_P Parameter: Plant Line Value: WS
  misc_feature: MA Experiment 20001560 PARAMETER Experiment Name: At_Drought_Soil_Dry_P Parameter: Post Timepoint (hr) Value: None
  misc_feature: MA Experiment 20001560 PARAMETER Experiment Name: At_Drought_Soil_Dry_P Parameter: Post-Treatment Value: None
  misc_feature: MA Experiment 20001560 PARAMETER Experiment Name: At_Drought_Soil_Dry_P Parameter: Timepoint (day) Value: 14
  misc_feature: MA Experiment 20001560 PARAMETER Experiment Name: At_Drought_Soil_Dry_P Parameter: Treatment Value: Drought vs. No Drought
tcgattatatcacaaggagatatggggaacagtgaaatgtcagcgagtgaggttgcggcggccaagcagaagaacgtcgacgattggttaccgatcacatcttccagaaacgctaagtggtggtactctgcttttcacaatgtcaccgccatggttggtgctggtgttcttagcttgccctacgctatgtccaatctcggatggggacctggagtgacgattatggtgatgtcatggatcataacgttgtacacactgtggcaaatggtggagatgcatgagattgttccagggaagaggcttgataggtatcacgagctaggtcaacacgcttttggtgaaaagcttggcctatggatcgtcgtgccgcagcagcttatcgtggaggtcggtgttgacatcgtttatatggtcacaggaggagcatccctcaagaaagtccatcaactagtctgtcccgattgcaaagagatcagaactacgttttggatcatgatctttgcttccgtccactttgttatctctcaccttcccaatttcaactctatctccatcatctcacttgccgcggctgttatgtccttaacttactcaactattgcttgggctgcatccgtgcacaaaggggtacatccagatgtggactactctcctagagcatcaaccgatgttggaaaagtattcaacttcttgaatgcgttgggagatgtggcttttgcttatgcaggtcacaacgttgtgttggagattcaggccacaatcccttcgactccggagatgccatccaaggtcccaatgtggagaggagttattgtagcctacattgtagtcgccatctgttacttccctgtagcattcctcggctattatatctttggaaacagcgttgatgacaacatcctcatcactttggagaagcctatctggcttattgctatggctaacatgttcgtggttatccatgtcattggaagctatcagatatttgcaatgccagtttttgacatgctcgaaaccgttttggtcaaaaagatgaatttcaatccttctttcaagctccgcttcattactcgtagtctttacgtcgctttcacgatgattgttgcgatatgcgtcccgtttttcggtggactactcggcttctttggaggattcgcctttgccccaacaacttactaccttccatgcattatgtggctcgttctcaagaaaccaaagaggtttggtctatcttggacagctaactggttctgcatcatagtaggagttcttttgacgatccttgccccaattggaggactcagaaccatcattatcaacgccaagacctacaagttcttctcttagatggatcacttttttttgtaaccgcgcaaccgaaaaataaaatcacggcatgtctaattttatgtgactgtccgtttaagtaaattttatgttttcattgtagttaagacaattatctttggtttcttttgataataaactctttttc

SEQ ID NO: 82802 - protein, 448 aa, Arabidopsis thaliana
  peptide (1)..(448): Ceres Seq. ID no. 12667380
  misc_feature (52)..(142): Pfam Name: Tryptophan/tyrosine permease family Pfam Description: Tryptophan/tyrosine permease family
  misc_feature (8)..(448): Homolog of NCBI NO: 18395471 NR Description: putative lysine/histidine-specific permease; id: At1g24400.1, supported by cDNA: gi_9293859 [Arabidopsis
  misc_feature (8)..(448): Homolog of NCBI NO: 15220504 NR Description: putative amino acid permease; protein id: [Arabidopsis thaliana] >gi|11072015|gb|AAG28894.1|AC008113_10 [Arabidopsis thaliana] >gi|12324687|gb|AAG52310.1|AC011020_17
  misc_feature (22)..(448): Homolog of NCBI NO: 12597815 NR Description: lysine and histidine specific transporter,
  misc_feature (22)..(448): Homolog of NCBI NO: 22330117 NR Description: lysine and histidine specific transporter,
  misc_feature (17)..(448): Homolog of NCBI NO: 2576361 NR Description: lysine and histidine specific transporter
  misc_feature (8)..(447): Homolog of NCBI NO: 7489096 NR Description: amino acid permease 1 - wood tobacco amino acid permease 1 >gi|1906549|gb|AAB96830.1| amino acid
  misc_feature (26)..(441): Homolog of NCBI NO: 15219896 NR Description: lysine and histidine specific transporter,
  misc_feature (25)..(440): Homolog of NCBI NO: 6091720 NR Description: putative amino acid permease [Arabidopsis
  misc_feature (25)..(440): Homolog of NCBI NO: 15232176 NR Description: putative amino acid permease; protein id: [Arabidopsis thaliana] >gi|6016733|gb|AAF01559.1|AC009325_29
  misc_feature (3)..(448): Homolog of NCBI NO: 25297692 NR Description: hypothetical protein F14O23.2 [imported] - thaliana >gi|7239491|gb|AAF43217.1|AC012654_1 Contains similarity the lysine and histidine specific transporter gene from A.
SIISQGDMGNSEMSASEVAAAKQKNVDDWLPITSSRNAKWWYSAFHNVTAMVGAGVLSLPYAMSNLGWGPGVTIMVMSWIITLYTLWQMVEMHEIVPGKRLDRYHELGQHAFGEKLGLWIVVPQQLIVEVGVDIVYMVTGGASLKKVHQLVCPDCKEIRTTFWIMIFASVHFVISHLPNFNSISIISLAAAVMSLTYSTIAWAASVHKGVHPDVDYSPRASTDVGKVFNFLNALGDVAFAYAGHNVVLEIQATIPSTPEMPSKVPMWRGVIVAYIVVAICYFPVAFLGYYIFGNSVDDNILITLEKPIWLIAMANMFVVIHVIGSYQIFAMPVFDMLETVLVKKMNFNPSFKLRFITRSLYVAFTMIVAICVPFFGGLLGFFGGFAFAPTTYYLPCIMWLVLKKPKRFGLSWTANWFCIIVGVLLTILAPIGGLRTIIINAKTYKFFS

SEQ ID NO: 82803 - protein, 441 aa, Arabidopsis thaliana
  peptide (1)..(441): Ceres Seq. ID no. 12667381
  misc_feature (45)..(135): Pfam Name: Tryptophan/tyrosine permease family Pfam Description: Tryptophan/tyrosine permease family
  misc_feature (1)..(441): Homolog of NCBI NO: 18395471 NR Description: putative lysine/histidine-specific permease; id: At1g24400.1, supported by cDNA: gi_9293859 [Arabidopsis
  misc_feature (1)..(441): Homolog of NCBI NO: 15220504 NR Description: putative amino acid permease; protein id: [Arabidopsis thaliana] >gi|11072015|gb|AAG28894.1|AC008113_10 [Arabidopsis thaliana] >gi|12324687|gb|AAG52310.1|AC011020_17
  misc_feature (15)..(441): Homolog of NCBI NO: 12597815 NR Description: lysine and histidine specific transporter,
  misc_feature (15)..(441): Homolog of NCBI NO: 22330117 NR Description: lysine and histidine specific transporter,
  misc_feature (10)..(441): Homolog of NCBI NO: 2576361 NR Description: lysine and histidine specific transporter
  misc_feature (1)..(440): Homolog of NCBI NO: 7489096 NR Description: amino acid permease 1 - wood tobacco amino acid permease 1 >gi|1906549|gb|AAB96830.1| amino acid
  misc_feature (19)..(434): Homolog of NCBI NO: 15219896 NR Description: lysine and histidine specific transporter,
  misc_feature (18)..(433): Homolog of NCBI NO: 6091720 NR Description: putative amino acid permease [Arabidopsis
  misc_feature (18)..(433): Homolog of NCBI NO: 15232176 NR Description: putative amino acid permease; protein id: [Arabidopsis thaliana] >gi|6016733|gb|AAF01559.1|AC009325_29
  misc_feature (1)..(441): Homolog of NCBI NO: 25297692 NR Description: hypothetical protein F14O23.2 [imported] - thaliana >gi|7239491|gb|AAF43217.1|AC012654_1 Contains similarity the lysine and histidine specific transporter gene from A.
MGNSEMSASEVAAAKQKNVDDWLPITSSRNAKWWYSAFHNVTAMVGAGVLSLPYAMSNLGWGPGVTIMVMSWIITLYTLWQMVEMHEIVPGKRLDRYHELGQHAFGEKLGLWIVVPQQLIVEVGVDIVYMVTGGASLKKVHQLVCPDCKEIRTTFWIMIFASVHFVISHLPNFNSISIISLAAAVMSLTYSTIAWAASVHKGVHPDVDYSPRASTDVGKVFNFLNALGDVAFAYAGHNVVLEIQATIPSTPEMPSKVPMWRGVIVAYIVVAICYFPVAFLGYYIFGNSVDDNILITLEKPIWLIAMANMFVVIHVIGSYQIFAMPVFDMLETVLVKKMNFNPSFKLRFITRSLYVAFTMIVAICVPFFGGLLGFFGGFAFAPTTYYLPCIMWLVLKKPKRFGLSWTANWFCIIVGVLLTILAPIGGLRTIIINAKTYKFFS

SEQ ID NO: 82804 - protein, 436 aa, Arabidopsis thaliana
  peptide (1)..(436): Ceres Seq. ID no. 12667382
  misc_feature (40)..(130): Pfam Name: Tryptophan/tyrosine permease family Pfam Description: Tryptophan/tyrosine permease family
  misc_feature (1)..(436): Homolog of NCBI NO: 18395471 NR Description: putative lysine/histidine-specific permease; id: At1g24400.1, supported by cDNA: gi_9293859 [Arabidopsis
  misc_feature (1)..(436): Homolog of NCBI NO: 15220504 NR Description: putative amino acid permease; protein id: [Arabidopsis thaliana] >gi|11072015|gb|AAG28894.1|AC008113_10 [Arabidopsis thaliana] >gi|12324687|gb|AAG52310.1|AC011020_17
  misc_feature (10)..(436): Homolog of NCBI NO: 12597815 NR Description: lysine and histidine specific transporter,
  misc_feature (10)..(436): Homolog of NCBI NO: 22330117 NR Description: lysine and histidine specific transporter,
  misc_feature (5)..(436): Homolog of NCBI NO: 2576361 NR Description: lysine and histidine specific transporter
  misc_feature (1)..(435): Homolog of NCBI NO: 7489096 NR Description: amino acid permease 1 - wood tobacco amino acid permease 1 >gi|1906549|gb|AAB96830.1| amino acid
  misc_feature (14)..(429): Homolog of NCBI NO: 15219896 NR Description: lysine and histidine specific transporter,
  misc_feature (13)..(428): Homolog of NCBI NO: 6091720 NR Description: putative amino acid permease [Arabidopsis
  misc_feature (13)..(428): Homolog of NCBI NO: 15232176 NR Description: putative amino acid permease; protein id: [Arabidopsis thaliana] >gi|6016733|gb|AAF01559.1|AC009325_29
  misc_feature (1)..(436): Homolog of NCBI NO: 25297692 NR Description: hypothetical protein F14O23.2 [imported] - thaliana >gi|7239491|gb|AAF43217.1|AC012654_1 Contains similarity the lysine and histidine specific transporter gene from A.
MSASEVAAAKQKNVDDWLPITSSRNAKWWYSAFHNVTAMVGAGVLSLPYAMSNLGWGPGVTIMVMSWIITLYTLWQMVEMHEIVPGKRLDRYHELGQHAFGEKLGLWIVVPQQLIVEVGVDIVYMVTGGASLKKVHQLVCPDCKEIRTTFWIMIFASVHFVISHLPNFNSISIISLAAAVMSLTYSTIAWAASVHKGVHPDVDYSPRASTDVGKVFNFLNALGDVAFAYAGHNVVLEIQATIPSTPEMPSKVPMWRGVIVAYIVVAICYFPVAFLGYYIFGNSVDDNILITLEKPIWLIAMANMFVVIHVIGSYQIFAMPVFDMLETVLVKKMNFNPSFKLRFITRSLYVAFTMIVAICVPFFGGLLGFFGGFAFAPTTYYLPCIMWLVLKKPKRFGLSWTANWFCIIVGVLLTILAPIGGLRTIIINAKTYKFFS

SEQ ID NO: 82805 - DNA, 755 bp, Arabidopsis thaliana
  misc_feature (1)..(755): Ceres Seq. ID no. 12667391
  misc_feature: MA Experiment ID: 20000495 Result: Up-regulated in Transcription
  misc_feature: MA Experiment 20000495 PARAMETER Experiment Name: At_Guard_Cells_P Parameter: Harvest Date Value: 8/2/2002
  misc_feature: MA Experiment 20000495 PARAMETER Experiment Name: At_Guard_Cells_P Parameter: Organism Value: A. thaliana
  misc_feature: MA Experiment 20000495 PARAMETER Experiment Name: At_Guard_Cells_P Parameter: Tissue Value: Guard Cells vs. Leaves
agaacagagagtggtgaaatcaagtgaagaacactaaggttcaactatggcgactcttcgtttcactctacttcttcttgtcttcgtcgtcgggatcttcttctccttctcctccgtttctcatgtacgtgcaacaagtgaaatcaatctcaggatcgaaccattttcctcgccgttcgcgacggatcttgcaaagctgcaaactcaaattggctacaagtttaacaacatcaaccttcttcgccgtgcaatgactcatgcttctttttctcaagagaacaacaaagccttgagtatctttggaacccatatcattgaaaccgcggtctctcttcagtttctcgctaaagatatcgatatttcctcgaaagcactgggccgtttgatatcagaggtttcaaatgtggagtcctcatgtgctcttgacggagaccggttgggtttggggaagataatcagagtttctactaagacagatgcatcgaactcggccattctttgtactggctttagggcaatctttggagctatagctattgatgctggaacggttgatgaagccatcaaggttttctggaaggtacatggagctcgagctggaagactagtctctatgttgtaaattagagctttattaagtcattaaagtcatgttttttcggatgccaagttctaagagactcttctccaatgcttagaattttatggttgatgttaactattagctgctgttatgagggtgtaagtgatcatac

SEQ ID NO: 82806 - protein, 191 aa, Arabidopsis thaliana
  peptide (1)..(191): Ceres Seq. ID no. 12667392
  misc_feature (1)..(191): Homolog of NCBI NO: 15221749 NR Description: putative ribonuclease III; protein id: supported by cDNA: gi_15010593, supported by cDNA: gi_20334853 thaliana] >gi|9743333|gb|AAF97957.1|AC000103_7 F21J9.11
  misc_feature (41)..(180): Homolog of NCBI NO: 29126353 NR Description: hypothetical protein [Oryza sativa (japonica
MATLRFTLLLLVFVVGIFFSFSSVSHVRATSEINLRIEPFSSPFATDLAKLQTQIGYKFNNINLLRRAMTHASFSQENNKALSIFGTHIIETAVSLQFLAKDIDISSKALGRLISEVSNVESSCALDGDRLGLGKIIRVSTKTDASNSAILCTGFRAIFGAIAIDAGTVDEAIKVFWKVHGARAGRLVSML

SEQ ID NO: 82807 - protein, 123 aa, Arabidopsis thaliana
  peptide (1)..(123): Ceres Seq. ID no. 12667393
  misc_feature (1)..(123): Homolog of NCBI NO: 15221749 NR Description: putative ribonuclease III; protein id: supported by cDNA: gi_15010593, supported by cDNA: gi_20334853 thaliana] >gi|9743333|gb|AAF97957.1|AC000103_7 F21J9.11
  misc_feature (1)..(112): Homolog of NCBI NO: 29126353 NR Description: hypothetical protein [Oryza sativa (japonica
MTHASFSQENNKALSIFGTHIIETAVSLQFLAKDIDISSKALGRLISEVSNVESSCALDGDRLGLGKIIRVSTKTDASNSAILCTGFRAIFGAIAIDAGTVDEAIKVFWKVHGARAGRLVSML

SEQ ID NO: 82808 - DNA, 939 bp, Arabidopsis thaliana
  misc_feature (1)..(939): Ceres Seq. ID no. 12667394
  misc_feature: MA Experiment ID: 20000185 Result: Down-regulated in Transcription
  misc_feature: MA Experiment 20000185 PARAMETER Experiment Name: At_Roots__P Parameter: Age (day) Value: 7 vs. 21
  misc_feature: MA Experiment 20000185 PARAMETER Experiment Name: At_Roots__P Parameter: Organism Value: A. thaliana
  misc_feature: MA Experiment 20000185 PARAMETER Experiment Name: At_Roots__P Parameter: Tissue Value: Roots vs. Whole Plant
  misc_feature: MA Experiment ID: 20000436 Result: Up-regulated in Transcription
  misc_feature: MA Experiment 20000436 PARAMETER Experiment Name: At_Drought_P Parameter: Age (day) Value: 7
  misc_feature: MA Experiment 20000436 PARAMETER Experiment Name: At_Drought_P Parameter: Organism Value: A. thaliana
  misc_feature: MA Experiment 20000436 PARAMETER Experiment Name: At_Drought_P Parameter: Plant Line Value: WS
  misc_feature: MA Experiment 20000436 PARAMETER Experiment Name: At_Drought_P Parameter: Timepoint (hr) Value: 12
  misc_feature: MA Experiment 20000436 PARAMETER Experiment Name: At_Drought_P Parameter: Tissue Value: Whole Plant
  misc_feature: MA Experiment 20000436 PARAMETER Experiment Name: At_Drought_P Parameter: Treatment Value: Drought vs. No Drought
  misc_feature: MA Experiment ID: 20000437 Result: Up-regulated in Transcription
  misc_feature: MA Experiment 20000437 PARAMETER Experiment Name: At_Drought_P Parameter: Age (day) Value: 8
  misc_feature: MA Experiment 20000437 PARAMETER Experiment Name: At_Drought_P Parameter: Organism Value: A. thaliana
  misc_feature: MA Experiment 20000437 PARAMETER Experiment Name: At_Drought_P Parameter: Plant Line Value: WS
  misc_feature: MA Experiment 20000437 PARAMETER Experiment Name: At_Drought_P Parameter: Timepoint (hr) Value: 24
  misc_feature: MA Experiment 20000437 PARAMETER Experiment Name: At_Drought_P Parameter: Tissue Value: Whole Plant
  misc_feature: MA Experiment 20000437 PARAMETER Experiment Name: At_Drought_P Parameter: Treatment Value: Drought vs. No Drought
  misc_feature: MA Experiment ID: 20000439 Result: Down-regulated in Transcription
  misc_feature: MA Experiment 20000439 PARAMETER Experiment Name: At_Roots__P Parameter: Age (day) Value: 14 vs. 21
  misc_feature: MA Experiment 20000439 PARAMETER Experiment Name: At_Roots__P Parameter: Organism Value: A. thaliana
  misc_feature: MA Experiment 20000439 PARAMETER Experiment Name: At_Roots__P Parameter: Tissue Value: Roots vs. Whole Plant
atgcagggagcatgcatctccgagagtcagccatggtatctccatttcgtatgcttcataggctttctctttctccttagagtactattcattcctctcctaaaatggttcaccacaagattcctcctcacacccaagcggctcaagcggtacggctcatgggctatggtcactggagccaccgaggggatcggacgcgcctttgctcacgagctggccaaacacggccttaacctcatcctagtcagcagaaacctttcgaagctcgaatctgtctctgatgatttccaacaagagtttccccacatcaagatcaagatcattccatttgacttctcctctgaaggaggatacggagcaatcgaggaagggataaaaggccttgaagttgggattttgataaacaacgttggtattacttatccacgcgccatgttcttccacgaggttgaccaacttacatggaccaaaatcctgagggttaatcttgaagccaccacttgggtcacacgatcactcatcggaccaatgcttcaccgccgccgtggagccatcgtcaatattagctccggcgctgccgttgttgtcccttctcatcccctctacgccatctacgctgccaccaaagcttatgtggatgcactatcaagatctctacatgtggaatataagcagtttggtattgatgtccagtgccaggttcccttatacgtgtcaacaaggatggtgtcagaagtggcagctatagacaaacctagcttatttgtaccgtcgcctgaagtctacgcaaaagcggcggtggcgcagatcggaattggatcacgttgctcgccgttttgggctcattctcttcagtggtttcttgttggacttgtaccggataaccttgttgatacttggcgtctctctatcggacttcgcagaagaagtttatcttaa

SEQ ID NO: 82809 - protein, 312 aa, Arabidopsis thaliana
  peptide (1)..(312): Ceres Seq. ID no. 12667395
  misc_feature (1)..(312): Homolog of NCBI NO: 15221751 NR Description: putative b-keto acyl reductase; protein id: [Arabidopsis thaliana] >gi|9743335|gb|AAF97959.1|AC000103_9
  misc_feature (1)..(309): Homolog of NCBI NO: 7489413 NR Description: probable b-keto acyl reductase (EC 1.1.-.-) -
  misc_feature (8)..(311): Homolog of NCBI NO: 28565597 NR Description: putative 3-ketoacyl-CoA reductase 1 [Brassica
  misc_feature (1)..(312): Homolog of NCBI NO: 7489808 NR Description: probable beta-keto acyl reductase - maize
  misc_feature (8)..(311): Homolog of NCBI NO: 28565601 NR Description: putative 3-ketoacyl-CoA reductase 2 [Brassica
  misc_feature (9)..(312): Homolog of NCBI NO: 38345332 NR Description: OSJNBa0081L15.5 [Oryza sativa (japonica
  misc_feature (8)..(311): Homolog of NCBI NO: 18408847 NR Description: Expressed protein; protein id: At1g67730.1, by cDNA: 7434. [Arabidopsis thaliana] >gi|21594872|gb|AAM66051.1|
  misc_feature (32)..(311): Homolog of NCBI NO: 11072027 NR Description: F12A21.14 [Arabidopsis thaliana]
  misc_feature (72)..(311): Homolog of NCBI NO: 2586125 NR Description: b-keto acyl reductase [Arabidopsis thaliana]
  misc_feature (103)..(309): Homolog of NCBI NO: 2586123 NR Description: b-keto acyl reductase [Allium porrum]
MQGACISESQPWYLHFVCFIGFLFLLRVLFIPLLKWFTTRFLLTPKRLKRYGSWAMVTGATEGIGRAFAHELAKHGLNLILVSRNLSKLESVSDDFQQEFPHIKIKIIPFDFSSEGGYGAIEEGIKGLEVGILINNVGITYPRAMFFHEVDQLTWTKILRVNLEATTWVTRSLIGPMLHRRRGAIVNISSGAAVVVPSHPLYAIYAATKAYVDALSRSLHVEYKQFGIDVQCQVPLYVSTRMVSEVAAIDKPSLFVPSPEVYAKAAVAQIGIGSRCSPFWAHSLQWFLVGLVPDNLVDTWRLSIGLRRRSLS

SEQ ID NO: 82810 - protein, 257 aa, Arabidopsis thaliana
  peptide (1)..(257): Ceres Seq. ID no. 12667396
  misc_feature (1)..(257): Homolog of NCBI NO: 15221751 NR Description: putative b-keto acyl reductase; protein id: [Arabidopsis thaliana] >gi|9743335|gb|AAF97959.1|AC000103_9
  misc_feature (1)..(254): Homolog of NCBI NO: 7489413 NR Description: probable b-keto acyl reductase (EC 1.1.-.-) -
  misc_feature (1)..(256): Homolog of NCBI NO: 28565597 NR Description: putative 3-ketoacyl-CoA reductase 1 [Brassica
  misc_feature (1)..(257): Homolog of NCBI NO: 7489808 NR Description: probable beta-keto acyl reductase - maize
  misc_feature (1)..(256): Homolog of NCBI NO: 28565601 NR Description: putative 3-ketoacyl-CoA reductase 2 [Brassica
  misc_feature (1)..(257): Homolog of NCBI NO: 38345332 NR Description: OSJNBa0081L15.5 [Oryza sativa (japonica
  misc_feature (1)..(256): Homolog of NCBI NO: 18408847 NR Description: Expressed protein; protein id: At1g67730.1, by cDNA: 7434. [Arabidopsis thaliana] >gi|21594872|gb|AAM66051.1|
  misc_feature (1)..(256): Homolog of NCBI NO: 11072027 NR Description: F12A21.14 [Arabidopsis thaliana]
  misc_feature (17)..(256): Homolog of NCBI NO: 2586125 NR Description: b-keto acyl reductase [Arabidopsis thaliana]
  misc_feature (48)..(254): Homolog of NCBI NO: 2586123 NR Description: b-keto acyl reductase [Allium porrum]
MVTGATEGIGRAFAHELAKHGLNLILVSRNLSKLESVSDDFQQEFPHIKIKIIPFDFSSEGGYGAIEEGIKGLEVGILINNVGITYPRAMFFHEVDQLTWTKILRVNLEATTWVTRSLIGPMLHRRRGAIVNISSGAAVVVPSHPLYAIYAATKAYVDALSRSLHVEYKQFGIDVQCQVPLYVSTRMVSEVAAIDKPSLFVPSPEVYAKAAVAQIGIGSRCSPFWAHSLQWFLVGLVPDNLVDTWRLSIGLRRRSLS

SEQ ID NO: 82811 - protein, 168 aa, Arabidopsis thaliana
  peptide (1)..(168): Ceres Seq. ID no. 12667397
  misc_feature (1)..(168): Homolog of NCBI NO: 15221751 NR Description: putative b-keto acyl reductase; protein id: [Arabidopsis thaliana] >gi|9743335|gb|AAF97959.1|AC000103_9
  misc_feature (1)..(165): Homolog of NCBI NO: 7489413 NR Description: probable b-keto acyl reductase (EC 1.1.-.-) -
  misc_feature (1)..(167): Homolog of NCBI NO: 28565597 NR Description: putative 3-ketoacyl-CoA reductase 1 [Brassica
  misc_feature (1)..(168): Homolog of NCBI NO: 7489808 NR Description: probable beta-keto acyl reductase - maize
  misc_feature (1)..(167): Homolog of NCBI NO: 28565601 NR Description: putative 3-ketoacyl-CoA reductase 2 [Brassica
  misc_feature (1)..(168): Homolog of NCBI NO: 38345332 NR Description: OSJNBa0081L15.5 [Oryza sativa (japonica
  misc_feature (1)..(167): Homolog of NCBI NO: 18408847 NR Description: Expressed protein; protein id: At1g67730.1, by cDNA: 7434. [Arabidopsis thaliana] >gi|21594872|gb|AAM66051.1|
  misc_feature (1)..(167): Homolog of NCBI NO: 11072027 NR Description: F12A21.14 [Arabidopsis thaliana]
  misc_feature (1)..(167): Homolog of NCBI NO: 2586125 NR Description: b-keto acyl reductase [Arabidopsis thaliana]
  misc_feature (1)..(165): Homolog of NCBI NO: 2586123 NR Description: b-keto acyl reductase [Allium porrum]
MFFHEVDQLTWTKILRVNLEATTWVTRSLIGPMLHRRRGAIVNISSGAAVVVPSHPLYAIYAATKAYVDALSRSLHVEYKQFGIDVQCQVPLYVSTRMVSEVAAIDKPSLFVPSPEVYAKAAVAQIGIGSRCSPFWAHSLQWFLVGLVPDNLVDTWRLSIGLRRRSLS

SEQ ID NO: 82812 - DNA, 1030 bp, Arabidopsis thaliana
  misc_feature (1)..(1030): Ceres Seq. ID no. 12667412
  misc_feature: MA Experiment ID: 20000171 Result: Down-regulated in Transcription
  misc_feature: MA Experiment 20000171 PARAMETER Experiment Name: At_42deg_Heat_P Parameter: Age (day) Value: 14
  misc_feature: MA Experiment 20000171 PARAMETER Experiment Name: At_42deg_Heat_P Parameter: Organism Value: A. thaliana
  misc_feature: MA Experiment 20000171 PARAMETER Experiment Name: At_42deg_Heat_P Parameter: Plant Line Value: WS
  misc_feature: MA Experiment 20000171 PARAMETER Experiment Name: At_42deg_Heat_P Parameter: Temperature (deg C) Value: 42 vs. 22
  misc_feature: MA Experiment 20000171 PARAMETER Experiment Name: At_42deg_Heat_P Parameter: Timepoint (hr) Value: 1
  misc_feature: MA Experiment 20000171 PARAMETER Experiment Name: At_42deg_Heat_P Parameter: Tissue Value: Aerial
  misc_feature: MA Experiment ID: 20000173 Result: Down-regulated in Transcription
  misc_feature: MA Experiment 20000173 PARAMETER Experiment Name: At_42deg_Heat_P Parameter: Age (day) Value: 14
  misc_feature: MA Experiment 20000173 PARAMETER Experiment Name: At_42deg_Heat_P Parameter: Organism Value: A. thaliana
  misc_feature: MA Experiment 20000173 PARAMETER Experiment Name: At_42deg_Heat_P Parameter: Plant Line Value: WS
  misc_feature: MA Experiment 20000173 PARAMETER Experiment Name: At_42deg_Heat_P Parameter: Temperature (deg C) Value: 42 vs. 22
  misc_feature: MA Experiment 20000173 PARAMETER Experiment Name: At_42deg_Heat_P Parameter: Timepoint (hr) Value: 6
  misc_feature: MA Experiment 20000173 PARAMETER Experiment Name: At_42deg_Heat_P Parameter: Tissue Value: Aerial
  misc_feature: MA Experiment ID: 20000180 Result: Up-regulated in Transcription
  misc_feature: MA Experiment 20000180 PARAMETER Experiment Name: At_Germinating_Seeds_P Parameter: Age (hr) Value: 24 vs. 0
  misc_feature: MA Experiment 20000180 PARAMETER Experiment Name: At_Germinating_Seeds_P Parameter: Tissue Value: Germinating Seeds
  misc_feature: MA Experiment ID: 20000227 Result: Down-regulated in Transcription
  misc_feature: MA Experiment 20000227 PARAMETER Experiment Name: At_Root-Tips-vs-Tops_P Parameter: Tissue Value: Root Tips vs. Root Tops
  misc_feature: MA Experiment ID: 20000234 Result: Down-regulated in Transcription
  misc_feature: MA Experiment 20000234 PARAMETER Experiment Name: At_Siliques_P Parameter: Age (day) Value: 21
  misc_feature: MA Experiment 20000234 PARAMETER Experiment Name: At_Siliques_P Parameter: Organism Value: A. thaliana
  misc_feature: MA Experiment 20000234 PARAMETER Experiment Name: At_Siliques_P Parameter: Plant Line Value: WS
  misc_feature: MA Experiment 20000234 PARAMETER Experiment Name: At_Siliques_P Parameter: Tissue Value: Less Than 5mm Siliques vs. Whole Plant
  misc_feature: MA Experiment ID: 20000235 Result: Down-regulated in Transcription
  misc_feature: MA Experiment 20000235 PARAMETER Experiment Name: At_Siliques_P Parameter: Age (day) Value: 21
  misc_feature: MA Experiment 20000235 PARAMETER Experiment Name: At_Siliques_P Parameter: Organism Value: A. thaliana
  misc_feature: MA Experiment 20000235 PARAMETER Experiment Name: At_Siliques_P Parameter: Plant Line Value: WS
  misc_feature: MA Experiment 20000235 PARAMETER Experiment Name: At_Siliques_P Parameter: Tissue Value: 5-10mm Siliques vs. Whole Plant
  misc_feature: MA Experiment ID: 20000264 Result: Down-regulated in Transcription
  misc_feature: MA Experiment 20000264 PARAMETER Experiment Name: At_Open_Flower_P Parameter: Age (day) Value: 21
  misc_feature: MA Experiment 20000264 PARAMETER Experiment Name: At_Open_Flower_P Parameter: Plant Line Value: WS
  misc_feature: MA Experiment 20000264 PARAMETER Experiment Name: At_Open_Flower_P Parameter: Tissue Value: Open Flower vs. Whole Plant
  misc_feature: MA Experiment ID: 20000265 Result: Down-regulated in Transcription
  misc_feature: MA Experiment 20000265 PARAMETER Experiment Name: At_Open_Flower_P Parameter: Age (day) Value: 21
  misc_feature: MA Experiment 20000265 PARAMETER Experiment Name: At_Open_Flower_P Parameter: Plant Line Value: WS
  misc_feature: MA Experiment 20000265 PARAMETER Experiment Name: At_Open_Flower_P Parameter: Tissue Value: Closed Flower vs. Whole Plant
  misc_feature: MA Experiment ID: 20000286 Result: Down-regulated in Transcription
  misc_feature: MA Experiment 20000286 PARAMETER Experiment Name: At_Open_Flower_P Parameter: Age (day) Value: 21
  misc_feature: MA Experiment 20000286 PARAMETER Experiment Name: At_Open_Flower_P Parameter: Plant Line Value: WS
  misc_feature: MA Experiment 20000286 PARAMETER Experiment Name: At_Open_Flower_P Parameter: Tissue Value: Half Open vs. Whole Plant
  misc_feature: MA Experiment ID: 20000437 Result: Down-regulated in Transcription
  misc_feature: MA Experiment 20000437 PARAMETER Experiment Name: At_Drought_P Parameter: Age (day) Value: 8
  misc_feature: MA Experiment 20000437 PARAMETER Experiment Name: At_Drought_P Parameter: Organism Value: A. thaliana
  misc_feature: MA Experiment 20000437 PARAMETER Experiment Name: At_Drought_P Parameter: Plant Line Value: WS
  misc_feature: MA Experiment 20000437 PARAMETER Experiment Name: At_Drought_P Parameter: Timepoint (hr) Value: 24
  misc_feature: MA Experiment 20000437 PARAMETER Experiment Name: At_Drought_P Parameter: Tissue Value: Whole Plant
  misc_feature: MA Experiment 20000437 PARAMETER Experiment Name: At_Drought_P Parameter: Treatment Value: Drought vs. No Drought
  misc_feature: MA Experiment ID: 20000794 Result: Down-regulated in Transcription
  misc_feature: MA Experiment 20000794 PARAMETER Experiment Name: At_Petals_P Parameter: Age (day) Value: 23-25 days
  misc_feature: MA Experiment 20000794 PARAMETER Experiment Name: At_Petals_P Parameter: Plant Line Value: WS
  misc_feature: MA Experiment 20000794 PARAMETER Experiment Name: At_Petals_P Parameter: Tissue Value: Petals vs. Whole plant
  misc_feature: MA Experiment ID: 20001247 Result: Down-regulated in Transcription
  misc_feature: MA Experiment 20001247 PARAMETER Experiment Name: At_Far-red-induction_P Parameter: Age (day) Value: 7
  misc_feature: MA Experiment 20001247 PARAMETER Experiment Name: At_Far-red-induction_P Parameter: Light Value: Far-red vs. White
  misc_feature: MA Experiment 20001247 PARAMETER Experiment Name: At_Far-red-induction_P Parameter: Organism Value: A. thaliana
  misc_feature: MA Experiment 20001247 PARAMETER Experiment Name: At_Far-red-induction_P Parameter: Plant Line Value: Columbia
  misc_feature: MA Experiment 20001247 PARAMETER Experiment Name: At_Far-red-induction_P Parameter: Timepoint (hr) Value: 1
  misc_feature: MA Experiment 20001247 PARAMETER Experiment Name: At_Far-red-induction_P Parameter: Tissue Value: Whole Plant
  misc_feature: MA Experiment ID: 20001450 Result: Down-regulated in Transcription
  misc_feature: MA Experiment 20001450 PARAMETER Experiment Name: At_Far-red-induction_P Parameter: Age (day) Value: 7
  misc_feature: MA Experiment 20001450 PARAMETER Experiment Name: At_Far-red-induction_P Parameter: Light Value: Far-red vs. White
  misc_feature: MA Experiment 20001450 PARAMETER Experiment Name: At_Far-red-induction_P Parameter: Organism Value: A. thaliana
  misc_feature: MA Experiment 20001450 PARAMETER Experiment Name: At_Far-red-induction_P Parameter: Plant Line Value: Columbia
  misc_feature: MA Experiment 20001450 PARAMETER Experiment Name: At_Far-red-induction_P Parameter: Timepoint (hr) Value: 8
  misc_feature: MA Experiment 20001450 PARAMETER Experiment Name: At_Far-red-induction_P Parameter: Tissue Value: Whole Plant
  misc_feature: MA Experiment ID: 20001451 Result: Down-regulated in Transcription
  misc_feature: MA Experiment 20001451 PARAMETER Experiment Name: At_Far-red-induction_P Parameter: Age (day) Value: 7
  misc_feature: MA Experiment 20001451 PARAMETER Experiment Name: At_Far-red-induction_P Parameter: Light Value: Far-red vs. White
  misc_feature: MA Experiment 20001451 PARAMETER Experiment Name: At_Far-red-induction_P Parameter: Organism Value: A. thaliana
  misc_feature: MA Experiment 20001451 PARAMETER Experiment Name: At_Far-red-induction_P Parameter: Plant Line Value: Columbia
  misc_feature: MA Experiment 20001451 PARAMETER Experiment Name: At_Far-red-induction_P Parameter: Timepoint (hr) Value: 24
  misc_feature: MA Experiment 20001451 PARAMETER Experiment Name: At_Far-red-induction_P Parameter: Tissue Value: Whole Plant
ttgcgtttccacatttgtttaaacataactctctctctctctctctctctctctctctctcagtacctcttattcttatgctcttcttcaccaatcctatctcttctatctgtctttattttctctacatgtgaattgacccatttctggtaaacacatagagtaccacttttcttatttagattcttcttcctcttcatagcttccaagtcaactacttcagcttctgtcggctgtctcttcccagatctcgttaagaccaaaacttggaataaatgacggaatctgatgatgcctcacgagaaacaccagccagcagaggaggagaagcctcgtcaaatcaagatctgtccaaaccagaatcaaaccatgtttcactcgatctcaagctcaacgatactttcaacgatgacacaaagagcacaaagtgtgaagcaaacccaagagtcttctcttgcaactactgcagacgcaagttctatagctctcaagctcttggaggtcaccagaacgcacacaagcgagaaagaacaatggccaaacgagcaatgcacatgggaagaatgtttggtcaccatcacaggccttacacatacacttcttcttcccttgggatgcaagctcactccggtttacttcatcacaccttatctcagcctcagcctcttgtttctaggtttcatcatcaagggtattttggtaacaccgtgccgttgttctttgactatgacgatggtggtagcgacttcttctggcccggcagcttccgtcaggtggttgaggaagctgaggctccggtggttgtggtggctagtactgagtcaggccttgatttgaactcggttgcggcaaatggaggtgtagataataatagctcaaagcctgatcttaccttaagactctaaaaggattaaggagattatatctttattgttatttttctattgttagacatacagaagataagttggagacagttgatagaaattgatgaaaaactttgttgttatattaaatgaggttgttcatt

SEQ ID NO: 82813 - protein, 209 aa, Arabidopsis thaliana
  peptide (1)..(209): Ceres Seq. ID no. 12667413
  misc_feature (59)..(81): Pfam Name: Zinc finger, C2H2 type Pfam Description: Zinc finger, C2H2 type
  misc_feature (1)..(209): Homolog of NCBI NO: 18395528 NR Description: zinc finger protein 7, ZFP7; protein id: supported by cDNA: gi_790684 [Arabidopsis thaliana]
  misc_feature (20)..(126): Homolog of NCBI NO: 15238724 NR Description: ZFP3 zinc finger protein; protein id: supported by cDNA: gi_790676 [Arabidopsis thaliana]
  misc_feature (20)..(95): Homolog of NCBI NO: 15218939 NR Description: C2H2-type zinc finger protein, putative; protein At1g66140.1, supported by cDNA: gi_13605608, supported by cDNA: supported by cDNA: gi_790678 [Arabidopsis thaliana]
  misc_feature (25)..(121): Homolog of NCBI NO: 15242152 NR Description: CCHH finger protein 2-like protein (pir||S55882); id: At5g57520.1, supported by cDNA: gi_790674 [Arabidopsis >gi|27923888|sp|Q39261|ZFP2_ARATH Zinc finger protein 2
  misc_feature (42)..(118): Homolog of NCBI NO: 15238913 NR Description: zinc finger -like protein; protein id: At5g10970.1
  misc_feature (34)..(93): Homolog of NCBI NO: 15220823 NR Description: zinc finger protein; protein id: At1g80730.1, by cDNA: gi_790672 [Arabidopsis thaliana]
  misc_feature (20)..(92): Homolog of NCBI NO: 1362017 NR Description: CCHH finger protein 4 - Arabidopsis thaliana
  misc_feature (57)..(138): Homolog of NCBI NO: 40538953 NR Description: expressed protein [Oryza sativa (japonica
  misc_feature (57)..(188): Homolog of NCBI NO: 29027767 NR Description: OJ1710_H11.12 [Oryza sativa (japonica
  misc_feature (18)..(105): Homolog of NCBI NO: 1362020 NR Description: zinc finger protein 8 - Arabidopsis thaliana
MTESDDASRETPASRGGEASSNQDLSKPESNHVSLDLKLNDTFNDDTKSTKCEANPRVFSCNYCRRKFYSSQALGGHQNAHKRERTMAKRAMHMGRMFGHHHRPYTYTSSSLGMQAHSGLLHHTLSQPQPLVSRFHHQGYFGNTVPLFFDYDDGGSDFFWPGSFRQVVEEAEAPVVVVASTESGLDLNSVAANGGVDNNSSKPDLTLRL

SEQ ID NO: 82814 - protein, 182 aa, Arabidopsis thaliana
  peptide (1)..(182): Ceres Seq. ID no. 12667414
MMPHEKHQPAEEEKPRQIKICPNQNQTMFHSISSSTILSTMTQRAQSVKQTQESSLATTADASSIALKLLEVTRTHTSEKEQWPNEQCTWEECLVTITGLTHTLLLPLGCKLTPVYFITPYLSLSLLFLGFIIKGILVTPCRCSLTMTMVVATSSGPAASVRWLRKLRLRWLWWLVLSQALI

SEQ ID NO: 82815 - protein, 181 aa, Arabidopsis thaliana
  peptide (1)..(181): Ceres Seq. ID no. 12667415
MPHEKHQPAEEEKPRQIKICPNQNQTMFHSISSSTILSTMTQRAQSVKQTQESSLATTADASSIALKLLEVTRTHTSEKEQWPNEQCTWEECLVTITGLTHTLLLPLGCKLTPVYFITPYLSLSLLFLGFIIKGILVTPCRCSLTMTMVVATSSGPAASVRWLRKLRLRWLWWLVLSQALI

SEQ ID NO: 82816 - DNA, 588 bp, Arabidopsis thaliana
  misc_feature (1)..(588): Ceres Seq. ID no. 12667420
  misc_feature: MA Experiment ID: 20000437 Result: Up-regulated in Transcription
  misc_feature: MA Experiment 20000437 PARAMETER Experiment Name: At_Drought_P Parameter: Age (day) Value: 8
  misc_feature: MA Experiment 20000437 PARAMETER Experiment Name: At_Drought_P Parameter: Organism Value: A. thaliana
  misc_feature: MA Experiment 20000437 PARAMETER Experiment Name: At_Drought_P Parameter: Plant Line Value: WS
  misc_feature: MA Experiment 20000437 PARAMETER Experiment Name: At_Drought_P Parameter: Timepoint (hr) Value: 24
  misc_feature: MA Experiment 20000437 PARAMETER Experiment Name: At_Drought_P Parameter: Tissue Value: Whole Plant
  misc_feature: MA Experiment 20000437 PARAMETER Experiment Name: At_Drought_P Parameter: Treatment Value: Drought vs. No Drought
  misc_feature: MA Experiment ID: 20000441 Result: Down-regulated in Transcription
  misc_feature: MA Experiment 20000441 PARAMETER Experiment Name: At_1uM_BR-BRZ__P Parameter: Tissue Value: Shoot Apices
  misc_feature: MA Experiment 20000441 PARAMETER Experiment Name: At_1uM_BR-BRZ__P Parameter: Treatment Value: 1uM BR vs. No Treatment
  misc_feature: MA Experiment ID: 20000443 Result: Down-regulated in Transcription
  misc_feature: MA Experiment 20000443 PARAMETER Experiment Name: At_1uM_BR-BRZ__P Parameter: Tissue Value: Shoot Apices
  misc_feature: MA Experiment 20000443 PARAMETER Experiment Name: At_1uM_BR-BRZ__P Parameter: Treatment Value: 1uM BRZ vs. No Treatment
  misc_feature: MA Experiment ID: 20000451 Result: Up-regulated in Transcription
  misc_feature: MA Experiment 20000451 PARAMETER Experiment Name: At_CS6879_Shoots-Roots_P Parameter: Age (day) Value: 14
  misc_feature: MA Experiment 20000451 PARAMETER Experiment Name: At_CS6879_Shoots-Roots_P Parameter: Organism Value: A. thaliana
  misc_feature: MA Experiment 20000451 PARAMETER Experiment Name: At_CS6879_Shoots-Roots_P Parameter: Plant Line Value: CS6879 vs. WS
  misc_feature: MA Experiment 20000451 PARAMETER Experiment Name: At_CS6879_Shoots-Roots_P Parameter: Tissue Value: Roots
atggtttgtgcttgtatgcgtagaagcgagatggaggtaccggttgatgaggggcatttcctatctatgcttctaaagataatgaatgccaaaaagacgatagagcttggtgttttcaccggttattcgttgctcaccacggccctagcattgcctcatgatggacatgttactggaatagatattgataaagaagcttacgagatgggactggagttcataaagaatgcaggtgttcatcacaagatcaatttcatccactctgattgtcttcaggccttagacaatatgttgagtgagaatccaaaaccagagtttgatttcgcatttgttgacgctgataaaccaaactatgcaaacatgcacgagaggctaatgaagctggtgaaggtaggaggagtcatagcgtttgataacacattgtggtcagggtttgtggcggagaaagaggaaaacgtgccagtgcacatgagggtaaacagaaaagcctttttggacttgaacaagcgtctcgctgctgatcctcacgtcgaggtctctcaagtctccattggcgatggtgtcactctctgcagacgccttgtatga

SEQ ID NO: 82817 - protein, 195 aa, Arabidopsis thaliana
  peptide (1)..(195): Ceres Seq. ID no. 12667421
  misc_feature (6)..(194): Pfam Name: O-methyltransferase Pfam Description: O-methyltransferase
  misc_feature (1)..(195): Homolog of NCBI NO: 15221807 NR Description: caffeoyl-CoA 3-O-methyltransferase, putative; id: At1g24735.1 [Arabidopsis thaliana] >gi|25317647|pir||A86380
  misc_feature (9)..(195): Homolog of NCBI NO: 18408911 NR Description: caffeoyl-CoA 3-O-methyltransferase, putative; id: At1g67980.1, supported by cDNA: gi_682727 [Arabidopsis
  misc_feature (9)..(195): Homolog of NCBI NO: 30580369 NR Description: Putative caffeoyl-CoA O-methyltransferase
  misc_feature (9)..(195): Homolog of NCBI NO: 682728 NR Description: S-adenosyl-L-methionine:trans-caffeoyl-Coenzyme A
  misc_feature (9)..(195): Homolog of NCBI NO: 30580370 NR Description: Putative caffeoyl-CoA O-methyltransferase
  misc_feature (9)..(195): Homolog of NCBI NO: 18408913 NR Description: caffeoyl-CoA 3-O-methyltransferase, putative;
  misc_feature (9)..(194): Homolog of NCBI NO: 3023432 NR Description: Caffeoyl-CoA O-methyltransferase
  misc_feature (18)..(194): Homolog of NCBI NO: 37720881 NR Description: O-methyltransferase [Mesembryanthemum
  misc_feature (11)..(194): Homolog of NCBI NO: 7448239 NR Description: caffeoyl-CoA O-methyltransferase (EC 2.1.1.104)
  misc_feature (11)..(194): Homolog of NCBI NO: 18416703 NR Description: caffeoyl-CoA 3-O-methyltransferase, putative; id: At4g26220.1, supported by cDNA: 33227., supported by cDNA:
MVCACMRRSEMEVPVDEGHFLSMLLKIMNAKKTIELGVFTGYSLLTTALALPHDGHVTGIDIDKEAYEMGLEFIKNAGVHHKINFIHSDCLQALDNMLSENPKPEFDFAFVDADKPNYANMHERLMKLVKVGGVIAFDNTLWSGFVAEKEENVPVHMRVNRKAFLDLNKRLAADPHVEVSQVSIGDGVTLCRRLV

SEQ ID NO: 82818 - protein, 190 aa, Arabidopsis thaliana
  peptide (1)..(190): Ceres Seq. ID no. 12667422
  misc_feature (1)..(189): Pfam Name: O-methyltransferase Pfam Description: O-methyltransferase
  misc_feature (1)..(190): Homolog of NCBI NO: 15221807 NR Description: caffeoyl-CoA 3-O-methyltransferase, putative; id: At1g24735.1 [Arabidopsis thaliana] >gi|25317647|pir||A86380
  misc_feature (4)..(190): Homolog of NCBI NO: 18408911 NR Description: caffeoyl-CoA 3-O-methyltransferase, putative; id: At1g67980.1, supported by cDNA: gi_682727 [Arabidopsis
  misc_feature (4)..(190): Homolog of NCBI NO: 30580369 NR Description: Putative caffeoyl-CoA O-methyltransferase
  misc_feature (4)..(190): Homolog of NCBI NO: 682728 NR Description: S-adenosyl-L-methionine:trans-caffeoyl-Coenzyme A
  misc_feature (4)..(190): Homolog of NCBI NO: 30580370 NR Description: Putative caffeoyl-CoA O-methyltransferase
  misc_feature (4)..(190): Homolog of NCBI NO: 18408913 NR Description: caffeoyl-CoA 3-O-methyltransferase, putative;
  misc_feature (4)..(189): Homolog of NCBI NO: 3023432 NR Description: Caffeoyl-CoA O-methyltransferase
  misc_feature (13)..(189): Homolog of NCBI NO: 37720881 NR Description: O-methyltransferase [Mesembryanthemum
  misc_feature (6)..(189): Homolog of NCBI NO: 7448239 NR Description: caffeoyl-CoA O-methyltransferase (EC 2.1.1.104)
  misc_feature (6)..(189): Homolog of NCBI NO: 18416703 NR Description: caffeoyl-CoA 3-O-methyltransferase, putative; id: At4g26220.1, supported by cDNA: 33227., supported by cDNA:
MRRSEMEVPVDEGHFLSMLLKIMNAKKTIELGVFTGYSLLTTALALPHDGHVTGIDIDKEAYEMGLEFIKNAGVHHKINFIHSDCLQALDNMLSENPKPEFDFAFVDADKPNYANMHERLMKLVKVGGVIAFDNTLWSGFVAEKEENVPVHMRVNRKAFLDLNKRLAADPHVEVSQVSIGDGVTLCRRLV

SEQ ID NO: 82819 - protein, 185 aa, Arabidopsis thaliana
  peptide (1)..(185): Ceres Seq. ID no. 12667423
  misc_feature (1)..(184): Pfam Name: O-methyltransferase Pfam Description: O-methyltransferase
  misc_feature (1)..(185): Homolog of NCBI NO: 15221807 NR Description: caffeoyl-CoA 3-O-methyltransferase, putative; id: At1g24735.1 [Arabidopsis thaliana] >gi|25317647|pir||A86380
  misc_feature (1)..(185): Homolog of NCBI NO: 18408911 NR Description: caffeoyl-CoA 3-O-methyltransferase, putative; id: At1g67980.1, supported by cDNA: gi_682727 [Arabidopsis
  misc_feature (1)..(185): Homolog of NCBI NO: 30580369 NR Description: Putative caffeoyl-CoA O-methyltransferase
  misc_feature (1)..(185): Homolog of NCBI NO: 682728 NR Description: S-adenosyl-L-methionine:trans-caffeoyl-Coenzyme A
  misc_feature (1)..(185): Homolog of NCBI NO: 30580370 NR Description: Putative caffeoyl-CoA O-methyltransferase
  misc_feature (1)..(185): Homolog of NCBI NO: 18408913 NR Description: caffeoyl-CoA 3-O-methyltransferase, putative;
  misc_feature (1)..(184): Homolog of NCBI NO: 3023432 NR Description: Caffeoyl-CoA O-methyltransferase
  misc_feature (8)..(184): Homolog of NCBI NO: 37720881 NR Description: O-methyltransferase [Mesembryanthemum
  misc_feature (1)..(184): Homolog of NCBI NO: 7448239 NR Description: caffeoyl-CoA O-methyltransferase (EC 2.1.1.104)
  misc_feature (1)..(184): Homolog of NCBI NO: 18416703 NR Description: caffeoyl-CoA 3-O-methyltransferase, putative; id: At4g26220.1, supported by cDNA: 33227., supported by cDNA:
MEVPVDEGHFLSMLLKIMNAKKTIELGVFTGYSLLTTALALPHDGHVTGIDIDKEAYEMGLEFIKNAGVHHKINFIHSDCLQALDNMLSENPKPEFDFAFVDADKPNYANMHERLMKLVKVGGVIAFDNTLWSGFVAEKEENVPVHMRVNRKAFLDLNKRLAADPHVEVSQVSIGDGVTLCRRLV

SEQ ID NO: 82820 - DNA, 2778 bp, Arabidopsis thaliana
  misc_feature (1)..(2778): Ceres Seq. ID no. 12667428
  misc_feature: MA Experiment ID: 20000307 Result: Down-regulated in Transcription
  misc_feature: MA Experiment 20000307 PARAMETER Experiment Name: At_Germinating_Seeds_Sub_P Parameter: Age (hr) Value: 24 vs. 0
  misc_feature: MA Experiment 20000307 PARAMETER Experiment Name: At_Germinating_Seeds_Sub_P Parameter: Organism Value: A. thaliana
  misc_feature: MA Experiment 20000307 PARAMETER Experiment Name: At_Germinating_Seeds_Sub_P Parameter: Plant Line Value: WS
  misc_feature: MA Experiment 20000307 PARAMETER Experiment Name: At_Germinating_Seeds_Sub_P Parameter: Tissue Value: Germinating Seeds
  misc_feature: MA Experiment ID: 20000355 Result: Down-regulated in Transcription
  misc_feature: MA Experiment 20000355 PARAMETER Experiment Name: At_Siliques_Sub_P Parameter: Age (day) Value: 21
  misc_feature: MA Experiment 20000355 PARAMETER Experiment Name: At_Siliques_Sub_P Parameter: Organism Value: A. thaliana
  misc_feature: MA Experiment 20000355 PARAMETER Experiment Name: At_Siliques_Sub_P Parameter: Plant Line Value: WS
  misc_feature: MA Experiment 20000355 PARAMETER Experiment Name: At_Siliques_Sub_P Parameter: Tissue Value: Less Than 5mm Siliques vs. Whole Plant
  misc_feature: MA Experiment ID: 20000440 Result: Down-regulated in Transcription
  misc_feature: MA Experiment 20000440 PARAMETER Experiment Name: At_Closed-Flower__Sub_P Parameter: Tissue Value: Closed Flower vs. Whole Plant
atgcgtctgcgtcaccaaggaggacaatacttggctcgcggtatggaacccgtgtactggtcaaacaaggtggattcaacccatgacttatatgacaactatactctcggatcctaccaaaataatagctacaatatattggcacacactggttttggctacgaccacgaattccaaatttatgaaattaactccaattcatggaggattattgatgccactttggacttcaaattagggtatattggtcgtggcgtgtctttgaagggaaagacttactggattgctagtggtgaagaagagaaacggcttggcaaattcttaatcagttttgattatacgacagaaagatttgaacgtctatgtcttccgaataagtatccttgttatgcaactctggctctatccgttgttagagaagagaaactttccatgttatcgcaacgcggaattaaatcaaaggcagaaatatgggtgacaaataagattggtgagacacaagtggtgtcgtggagcatggtcttagctttggatttgcagcctaaacgttgtattggggaaagcggaagtttcttggtcgacgagaagaagagagtggtcgtgtgttgtgataatattagagaccaaggaaaaaccacgtttgactcaaatctaccaaggtatcacaggcaaaagaaaaagggacgaatgatcatagtgtttgacgttgaatcaatgagactccccgtcaccgtcaaagccactaagccgtcgtttctcgtcatttggatccgatactcctccgccgcgtcgtcgccgacagtctccttgaatccaagtggacgattacagcaaactctcgcaggatctgtggaagtgaaaggaaaatctctgcactccggtaagttctcgacggtgaagctaaatccggagatcgccggagctggtaggttcttcgagtttcgatccagattcatccctgcgtcgattgaatttgctcaggaatcgcctctttgcacgacgctgttgaaagatgagctcaaaatccgaaccgttgagcatttgttatcagctcttgaggcgaagggagttgataattgcaggattcaaatcgagagcgaaagttccgatgatcgagaagtcgaggtccctatttttgatggatcagctaaagaatgggtcgatgcgatacaaggagttggcataaacgcggctcaaaaccatgatggtgaaagtgtagagaagatggtcgcacatgtgaacaagcctgtgtatgtttgcaagaacgatacttttgttgctgcatttccggctctagagactcggatcacttgtggtatcgacttcccacaggtgcctgctataggctgccaatggttttcttggagacctatccatgagtcttcttttgcaaaggatatcgcatcatcaagaaccttctgtgtctatgaagaggtggagcgtatgcgtgaagcagggctcattaaaggaggttctctggataacgccatagtttgtagcgctgagcatggatggatgaatcctcctctgcgaatgaggaggaggaggtgcgatcttcaaccgaagagaacgagaatgtgcgatcttcaaccgaagagaacgagtatgtgcgatcttccaccgaagctggtaggggagaagatcctcacgaggattccgataacatctctgagagcggtgcgatccacttgcaaattatggaacgctttaaccaaagatcgggttctggttagattccatctccgtcgcagcaaggaggaagaagaagacacgatggatctatctataaagcaggtagatttgcttaatcaagtcgagatatctagagtgtatcactgcgacggcttgttgttatgcgtggctaaggacaactcgagggtcgtggtttggaacccttatttggggcaaacaagatggatcagacccagaacagaatccaacataggagacagctatgctcttggatacgacatcaaccgtaaccacaaaatcttgaggatggtgcagacaagaaacgtttccgtttacaggtacgaaatctacgacttgcgctctaattcatggagggttctcgaggtcactcccaacggggaaatggaccctaatcatcccctctacggcgtttctgtgaagggaaatacctacttttttgcgcatgaggatagcagcagtggtgaaattgatgaagatggcgacataatcgatcttgaagatttcttactctgttttgattttacaacagagacatttggtctgcgtctgcctcttccgtttcactctactatcgatgcgactgtgaccctctcttgtgttagagaccagcagctcgcggtgctatatcataatgagggtcttcacagtgatgatcggtttaccacagttgagttttgggttactactagtattgagcccaactctgtgtcctggagcaagtttttgacagtggatatgagaccattggcactcactggtgttcggtttgacaatgatatgggtgccaccttcttcattgacgaggatgagaaagtcgctgtggttttcgatctagacggatacctaagcaccgagagcgctcgttaccacaccgcttttatcagtggaaaggatggattctttaaacctgtgactctaggagtagctcccaatgtcggggaaccttgtcccagaaccgggcatattccgactacatatcgtcccccgcttgtctgctcgtctacttaccttccgagtttagtgcaagtcaaccaacagcgcaaaaggaaagaaagacatgtttag

SEQ ID NO: 82821 - protein, 925 aa, Arabidopsis thaliana
  peptide (1)..(925): Ceres Seq. ID no. 12667429
  misc_feature (274)..(517): Pfam Name: UDP-3-O-acyl N-acetylglycosamine deacetylase Pfam Description: UDP-3-O-acyl N-acetylglycosamine deacetylase
  misc_feature (513)..(925): Homolog of NCBI NO: 23297235 NR Description: unknown protein [Arabidopsis thaliana]
  misc_feature (513)..(925): Homolog of NCBI NO: 19347782 NR Description: putative F5A9.18 protein [Arabidopsis thaliana]
  misc_feature (536)..(587): Homolog of NCBI NO: 25518320 NR Description: hypothetical protein F4F7.1 [imported] -
  misc_feature (536)..(587): Homolog of NCBI NO: 25518507 NR Description: hypothetical protein F4F7.4 [imported] -
  misc_feature (239)..(517): Homolog of NCBI NO: 26451306 NR Description: unknown protein [Arabidopsis thaliana]
  misc_feature (239)..(504): Homolog of NCBI NO: 20453133 NR Description: At1g25190/F4F7_4 [Arabidopsis thaliana]
  misc_feature (704)..(914): Homolog of NCBI NO: 15220234 NR Description: unknown protein; protein id: At1g10890.1
  misc_feature (529)..(668): Homolog of NCBI NO: 15220234 NR Description: unknown protein; protein id: At1g10890.1
  misc_feature (594)..(882): Homolog of NCBI NO: 15239318 NR Description: putative protein; protein id: At5g36200.1
  misc_feature (535)..(611): Homolog of NCBI NO: 15239318 NR Description: putative protein; protein id: At5g36200.1
MRLRHQGGQYLARGMEPVYWSNKVDSTHDLYDNYTLGSYQNNSYNILAHTGFGYDHEFQIYEINSNSWRIIDATLDFKLGYIGRGVSLKGKTYWIASGEEEKRLGKFLISFDYTTERFERLCLPNKYPCYATLALSVVREEKLSMLSQRGIKSKAEIWVTNKIGETQVVSWSMVLALDLQPKRCIGESGSFLVDEKKRVVVCCDNIRDQGKTTFDSNLPRYHRQKKKGRMIIVFDVESMRLPVTVKATKPSFLVIWIRYSSAASSPTVSLNPSGRLQQTLAGSVEVKGKSLHSGKFSTVKLNPEIAGAGRFFEFRSRFIPASIEFAQESPLCTTLLKDELKIRTVEHLLSALEAKGVDNCRIQIESESSDDREVEVPIFDGSAKEWVDAIQGVGINAAQNHDGESVEKMVAHVNKPVYVCKNDTFVAAFPALETRITCGIDFPQVPAIGCQWFSWRPIHESSFAKDIASSRTFCVYEEVERMREAGLIKGGSLDNAIVCSAEHGWMNPPLRMRRRRCDLQPKRTRMCDLQPKRTSMCDLPPKLVGEKILTRIPITSLRAVRSTCKLWNALTKDRVLVRFHLRRSKEEEEDTMDLSIKQVDLLNQVEISRVYHCDGLLLCVAKDNSRVVVWNPYLGQTRWIRPRTESNIGDSYALGYDINRNHKILRMVQTRNVSVYRYEIYDLRSNSWRVLEVTPNGEMDPNHPLYGVSVKGNTYFFAHEDSSSGEIDEDGDIIDLEDFLLCFDFTTETFGLRLPLPFHSTIDATVTLSCVRDQQLAVLYHNEGLHSDDRFTTVEFWVTTSIEPNSVSWSKFLTVDMRPLALTGVRFDNDMGATFFIDEDEKVAVVFDLDGYLSTESARYHTAFISGKDGFFKPVTLGVAPNVGEPCPRTGHIPTTYRPPLVCSSTYLPSLVQVNQQRKRKERHV

SEQ ID NO: 82822 - protein, 911 aa, Arabidopsis thaliana
  peptide (1)..(911): Ceres Seq. ID no. 12667430
  misc_feature (260)..(503): Pfam Name: UDP-3-O-acyl N-acetylglycosamine deacetylase Pfam Description: UDP-3-O-acyl N-acetylglycosamine deacetylase
  misc_feature (499)..(911): Homolog of NCBI NO: 23297235 NR Description: unknown protein [Arabidopsis thaliana]
  misc_feature (499)..(911): Homolog of NCBI NO: 19347782 NR Description: putative F5A9.18 protein [Arabidopsis thaliana]
  misc_feature (522)..(573): Homolog of NCBI NO: 25518320 NR Description: hypothetical protein F4F7.1 [imported] -
  misc_feature (522)..(573): Homolog of NCBI NO: 25518507 NR Description: hypothetical protein F4F7.4 [imported] -
  misc_feature (225)..(503): Homolog of NCBI NO: 26451306 NR Description: unknown protein [Arabidopsis thaliana]
  misc_feature (225)..(490): Homolog of NCBI NO: 20453133 NR Description: At1g25190/F4F7_4 [Arabidopsis thaliana]
  misc_feature (690)..(900): Homolog of NCBI NO: 15220234 NR Description: unknown protein; protein id: At1g10890.1
  misc_feature (515)..(654): Homolog of NCBI NO: 15220234 NR Description: unknown protein; protein id: At1g10890.1
  misc_feature (580)..(868): Homolog of NCBI NO: 15239318 NR Description: putative protein; protein id: At5g36200.1
  misc_feature (521)..(597): Homolog of NCBI NO: 15239318 NR Description: putative protein; protein id: At5g36200.1
MEPVYWSNKVDSTHDLYDNYTLGSYQNNSYNILAHTGFGYDHEFQIYEINSNSWRIIDATLDFKLGYIGRGVSLKGKTYWIASGEEEKRLGKFLISFDYTTERFERLCLPNKYPCYATLALSVVREEKLSMLSQRGIKSKAEIWVTNKIGETQVVSWSMVLALDLQPKRCIGESGSFLVDEKKRVVVCCDNIRDQGKTTFDSNLPRYHRQKKKGRMIIVFDVESMRLPVTVKATKPSFLVIWIRYSSAASSPTVSLNPSGRLQQTLAGSVEVKGKSLHSGKFSTVKLNPEIAGAGRFFEFRSRFIPASIEFAQESPLCTTLLKDELKIRTVEHLLSALEAKGVDNCRIQIESESSDDREVEVPIFDGSAKEWVDAIQGVGINAAQNHDGESVEKMVAHVNKPVYVCKNDTFVAAFPALETRITCGIDFPQVPAIGCQWFSWRPIHESSFAKDIASSRTFCVYEEVERMREAGLIKGGSLDNAIVCSAEHGWMNPPLRMRRRRCDLQPKRTRMCDLQPKRTSMCDLPPKLVGEKILTRIPITSLRAVRSTCKLWNALTKDRVLVRFHLRRSKEEEEDTMDLSIKQVDLLNQVEISRVYHCDGLLLCVAKDNSRVVVWNPYLGQTRWIRPRTESNIGDSYALGYDINRNHKILRMVQTRNVSVYRYEIYDLRSNSWRVLEVTPNGEMDPNHPLYGVSVKGNTYFFAHEDSSSGEIDEDGDIIDLEDFLLCFDFTTETFGLRLPLPFHSTIDATVTLSCVRDQQLAVLYHNEGLHSDDRFTTVEFWVTTSIEPNSVSWSKFLTVDMRPLALTGVRFDNDMGATFFIDEDEKVAVVFDLDGYLSTESARYHTAFISGKDGFFKPVTLGVAPNVGEPCPRTGHIPTTYRPPLVCSSTYLPSLVQVNQQRKRKERHV

SEQ ID NO: 82823 - protein, 781 aa, Arabidopsis thaliana
  peptide (1)..(781): Ceres Seq. ID no. 12667431
  misc_feature (130)..(373): Pfam Name: UDP-3-O-acyl N-acetylglycosamine deacetylase Pfam Description: UDP-3-O-acyl N-acetylglycosamine deacetylase
  misc_feature (369)..(781): Homolog of NCBI NO: 23297235 NR Description: unknown protein [Arabidopsis thaliana]
  misc_feature (369)..(781): Homolog of NCBI NO: 19347782 NR Description: putative F5A9.18 protein [Arabidopsis thaliana]
  misc_feature (392)..(443): Homolog of NCBI NO: 25518320 NR Description: hypothetical protein F4F7.1 [imported] -
  misc_feature (392)..(443): Homolog of NCBI NO: 25518507 NR Description: hypothetical protein F4F7.4 [imported] -
  misc_feature (95)..(373): Homolog of NCBI NO: 26451306 NR Description: unknown protein [Arabidopsis thaliana]
  misc_feature (95)..(360): Homolog of NCBI NO: 20453133 NR Description: At1g25190/F4F7_4 [Arabidopsis thaliana]
  misc_feature (560)..(770): Homolog of NCBI NO: 15220234 NR Description: unknown protein; protein id: At1g10890.1
  misc_feature (385)..(524): Homolog of NCBI NO: 15220234 NR Description: unknown protein; protein id: At1g10890.1
  misc_feature (450)..(738): Homolog of NCBI NO: 15239318 NR Description: putative protein; protein id: At5g36200.1
  misc_feature (391)..(467): Homolog of NCBI NO: 15239318 NR Description: putative protein; protein id: At5g36200.1
MLSQRGIKSKAEIWVTNKIGETQVVSWSMVLALDLQPKRCIGESGSFLVDEKKRVVVCCDNIRDQGKTTFDSNLPRYHRQKKKGRMIIVFDVESMRLPVTVKATKPSFLVIWIRYSSAASSPTVSLNPSGRLQQTLAGSVEVKGKSLHSGKFSTVKLNPEIAGAGRFFEFRSRFIPASIEFAQESPLCTTLLKDELKIRTVEHLLSALEAKGVDNCRIQIESESSDDREVEVPIFDGSAKEWVDAIQGVGINAAQNHDGESVEKMVAHVNKPVYVCKNDTFVAAFPALETRITCGIDFPQVPAIGCQWFSWRPIHESSFAKDIASSRTFCVYEEVERMREAGLIKGGSLDNAIVCSAEHGWMNPPLRMRRRRCDLQPKRTRMCDLQPKRTSMCDLPPKLVGEKILTRIPITSLRAVRSTCKLWNALTKDRVLVRFHLRRSKEEEEDTMDLSIKQVDLLNQVEISRVYHCDGLLLCVAKDNSRVVVWNPYLGQTRWIRPRTESNIGDSYALGYDINRNHKILRMVQTRNVSVYRYEIYDLRSNSWRVLEVTPNGEMDPNHPLYGVSVKGNTYFFAHEDSSSGEIDEDGDIIDLEDFLLCFDFTTETFGLRLPLPFHSTIDATVTLSCVRDQQLAVLYHNEGLHSDDRFTTVEFWVTTSIEPNSVSWSKFLTVDMRPLALTGVRFDNDMGATFFIDEDEKVAVVFDLDGYLSTESARYHTAFISGKDGFFKPVTLGVAPNVGEPCPRTGHIPTTYRPPLVCSSTYLPSLVQVNQQRKRKERHV

SEQ ID NO: 82824 - DNA, 2850 bp, Arabidopsis thaliana
  misc_feature (1)..(2850): Ceres Seq. ID no. 12667447
  misc_feature: MA Experiment ID: 20000307 Result: Down-regulated in Transcription
  misc_feature: MA Experiment 20000307 PARAMETER Experiment Name: At_Germinating_Seeds_Sub_P Parameter: Age (hr) Value: 24 vs. 0
  misc_feature: MA Experiment 20000307 PARAMETER Experiment Name: At_Germinating_Seeds_Sub_P Parameter: Organism Value: A. thaliana
  misc_feature: MA Experiment 20000307 PARAMETER Experiment Name: At_Germinating_Seeds_Sub_P Parameter: Plant Line Value: WS
  misc_feature: MA Experiment 20000307 PARAMETER Experiment Name: At_Germinating_Seeds_Sub_P Parameter: Tissue Value: Germinating Seeds
  misc_feature: MA Experiment ID: 20000355 Result: Down-regulated in Transcription
  misc_feature: MA Experiment 20000355 PARAMETER Experiment Name: At_Siliques_Sub_P Parameter: Age (day) Value: 21
  misc_feature: MA Experiment 20000355 PARAMETER Experiment Name: At_Siliques_Sub_P Parameter: Organism Value: A. thaliana
  misc_feature: MA Experiment 20000355 PARAMETER Experiment Name: At_Siliques_Sub_P Parameter: Plant Line Value: WS
  misc_feature: MA Experiment 20000355 PARAMETER Experiment Name: At_Siliques_Sub_P Parameter: Tissue Value: Less Than 5mm Siliques vs. Whole Plant
  misc_feature: MA Experiment ID: 20000440 Result: Down-regulated in Transcription
  misc_feature: MA Experiment 20000440 PARAMETER Experiment Name: At_Closed-Flower__Sub_P Parameter: Tissue Value: Closed Flower vs. Whole Plant
atgcgtctgcgtcaccaaggaggacaatacttggctcgcggtatggaacccgtgtactggtcaaacaaggtggattcaacccatgacttatatgacaactatactctcggatcctaccaaaataatagctacaatatattggcacacactggttttggctacgaccacgaattccaaatttatgaaattaactccaattcatggaggattattgatgccactttggacttcaaattagggtatattggtcgtggcgtgtctttgaagggaaagacttactggattgctagtggtgaagaagagaaacggcttggcaaattcttaatcagttttgattatacgacagaaagatttgaacgtctatgtcttccgaataagtatccttgttatgcaactctggctctatccgttgttagagaagagaaactttccatgttatcgcaacgcggaattaaatcaaaggcagaaatatgggtgacaaataagattggtgagacacaagtggtgtcgtggagcatggtcttagctttggatttgcagcctaaacgttgtattggggaaagcggaagtttcttggtcgacgagaagaagagagtggtcgtgtgttgtgataatattagagaccaaggaaaaaccacgtttgactcaaatctaccaaggtatcacaggcaaaagaaaaagggacgaatgatcatagtgtttgacgttgaatcaatgagactccccgtcaccgtcaaagccactaagccgtcgtttctcgtcatttggatccgatactcctccgccgcgtcgtcgccgacagtctccttgaatccaagtggacgattacagcaaactctcgcaggatctgtggaagtgaaaggaaaatctctgcactccggtaagttctcgacggtgaagctaaatccggagatcgccggagctggtaggttcttcgagtttcgatccagattcatccctgcgtcgattgaatttgctcaggaatcgcctctttgcacgacgctgttgaaagatgagctcaaaatccgaaccgttgagcatttgttatcagctcttgaggcgaagggagttgataattgcaggattcaaatcgagagcgaaagttccgatgatcgagaagtcgaggtttctaaagaatgggtcgatgcgatacaaggagttggcataaacgcggctcaaaaccatgatggtgaaagtgtagagaagatggtcgcacatgtgaacaagcctgtgtatgtttgcaagaacgatacttttgttgctgcatttccggctctagagactcggatcacttgtggtatcgacttcccacaggtgcctgctataggctgccaatggttttcttggagacctatccatgagtcttcttttgcaaaggatatcgcatcatcaagaaccttctgtgtctatgaagaggtggagcgtatgcgtgaagcagggctcattaaaggaggttctctggataacgccatagtttgtagcgctgagcatggatggatgaatcctcctctgcggtttgatgatgaagcatgtcgacataagattcttgacctaatcggtgacctctcccttgtttcacggggcggaaatggaggactccccgtggctcacatagtcgcatataagaatgaggaggaggaggtgcgatcttcaaccgaagagaacgagaatgtgcgatcttcaaccgaagagaacgagtatgtgcgatcttccaccgaagctggtaggggagaagatcctcacgaggattccgataacatctctgagagcggtgcgatccacttgcaaattatggaacgctttaaccaaagatcgggttctggcaaggaggaagaagaagacacgatggatctatctataaagcaggtagatttgcttaatcaagtcgagatatctagagtgtatcactgcgacggcttgttgttatgcgtggctaaggacaactcgagggtcgtggtttggaacccttatttggggcaaacaagatggatcagacccagaacagaatccaacataggagacagctatgctcttggatacgacatcaaccgtaaccacaaaatcttgaggatggtgcagacaagaaacgtttccgtttacaggtacgaaatctacgacttgcgctctaattcatggagggttctcgaggtcactcccaacggggaaatggaccctaatcatcccctctacggcgtttctgtgaagggaaatacctacttttttgcgcatgaggatagcagcagtggtgaaattgatgaagatggcgacataatcgatcttgaagatttcttactctgttttgattttacaacagagacatttggtctgcgtctgcctcttccgtttcactctactatcgatgcgactgtgaccctctcttgtgttagagaccagcagctcgcggtgctatatcataatgagggtcttcacagtgatgatcggtttaccacagttgagttttgggttactactagtattgagcccaactctgtgtcctggagcaagtttttgacagtggatatgagaccattggcactcactggtgttcggtttgacaatgatatgggtgccaccttcttcattgacgaggatgagaaagtcgctgtggttttcgatctagacggatacctaagcaccgagagcgctcgttaccacaccgcttttatcagtggaaaggatggattctttaaacctgtgactctaggagtagctcccaatgtcggggaaccttgtcccagaaccgggcatattccgactacatatcgtcccccgcttgtctgctcgtctacttaccttccgagtttagtgcaagtcaaccaacagcgcaaaaggaaagaaagacatgtttag

SEQ ID NO: 82825 - protein, 949 aa, Arabidopsis thaliana
  peptide (1)..(949): Ceres Seq. ID no. 12667448
  misc_feature (274)..(542): Pfam Name: UDP-3-O-acyl N-acetylglycosamine deacetylase Pfam Description: UDP-3-O-acyl N-acetylglycosamine deacetylase
  misc_feature (600)..(949): Homolog of NCBI NO: 23297235 NR Description: unknown protein [Arabidopsis thaliana]
  misc_feature (600)..(949): Homolog of NCBI NO: 19347782 NR Description: putative F5A9.18 protein [Arabidopsis thaliana]
  misc_feature (239)..(542): Homolog of NCBI NO: 26451306 NR Description: unknown protein [Arabidopsis thaliana]
  misc_feature (239)..(498): Homolog of NCBI NO: 20453133 NR Description: At1g25190/F4F7_4 [Arabidopsis thaliana]
  misc_feature (728)..(938): Homolog of NCBI NO: 15220234 NR Description: unknown protein; protein id: At1g10890.1
  misc_feature (619)..(692): Homolog of NCBI NO: 15220234 NR Description: unknown protein; protein id: At1g10890.1
  misc_feature (618)..(906): Homolog of NCBI NO: 15239318 NR Description: putative protein; protein id: At5g36200.1
  misc_feature (628)..(873): Homolog of NCBI NO: 9293877 NR Description: gb|AAC67359.1~gene_id:MCB17.16~similar to unknown
  misc_feature (628)..(873): Homolog of NCBI NO: 22331255 NR Description: similar to type 2 peroxiredoxin, putative;
  misc_feature (628)..(906): Homolog of NCBI NO: 15228908 NR Description: hypothetical protein; protein id: At3g22940.1 thaliana] >gi|11994724|dbj|BAB03040.1|
MRLRHQGGQYLARGMEPVYWSNKVDSTHDLYDNYTLGSYQNNSYNILAHTGFGYDHEFQIYEINSNSWRIIDATLDFKLGYIGRGVSLKGKTYWIASGEEEKRLGKFLISFDYTTERFERLCLPNKYPCYATLALSVVREEKLSMLSQRGIKSKAEIWVTNKIGETQVVSWSMVLALDLQPKRCIGESGSFLVDEKKRVVVCCDNIRDQGKTTFDSNLPRYHRQKKKGRMIIVFDVESMRLPVTVKATKPSFLVIWIRYSSAASSPTVSLNPSGRLQQTLAGSVEVKGKSLHSGKFSTVKLNPEIAGAGRFFEFRSRFIPASIEFAQESPLCTTLLKDELKIRTVEHLLSALEAKGVDNCRIQIESESSDDREVEVSKEWVDAIQGVGINAAQNHDGESVEKMVAHVNKPVYVCKNDTFVAAFPALETRITCGIDFPQVPAIGCQWFSWRPIHESSFAKDIASSRTFCVYEEVERMREAGLIKGGSLDNAIVCSAEHGWMNPPLRFDDEACRHKILDLIGDLSLVSRGGNGGLPVAHIVAYKNEEEEVRSSTEENENVRSSTEENEYVRSSTEAGRGEDPHEDSDNISESGAIHLQIMERFNQRSGSGKEEEEDTMDLSIKQVDLLNQVEISRVYHCDGLLLCVAKDNSRVVVWNPYLGQTRWIRPRTESNIGDSYALGYDINRNHKILRMVQTRNVSVYRYEIYDLRSNSWRVLEVTPNGEMDPNHPLYGVSVKGNTYFFAHEDSSSGEIDEDGDIIDLEDFLLCFDFTTETFGLRLPLPFHSTIDATVTLSCVRDQQLAVLYHNEGLHSDDRFTTVEFWVTTSIEPNSVSWSKFLTVDMRPLALTGVRFDNDMGATFFIDEDEKVAVVFDLDGYLSTESARYHTAFISGKDGFFKPVTLGVAPNVGEPCPRTGHIPTTYRPPLVCSSTYLPSLVQVNQQRKRKERHV

SEQ ID NO: 82826 - protein, 935 aa, Arabidopsis thaliana
  peptide (1)..(935): Ceres Seq. ID no. 12667449
  misc_feature (260)..(528): Pfam Name: UDP-3-O-acyl N-acetylglycosamine deacetylase Pfam Description: UDP-3-O-acyl N-acetylglycosamine deacetylase
  misc_feature (586)..(935): Homolog of NCBI NO: 23297235 NR Description: unknown protein [Arabidopsis thaliana]
  misc_feature (586)..(935): Homolog of NCBI NO: 19347782 NR Description: putative F5A9.18 protein [Arabidopsis thaliana]
  misc_feature (225)..(528): Homolog of NCBI NO: 26451306 NR Description: unknown protein [Arabidopsis thaliana]
  misc_feature (225)..(484): Homolog of NCBI NO: 20453133 NR Description: At1g25190/F4F7_4 [Arabidopsis thaliana]
  misc_feature (714)..(924): Homolog of NCBI NO: 15220234 NR Description: unknown protein; protein id: At1g10890.1
  misc_feature (605)..(678): Homolog of NCBI NO: 15220234 NR Description: unknown protein; protein id: At1g10890.1
  misc_feature (604)..(892): Homolog of NCBI NO: 15239318 NR Description: putative protein; protein id: At5g36200.1
  misc_feature (614)..(859): Homolog of NCBI NO: 9293877 NR Description: gb|AAC67359.1~gene_id:MCB17.16~similar to unknown
  misc_feature (614)..(859): Homolog of NCBI NO: 22331255 NR Description: similar to type 2 peroxiredoxin, putative;
  misc_feature (614)..(892): Homolog of NCBI NO: 15228908 NR Description: hypothetical protein; protein id: At3g22940.1 thaliana] >gi|11994724|dbj|BAB03040.1|
MEPVYWSNKVDSTHDLYDNYTLGSYQNNSYNILAHTGFGYDHEFQIYEINSNSWRIIDATLDFKLGYIGRGVSLKGKTYWIASGEEEKRLGKFLISFDYTTERFERLCLPNKYPCYATLALSVVREEKLSMLSQRGIKSKAEIWVTNKIGETQVVSWSMVLALDLQPKRCIGESGSFLVDEKKRVVVCCDNIRDQGKTTFDSNLPRYHRQKKKGRMIIVFDVESMRLPVTVKATKPSFLVIWIRYSSAASSPTVSLNPSGRLQQTLAGSVEVKGKSLHSGKFSTVKLNPEIAGAGRFFEFRSRFIPASIEFAQESPLCTTLLKDELKIRTVEHLLSALEAKGVDNCRIQIESESSDDREVEVSKEWVDAIQGVGINAAQNHDGESVEKMVAHVNKPVYVCKNDTFVAAFPALETRITCGIDFPQVPAIGCQWFSWRPIHESSFAKDIASSRTFCVYEEVERMREAGLIKGGSLDNAIVCSAEHGWMNPPLRFDDEACRHKILDLIGDLSLVSRGGNGGLPVAHIVAYKNEEEEVRSSTEENENVRSSTEENEYVRSSTEAGRGEDPHEDSDNISESGAIHLQIMERFNQRSGSGKEEEEDTMDLSIKQVDLLNQVEISRVYHCDGLLLCVAKDNSRVVVWNPYLGQTRWIRPRTESNIGDSYALGYDINRNHKILRMVQTRNVSVYRYEIYDLRSNSWRVLEVTPNGEMDPNHPLYGVSVKGNTYFFAHEDSSSGEIDEDGDIIDLEDFLLCFDFTTETFGLRLPLPFHSTIDATVTLSCVRDQQLAVLYHNEGLHSDDRFTTVEFWVTTSIEPNSVSWSKFLTVDMRPLALTGVRFDNDMGATFFIDEDEKVAVVFDLDGYLSTESARYHTAFISGKDGFFKPVTLGVAPNVGEPCPRTGHIPTTYRPPLVCSSTYLPSLVQVNQQRKRKERHV

SEQ ID NO: 82827 - protein, 805 aa, Arabidopsis thaliana
  peptide (1)..(805): Ceres Seq. ID no. 12667450
  misc_feature (130)..(398): Pfam Name: UDP-3-O-acyl N-acetylglycosamine deacetylase Pfam Description: UDP-3-O-acyl N-acetylglycosamine deacetylase
  misc_feature (456)..(805): Homolog of NCBI NO: 23297235 NR Description: unknown protein [Arabidopsis thaliana]
  misc_feature (456)..(805): Homolog of NCBI NO: 19347782 NR Description: putative F5A9.18 protein [Arabidopsis thaliana]
  misc_feature (95)..(398): Homolog of NCBI NO: 26451306 NR Description: unknown protein [Arabidopsis thaliana]
  misc_feature (95)..(354): Homolog of NCBI NO: 20453133 NR Description: At1g25190/F4F7_4 [Arabidopsis thaliana]
  misc_feature (584)..(794): Homolog of NCBI NO: 15220234 NR Description: unknown protein; protein id: At1g10890.1
  misc_feature (475)..(548): Homolog of NCBI NO: 15220234 NR Description: unknown protein; protein id: At1g10890.1
  misc_feature (474)..(762): Homolog of NCBI NO: 15239318 NR Description: putative protein; protein id: At5g36200.1
  misc_feature (484)..(729): Homolog of NCBI NO: 9293877 NR Description: gb|AAC67359.1~gene_id:MCB17.16~similar to unknown
  misc_feature (484)..(729): Homolog of NCBI NO: 22331255 NR Description: similar to type 2 peroxiredoxin, putative;
  misc_feature (484)..(762): Homolog of NCBI NO: 15228908 NR Description: hypothetical protein; protein id: At3g22940.1 thaliana] >gi|11994724|dbj|BAB03040.1|
MLSQRGIKSKAEIWVTNKIGETQVVSWSMVLALDLQPKRCIGESGSFLVDEKKRVVVCCDNIRDQGKTTFDSNLPRYHRQKKKGRMIIVFDVESMRLPVTVKATKPSFLVIWIRYSSAASSPTVSLNPSGRLQQTLAGSVEVKGKSLHSGKFSTVKLNPEIAGAGRFFEFRSRFIPASIEFAQESPLCTTLLKDELKIRTVEHLLSALEAKGVDNCRIQIESESSDDREVEVSKEWVDAIQGVGINAAQNHDGESVEKMVAHVNKPVYVCKNDTFVAAFPALETRITCGIDFPQVPAIGCQWFSWRPIHESSFAKDIASSRTFCVYEEVERMREAGLIKGGSLDNAIVCSAEHGWMNPPLRFDDEACRHKILDLIGDLSLVSRGGNGGLPVAHIVAYKNEEEEVRSSTEENENVRSSTEENEYVRSSTEAGRGEDPHEDSDNISESGAIHLQIMERFNQRSGSGKEEEEDTMDLSIKQVDLLNQVEISRVYHCDGLLLCVAKDNSRVVVWNPYLGQTRWIRPRTESNIGDSYALGYDINRNHKILRMVQTRNVSVYRYEIYDLRSNSWRVLEVTPNGEMDPNHPLYGVSVKGNTYFFAHEDSSSGEIDEDGDIIDLEDFLLCFDFTTETFGLRLPLPFHSTIDATVTLSCVRDQQLAVLYHNEGLHSDDRFTTVEFWVTTSIEPNSVSWSKFLTVDMRPLALTGVRFDNDMGATFFIDEDEKVAVVFDLDGYLSTESARYHTAFISGKDGFFKPVTLGVAPNVGEPCPRTGHIPTTYRPPLVCSSTYLPSLVQVNQQRKRKERHV

SEQ ID NO: 82828 - DNA, 1098 bp, Arabidopsis thaliana
  misc_feature (1)..(1098): Ceres Seq. ID no. 12667471
  misc_feature: MA Experiment ID: 20000185 Result: Up-regulated in Transcription
  misc_feature: MA Experiment 20000185 PARAMETER Experiment Name: At_Roots__P Parameter: Age (day) Value: 7 vs. 21
  misc_feature: MA Experiment 20000185 PARAMETER Experiment Name: At_Roots__P Parameter: Organism Value: A. thaliana
  misc_feature: MA Experiment 20000185 PARAMETER Experiment Name: At_Roots__P Parameter: Tissue Value: Roots vs. Whole Plant
  misc_feature: MA Experiment ID: 20000227 Result: Down-regulated in Transcription
  misc_feature: MA Experiment 20000227 PARAMETER Experiment Name: At_Root-Tips-vs-Tops_P Parameter: Tissue Value: Root Tips vs. Root Tops
  misc_feature: MA Experiment ID: 20000439 Result: Up-regulated in Transcription
  misc_feature: MA Experiment 20000439 PARAMETER Experiment Name: At_Roots__P Parameter: Age (day) Value: 14 vs. 21
  misc_feature: MA Experiment 20000439 PARAMETER Experiment Name: At_Roots__P Parameter: Organism Value: A. thaliana
  misc_feature: MA Experiment 20000439 PARAMETER Experiment Name: At_Roots__P Parameter: Tissue Value: Roots vs. Whole Plant
  misc_feature: MA Experiment ID: 20000460 Result: Down-regulated in Transcription
  misc_feature: MA Experiment 20000460 PARAMETER Experiment Name: At_10percent_PEG_P Parameter: Age (day) Value: 12
  misc_feature: MA Experiment 20000460 PARAMETER Experiment Name: At_10percent_PEG_P Parameter: Organism Value: A. thaliana
  misc_feature: MA Experiment 20000460 PARAMETER Experiment Name: At_10percent_PEG_P Parameter: Plant Line Value: WS
  misc_feature: MA Experiment 20000460 PARAMETER Experiment Name: At_10percent_PEG_P Parameter: Timepoint (day) Value: 12
  misc_feature: MA Experiment 20000460 PARAMETER Experiment Name: At_10percent_PEG_P Parameter: Tissue Value: Whole Plant
  misc_feature: MA Experiment 20000460 PARAMETER Experiment Name: At_10percent_PEG_P Parameter: Treatment Value: 10percent PEG vs. No Treatment
atggggaggtcgccttgttgcgacgagaatggtctaaagaaagggccatggactcctgaagaagatcaaaagcttattgattacattcataaacatggtcatggaagctggagagctctccccaagctcgcagatttgaataggtgtggaaagagttgtagactgaggtggacaaattatttgagaccagacatcaaaagaggaaagttttcagccgaagaagagcaaacaatcctccatctccactccattctcgggaataaatggtcagctattgcgacgcatttgcaaggtcgtacagataatgagataaaaaacttttggaacacacatctaaagaagaaattgatccagatggggatcgatcctgtgactcatcagccaagaaccgacctcttcgcaagtttacctcagctcatagccttggcaaatctaaaagacctaatcgaacaaacatcacaattctcatccatgcaaggcgaagcagcccaactagccaatctacaatatctccaacgtatgtttaattcttcggcttcattaaccaacaacaacggcaacaattttagcccgagtagtattctcgatatcgatcagcaccatgccatgaacctcttaaactccatggtctcttggaacaaagatcaaaaccccgcttttgatccggttcttgaactcgaggctaacgatcaaaatcaagatttatttccactagggtttatcattgatcaacccacccaaccactccaacaacaaaaataccatttaaacaatagtcctagtgagctaccatcgcaaggtgacccacttcttgatcatgtccctttcagtctccaaacacctttgaatagtgaggatcactttatagataatttggtcaaacatccaactgatcatgagcatgaacatgatgacaatccatcttcatgggttctcccttctcttatagacaataaccctaaaactgtcacgtcttctcttccacacaacaatccggcggatgcaagtagcagctcaagctatggaggttgtgaagctgcgtcgttttattggcctgacatttgcttcgacgaaagcctcatgaacgttatatcttag

SEQ ID NO: 82829 - protein, 365 aa, Arabidopsis thaliana
  peptide (1)..(365): Ceres Seq. ID no. 12667472
  misc_feature (14)..(61): Pfam Name: Myb-like DNA-binding domain Pfam Description: Myb-like DNA-binding domain
  misc_feature (1)..(365): Homolog of NCBI NO: 15218730 NR Description: myb family transcription factor; protein id:
  misc_feature (151)..(365): Homolog of NCBI NO: 11358691 NR Description: probable transcription factor MYB93 [imported] - thaliana (fragment) >gi|3941526|gb|AAC83639.1| putative
  misc_feature (1)..(221): Homolog of NCBI NO: 30024600 NR Description: transcription factor MYB102 [Lotus japonicus]
  misc_feature (1)..(309): Homolog of NCBI NO: 11358678 NR Description: probable transcription factor (MYB9) - thaliana >gi|9755729|emb|CAC01841.1| putative transcription
  misc_feature (1)..(309): Homolog of NCBI NO: 30686014 NR Description: myb DNA-binding protein(AtMYB9) [Arabidopsis
  misc_feature (1)..(247): Homolog of NCBI NO: 15233021 NR Description: myb family transcription factor; protein id: supported by cDNA: gi_15375289 [Arabidopsis thaliana] putative MYB family transcription factor [Arabidopsis thaliana]
  misc_feature (1)..(238): Homolog of NCBI NO: 15238370 NR Description: myb family transcription factor; protein id:
  misc_feature (1)..(314): Homolog of NCBI NO: 30024598 NR Description: transcription factor MYB101 [Lotus japonicus]
  misc_feature (1)..(196): Homolog of NCBI NO: 15238116 NR Description: myb family transcription factor; protein id: supported by cDNA: gi_3941523 [Arabidopsis thaliana]
MGRSPCCDENGLKKGPWTPEEDQKLIDYIHKHGHGSWRALPKLADLNRCGKSCRLRWTNYLRPDIKRGKFSAEEEQTILHLHSILGNKWSAIATHLQGRTDNEIKNFWNTHLKKKLIQMGIDPVTHQPRTDLFASLPQLIALANLKDLIEQTSQFSSMQGEAAQLANLQYLQRMFNSSASLTNNNGNNFSPSSILDIDQHHAMNLLNSMVSWNKDQNPAFDPVLELEANDQNQDLFPLGFIIDQPTQPLQQQKYHLNNSPSELPSQGDPLLDHVPFSLQTPLNSEDHFIDNLVKHPTDHEHEHDDNPSSWVLPSLIDNNPKTVTSSLPHNNPADASSSSSYGGCEAASFYWPDICFDESLMNVIS

SEQ ID NO: 82830 - protein, 247 aa, Arabidopsis thaliana
  peptide (1)..(247): Ceres Seq. ID no. 12667473
  misc_feature (1)..(247): Homolog of NCBI NO: 15218730 NR Description: myb family transcription factor; protein id:
  misc_feature (33)..(247): Homolog of NCBI NO: 11358691 NR Description: probable transcription factor MYB93 [imported] - thaliana (fragment) >gi|3941526|gb|AAC83639.1| putative
  misc_feature (1)..(103): Homolog of NCBI NO: 30024600 NR Description: transcription factor MYB102 [Lotus japonicus]
  misc_feature (1)..(191): Homolog of NCBI NO: 11358678 NR Description: probable transcription factor (MYB9) - thaliana >gi|9755729|emb|CAC01841.1| putative transcription
  misc_feature (1)..(191): Homolog of NCBI NO: 30686014 NR Description: myb DNA-binding protein(AtMYB9) [Arabidopsis
  misc_feature (1)..(129): Homolog of NCBI NO: 15233021 NR Description: myb family transcription factor; protein id: supported by cDNA: gi_15375289 [Arabidopsis thaliana] putative MYB family transcription factor [Arabidopsis thaliana]
  misc_feature (1)..(120): Homolog of NCBI NO: 15238370 NR Description: myb family transcription factor; protein id:
  misc_feature (1)..(196): Homolog of NCBI NO: 30024598 NR Description: transcription factor MYB101 [Lotus japonicus]
  misc_feature (1)..(78): Homolog of NCBI NO: 15238116 NR Description: myb family transcription factor; protein id: supported by cDNA: gi_3941523 [Arabidopsis thaliana]
MGIDPVTHQPRTDLFASLPQLIALANLKDLIEQTSQFSSMQGEAAQLANLQYLQRMFNSSASLTNNNGNNFSPSSILDIDQHHAMNLLNSMVSWNKDQNPAFDPVLELEANDQNQDLFPLGFIIDQPTQPLQQQKYHLNNSPSELPSQGDPLLDHVPFSLQTPLNSEDHFIDNLVKHPTDHEHEHDDNPSSWVLPSLIDNNPKTVTSSLPHNNPADASSSSSYGGCEAASFYWPDICFDESLMNVIS

SEQ ID NO: 82831 - protein, 208 aa, Arabidopsis thaliana
  peptide (1)..(208): Ceres Seq. ID no. 12667474
  misc_feature (1)..(208): Homolog of NCBI NO: 15218730 NR Description: myb family transcription factor; protein id:
  misc_feature (1)..(208): Homolog of NCBI NO: 11358691 NR Description: probable transcription factor MYB93 [imported] - thaliana (fragment) >gi|3941526|gb|AAC83639.1| putative
  misc_feature (1)..(64): Homolog of NCBI NO: 30024600 NR Description: transcription factor MYB102 [Lotus japonicus]
  misc_feature (1)..(152): Homolog of NCBI NO: 11358678 NR Description: probable transcription factor (MYB9) - thaliana >gi|9755729|emb|CAC01841.1| putative transcription
  misc_feature (1)..(152): Homolog of NCBI NO: 30686014 NR Description: myb DNA-binding protein(AtMYB9) [Arabidopsis
  misc_feature (1)..(90): Homolog of NCBI NO: 15233021 NR Description: myb family transcription factor; protein id: supported by cDNA: gi_15375289 [Arabidopsis thaliana] putative MYB family transcription factor [Arabidopsis thaliana]
  misc_feature (1)..(81): Homolog of NCBI NO: 15238370 NR Description: myb family transcription factor; protein id:
  misc_feature (1)..(157): Homolog of NCBI NO: 30024598 NR Description: transcription factor MYB101 [Lotus japonicus]
  misc_feature (1)..(39): Homolog of NCBI NO: 15238116 NR Description: myb family transcription factor; protein id: supported by cDNA: gi_3941523 [Arabidopsis thaliana]
MQGEAAQLANLQYLQRMFNSSASLTNNNGNNFSPSSILDIDQHHAMNLLNSMVSWNKDQNPAFDPVLELEANDQNQDLFPLGFIIDQPTQPLQQQKYHLNNSPSELPSQGDPLLDHVPFSLQTPLNSEDHFIDNLVKHPTDHEHEHDDNPSSWVLPSLIDNNPKTVTSSLPHNNPADASSSSSYGGCEAASFYWPDICFDESLMNVIS

SEQ ID NO: 82832 - DNA, 1068 bp, Arabidopsis thaliana
  misc_feature (1)..(1068): Ceres Seq. ID no. 12667525
atgggctttgttagacctgtttgcatgacaatcctctttcttttgattgtattcgttctttcggcgccgtcctcggccatggaccttcccgccacatccggtggtcacaaccggagcaacgaggaggttgagtttattttccaaatgtggatgtccaagcacgggaagacttataccaatgctctcggagagaaggaacggcgttttcagaacttcaaggacaatctccgtttcatcgaccagcacaatgcaaagaacctctcttaccagcttggtttgactcggtttgcagacctaaccgttcaagagtaccgagaccttttccctggaagccctaaaccgaaacaaaggaatctcaaaaccagtcgtaggtacgtgccactcgccggagatcagctcccagagtcagttgactggaggcaagaaggtgcagtgtcggaaattaaagaccaaggcacttgcaacagctgctgggcgttctccacagtggcagcagtagagggattaaacaagattgtgacaggagagttaatctcattgtccgagcaagaattggtcgactgcaacctagtcaacaacggttgttatggatcaggactaatggacacagctttccagttccttatcaataacaatggtcttgattccgaaaaagattatccataccagggcactcaaggctcctgtaaccgcaaacaggttcacctattagtcatcacgattgatagctacgaggatgtgccagcgaatgatgagatttccttacaaaaggcggttgctcaccagcccgtgagtgttggcgttgacaaaaaatcccaagaatttatgctctatcgatcgtgtatatataatggaccatgcggaacaaatcttgaccatgcacttgttatcgtcgggtacggtagtgagaacggtcaggactattggatcgtgagaaactcatggggaacgacttggggagatgctggctacattaagattgctcgtaactttgaagatccaaaaggtctctgtggaattgcgatgcttgcttcatatcctattaagaattcggcttccaatgcatga

SEQ ID NO: 82833 - protein, 355 aa, Arabidopsis thaliana
  peptide (1)..(355): Ceres Seq. ID no. 12667526
  misc_feature (133)..(348): Pfam Name: Papain family cysteine protease Pfam Description: Papain family cysteine protease
  misc_feature (1)..(355): Homolog of NCBI NO: 18416165 NR Description: cysteine proteinase; protein id: At4g23520.1
  misc_feature (1)..(349): Homolog of NCBI NO: 18422289 NR Description: cysteine proteinase RD21A; protein id:
  misc_feature (1)..(350): Homolog of NCBI NO: 14517542 NR Description: F2G19.31/F2G19.31 [Arabidopsis thaliana]
  misc_feature (1)..(350): Homolog of NCBI NO: 18401614 NR Description: cysteine proteinase RD21A; protein id: supported by cDNA: gi_14517541, supported by cDNA: gi_18175925, by cDNA: gi_19548038 [Arabidopsis thaliana]
  misc_feature (11)..(350): Homolog of NCBI NO: 18141285 NR Description: senescence-associated cysteine protease [Brassica
  misc_feature (1)..(349): Homolog of NCBI NO: 18141283 NR Description: senescence-associated cysteine protease [Brassica
  misc_feature (11)..(353): Homolog of NCBI NO: 18413505 NR Description: cysteine proteinase; protein id: At4g11310.1
  misc_feature (11)..(353): Homolog of NCBI NO: 20260334 NR Description: drought-inducible cysteine proteinase RD21A
  misc_feature (15)..(353): Homolog of NCBI NO: 6682829 NR Description: cysteine protease component of protease-inhibitor
  misc_feature (1)..(353): Homolog of NCBI NO: 18413507 NR Description: cysteine proteinase; protein id: At4g11320.1, by cDNA: 6307., supported by cDNA: gi_14334763, supported by gi_15293256 [Arabidopsis thaliana] >gi|7435826|pir||T13023
MGFVRPVCMTILFLLIVFVLSAPSSAMDLPATSGGHNRSNEEVEFIFQMWMSKHGKTYTNALGEKERRFQNFKDNLRFIDQHNAKNLSYQLGLTRFADLTVQEYRDLFPGSPKPKQRNLKTSRRYVPLAGDQLPESVDWRQEGAVSEIKDQGTCNSCWAFSTVAAVEGLNKIVTGELISLSEQELVDCNLVNNGCYGSGLMDTAFQFLINNNGLDSEKDYPYQGTQGSCNRKQVHLLVITIDSYEDVPANDEISLQKAVAHQPVSVGVDKKSQEFMLYRSCIYNGPCGTNLDHALVIVGYGSENGQDYWIVRNSWGTTWGDAGYIKIARNFEDPKGLCGIAMLASYPIKNSASNA

SEQ ID NO: 82834 - protein, 347 aa, Arabidopsis thaliana
  peptide (1)..(347): Ceres Seq. ID no. 12667527
  misc_feature (125)..(340): Pfam Name: Papain family cysteine protease Pfam Description: Papain family cysteine protease
  misc_feature (1)..(347): Homolog of NCBI NO: 18416165 NR Description: cysteine proteinase; protein id: At4g23520.1
  misc_feature (1)..(341): Homolog of NCBI NO: 18422289 NR Description: cysteine proteinase RD21A; protein id:
  misc_feature (1)..(342): Homolog of NCBI NO: 14517542 NR Description: F2G19.31/F2G19.31 [Arabidopsis thaliana]
  misc_feature (1)..(342): Homolog of NCBI NO: 18401614 NR Description: cysteine proteinase RD21A; protein id: supported by cDNA: gi_14517541, supported by cDNA: gi_18175925, by cDNA: gi_19548038 [Arabidopsis thaliana]
  misc_feature (3)..(342): Homolog of NCBI NO: 18141285 NR Description: senescence-associated cysteine protease [Brassica
  misc_feature (1)..(341): Homolog of NCBI NO: 18141283 NR Description: senescence-associated cysteine protease [Brassica
  misc_feature (3)..(345): Homolog of NCBI NO: 18413505 NR Description: cysteine proteinase; protein id: At4g11310.1
  misc_feature (3)..(345): Homolog of NCBI NO: 20260334 NR Description: drought-inducible cysteine proteinase RD21A
  misc_feature (7)..(345): Homolog of NCBI NO: 6682829 NR Description: cysteine protease component of protease-inhibitor
  misc_feature (1)..(345): Homolog of NCBI NO: 18413507 NR Description: cysteine proteinase; protein id: At4g11320.1, by cDNA: 6307., supported by cDNA: gi_14334763, supported by gi_15293256 [Arabidopsis thaliana] >gi|7435826|pir||T13023
MTILFLLIVFVLSAPSSAMDLPATSGGHNRSNEEVEFIFQMWMSKHGKTYTNALGEKERRFQNFKDNLRFIDQHNAKNLSYQLGLTRFADLTVQEYRDLFPGSPKPKQRNLKTSRRYVPLAGDQLPESVDWRQEGAVSEIKDQGTCNSCWAFSTVAAVEGLNKIVTGELISLSEQELVDCNLVNNGCYGSGLMDTAFQFLINNNGLDSEKDYPYQGTQGSCNRKQVHLLVITIDSYEDVPANDEISLQKAVAHQPVSVGVDKKSQEFMLYRSCIYNGPCGTNLDHALVIVGYGSENGQDYWIVRNSWGTTWGDAGYIKIARNFEDPKGLCGIAMLASYPIKNSASNA

SEQ ID NO: 82835 - protein, 329 aa, Arabidopsis thaliana
  peptide (1)..(329): Ceres Seq. ID no. 12667528
  misc_feature (107)..(322): Pfam Name: Papain family cysteine protease Pfam Description: Papain family cysteine protease
  misc_feature (1)..(329): Homolog of NCBI NO: 18416165 NR Description: cysteine proteinase; protein id: At4g23520.1
  misc_feature (1)..(323): Homolog of NCBI NO: 18422289 NR Description: cysteine proteinase RD21A; protein id:
  misc_feature (1)..(324): Homolog of NCBI NO: 14517542 NR Description: F2G19.31/F2G19.31 [Arabidopsis thaliana]
  misc_feature (1)..(324): Homolog of NCBI NO: 18401614 NR Description: cysteine proteinase RD21A; protein id: supported by cDNA: gi_14517541, supported by cDNA: gi_18175925, by cDNA: gi_19548038 [Arabidopsis thaliana]
  misc_feature (1)..(324): Homolog of NCBI NO: 18141285 NR Description: senescence-associated cysteine protease [Brassica
  misc_feature (1)..(323): Homolog of NCBI NO: 18141283 NR Description: senescence-associated cysteine protease [Brassica
  misc_feature (1)..(327): Homolog of NCBI NO: 18413505 NR Description: cysteine proteinase; protein id: At4g11310.1
  misc_feature (1)..(327): Homolog of NCBI NO: 20260334 NR Description: drought-inducible cysteine proteinase RD21A
  misc_feature (1)..(327): Homolog of NCBI NO: 6682829 NR Description: cysteine protease component of protease-inhibitor
  misc_feature (1)..(327): Homolog of NCBI NO: 18413507 NR Description: cysteine proteinase; protein id: At4g11320.1, by cDNA: 6307., supported by cDNA: gi_14334763, supported by gi_15293256 [Arabidopsis thaliana] >gi|7435826|pir||T13023
MDLPATSGGHNRSNEEVEFIFQMWMSKHGKTYTNALGEKERRFQNFKDNLRFIDQHNAKNLSYQLGLTRFADLTVQEYRDLFPGSPKPKQRNLKTSRRYVPLAGDQLPESVDWRQEGAVSEIKDQGTCNSCWAFSTVAAVEGLNKIVTGELISLSEQELVDCNLVNNGCYGSGLMDTAFQFLINNNGLDSEKDYPYQGTQGSCNRKQVHLLVITIDSYEDVPANDEISLQKAVAHQPVSVGVDKKSQEFMLYRSCIYNGPCGTNLDHALVIVGYGSENGQDYWIVRNSWGTTWGDAGYIKIARNFEDPKGLCGIAMLASYPIKNSASNA

SEQ ID NO: 82836 - DNA, 1329 bp, Arabidopsis thaliana
  misc_feature (1)..(1329): Ceres Seq. ID no. 12667529
  misc_feature: MA Experiment ID: 20000171 Result: Up-regulated in Transcription
  misc_feature: MA Experiment 20000171 PARAMETER Experiment Name: At_42deg_Heat_P Parameter: Age (day) Value: 14
  misc_feature: MA Experiment 20000171 PARAMETER Experiment Name: At_42deg_Heat_P Parameter: Organism Value: A. thaliana
  misc_feature: MA Experiment 20000171 PARAMETER Experiment Name: At_42deg_Heat_P Parameter: Plant Line Value: WS
  misc_feature: MA Experiment 20000171 PARAMETER Experiment Name: At_42deg_Heat_P Parameter: Temperature (deg C) Value: 42 vs. 22
  misc_feature: MA Experiment 20000171 PARAMETER Experiment Name: At_42deg_Heat_P Parameter: Timepoint (hr) Value: 1
  misc_feature: MA Experiment 20000171 PARAMETER Experiment Name: At_42deg_Heat_P Parameter: Tissue Value: Aerial
  misc_feature: MA Experiment ID: 20000173 Result: Up-regulated in Transcription
  misc_feature: MA Experiment 20000173 PARAMETER Experiment Name: At_42deg_Heat_P Parameter: Age (day) Value: 14
  misc_feature: MA Experiment 20000173 PARAMETER Experiment Name: At_42deg_Heat_P Parameter: Organism Value: A. thaliana
  misc_feature: MA Experiment 20000173 PARAMETER Experiment Name: At_42deg_Heat_P Parameter: Plant Line Value: WS
  misc_feature: MA Experiment 20000173 PARAMETER Experiment Name: At_42deg_Heat_P Parameter: Temperature (deg C) Value: 42 vs. 22
  misc_feature: MA Experiment 20000173 PARAMETER Experiment Name: At_42deg_Heat_P Parameter: Timepoint (hr) Value: 6
  misc_feature: MA Experiment 20000173 PARAMETER Experiment Name: At_42deg_Heat_P Parameter: Tissue Value: Aerial
  misc_feature: MA Experiment ID: 20000180 Result: Up-regulated in Transcription
  misc_feature: MA Experiment 20000180 PARAMETER Experiment Name: At_Germinating_Seeds_P Parameter: Age (hr) Value: 24 vs. 0
  misc_feature: MA Experiment 20000180 PARAMETER Experiment Name: At_Germinating_Seeds_P Parameter: Tissue Value: Germinating Seeds
  misc_feature: MA Experiment ID: 20000182 Result: Up-regulated in Transcription
  misc_feature: MA Experiment 20000182 PARAMETER Experiment Name: At_2mM_SA_P Parameter: Age (day) Value: 14
  misc_feature: MA Experiment 20000182 PARAMETER Experiment Name: At_2mM_SA_P Parameter: Organism Value: A. thaliana
  misc_feature: MA Experiment 20000182 PARAMETER Experiment Name: At_2mM_SA_P Parameter: Plant Line Value: WS
  misc_feature: MA Experiment 20000182 PARAMETER Experiment Name: At_2mM_SA_P Parameter: Timepoint (hr) Value: 6
  misc_feature: MA Experiment 20000182 PARAMETER Experiment Name: At_2mM_SA_P Parameter: Tissue Value: Aerial
  misc_feature: MA Experiment 20000182 PARAMETER Experiment Name: At_2mM_SA_P Parameter: Treatment Value: 2mM SA vs. No Treatment
  misc_feature: MA Experiment ID: 20000184 Result: Down-regulated in Transcription
  misc_feature: MA Experiment 20000184 PARAMETER Experiment Name: At_Shoots__P Parameter: Age (day) Value: 7
  misc_feature: MA Experiment 20000184 PARAMETER Experiment Name: At_Shoots__P Parameter: Tissue Value: Shoots vs. Whole Plant
  misc_feature: MA Experiment ID: 20000227 Result: Down-regulated in Transcription
  misc_feature: MA Experiment 20000227 PARAMETER Experiment Name: At_Root-Tips-vs-Tops_P Parameter: Tissue Value: Root Tips vs. Root Tops
  misc_feature: MA Experiment ID: 20000234 Result: Down-regulated in Transcription
  misc_feature: MA Experiment 20000234 PARAMETER Experiment Name: At_Siliques_P Parameter: Age (day) Value: 21
  misc_feature: MA Experiment 20000234 PARAMETER Experiment Name: At_Siliques_P Parameter: Organism Value: A. thaliana
  misc_feature: MA Experiment 20000234 PARAMETER Experiment Name: At_Siliques_P Parameter: Plant Line Value: WS
  misc_feature: MA Experiment 20000234 PARAMETER Experiment Name: At_Siliques_P Parameter: Tissue Value: Less Than 5mm Siliques vs. Whole Plant
  misc_feature: MA Experiment ID: 20000235 Result: Down-regulated in Transcription
  misc_feature: MA Experiment 20000235 PARAMETER Experiment Name: At_Siliques_P Parameter: Age (day) Value: 21
  misc_feature: MA Experiment 20000235 PARAMETER Experiment Name: At_Siliques_P Parameter: Organism Value: A. thaliana
  misc_feature: MA Experiment 20000235 PARAMETER Experiment Name: At_Siliques_P Parameter: Plant Line Value: WS
  misc_feature: MA Experiment 20000235 PARAMETER Experiment Name: At_Siliques_P Parameter: Tissue Value: 5-10mm Siliques vs. Whole Plant
  misc_feature: MA Experiment ID: 20000264 Result: Down-regulated in Transcription
  misc_feature: MA Experiment 20000264 PARAMETER Experiment Name: At_Open_Flower_P Parameter: Age (day) Value: 21
  misc_feature: MA Experiment 20000264 PARAMETER Experiment Name: At_Open_Flower_P Parameter: Plant Line Value: WS
  misc_feature: MA Experiment 20000264 PARAMETER Experiment Name: At_Open_Flower_P Parameter: Tissue Value: Open Flower vs. Whole Plant
  misc_feature: MA Experiment ID: 20000265 Result: Down-regulated in Transcription
  misc_feature: MA Experiment 20000265 PARAMETER Experiment Name: At_Open_Flower_P Parameter: Age (day) Value: 21
  misc_feature: MA Experiment 20000265 PARAMETER Experiment Name: At_Open_Flower_P Parameter: Plant Line Value: WS
  misc_feature: MA Experiment 20000265 PARAMETER Experiment Name: At_Open_Flower_P Parameter: Tissue Value: Closed Flower vs. Whole Plant
  misc_feature: MA Experiment ID: 20000286 Result: Down-regulated in Transcription
  misc_feature: MA Experiment 20000286 PARAMETER Experiment Name: At_Open_Flower_P Parameter: Age (day) Value: 21
  misc_feature: MA Experiment 20000286 PARAMETER Experiment Name: At_Open_Flower_P Parameter: Plant Line Value: WS
  misc_feature: MA Experiment 20000286 PARAMETER Experiment Name: At_Open_Flower_P Parameter: Tissue Value: Half Open vs. Whole Plant
  misc_feature: MA Experiment ID: 20000439 Result: Down-regulated in Transcription
  misc_feature: MA Experiment 20000439 PARAMETER Experiment Name: At_Roots__P Parameter: Age (day) Value: 14 vs. 21
  misc_feature: MA Experiment 20000439 PARAMETER Experiment Name: At_Roots__P Parameter: Organism Value: A. thaliana
  misc_feature: MA Experiment 20000439 PARAMETER Experiment Name: At_Roots__P Parameter: Tissue Value: Roots vs. Whole Plant
  misc_feature: MA Experiment ID: 20000441 Result: Up-regulated in Transcription
  misc_feature: MA Experiment 20000441 PARAMETER Experiment Name: At_1uM_BR-BRZ__P Parameter: Tissue Value: Shoot Apices
  misc_feature: MA Experiment 20000441 PARAMETER Experiment Name: At_1uM_BR-BRZ__P Parameter: Treatment Value: 1uM BR vs. No Treatment
  misc_feature: MA Experiment ID: 20000443 Result: Up-regulated in Transcription
  misc_feature: MA Experiment 20000443 PARAMETER Experiment Name: At_1uM_BR-BRZ__P Parameter: Tissue Value: Shoot Apices
  misc_feature: MA Experiment 20000443 PARAMETER Experiment Name: At_1uM_BR-BRZ__P Parameter: Treatment Value: 1uM BRZ vs. No Treatment
  misc_feature: MA Experiment ID: 20000794 Result: Down-regulated in Transcription
  misc_feature: MA Experiment 20000794 PARAMETER Experiment Name: At_Petals_P Parameter: Age (day) Value: 23-25 days
  misc_feature: MA Experiment 20000794 PARAMETER Experiment Name: At_Petals_P Parameter: Plant Line Value: WS
  misc_feature: MA Experiment 20000794 PARAMETER Experiment Name: At_Petals_P Parameter: Tissue Value: Petals vs. Whole plant
  misc_feature: MA Experiment ID: 20001248 Result: Down-regulated in Transcription
  misc_feature: MA Experiment 20001248 PARAMETER Experiment Name: At_Far-red-induction_P Parameter: Age (day) Value: 7
  misc_feature: MA Experiment 20001248 PARAMETER Experiment Name: At_Far-red-induction_P Parameter: Light Value: Far-red vs. White
  misc_feature: MA Experiment 20001248 PARAMETER Experiment Name: At_Far-red-induction_P Parameter: Organism Value: A. thaliana
  misc_feature: MA Experiment 20001248 PARAMETER Experiment Name: At_Far-red-induction_P Parameter: Plant Line Value: Columbia
  misc_feature: MA Experiment 20001248 PARAMETER Experiment Name: At_Far-red-induction_P Parameter: Timepoint (hr) Value: 4
  misc_feature: MA Experiment 20001248 PARAMETER Experiment Name: At_Far-red-induction_P Parameter: Tissue Value: Whole Plant
  misc_feature: MA Experiment ID: 20001450 Result: Down-regulated in Transcription
  misc_feature: MA Experiment 20001450 PARAMETER Experiment Name: At_Far-red-induction_P Parameter: Age (day) Value: 7
  misc_feature: MA Experiment 20001450 PARAMETER Experiment Name: At_Far-red-induction_P Parameter: Light Value: Far-red vs. White
  misc_feature: MA Experiment 20001450 PARAMETER Experiment Name: At_Far-red-induction_P Parameter: Organism Value: A. thaliana
  misc_feature: MA Experiment 20001450 PARAMETER Experiment Name: At_Far-red-induction_P Parameter: Plant Line Value: Columbia
  misc_feature: MA Experiment 20001450 PARAMETER Experiment Name: At_Far-red-induction_P Parameter: Timepoint (hr) Value: 8
  misc_feature: MA Experiment 20001450 PARAMETER Experiment Name: At_Far-red-induction_P Parameter: Tissue Value: Whole Plant
  misc_feature: MA Experiment ID: 20001904 Result: Down-regulated in Transcription
  misc_feature: MA Experiment 20001904 PARAMETER Experiment Name: At_Drought_Reproduction_P Parameter: Age (day) Value: 37
  misc_feature: MA Experiment 20001904 PARAMETER Experiment Name: At_Drought_Reproduction_P Parameter: Organism Value: A. thaliana
  misc_feature: MA Experiment 20001904 PARAMETER Experiment Name: At_Drought_Reproduction_P Parameter: Plant Line Value: WS
  misc_feature: MA Experiment 20001904 PARAMETER Experiment Name: At_Drought_Reproduction_P Parameter: Timepoint (day) Value: 7
  misc_feature: MA Experiment 20001904 PARAMETER Experiment Name: At_Drought_Reproduction_P Parameter: Tissue Value: Rosettes
  misc_feature: MA Experiment 20001904 PARAMETER Experiment Name: At_Drought_Reproduction_P Parameter: Treatment Value: Drought vs. No Drought
  misc_feature: MA Experiment ID: 20001905 Result: Down-regulated in Transcription
  misc_feature: MA Experiment 20001905 PARAMETER Experiment Name: At_Drought_Reproduction_P Parameter: Age (day) Value: 40
  misc_feature: MA Experiment 20001905 PARAMETER Experiment Name: At_Drought_Reproduction_P Parameter: Organism Value: A. thaliana
  misc_feature: MA Experiment 20001905 PARAMETER Experiment Name: At_Drought_Reproduction_P Parameter: Plant Line Value: WS
  misc_feature: MA Experiment 20001905 PARAMETER Experiment Name: At_Drought_Reproduction_P Parameter: Timepoint (day) Value: 10
  misc_feature: MA Experiment 20001905 PARAMETER Experiment Name: At_Drought_Reproduction_P Parameter: Tissue Value: Rosettes
  misc_feature: MA Experiment 20001905 PARAMETER Experiment Name: At_Drought_Reproduction_P Parameter: Treatment Value: Drought vs. No Drought
aacatccaatctctctttatattccttccttccattgtggcaataagtaacaaaccttgccctctacttcattccctccttgttttgatttcatcgtctttgttagctctcctctgtttttttttcttagtcaatcgatggcgaaggagcttgctgataaggctaaagaggctttcgtagacgatgacttcgatgttgctgttgacttgtactccaaagccattgacttggatcctaattgcgctgagttcttcgctgatcgtgctcaggcctatatcaaactcgaaagcttcactgaggccgtggcagatgcgaacaaagcaattgagttggatccttcattgaccaaagcttacctaagaaaaggaactgcctgtatgaagcttgaagagtatcggactgctaaaacagctcttgaaaagggtgcctctatcacgccgagtgaatccaaatttaagaagttgatagatgaatgcaattttctaatcacagaagaagagaaagatttggttcaaccggtgccttcgactttgccttcaagtgtgacagcaccaccagtatctgaacttgatgtcacccctacagccaagtacaggcacgagtactaccaaaagccagaggaagttgtggtaactgtttttgcaaaaggaatacccaagcagaatgttaacatcgactttggtgaacaaattctgagtgttgtgattgaggttcctggagaggatgcgtattatctccaaccgagattgtttggaaagataataccagataagtgcaaatatgaagtattgtcgaccaaaattgagatctgtcttgcaaaagccgatataatcacatgggcctccctcgaacacggcaaagggccagcggttttgccaaagcctaatgtctcatcagaggtttcacagaggccagcttatccatcttctaagaaagttaaggactgggacaagctggaagctgaagtgaagaagcaggaaaaagatgagaagctggaaggagacgcagctttgaacaaattcttccgggagatataccagaatgcggatgaggatatgaggcgagcgatgagcaaatcatttgtggaatcgaatgggacagtgctgtcaacaaactggcaagaggttgggactaagacaatcgagagtactcctccggatggcatggagctcaagaaatgggagatctgatctgatatgatatgatgatcctttcctttttatgcagttgtgaattttgcctaaatgtagacaaatcttgaaacctggtccctttcttcctgtaatgaggatcctaaggtttttgcttttttgttaaatatggctttct

SEQ ID NO: 82837 - protein, 350 aa, Arabidopsis thaliana; identical to SEQ ID NO: 48150
  peptide (1)..(350): Ceres Seq. ID no. 12667530
  misc_feature (150)..(237): Pfam Name: CS domain Pfam Description: CS domain
  misc_feature (1)..(350): Homolog of NCBI NO: 15236528 NR Description: phosphatase like protein; protein id: supported by cDNA: gi_17017307, supported by cDNA: gi_17381043, by cDNA: gi_20465860 [Arabidopsis thaliana]
  misc_feature (1)..(350): Homolog of NCBI NO: 17017308 NR Description: SGT1a [Arabidopsis thaliana]
  misc_feature (1)..(349): Homolog of NCBI NO: 40974915 NR Description: SGT1-like protein [Brassica oleracea]
  misc_feature (1)..(349): Homolog of NCBI NO: 40974917 NR Description: SGT1-like protein [Brassica oleracea]
  misc_feature (1)..(349): Homolog of NCBI NO: 15237122 NR Description: putative protein; protein id: At4g11260.1, by cDNA: 152712., supported by cDNA: gi_13877932, supported by gi_16226817, supported by cDNA: gi_17017309 [Arabidopsis
  misc_feature (78)..(350): Homolog of NCBI NO: 30524966 NR Description: SGT1-like protein [Arabidopsis thaliana]
  misc_feature (1)..(349): Homolog of NCBI NO: 34912836 NR Description: Sgt1 [Oryza sativa (japonica cultivar-group)]
  misc_feature (1)..(349): Homolog of NCBI NO: 6581058 NR Description: Sgt1 [Oryza sativa]
  misc_feature (33)..(350): Homolog of NCBI NO: 6468695 NR Description: putative protein phosphatase [Rubus idaeus]
  misc_feature (2)..(350): Homolog of NCBI NO: 29468339 NR Description: SGT1 [Nicotiana benthamiana]

SEQ ID NO: 82838 - protein, 270 aa, Arabidopsis thaliana; identical to SEQ ID NO: 48151
  peptide (1)..(270): Ceres Seq. ID no. 12667531
  misc_feature (70)..(157): Pfam Name: CS domain Pfam Description: CS domain
  misc_feature (1)..(270): Homolog of NCBI NO: 15236528 NR Description: phosphatase like protein; protein id: supported by cDNA: gi_17017307, supported by cDNA: gi_17381043, by cDNA: gi_20465860 [Arabidopsis thaliana]
  misc_feature (1)..(270): Homolog of NCBI NO: 17017308 NR Description: SGT1a [Arabidopsis thaliana]
  misc_feature (1)..(269): Homolog of NCBI NO: 40974915 NR Description: SGT1-like protein [Brassica oleracea]
  misc_feature (1)..(269): Homolog of NCBI NO: 40974917 NR Description: SGT1-like protein [Brassica oleracea]
  misc_feature (1)..(269): Homolog of NCBI NO: 15237122 NR Description: putative protein; protein id: At4g11260.1, by cDNA: 152712., supported by cDNA: gi_13877932, supported by gi_16226817, supported by cDNA: gi_17017309 [Arabidopsis
  misc_feature (1)..(270): Homolog of NCBI NO: 30524966 NR Description: SGT1-like protein [Arabidopsis thaliana]
  misc_feature (1)..(269): Homolog of NCBI NO: 34912836 NR Description: Sgt1 [Oryza sativa (japonica cultivar-group)]
  misc_feature (1)..(269): Homolog of NCBI NO: 6581058 NR Description: Sgt1 [Oryza sativa]
  misc_feature (1)..(270): Homolog of NCBI NO: 6468695 NR Description: putative protein phosphatase [Rubus idaeus]
  misc_feature (1)..(270): Homolog of NCBI NO: 29468339 NR Description: SGT1 [Nicotiana benthamiana]

SEQ ID NO: 82839 - DNA, 1544 bp, Arabidopsis thaliana
  misc_feature (1)..(1544): Ceres Seq. ID no. 12667532
  misc_feature: MA Experiment ID: 20000307 Result: Up-regulated in Transcription
  misc_feature: MA Experiment 20000307 PARAMETER Experiment Name: At_Germinating_Seeds_Sub_P Parameter: Age (hr) Value: 24 vs. 0
  misc_feature: MA Experiment 20000307 PARAMETER Experiment Name: At_Germinating_Seeds_Sub_P Parameter: Organism Value: A. thaliana
  misc_feature: MA Experiment 20000307 PARAMETER Experiment Name: At_Germinating_Seeds_Sub_P Parameter: Plant Line Value: WS
  misc_feature: MA Experiment 20000307 PARAMETER Experiment Name: At_Germinating_Seeds_Sub_P Parameter: Tissue Value: Germinating Seeds
  misc_feature: MA Experiment ID: 20000348 Result: Up-regulated in Transcription
  misc_feature: MA Experiment 20000348 PARAMETER Experiment Name: At_100uM_ABA_Sub_P Parameter: Age (day) Value: 14
  misc_feature: MA Experiment 20000348 PARAMETER Experiment Name: At_100uM_ABA_Sub_P Parameter: Organism Value: A. thaliana
  misc_feature: MA Experiment 20000348 PARAMETER Experiment Name: At_100uM_ABA_Sub_P Parameter: Plant Line Value: WS
  misc_feature: MA Experiment 20000348 PARAMETER Experiment Name: At_100uM_ABA_Sub_P Parameter: Timepoint (hr) Value: 1
  misc_feature: MA Experiment 20000348 PARAMETER Experiment Name: At_100uM_ABA_Sub_P Parameter: Tissue Value: Aerial
  misc_feature: MA Experiment 20000348 PARAMETER Experiment Name: At_100uM_ABA_Sub_P Parameter: Treatment Value: 100uM ABA vs. No Treatment
  misc_feature: MA Experiment ID: 20000349 Result: Up-regulated in Transcription
  misc_feature: MA Experiment 20000349 PARAMETER Experiment Name: At_100uM_ABA_Sub_P Parameter: Age (day) Value: 14
  misc_feature: MA Experiment 20000349 PARAMETER Experiment Name: At_100uM_ABA_Sub_P Parameter: Organism Value: A. thaliana
  misc_feature: MA Experiment 20000349 PARAMETER Experiment Name: At_100uM_ABA_Sub_P Parameter: Plant Line Value: WS
  misc_feature: MA Experiment 20000349 PARAMETER Experiment Name: At_100uM_ABA_Sub_P Parameter: Timepoint (hr) Value: 6
  misc_feature: MA Experiment 20000349 PARAMETER Experiment Name: At_100uM_ABA_Sub_P Parameter: Tissue Value: Aerial
  misc_feature: MA Experiment 20000349 PARAMETER Experiment Name: At_100uM_ABA_Sub_P Parameter: Treatment Value: 100uM ABA vs. No Treatment
  misc_feature: MA Experiment ID: 20000352 Result: Up-regulated in Transcription
  misc_feature: MA Experiment 20000352 PARAMETER Experiment Name: At_Drought_Sub_P Parameter: Age (day) Value: 7
  misc_feature: MA Experiment 20000352 PARAMETER Experiment Name: At_Drought_Sub_P Parameter: Organism Value: A. thaliana
  misc_feature: MA Experiment 20000352 PARAMETER Experiment Name: At_Drought_Sub_P Parameter: Plant Line Value: WS
  misc_feature: MA Experiment 20000352 PARAMETER Experiment Name: At_Drought_Sub_P Parameter: Timepoint (hr) Value: 6
  misc_feature: MA Experiment 20000352 PARAMETER Experiment Name: At_Drought_Sub_P Parameter: Tissue Value: Whole Plant
  misc_feature: MA Experiment 20000352 PARAMETER Experiment Name: At_Drought_Sub_P Parameter: Treatment Value: Drought vs. No Drought
  misc_feature: MA Experiment ID: 20000355 Result: Down-regulated in Transcription
  misc_feature: MA Experiment 20000355 PARAMETER Experiment Name: At_Siliques_Sub_P Parameter: Age (day) Value: 21
  misc_feature: MA Experiment 20000355 PARAMETER Experiment Name: At_Siliques_Sub_P Parameter: Organism Value: A. thaliana
  misc_feature: MA Experiment 20000355 PARAMETER Experiment Name: At_Siliques_Sub_P Parameter: Plant Line Value: WS
  misc_feature: MA Experiment 20000355 PARAMETER Experiment Name: At_Siliques_Sub_P Parameter: Tissue Value: Less Than 5mm Siliques vs. Whole Plant
acgcaaaaacaatcatctctctataaaaataaaagaagttggttagttccaacgctagagttaagaaatatggctagccaaggatgcgtagattggcagttcagtggcagtgatgcagccgaaaaggccgcccaagcctccctaggcacttactcttctgaaatcttcagtctgtgtgaccctcaaggaaagcctattttgcctccactaagtgaagaggcagagaccagccataccgccgaaaaggcggttgttaaggctgtcctttgcggtacgggaaacgcctatgctccaagtattggcctcccggttgccaaacgtgctgtggcggaatatctaaaccgagatcttgacaataagctaacgggagatgacgtatatatgactgttggatgcaaacaagcaatcgagctcgcggttagtattctggctaaaccgaaagccaacatcttgcttccgaggccaggcttcccatgggacatggtccactctatctacaaacaccttgaggtccgaaggtatgagttcatccctgaaagagactttgagatcgatttcaacagcgttagagagatggtagacgagaacacttttgcgatatttataatcaacccccacaatcccaatgggaactactacactgaggctcatcttaagcagctcgctacattggcacgggaactcgggataatggtcgtttcggatgaagtatatagatggtccgtattcgggagtaatccatttgttccaatggggaaattctcctcgatagtaccagtgattacactcgggtccatatcgaaaggatggattgtcccaggatggcgaacgggctggctcgcgttacacgatctaaatggtgtctttagatccacaaaggtcttaaaagctgcgaaagaatttctggagattacttccaaaccaccaactgtcatccaggcggctattcccacaatcttggagaaaactcctcaagattttttcgagaagagggggatttttctaaaagacaaagtggattttggatattctaagctcaagaacataccaactctcacctgctacatgaaacctgaatcatgcaccttcttatggaccaagctggacccattgcattttgtagacattgaagacgatcacgacttctgcaggaagcttgctaaggaagaaaatctcgttgttttaccaggaattgcatttggtcagaataactggttgaggcattctatcgacatggagactccaagattggaggatgcatttgaaagattaaagagcttctgtgaacgccattccgttatagttgaagcttcttcactcaaagacgtcaatggcgtcaactaaagggtcaatataaatttctttgccttaagtcttttacatatgctataataataaatgtgtgttttattgatatgagatcaatcatgaacacttttgtatctgtaacaaataaaattggtgaatttatcaccatgtcgtgtaatgttttctcatagtttgcaatatttcgatcgatgtatttctacttttcgaaacataag

SEQ ID NO: 82840 - protein, 447 aa, Arabidopsis thaliana
  peptide (1)..(447): Ceres Seq. ID no. 12667533
  misc_feature (111)..(428): Pfam Name: Aminotransferase class I and II Pfam Description: Aminotransferase class I and II
  misc_feature (24)..(447): Homolog of NCBI NO: 22328891 NR Description: tyrosine transaminase like protein; protein id: supported by cDNA: gi_17979318 [Arabidopsis thaliana] putative tyrosine transaminase [Arabidopsis thaliana]
  misc_feature (24)..(365): Homolog of NCBI NO: 7488405 NR Description: tyrosine transaminase homolog F9D16.60 - thaliana >gi|4454028|emb|CAA23025.1| tyrosine transaminase like [Arabidopsis thaliana] >gi|7269207|emb|CAB79314.1| tyrosine
  misc_feature (24)..(446): Homolog of NCBI NO: 15236533 NR Description: tyrosine transaminase like protein; protein id: supported by cDNA: gi_20466689 [Arabidopsis thaliana]
  misc_feature (29)..(447): Homolog of NCBI NO: 28192642 NR Description: cystine lyase BOCL-3 [Brassica oleracea]
  misc_feature (128)..(446): Homolog of NCBI NO: 30686253 NR Description: aminotransferase family [Arabidopsis thaliana]
  misc_feature (17)..(439): Homolog of NCBI NO: 11527943 NR Description: ROOTY/SUPERROOT1 [Arabidopsis thaliana]
  misc_feature (17)..(439): Homolog of NCBI NO: 11527941 NR Description: ROOTY/SUPERROOT1 [Arabidopsis thaliana]
  misc_feature (17)..(439): Homolog of NCBI NO: 15225387 NR Description: putative tyrosine aminotransferase; protein id: supported by cDNA: gi_11527938, supported by cDNA: gi_11527940,
  misc_feature (17)..(439): Homolog of NCBI NO: 15809874 NR Description: At2g20610/F23N11.7 [Arabidopsis thaliana]
  misc_feature (32)..(440): Homolog of NCBI NO: 15224631 NR Description: putative tyrosine aminotransferase; protein id: supported by cDNA: 14570. [Arabidopsis thaliana]
TQKQSSLYKNKRSWLVPTLELRNMASQGCVDWQFSGSDAAEKAAQASLGTYSSEIFSLCDPQGKPILPPLSEEAETSHTAEKAVVKAVLCGTGNAYAPSIGLPVAKRAVAEYLNRDLDNKLTGDDVYMTVGCKQAIELAVSILAKPKANILLPRPGFPWDMVHSIYKHLEVRRYEFIPERDFEIDFNSVREMVDENTFAIFIINPHNPNGNYYTEAHLKQLATLARELGIMVVSDEVYRWSVFGSNPFVPMGKFSSIVPVITLGSISKGWIVPGWRTGWLALHDLNGVFRSTKVLKAAKEFLEITSKPPTVIQAAIPTILEKTPQDFFEKRGIFLKDKVDFGYSKLKNIPTLTCYMKPESCTFLWTKLDPLHFVDIEDDHDFCRKLAKEENLVVLPGIAFGQNNWLRHSIDMETPRLEDAFERLKSFCERHSVIVEASSLKDVNGVN

SEQ ID NO: 82841 - protein, 424 aa, Arabidopsis thaliana
  peptide (1)..(424): Ceres Seq. ID no. 12667534
  misc_feature (88)..(405): Pfam Name: Aminotransferase class I and II Pfam Description: Aminotransferase class I and II
  misc_feature (1)..(424): Homolog of NCBI NO: 22328891 NR Description: tyrosine transaminase like protein; protein id: supported by cDNA: gi_17979318 [Arabidopsis thaliana] putative tyrosine transaminase [Arabidopsis thaliana]
  misc_feature (1)..(342): Homolog of NCBI NO: 7488405 NR Description: tyrosine transaminase homolog F9D16.60 - thaliana >gi|4454028|emb|CAA23025.1| tyrosine transaminase like [Arabidopsis thaliana] >gi|7269207|emb|CAB79314.1| tyrosine
  misc_feature (1)..(423): Homolog of NCBI NO: 15236533 NR Description: tyrosine transaminase like protein; protein id: supported by cDNA: gi_20466689 [Arabidopsis thaliana]
  misc_feature (6)..(424): Homolog of NCBI NO: 28192642 NR Description: cystine lyase BOCL-3 [Brassica oleracea]
  misc_feature (105)..(423): Homolog of NCBI NO: 30686253 NR Description: aminotransferase family [Arabidopsis thaliana]
  misc_feature (1)..(416): Homolog of NCBI NO: 11527943 NR Description: ROOTY/SUPERROOT1 [Arabidopsis thaliana]
  misc_feature (1)..(416): Homolog of NCBI NO: 11527941 NR Description: ROOTY/SUPERROOT1 [Arabidopsis thaliana]
  misc_feature (1)..(416): Homolog of NCBI NO: 15225387 NR Description: putative tyrosine aminotransferase; protein id: supported by cDNA: gi_11527938, supported by cDNA: gi_11527940,
  misc_feature (1)..(416): Homolog of NCBI NO: 15809874 NR Description: At2g20610/F23N11.7 [Arabidopsis thaliana]
  misc_feature (9)..(417): Homolog of NCBI NO: 15224631 NR Description: putative tyrosine aminotransferase; protein id: supported by cDNA: 14570. [Arabidopsis thaliana]
MASQGCVDWQFSGSDAAEKAAQASLGTYSSEIFSLCDPQGKPILPPLSEEAETSHTAEKAVVKAVLCGTGNAYAPSIGLPVAKRAVAEYLNRDLDNKLTGDDVYMTVGCKQAIELAVSILAKPKANILLPRPGFPWDMVHSIYKHLEVRRYEFIPERDFEIDFNSVREMVDENTFAIFIINPHNPNGNYYTEAHLKQLATLARELGIMVVSDEVYRWSVFGSNPFVPMGKFSSIVPVITLGSISKGWIVPGWRTGWLALHDLNGVFRSTKVLKAAKEFLEITSKPPTVIQAAIPTILEKTPQDFFEKRGIFLKDKVDFGYSKLKNIPTLTCYMKPESCTFLWTKLDPLHFVDIEDDHDFCRKLAKEENLVVLPGIAFGQNNWLRHSIDMETPRLEDAFERLKSFCERHSVIVEASSLKDVNGVN

SEQ ID NO: 82842 - protein, 320 aa, Arabidopsis thaliana
  peptide (1)..(320): Ceres Seq. ID no. 12667535
  misc_feature (1)..(301): Pfam Name: Aminotransferase class I and II Pfam Description: Aminotransferase class I and II
  misc_feature (1)..(320): Homolog of NCBI NO: 22328891 NR Description: tyrosine transaminase like protein; protein id: supported by cDNA: gi_17979318 [Arabidopsis thaliana] putative tyrosine transaminase [Arabidopsis thaliana]
  misc_feature (1)..(238): Homolog of NCBI NO: 7488405 NR Description: tyrosine transaminase homolog F9D16.60 - thaliana >gi|4454028|emb|CAA23025.1| tyrosine transaminase like [Arabidopsis thaliana] >gi|7269207|emb|CAB79314.1| tyrosine
  misc_feature (1)..(319): Homolog of NCBI NO: 15236533 NR Description: tyrosine transaminase like protein; protein id: supported by cDNA: gi_20466689 [Arabidopsis thaliana]
  misc_feature (1)..(320): Homolog of NCBI NO: 28192642 NR Description: cystine lyase BOCL-3 [Brassica oleracea]
  misc_feature (1)..(319): Homolog of NCBI NO: 30686253 NR Description: aminotransferase family [Arabidopsis thaliana]
  misc_feature (1)..(312): Homolog of NCBI NO: 11527943 NR Description: ROOTY/SUPERROOT1 [Arabidopsis thaliana]
  misc_feature (1)..(312): Homolog of NCBI NO: 11527941 NR Description: ROOTY/SUPERROOT1 [Arabidopsis thaliana]
  misc_feature (1)..(312): Homolog of NCBI NO: 15225387 NR Description: putative tyrosine aminotransferase; protein id: supported by cDNA: gi_11527938, supported by cDNA: gi_11527940,
  misc_feature (1)..(312): Homolog of NCBI NO: 15809874 NR Description: At2g20610/F23N11.7 [Arabidopsis thaliana]
  misc_feature (1)..(313): Homolog of NCBI NO: 15224631 NR Description: putative tyrosine aminotransferase; protein id: supported by cDNA: 14570. [Arabidopsis thaliana]
MTVGCKQAIELAVSILAKPKANILLPRPGFPWDMVHSIYKHLEVRRYEFIPERDFEIDFNSVREMVDENTFAIFIINPHNPNGNYYTEAHLKQLATLARELGIMVVSDEVYRWSVFGSNPFVPMGKFSSIVPVITLGSISKGWIVPGWRTGWLALHDLNGVFRSTKVLKAAKEFLEITSKPPTVIQAAIPTILEKTPQDFFEKRGIFLKDKVDFGYSKLKNIPTLTCYMKPESCTFLWTKLDPLHFVDIEDDHDFCRKLAKEENLVVLPGIAFGQNNWLRHSIDMETPRLEDAFERLKSFCERHSVIVEASSLKDVNGVN

SEQ ID NO: 82843 - DNA, 1328 bp, Arabidopsis thaliana
  misc_feature (1)..(1328): Ceres Seq. ID no. 12667555
  misc_feature: MA Experiment ID: 20000169 Result: Up-regulated in Transcription
  misc_feature: MA Experiment 20000169 PARAMETER Experiment Name: At_100uM_ABA_P Parameter: Age (day) Value: 14
  misc_feature: MA Experiment 20000169 PARAMETER Experiment Name: At_100uM_ABA_P Parameter: Organism Value: A. thaliana
  misc_feature: MA Experiment 20000169 PARAMETER Experiment Name: At_100uM_ABA_P Parameter: Plant Line Value: WS
  misc_feature: MA Experiment 20000169 PARAMETER Experiment Name: At_100uM_ABA_P Parameter: Timepoint (hr) Value: 6
  misc_feature: MA Experiment 20000169 PARAMETER Experiment Name: At_100uM_ABA_P Parameter: Tissue Value: Aerial
  misc_feature: MA Experiment 20000169 PARAMETER Experiment Name: At_100uM_ABA_P Parameter: Treatment Value: 100uM ABA vs. No Treatment
  misc_feature: MA Experiment ID: 20000171 Result: Down-regulated in Transcription
  misc_feature: MA Experiment 20000171 PARAMETER Experiment Name: At_42deg_Heat_P Parameter: Age (day) Value: 14
  misc_feature: MA Experiment 20000171 PARAMETER Experiment Name: At_42deg_Heat_P Parameter: Organism Value: A. thaliana
  misc_feature: MA Experiment 20000171 PARAMETER Experiment Name: At_42deg_Heat_P Parameter: Plant Line Value: WS
  misc_feature: MA Experiment 20000171 PARAMETER Experiment Name: At_42deg_Heat_P Parameter: Temperature (deg C) Value: 42 vs. 22
  misc_feature: MA Experiment 20000171 PARAMETER Experiment Name: At_42deg_Heat_P Parameter: Timepoint (hr) Value: 1
  misc_feature: MA Experiment 20000171 PARAMETER Experiment Name: At_42deg_Heat_P Parameter: Tissue Value: Aerial
  misc_feature: MA Experiment ID: 20000173 Result: Down-regulated in Transcription
  misc_feature: MA Experiment 20000173 PARAMETER Experiment Name: At_42deg_Heat_P Parameter: Age (day) Value: 14
  misc_feature: MA Experiment 20000173 PARAMETER Experiment Name: At_42deg_Heat_P Parameter: Organism Value: A. thaliana
  misc_feature: MA Experiment 20000173 PARAMETER Experiment Name: At_42deg_Heat_P Parameter: Plant Line Value: WS
  misc_feature: MA Experiment 20000173 PARAMETER Experiment Name: At_42deg_Heat_P Parameter: Temperature (deg C) Value: 42 vs. 22
  misc_feature: MA Experiment 20000173 PARAMETER Experiment Name: At_42deg_Heat_P Parameter: Timepoint (hr) Value: 6
  misc_feature: MA Experiment 20000173 PARAMETER Experiment Name: At_42deg_Heat_P Parameter: Tissue Value: Aerial
  misc_feature: MA Experiment ID: 20000182 Result: Up-regulated in Transcription
  misc_feature: MA Experiment 20000182 PARAMETER Experiment Name: At_2mM_SA_P Parameter: Age (day) Value: 14
  misc_feature: MA Experiment 20000182 PARAMETER Experiment Name: At_2mM_SA_P Parameter: Organism Value: A. thaliana
  misc_feature: MA Experiment 20000182 PARAMETER Experiment Name: At_2mM_SA_P Parameter: Plant Line Value: WS
  misc_feature: MA Experiment 20000182 PARAMETER Experiment Name: At_2mM_SA_P Parameter: Timepoint (hr) Value: 6
  misc_feature: MA Experiment 20000182 PARAMETER Experiment Name: At_2mM_SA_P Parameter: Tissue Value: Aerial
  misc_feature: MA Experiment 20000182 PARAMETER Experiment Name: At_2mM_SA_P Parameter: Treatment Value: 2mM SA vs. No Treatment
  misc_feature: MA Experiment ID: 20000184 Result: Down-regulated in Transcription
  misc_feature: MA Experiment 20000184 PARAMETER Experiment Name: At_Shoots__P Parameter: Age (day) Value: 7
  misc_feature: MA Experiment 20000184 PARAMETER Experiment Name: At_Shoots__P Parameter: Tissue Value: Shoots vs. Whole Plant
  misc_feature: MA Experiment ID: 20000185 Result: Down-regulated in Transcription
  misc_feature: MA Experiment 20000185 PARAMETER Experiment Name: At_Roots__P Parameter: Age (day) Value: 7 vs. 21
  misc_feature: MA Experiment 20000185 PARAMETER Experiment Name: At_Roots__P Parameter: Organism Value: A. thaliana
  misc_feature: MA Experiment 20000185 PARAMETER Experiment Name: At_Roots__P Parameter: Tissue Value: Roots vs. Whole Plant
  misc_feature: MA Experiment ID: 20000211 Result: Down-regulated in Transcription
  misc_feature: MA Experiment 20000211 PARAMETER Experiment Name: At_0.001percent_MeJA__P Parameter: Age (day) Value: 14
  misc_feature: MA Experiment 20000211 PARAMETER Experiment Name: At_0.001percent_MeJA__P Parameter: Organism Value: A. thaliana
  misc_feature: MA Experiment 20000211 PARAMETER Experiment Name: At_0.001percent_MeJA__P Parameter: Plant Line Value: WS
  misc_feature: MA Experiment 20000211 PARAMETER Experiment Name: At_0.001percent_MeJA__P Parameter: Timepoint (hr) Value: 1
  misc_feature: MA Experiment 20000211 PARAMETER Experiment Name: At_0.001percent_MeJA__P Parameter: Tissue Value: Aerial
  misc_feature: MA Experiment 20000211 PARAMETER Experiment Name: At_0.001percent_MeJA__P Parameter: Treatment Value: 0.001percent MeJA vs. No Treatment
  misc_feature: MA Experiment ID: 20000227 Result: Up-regulated in Transcription
  misc_feature: MA Experiment 20000227 PARAMETER Experiment Name: At_Root-Tips-vs-Tops_P Parameter: Tissue Value: Root Tips vs. Root Tops
  misc_feature: MA Experiment ID: 20000234 Result: Down-regulated in Transcription
  misc_feature: MA Experiment 20000234 PARAMETER Experiment Name: At_Siliques_P Parameter: Age (day) Value: 21
  misc_feature: MA Experiment 20000234 PARAMETER Experiment Name: At_Siliques_P Parameter: Organism Value: A. thaliana
  misc_feature: MA Experiment 20000234 PARAMETER Experiment Name: At_Siliques_P Parameter: Plant Line Value: WS
  misc_feature: MA Experiment 20000234 PARAMETER Experiment Name: At_Siliques_P Parameter: Tissue Value: Less Than 5mm Siliques vs. Whole Plant
  misc_feature: MA Experiment ID: 20000235 Result: Down-regulated in Transcription
  misc_feature: MA Experiment 20000235 PARAMETER Experiment Name: At_Siliques_P Parameter: Age (day) Value: 21
  misc_feature: MA Experiment 20000235 PARAMETER Experiment Name: At_Siliques_P Parameter: Organism Value: A. thaliana
  misc_feature: MA Experiment 20000235 PARAMETER Experiment Name: At_Siliques_P Parameter: Plant Line Value: WS
  misc_feature: MA Experiment 20000235 PARAMETER Experiment Name: At_Siliques_P Parameter: Tissue Value: 5-10mm Siliques vs. Whole Plant
  misc_feature: MA Experiment ID: 20000264 Result: Down-regulated in Transcription
  misc_feature: MA Experiment 20000264 PARAMETER Experiment Name: At_Open_Flower_P Parameter: Age (day) Value: 21
  misc_feature: MA Experiment 20000264 PARAMETER Experiment Name: At_Open_Flower_P Parameter: Plant Line Value: WS
  misc_feature: MA Experiment 20000264 PARAMETER Experiment Name: At_Open_Flower_P Parameter: Tissue Value: Open Flower vs. Whole Plant
  misc_feature: MA Experiment ID: 20000265 Result: Down-regulated in Transcription
  misc_feature: MA Experiment 20000265 PARAMETER Experiment Name: At_Open_Flower_P Parameter: Age (day) Value: 21
  misc_feature: MA Experiment 20000265 PARAMETER Experiment Name: At_Open_Flower_P Parameter: Plant Line Value: WS
  misc_feature: MA Experiment 20000265 PARAMETER Experiment Name: At_Open_Flower_P Parameter: Tissue Value: Closed Flower vs. Whole Plant
  misc_feature: MA Experiment ID: 20000267 Result: Up-regulated in Transcription
  misc_feature: MA Experiment 20000267 PARAMETER Experiment Name: At_Drought_P Parameter: Age (day) Value: 7
  misc_feature: MA Experiment 20000267 PARAMETER Experiment Name: At_Drought_P Parameter: Organism Value: A. thaliana
  misc_feature: MA Experiment 20000267 PARAMETER Experiment Name: At_Drought_P Parameter: Plant Line Value: WS
  misc_feature: MA Experiment 20000267 PARAMETER Experiment Name: At_Drought_P Parameter: Timepoint (hr) Value: 6
  misc_feature: MA Experiment 20000267 PARAMETER Experiment Name: At_Drought_P Parameter: Tissue Value: Whole Plant
  misc_feature: MA Experiment 20000267 PARAMETER Experiment Name: At_Drought_P Parameter: Treatment Value: Drought vs. No Drought
  misc_feature: MA Experiment ID: 20000286 Result: Down-regulated in Transcription
  misc_feature: MA Experiment 20000286 PARAMETER Experiment Name: At_Open_Flower_P Parameter: Age (day) Value: 21
  misc_feature: MA Experiment 20000286 PARAMETER Experiment Name: At_Open_Flower_P Parameter: Plant Line Value: WS
  misc_feature: MA Experiment 20000286 PARAMETER Experiment Name: At_Open_Flower_P Parameter: Tissue Value: Half Open vs. Whole Plant
  misc_feature: MA Experiment ID: 20000288 Result: Up-regulated in Transcription
  misc_feature: MA Experiment 20000288 PARAMETER Experiment Name: At_Drought_P Parameter: Age (day) Value: 7
  misc_feature: MA Experiment 20000288 PARAMETER Experiment Name: At_Drought_P Parameter: Organism Value: A. thaliana
  misc_feature: MA Experiment 20000288 PARAMETER Experiment Name: At_Drought_P Parameter: Plant Line Value: WS
  misc_feature: MA Experiment 20000288 PARAMETER Experiment Name: At_Drought_P Parameter: Timepoint (hr) Value: 1
  misc_feature: MA Experiment 20000288 PARAMETER Experiment Name: At_Drought_P Parameter: Tissue Value: Whole Plant
  misc_feature: MA Experiment 20000288 PARAMETER Experiment Name: At_Drought_P Parameter: Treatment Value: Drought vs. No Drought
  misc_feature: MA Experiment ID: 20000438 Result: Down-regulated in Transcription
  misc_feature: MA Experiment 20000438 PARAMETER Experiment Name: At_Shoots__P Parameter: Age (day) Value: 14
  misc_feature: MA Experiment 20000438 PARAMETER Experiment Name: At_Shoots__P Parameter: Tissue Value: Shoots vs. Whole Plant
  misc_feature: MA Experiment ID: 20000439 Result: Down-regulated in Transcription
  misc_feature: MA Experiment 20000439 PARAMETER Experiment Name: At_Roots__P Parameter: Age (day) Value: 14 vs. 21
  misc_feature: MA Experiment 20000439 PARAMETER Experiment Name: At_Roots__P Parameter: Organism Value: A. thaliana
  misc_feature: MA Experiment 20000439 PARAMETER Experiment Name: At_Roots__P Parameter: Tissue Value: Roots vs. Whole Plant
  misc_feature: MA Experiment ID: 20000441 Result: Up-regulated in Transcription
  misc_feature: MA Experiment 20000441 PARAMETER Experiment Name: At_1uM_BR-BRZ__P Parameter: Tissue Value: Shoot Apices
  misc_feature: MA Experiment 20000441 PARAMETER Experiment Name: At_1uM_BR-BRZ__P Parameter: Treatment Value: 1uM BR vs. No Treatment
  misc_feature: MA Experiment ID: 20000443 Result: Up-regulated in Transcription
  misc_feature: MA Experiment 20000443 PARAMETER Experiment Name: At_1uM_BR-BRZ__P Parameter: Tissue Value: Shoot Apices
  misc_feature: MA Experiment 20000443 PARAMETER Experiment Name: At_1uM_BR-BRZ__P Parameter: Treatment Value: 1uM BRZ vs. No Treatment
  misc_feature: MA Experiment ID: 20000445 Result: Up-regulated in Transcription
  misc_feature: MA Experiment 20000445 PARAMETER Experiment Name: At_100uM_NAA__P Parameter: Age (day) Value: 14
  misc_feature: MA Experiment 20000445 PARAMETER Experiment Name: At_100uM_NAA__P Parameter: Organism Value: A. thaliana
  misc_feature: MA Experiment 20000445 PARAMETER Experiment Name: At_100uM_NAA__P Parameter: Plant Line Value: WS
  misc_feature: MA Experiment 20000445 PARAMETER Experiment Name: At_100uM_NAA__P Parameter: Timepoint (hr) Value: 6
  misc_feature: MA Experiment 20000445 PARAMETER Experiment Name: At_100uM_NAA__P Parameter: Tissue Value: Aerial
  misc_feature: MA Experiment 20000445 PARAMETER Experiment Name: At_100uM_NAA__P Parameter: Treatment Value: 100uM NAA vs. No Treatment
  misc_feature: MA Experiment ID: 20000460 Result: Up-regulated in Transcription
  misc_feature: MA Experiment 20000460 PARAMETER Experiment Name: At_10percent_PEG_P Parameter: Age (day) Value: 12
  misc_feature: MA Experiment 20000460 PARAMETER Experiment Name: At_10percent_PEG_P Parameter: Organism Value: A. thaliana
  misc_feature: MA Experiment 20000460 PARAMETER Experiment Name: At_10percent_PEG_P Parameter: Plant Line Value: WS
  misc_feature: MA Experiment 20000460 PARAMETER Experiment Name: At_10percent_PEG_P Parameter: Timepoint (day) Value: 12
  misc_feature: MA Experiment 20000460 PARAMETER Experiment Name: At_10percent_PEG_P Parameter: Tissue Value: Whole Plant
  misc_feature: MA Experiment 20000460 PARAMETER Experiment Name: At_10percent_PEG_P Parameter: Treatment Value: 10percent PEG vs. No Treatment
  misc_feature: MA Experiment ID: 20000495 Result: Down-regulated in Transcription
  misc_feature: MA Experiment 20000495 PARAMETER Experiment Name: At_Guard_Cells_P Parameter: Harvest Date Value: 8/2/2002
  misc_feature: MA Experiment 20000495 PARAMETER Experiment Name: At_Guard_Cells_P Parameter: Organism Value: A. thaliana
  misc_feature: MA Experiment 20000495 PARAMETER Experiment Name: At_Guard_Cells_P Parameter: Tissue Value: Guard Cells vs. Leaves
  misc_feature: MA Experiment ID: 20000496 Result: Down-regulated in Transcription
  misc_feature: MA Experiment 20000496 PARAMETER Experiment Name: At_Guard_Cells_P Parameter: Harvest Date Value: 7/19/2002
  misc_feature: MA Experiment 20000496 PARAMETER Experiment Name: At_Guard_Cells_P Parameter: Organism Value: Canola
  misc_feature: MA Experiment 20000496 PARAMETER Experiment Name: At_Guard_Cells_P Parameter: Tissue Value: Guard Cells vs. Leaves
  misc_feature: MA Experiment ID: 20000573 Result: Down-regulated in Transcription
  misc_feature: MA Experiment 20000573 PARAMETER Experiment Name: At_100uM_ABA_Mutants__P Parameter: Organism Value: A. thaliana
  misc_feature: MA Experiment 20000573 PARAMETER Experiment Name: At_100uM_ABA_Mutants__P Parameter: Plant Line Value: CS22 vs. Ler wt
  misc_feature: MA Experiment 20000573 PARAMETER Experiment Name: At_100uM_ABA_Mutants__P Parameter: Timepoint (hr) Value: N/A
  misc_feature: MA Experiment 20000573 PARAMETER Experiment Name: At_100uM_ABA_Mutants__P Parameter: Tissue Value: Whole Plant
  misc_feature: MA Experiment 20000573 PARAMETER Experiment Name: At_100uM_ABA_Mutants__P Parameter: Treatment Value: None
  misc_feature: MA Experiment ID: 20000574 Result: Down-regulated in Transcription
  misc_feature: MA Experiment 20000574 PARAMETER Experiment Name: At_100uM_ABA_Mutants__P Parameter: Organism Value: A. thaliana
  misc_feature: MA Experiment 20000574 PARAMETER Experiment Name: At_100uM_ABA_Mutants__P Parameter: Plant Line Value: CS23 vs. Ler wt
  misc_feature: MA Experiment 20000574 PARAMETER Experiment Name: At_100uM_ABA_Mutants__P Parameter: Timepoint (hr) Value: N/A
  misc_feature: MA Experiment 20000574 PARAMETER Experiment Name: At_100uM_ABA_Mutants__P Parameter: Tissue Value: Whole Plant
  misc_feature: MA Experiment 20000574 PARAMETER Experiment Name: At_100uM_ABA_Mutants__P Parameter: Treatment Value: None
  misc_feature: MA Experiment ID: 20000709 Result: Down-regulated in Transcription
  misc_feature: MA Experiment 20000709 PARAMETER Experiment Name: At_15mM_NH4NO3_L-to-H_P Parameter: Age (hr) Value: 14
  misc_feature: MA Experiment 20000709 PARAMETER Experiment Name: At_15mM_NH4NO3_L-to-H_P Parameter: Organism Value: A. thaliana
  misc_feature: MA Experiment 20000709 PARAMETER Experiment Name: At_15mM_NH4NO3_L-to-H_P Parameter: Plant Line Value: WS
  misc_feature: MA Experiment 20000709 PARAMETER Experiment Name: At_15mM_NH4NO3_L-to-H_P Parameter: Timepoint (hr) Value: 4
  misc_feature: MA Experiment 20000709 PARAMETER Experiment Name: At_15mM_NH4NO3_L-to-H_P Parameter: Tissue Value: Aerial
  misc_feature: MA Experiment 20000709 PARAMETER Experiment Name: At_15mM_NH4NO3_L-to-H_P Parameter: Treatment Value: 15mM NH4NO3 vs. 30mM Mannitol
  misc_feature: MA Experiment ID: 20000794 Result: Down-regulated in Transcription
  misc_feature: MA Experiment 20000794 PARAMETER Experiment Name: At_Petals_P Parameter: Age (day) Value: 23-25 days
  misc_feature: MA Experiment 20000794 PARAMETER Experiment Name: At_Petals_P Parameter: Plant Line Value: WS
  misc_feature: MA Experiment 20000794 PARAMETER Experiment Name: At_Petals_P Parameter: Tissue Value: Petals vs. Whole plant
  misc_feature: MA Experiment ID: 20001554 Result: Down-regulated in Transcription
  misc_feature: MA Experiment 20001554 PARAMETER Experiment Name: At_Drought_Soil_Dry_P Parameter: Age (day) Value: 21
  misc_feature: MA Experiment 20001554 PARAMETER Experiment Name: At_Drought_Soil_Dry_P Parameter: Organism Value: A. thaliana
  misc_feature: MA Experiment 20001554 PARAMETER Experiment Name: At_Drought_Soil_Dry_P Parameter: Plant Line Value: WS
  misc_feature: MA Experiment 20001554 PARAMETER Experiment Name: At_Drought_Soil_Dry_P Parameter: Post Timepoint (hr) Value: None
  misc_feature: MA Experiment 20001554 PARAMETER Experiment Name: At_Drought_Soil_Dry_P Parameter: Post-Treatment Value: None
  misc_feature: MA Experiment 20001554 PARAMETER Experiment Name: At_Drought_Soil_Dry_P Parameter: Timepoint (day) Value: 7
  misc_feature: MA Experiment 20001554 PARAMETER Experiment Name: At_Drought_Soil_Dry_P Parameter: Treatment Value: Drought vs. No Drought
  misc_feature: MA Experiment ID: 20001555 Result: Down-regulated in Transcription
  misc_feature: MA Experiment 20001555 PARAMETER Experiment Name: At_Drought_Soil_Dry_P Parameter: Age (day) Value: 24
  misc_feature: MA Experiment 20001555 PARAMETER Experiment Name: At_Drought_Soil_Dry_P Parameter: Organism Value: A. thaliana
  misc_feature: MA Experiment 20001555 PARAMETER Experiment Name: At_Drought_Soil_Dry_P Parameter: Plant Line Value: WS
  misc_feature: MA Experiment 20001555 PARAMETER Experiment Name: At_Drought_Soil_Dry_P Parameter: Post Timepoint (hr) Value: None
  misc_feature: MA Experiment 20001555 PARAMETER Experiment Name: At_Drought_Soil_Dry_P Parameter: Post-Treatment Value: None
  misc_feature: MA Experiment 20001555 PARAMETER Experiment Name: At_Drought_Soil_Dry_P Parameter: Timepoint (day) Value: 10
  misc_feature: MA Experiment 20001555 PARAMETER Experiment Name: At_Drought_Soil_Dry_P Parameter: Treatment Value: Drought vs. No Drought
  misc_feature: MA Experiment ID: 20001556 Result: Down-regulated in Transcription
  misc_feature: MA Experiment 20001556 PARAMETER Experiment Name: At_Drought_Soil_Dry_P Parameter: Age (day) Value: 26
  misc_feature: MA Experiment 20001556 PARAMETER Experiment Name: At_Drought_Soil_Dry_P Parameter: Organism Value: A. thaliana
  misc_feature: MA Experiment 20001556 PARAMETER Experiment Name: At_Drought_Soil_Dry_P Parameter: Plant Line Value: WS
  misc_feature: MA Experiment 20001556 PARAMETER Experiment Name: At_Drought_Soil_Dry_P Parameter: Post Timepoint (hr) Value: None
  misc_feature: MA Experiment 20001556 PARAMETER Experiment Name: At_Drought_Soil_Dry_P Parameter: Post-Treatment Value: None
  misc_feature: MA Experiment 20001556 PARAMETER Experiment Name: At_Drought_Soil_Dry_P Parameter: Timepoint (day) Value: 12
  misc_feature: MA Experiment 20001556 PARAMETER Experiment Name: At_Drought_Soil_Dry_P Parameter: Treatment Value: Drought vs. No Drought
  misc_feature: MA Experiment ID: 20001755 Result: Up-regulated in Transcription
  misc_feature: MA Experiment 20001755 PARAMETER Experiment Name: At_50mM_NH4NO3_L-to-H_P Parameter: Timepoint (hr) Value: 2
  misc_feature: MA Experiment 20001755 PARAMETER Experiment Name: At_50mM_NH4NO3_L-to-H_P Parameter: Tissue Value: Leaf
  misc_feature: MA Experiment 20001755 PARAMETER Experiment Name: At_50mM_NH4NO3_L-to-H_P Parameter: Treatment Value: 50mM NH4NO3 vs 100mM Mannitol
  misc_feature: MA Experiment ID: 20001773 Result: Down-regulated in Transcription
  misc_feature: MA Experiment 20001773 PARAMETER Experiment Name: At_Far-red-enriched-adult_P Parameter: Age (day) Value: 30
  misc_feature: MA Experiment 20001773 PARAMETER Experiment Name: At_Far-red-enriched-adult_P Parameter: Light Value: Far-red enriched vs. White
  misc_feature: MA Experiment 20001773 PARAMETER Experiment Name: At_Far-red-enriched-adult_P Parameter: Organism Value: A. thaliana
  misc_feature: MA Experiment 20001773 PARAMETER Experiment Name: At_Far-red-enriched-adult_P Parameter: Plant Line Value: Columbia
  misc_feature: MA Experiment 20001773 PARAMETER Experiment Name: At_Far-red-enriched-adult_P Parameter: Timepoint (hr) Value: 48
  misc_feature: MA Experiment 20001773 PARAMETER Experiment Name: At_Far-red-enriched-adult_P Parameter: Tissue Value: Aerial
  misc_feature: MA Experiment ID: 20001904 Result: Down-regulated in Transcription
  misc_feature: MA Experiment 20001904 PARAMETER Experiment Name: At_Drought_Reproduction_P Parameter: Age (day) Value: 37
  misc_feature: MA Experiment 20001904 PARAMETER Experiment Name: At_Drought_Reproduction_P Parameter: Organism Value: A. thaliana
  misc_feature: MA Experiment 20001904 PARAMETER Experiment Name: At_Drought_Reproduction_P Parameter: Plant Line Value: WS
  misc_feature: MA Experiment 20001904 PARAMETER Experiment Name: At_Drought_Reproduction_P Parameter: Timepoint (day) Value: 7
  misc_feature: MA Experiment 20001904 PARAMETER Experiment Name: At_Drought_Reproduction_P Parameter: Tissue Value: Rosettes
  misc_feature: MA Experiment 20001904 PARAMETER Experiment Name: At_Drought_Reproduction_P Parameter: Treatment Value: Drought vs. No Drought
  misc_feature: MA Experiment ID: 20001905 Result: Down-regulated in Transcription
  misc_feature: MA Experiment 20001905 PARAMETER Experiment Name: At_Drought_Reproduction_P Parameter: Age (day) Value: 40
  misc_feature: MA Experiment 20001905 PARAMETER Experiment Name: At_Drought_Reproduction_P Parameter: Organism Value: A. thaliana
  misc_feature: MA Experiment 20001905 PARAMETER Experiment Name: At_Drought_Reproduction_P Parameter: Plant Line Value: WS
  misc_feature: MA Experiment 20001905 PARAMETER Experiment Name: At_Drought_Reproduction_P Parameter: Timepoint (day) Value: 10
  misc_feature: MA Experiment 20001905 PARAMETER Experiment Name: At_Drought_Reproduction_P Parameter: Tissue Value: Rosettes
  misc_feature: MA Experiment 20001905 PARAMETER Experiment Name: At_Drought_Reproduction_P Parameter: Treatment Value: Drought vs. No Drought
  misc_feature: MA Experiment ID: 20001907 Result: Down-regulated in Transcription
  misc_feature: MA Experiment 20001907 PARAMETER Experiment Name: At_Drought_Reproduction_P Parameter: Age (day) Value: 37
  misc_feature: MA Experiment 20001907 PARAMETER Experiment Name: At_Drought_Reproduction_P Parameter: Organism Value: A. thaliana
  misc_feature: MA Experiment 20001907 PARAMETER Experiment Name: At_Drought_Reproduction_P Parameter: Plant Line Value: WS
  misc_feature: MA Experiment 20001907 PARAMETER Experiment Name: At_Drought_Reproduction_P Parameter: Timepoint (day) Value: 7
  misc_feature: MA Experiment 20001907 PARAMETER Experiment Name: At_Drought_Reproduction_P Parameter: Tissue Value: Siliques
  misc_feature: MA Experiment 20001907 PARAMETER Experiment Name: At_Drought_Reproduction_P Parameter: Treatment Value: Drought vs. No Drought
  misc_feature: MA Experiment ID: 20001910 Result: Down-regulated in Transcription
  misc_feature: MA Experiment 20001910 PARAMETER Experiment Name: At_Drought_Reproduction_P Parameter: Age (day) Value: 37
  misc_feature: MA Experiment 20001910 PARAMETER Experiment Name: At_Drought_Reproduction_P Parameter: Organism Value: A. thaliana
  misc_feature: MA Experiment 20001910 PARAMETER Experiment Name: At_Drought_Reproduction_P Parameter: Plant Line Value: WS
  misc_feature: MA Experiment 20001910 PARAMETER Experiment Name: At_Drought_Reproduction_P Parameter: Timepoint (day) Value: 7
  misc_feature: MA Experiment 20001910 PARAMETER Experiment Name: At_Drought_Reproduction_P Parameter: Tissue Value: Flowers
  misc_feature: MA Experiment 20001910 PARAMETER Experiment Name: At_Drought_Reproduction_P Parameter: Treatment Value: Drought vs. No Drought
ctatataacccattcttaattatactcaacacacattatatttttctgatcatatcattctttcagtccatctatataaccaattcttgatttatacttaaaacacacattatacatctttctcatcatagtttgtatcaatttcctagagtaaactacctaaaggaaaaaaaaaatctattttgggaatcatatactaaaaatggaaggaagagatatgttaagttgggagcaaaagacattgctaagcgagcttatcaatggatttgatgcggccaaaaagcttcaggcacgacttagagaagctccgtcgccgtcgtcatcattttcatcaccggcgacggctgttgctgagactaacgagattctggtgaagcagatagtttcttcctacgagagatctcttcttctgctaaactggtcatcctcaccgagcgtacaacttattccgacgccggttactgtagtcccggtggcaaatcccggcagtgttccagaatctccggcatcgataaacggaagtccgagaagtgaagagtttgccgatggaggaggttctagcgagagtcatcatcgccaagattacattttcaattcaaagaaaagaaagatgttaccaaagtggtcagaaaaagtgagaataagcccagagagaggcttagaaggacctcaagatgatgtctttagctggagaaaatatggtcaaaaagacattttaggcgccaaattcccaaggagttattacagatgcacacatcgtagcacacaaaactgttgggcaacgaaacaagtccagagatcagacggggatgctacggttttcgaagtgacgtacagaggaacacacacttgttcgcaggcgatcacaagaacaccaccattagcctcgccggagaagcgacaagacaccagagtcaaaccagccattacccaaaagccaaaggatattctcgagagtcttaaatccaacttaaccgttcgaaccgatgggcttgatgatggtaaagacgttttctcgttccctgatacgccgccgttttacaattacggaactatcaacggcgagttcggccacgtggagagttctccgatcttcgacgttgttgactggttcaatccaacggtcgagattgacacaactttccccgcgtttttacacgagtcgatttattattaattaaaatttgtaacagagaaatagatagtaactagtaagtaatgatcagcgagagttaaaacataaaagtacttagagtaatctaacgatgcataataaggaatgttcaacaggacttgaacatgatttcaatactaagagagatttatct

SEQ ID NO: 82844 - protein, 324 aa, Arabidopsis thaliana
  peptide (1)..(324): Ceres Seq. ID no. 12667556
  misc_feature (157)..(219): Pfam Name: WRKY DNA -binding domain Pfam Description: WRKY DNA -binding domain
  misc_feature (1)..(324): Homolog of NCBI NO: 15236622 NR Description: WRKY family transcription factor; protein id: supported by cDNA: gi_13507100, supported by cDNA: gi_13877710 thaliana] >gi|7486745|pir||T05613 hypothetical protein putative
  misc_feature (5)..(322): Homolog of NCBI NO: 15237039 NR Description: WRKY family transcription factor; protein id: supported by cDNA: gi_17064163 [Arabidopsis thaliana]
  misc_feature (53)..(322): Homolog of NCBI NO: 30681651 NR Description: WRKY family transcription factor [Arabidopsis >gi|24762209|gb|AAN64171.1| putative WRKY family transcription
  misc_feature (5)..(32): Homolog of NCBI NO: 30681651 NR Description: WRKY family transcription factor [Arabidopsis >gi|24762209|gb|AAN64171.1| putative WRKY family transcription
  misc_feature (14)..(221): Homolog of NCBI NO: 34911952 NR Description: P0694A04.6 [Oryza sativa (japonica
  misc_feature (96)..(234): Homolog of NCBI NO: 18420751 NR Description: WRKY family transcription factor; protein id: supported by cDNA: 6469., supported by cDNA: gi_15384218 thaliana] >gi|10178159|dbj|BAB11571.1| gene_id:MLE8.3~unknown
  misc_feature (96)..(262): Homolog of NCBI NO: 40253471 NR Description: putative transcription factor WRKY5 [Oryza sativa
  misc_feature (107)..(280): Homolog of NCBI NO: 34898262 NR Description: WRKY family transcription factor-like protein
  misc_feature (130)..(295): Homolog of NCBI NO: 11493824 NR Description: transcription factor WRKY5 [Petroselinum crispum]
  misc_feature (133)..(287): Homolog of NCBI NO: 15225975 NR Description: WRKY family transcription factor; protein id: supported by cDNA: gi_15430276, supported by cDNA: gi_19423941
MEGRDMLSWEQKTLLSELINGFDAAKKLQARLREAPSPSSSFSSPATAVAETNEILVKQIVSSYERSLLLLNWSSSPSVQLIPTPVTVVPVANPGSVPESPASINGSPRSEEFADGGGSSESHHRQDYIFNSKKRKMLPKWSEKVRISPERGLEGPQDDVFSWRKYGQKDILGAKFPRSYYRCTHRSTQNCWATKQVQRSDGDATVFEVTYRGTHTCSQAITRTPPLASPEKRQDTRVKPAITQKPKDILESLKSNLTVRTDGLDDGKDVFSFPDTPPFYNYGTINGEFGHVESSPIFDVVDWFNPTVEIDTTFPAFLHESIYY

SEQ ID NO: 82845 - protein, 319 aa, Arabidopsis thaliana
  peptide (1)..(319): Ceres Seq. ID no. 12667557
  misc_feature (152)..(214): Pfam Name: WRKY DNA -binding domain Pfam Description: WRKY DNA -binding domain
  misc_feature (1)..(319): Homolog of NCBI NO: 15236622 NR Description: WRKY family transcription factor; protein id: supported by cDNA: gi_13507100, supported by cDNA: gi_13877710 thaliana] >gi|7486745|pir||T05613 hypothetical protein putative
  misc_feature (1)..(317): Homolog of NCBI NO: 15237039 NR Description: WRKY family transcription factor; protein id: supported by cDNA: gi_17064163 [Arabidopsis thaliana]
  misc_feature (48)..(317): Homolog of NCBI NO: 30681651 NR Description: WRKY family transcription factor [Arabidopsis >gi|24762209|gb|AAN64171.1| putative WRKY family transcription
  misc_feature (1)..(27): Homolog of NCBI NO: 30681651 NR Description: WRKY family transcription factor [Arabidopsis >gi|24762209|gb|AAN64171.1| putative WRKY family transcription
  misc_feature (9)..(216): Homolog of NCBI NO: 34911952 NR Description: P0694A04.6 [Oryza sativa (japonica
  misc_feature (91)..(229): Homolog of NCBI NO: 18420751 NR Description: WRKY family transcription factor; protein id: supported by cDNA: 6469., supported by cDNA: gi_15384218 thaliana] >gi|10178159|dbj|BAB11571.1| gene_id:MLE8.3~unknown
  misc_feature (91)..(257): Homolog of NCBI NO: 40253471 NR Description: putative transcription factor WRKY5 [Oryza sativa
  misc_feature (102)..(275): Homolog of NCBI NO: 34898262 NR Description: WRKY family transcription factor-like protein
  misc_feature (125)..(290): Homolog of NCBI NO: 11493824 NR Description: transcription factor WRKY5 [Petroselinum crispum]
  misc_feature (128)..(282): Homolog of NCBI NO: 15225975 NR Description: WRKY family transcription factor; protein id: supported by cDNA: gi_15430276, supported by cDNA: gi_19423941
MLSWEQKTLLSELINGFDAAKKLQARLREAPSPSSSFSSPATAVAETNEILVKQIVSSYERSLLLLNWSSSPSVQLIPTPVTVVPVANPGSVPESPASINGSPRSEEFADGGGSSESHHRQDYIFNSKKRKMLPKWSEKVRISPERGLEGPQDDVFSWRKYGQKDILGAKFPRSYYRCTHRSTQNCWATKQVQRSDGDATVFEVTYRGTHTCSQAITRTPPLASPEKRQDTRVKPAITQKPKDILESLKSNLTVRTDGLDDGKDVFSFPDTPPFYNYGTINGEFGHVESSPIFDVVDWFNPTVEIDTTFPAFLHESIYY

SEQ ID NO: 82846 - protein, 188 aa, Arabidopsis thaliana
  peptide (1)..(188): Ceres Seq. ID no. 12667558
  misc_feature (21)..(83): Pfam Name: WRKY DNA -binding domain Pfam Description: WRKY DNA -binding domain
  misc_feature (1)..(188): Homolog of NCBI NO: 15236622 NR Description: WRKY family transcription factor; protein id: supported by cDNA: gi_13507100, supported by cDNA: gi_13877710 thaliana] >gi|7486745|pir||T05613 hypothetical protein putative
  misc_feature (1)..(186): Homolog of NCBI NO: 15237039 NR Description: WRKY family transcription factor; protein id: supported by cDNA: gi_17064163 [Arabidopsis thaliana]
  misc_feature (1)..(186): Homolog of NCBI NO: 30681651 NR Description: WRKY family transcription factor [Arabidopsis >gi|24762209|gb|AAN64171.1| putative WRKY family transcription
  misc_feature (1)..(85): Homolog of NCBI NO: 34911952 NR Description: P0694A04.6 [Oryza sativa (japonica
  misc_feature (1)..(98): Homolog of NCBI NO: 18420751 NR Description: WRKY family transcription factor; protein id: supported by cDNA: 6469., supported by cDNA: gi_15384218 thaliana] >gi|10178159|dbj|BAB11571.1| gene_id:MLE8.3~unknown
  misc_feature (1)..(126): Homolog of NCBI NO: 40253471 NR Description: putative transcription factor WRKY5 [Oryza sativa
  misc_feature (1)..(144): Homolog of NCBI NO: 34898262 NR Description: WRKY family transcription factor-like protein
  misc_feature (1)..(159): Homolog of NCBI NO: 11493824 NR Description: transcription factor WRKY5 [Petroselinum crispum]
  misc_feature (1)..(151): Homolog of NCBI NO: 15225975 NR Description: WRKY family transcription factor; protein id: supported by cDNA: gi_15430276, supported by cDNA: gi_19423941
  misc_feature (1)..(131): Homolog of NCBI NO: 15226740 NR Description: WRKY family transcription factor; protein id: supported by cDNA: gi_16798363 [Arabidopsis thaliana]
MLPKWSEKVRISPERGLEGPQDDVFSWRKYGQKDILGAKFPRSYYRCTHRSTQNCWATKQVQRSDGDATVFEVTYRGTHTCSQAITRTPPLASPEKRQDTRVKPAITQKPKDILESLKSNLTVRTDGLDDGKDVFSFPDTPPFYNYGTINGEFGHVESSPIFDVVDWFNPTVEIDTTFPAFLHESIYY

SEQ ID NO: 82847 - DNA, 1266 bp, Arabidopsis thaliana
  misc_feature (1)..(1266): Ceres Seq. ID no. 12667559
  misc_feature: MA Experiment ID: 20000306 Result: Up-regulated in Transcription
  misc_feature: MA Experiment 20000306 PARAMETER Experiment Name: At_Germinating_Seeds_Sub_P Parameter: Age (hr) Value: 6 vs. 0
  misc_feature: MA Experiment 20000306 PARAMETER Experiment Name: At_Germinating_Seeds_Sub_P Parameter: Organism Value: A. thaliana
  misc_feature: MA Experiment 20000306 PARAMETER Experiment Name: At_Germinating_Seeds_Sub_P Parameter: Plant Line Value: WS
  misc_feature: MA Experiment 20000306 PARAMETER Experiment Name: At_Germinating_Seeds_Sub_P Parameter: Tissue Value: Germinating Seeds
  misc_feature: MA Experiment ID: 20000307 Result: Up-regulated in Transcription
  misc_feature: MA Experiment 20000307 PARAMETER Experiment Name: At_Germinating_Seeds_Sub_P Parameter: Age (hr) Value: 24 vs. 0
  misc_feature: MA Experiment 20000307 PARAMETER Experiment Name: At_Germinating_Seeds_Sub_P Parameter: Organism Value: A. thaliana
  misc_feature: MA Experiment 20000307 PARAMETER Experiment Name: At_Germinating_Seeds_Sub_P Parameter: Plant Line Value: WS
  misc_feature: MA Experiment 20000307 PARAMETER Experiment Name: At_Germinating_Seeds_Sub_P Parameter: Tissue Value: Germinating Seeds
  misc_feature: MA Experiment ID: 20000327 Result: Down-regulated in Transcription
  misc_feature: MA Experiment 20000327 PARAMETER Experiment Name: At_42deg_Heat_Sub_P Parameter: Age (day) Value: 14
  misc_feature: MA Experiment 20000327 PARAMETER Experiment Name: At_42deg_Heat_Sub_P Parameter: Organism Value: A. thaliana
  misc_feature: MA Experiment 20000327 PARAMETER Experiment Name: At_42deg_Heat_Sub_P Parameter: Plant Line Value: WS
  misc_feature: MA Experiment 20000327 PARAMETER Experiment Name: At_42deg_Heat_Sub_P Parameter: Temperature (deg C) Value: 42 vs. 22
  misc_feature: MA Experiment 20000327 PARAMETER Experiment Name: At_42deg_Heat_Sub_P Parameter: Timepoint (hr) Value: 1
  misc_feature: MA Experiment 20000327 PARAMETER Experiment Name: At_42deg_Heat_Sub_P Parameter: Tissue Value: Aerial
atgaatcataagaatgtgcttctcatcaagctcatctccgctattctgatatcttttttcgcgttccgtctcttcattctccactccagcgagttttctccaatctttgcgtcggtcaccggaaaattcgaagctcggtttctgccgccggagattatcgtaccggaaaatgaagatctgattcctcaagatattgaagtagagaagtgtgatcttttcgccggaaaatggatcccagattcagtaggaccaatctacacaaacaaatcatgcggatcactcattgacggtcaccaaaattgtatcaccaatggccggcctgacttagattttctctactggaaatggaaacctcatgactgtttgttaccacgttttgaccctagaagatttcttcaacttatgaggcataaatcttgggcatttattggtgactccatatctcgtaaccacgtcgaatcactgctttgtatgctctctacgattgaagaaccggttgaagtataccatgacatggagtacaaatcaaaacgttggcatttccctttacataaccttactgtatccaacatatggtcgccatttcttgttcaagccgctattttcgaagattctaacggtgtctcgaccgcttctgttcagctacatcttgatagactcgatgagacatggaccagtctcatgcctagcttcgactatgcgatcatctcaaccggtaaatggtttcttaaatccgcaatttaccacgaaaatgcaaaactcgtcggttgccataactgtcaggaaaaacctcacatagaagagttaggattcgactatgcttataacgcatcgctgcataatgtcatggactttctagcagctgaagataacagtaaaggcacggttttctttcggacttcgactcccgatcatttccaaaacggggaatggcatagtggcgggacgtgtaagcaaacagagccggtgagcgatgaggagattgagattaaggatgtacataagatactaaaagatattgagattgatcagttcaagagggcggttagagagaagactaaccaggacggtgggaatctaaagcttttggatttcacccggatgttgctgacccgaccggacggtcatccgggtgagtaccgacagttcaggccgtttgataaagacaaaaatgcaaaggtacagaacgattgtttgcattggtgcttgcctggtccgtttgattacttgaatgatgttatattggagactatagtaaatggctga

SEQ ID NO: 82848 - protein, 421 aa, Arabidopsis thaliana
  peptide (1)..(421): Ceres Seq. ID no. 12667560
  misc_feature (242)..(418): Pfam Name: Arabidopsis proteins of unknown function Pfam Description: Arabidopsis proteins of unknown function
  misc_feature (1)..(421): Homolog of NCBI NO: 7486743 NR Description: hypothetical protein F9D16.260 - Arabidopsis >gi|4454048|emb|CAA23045.1| putative protein [Arabidopsis >gi|7269228|emb|CAB81297.1| putative protein [Arabidopsis
  misc_feature (1)..(421): Homolog of NCBI NO: 30686312 NR Description: expressed protein [Arabidopsis thaliana]
  misc_feature (4)..(421): Homolog of NCBI NO: 15237044 NR Description: putative protein; protein id: At4g11090.1
  misc_feature (2)..(420): Homolog of NCBI NO: 30678135 NR Description: expressed protein [Arabidopsis thaliana] unknown protein [Arabidopsis thaliana]
  misc_feature (22)..(420): Homolog of NCBI NO: 15234058 NR Description: hypothetical protein; protein id: At4g01080.1
  misc_feature (22)..(420): Homolog of NCBI NO: 28393189 NR Description: unknown protein [Arabidopsis thaliana]
  misc_feature (2)..(420): Homolog of NCBI NO: 25518737 NR Description: hypothetical protein F6F3.23 [imported] - thaliana >gi|9665154|gb|AAF97338.1|AC023628_19 Unknown protein
  misc_feature (10)..(418): Homolog of NCBI NO: 15223079 NR Description: unknown protein; protein id: At1g70230.1, by cDNA: gi_19310588 [Arabidopsis thaliana]
  misc_feature (68)..(416): Homolog of NCBI NO: 15237211 NR Description: putative protein; protein id: At5g15890.1
  misc_feature (68)..(415): Homolog of NCBI NO: 15237213 NR Description: putative protein; protein id: At5g15900.1
MNHKNVLLIKLISAILISFFAFRLFILHSSEFSPIFASVTGKFEARFLPPEIIVPENEDLIPQDIEVEKCDLFAGKWIPDSVGPIYTNKSCGSLIDGHQNCITNGRPDLDFLYWKWKPHDCLLPRFDPRRFLQLMRHKSWAFIGDSISRNHVESLLCMLSTIEEPVEVYHDMEYKSKRWHFPLHNLTVSNIWSPFLVQAAIFEDSNGVSTASVQLHLDRLDETWTSLMPSFDYAIISTGKWFLKSAIYHENAKLVGCHNCQEKPHIEELGFDYAYNASLHNVMDFLAAEDNSKGTVFFRTSTPDHFQNGEWHSGGTCKQTEPVSDEEIEIKDVHKILKDIEIDQFKRAVREKTNQDGGNLKLLDFTRMLLTRPDGHPGEYRQFRPFDKDKNAKVQNDCLHWCLPGPFDYLNDVILETIVNG

SEQ ID NO: 82849 - protein, 287 aa, Arabidopsis thaliana
  peptide (1)..(287): Ceres Seq. ID no. 12667561
  misc_feature (108)..(284): Pfam Name: Arabidopsis proteins of unknown function Pfam Description: Arabidopsis proteins of unknown function
  misc_feature (1)..(287): Homolog of NCBI NO: 7486743 NR Description: hypothetical protein F9D16.260 - Arabidopsis >gi|4454048|emb|CAA23045.1| putative protein [Arabidopsis >gi|7269228|emb|CAB81297.1| putative protein [Arabidopsis
  misc_feature (1)..(287): Homolog of NCBI NO: 30686312 NR Description: expressed protein [Arabidopsis thaliana]
  misc_feature (1)..(287): Homolog of NCBI NO: 15237044 NR Description: putative protein; protein id: At4g11090.1
  misc_feature (1)..(286): Homolog of NCBI NO: 30678135 NR Description: expressed protein [Arabidopsis thaliana] unknown protein [Arabidopsis thaliana]
  misc_feature (1)..(286): Homolog of NCBI NO: 15234058 NR Description: hypothetical protein; protein id: At4g01080.1
  misc_feature (1)..(286): Homolog of NCBI NO: 28393189 NR Description: unknown protein [Arabidopsis thaliana]
  misc_feature (1)..(286): Homolog of NCBI NO: 25518737 NR Description: hypothetical protein F6F3.23 [imported] - thaliana >gi|9665154|gb|AAF97338.1|AC023628_19 Unknown protein
  misc_feature (1)..(284): Homolog of NCBI NO: 15223079 NR Description: unknown protein; protein id: At1g70230.1, by cDNA: gi_19310588 [Arabidopsis thaliana]
  misc_feature (1)..(282): Homolog of NCBI NO: 15237211 NR Description: putative protein; protein id: At5g15890.1
  misc_feature (1)..(281): Homolog of NCBI NO: 15237213 NR Description: putative protein; protein id: At5g15900.1
MRHKSWAFIGDSISRNHVESLLCMLSTIEEPVEVYHDMEYKSKRWHFPLHNLTVSNIWSPFLVQAAIFEDSNGVSTASVQLHLDRLDETWTSLMPSFDYAIISTGKWFLKSAIYHENAKLVGCHNCQEKPHIEELGFDYAYNASLHNVMDFLAAEDNSKGTVFFRTSTPDHFQNGEWHSGGTCKQTEPVSDEEIEIKDVHKILKDIEIDQFKRAVREKTNQDGGNLKLLDFTRMLLTRPDGHPGEYRQFRPFDKDKNAKVQNDCLHWCLPGPFDYLNDVILETIVNG

SEQ ID NO: 82850 - protein, 264 aa, Arabidopsis thaliana
  peptide (1)..(264): Ceres Seq. ID no. 12667562
  misc_feature (85)..(261): Pfam Name: Arabidopsis proteins of unknown function Pfam Description: Arabidopsis proteins of unknown function
  misc_feature (1)..(264): Homolog of NCBI NO: 7486743 NR Description: hypothetical protein F9D16.260 - Arabidopsis >gi|4454048|emb|CAA23045.1| putative protein [Arabidopsis >gi|7269228|emb|CAB81297.1| putative protein [Arabidopsis
  misc_feature (1)..(264): Homolog of NCBI NO: 30686312 NR Description: expressed protein [Arabidopsis thaliana]
  misc_feature (1)..(264): Homolog of NCBI NO: 15237044 NR Description: putative protein; protein id: At4g11090.1
  misc_feature (1)..(263): Homolog of NCBI NO: 30678135 NR Description: expressed protein [Arabidopsis thaliana] unknown protein [Arabidopsis thaliana]
  misc_feature (1)..(263): Homolog of NCBI NO: 15234058 NR Description: hypothetical protein; protein id: At4g01080.1
  misc_feature (1)..(263): Homolog of NCBI NO: 28393189 NR Description: unknown protein [Arabidopsis thaliana]
  misc_feature (1)..(263): Homolog of NCBI NO: 25518737 NR Description: hypothetical protein F6F3.23 [imported] - thaliana >gi|9665154|gb|AAF97338.1|AC023628_19 Unknown protein
  misc_feature (1)..(261): Homolog of NCBI NO: 15223079 NR Description: unknown protein; protein id: At1g70230.1, by cDNA: gi_19310588 [Arabidopsis thaliana]
  misc_feature (1)..(259): Homolog of NCBI NO: 15237211 NR Description: putative protein; protein id: At5g15890.1
  misc_feature (1)..(258): Homolog of NCBI NO: 15237213 NR Description: putative protein; protein id: At5g15900.1
MLSTIEEPVEVYHDMEYKSKRWHFPLHNLTVSNIWSPFLVQAAIFEDSNGVSTASVQLHLDRLDETWTSLMPSFDYAIISTGKWFLKSAIYHENAKLVGCHNCQEKPHIEELGFDYAYNASLHNVMDFLAAEDNSKGTVFFRTSTPDHFQNGEWHSGGTCKQTEPVSDEEIEIKDVHKILKDIEIDQFKRAVREKTNQDGGNLKLLDFTRMLLTRPDGHPGEYRQFRPFDKDKNAKVQNDCLHWCLPGPFDYLNDVILETIVNG

SEQ ID NO: 82851 - DNA, 2270 bp, Arabidopsis thaliana
  misc_feature (1)..(2270): Ceres Seq. ID no. 12667567
  misc_feature: MA Experiment ID: 20000180 Result: Up-regulated in Transcription
  misc_feature: MA Experiment 20000180 PARAMETER Experiment Name: At_Germinating_Seeds_P Parameter: Age (hr) Value: 24 vs. 0
  misc_feature: MA Experiment 20000180 PARAMETER Experiment Name: At_Germinating_Seeds_P Parameter: Tissue Value: Germinating Seeds
  misc_feature: MA Experiment ID: 20000182 Result: Up-regulated in Transcription
  misc_feature: MA Experiment 20000182 PARAMETER Experiment Name: At_2mM_SA_P Parameter: Age (day) Value: 14
  misc_feature: MA Experiment 20000182 PARAMETER Experiment Name: At_2mM_SA_P Parameter: Organism Value: A. thaliana
  misc_feature: MA Experiment 20000182 PARAMETER Experiment Name: At_2mM_SA_P Parameter: Plant Line Value: WS
  misc_feature: MA Experiment 20000182 PARAMETER Experiment Name: At_2mM_SA_P Parameter: Timepoint (hr) Value: 6
  misc_feature: MA Experiment 20000182 PARAMETER Experiment Name: At_2mM_SA_P Parameter: Tissue Value: Aerial
  misc_feature: MA Experiment 20000182 PARAMETER Experiment Name: At_2mM_SA_P Parameter: Treatment Value: 2mM SA vs. No Treatment
  misc_feature: MA Experiment ID: 20000286 Result: Down-regulated in Transcription
  misc_feature: MA Experiment 20000286 PARAMETER Experiment Name: At_Open_Flower_P Parameter: Age (day) Value: 21
  misc_feature: MA Experiment 20000286 PARAMETER Experiment Name: At_Open_Flower_P Parameter: Plant Line Value: WS
  misc_feature: MA Experiment 20000286 PARAMETER Experiment Name: At_Open_Flower_P Parameter: Tissue Value: Half Open vs. Whole Plant
  misc_feature: MA Experiment ID: 20000495 Result: Down-regulated in Transcription
  misc_feature: MA Experiment 20000495 PARAMETER Experiment Name: At_Guard_Cells_P Parameter: Harvest Date Value: 8/2/2002
  misc_feature: MA Experiment 20000495 PARAMETER Experiment Name: At_Guard_Cells_P Parameter: Organism Value: A. thaliana
  misc_feature: MA Experiment 20000495 PARAMETER Experiment Name: At_Guard_Cells_P Parameter: Tissue Value: Guard Cells vs. Leaves
  misc_feature: MA Experiment ID: 20001247 Result: Up-regulated in Transcription
  misc_feature: MA Experiment 20001247 PARAMETER Experiment Name: At_Far-red-induction_P Parameter: Age (day) Value: 7
  misc_feature: MA Experiment 20001247 PARAMETER Experiment Name: At_Far-red-induction_P Parameter: Light Value: Far-red vs. White
  misc_feature: MA Experiment 20001247 PARAMETER Experiment Name: At_Far-red-induction_P Parameter: Organism Value: A. thaliana
  misc_feature: MA Experiment 20001247 PARAMETER Experiment Name: At_Far-red-induction_P Parameter: Plant Line Value: Columbia
  misc_feature: MA Experiment 20001247 PARAMETER Experiment Name: At_Far-red-induction_P Parameter: Timepoint (hr) Value: 1
  misc_feature: MA Experiment 20001247 PARAMETER Experiment Name: At_Far-red-induction_P Parameter: Tissue Value: Whole Plant
agagagagagagagagagatcatgtcgcagcagaagaaatacatcttccaagttgaagaaggcaaagaaggtagcgatggaagaccatcagttggtccagtgtaccggagtatctttgccaaggacggatttcccgacccgatcgaaggaatggatagttgttgggatgttttccgcatgtctgttgagaagtatccaaacaatccaatgctgggacgccgcgagattgtagatggaaagccgggtaagtatgtctggcaaacataccaagaagtctacgacattgtcatgaaacttggaaattctctcagaagtgttggagttaaggacgaagcaaaatgtggtatctatggtgcaaattctcctgagtggattatcagcatggaggcttgtaatgcacatggactctattgtgtaccgttatatgatacactaggtgctgatgctgtggaattcatcatttcccattcagaggtttcaattgtctttgtggaagagaagaagatctctgagttgttcaagacatgcccaaactcgacagagtacatgaaaactgttgtgagcttcgggggtgtctcacgtgaacaaaaagaagaagctgaaacttttgggttggttatatatgcttgggatgaatttttgaagctgggtgaaggaaagcaatatgatctcccaatcaaaaagaaaagcgacatttgcacgattatgtatacgagtggaaccactggtgacccaaagggagtgatgatatctaacgaaagcattgtgactctaatcgctggagtgatccgtctactgaaaagtgctaacgaggctctgactgtgaaagatgtgtatctttcttatcttcctcttgcccacatctttgaccgagttatcgaggagtgtttcattcaacatggtgctgcaattggcttctggcgaggggatgtaaaattgttgatcgaagaccttgctgagcttaaaccaactattttttgtgctgtacctcgtgtcctggatagagtatactcaggtcttcagaagaagctttctgatggtggattcttaaaaaagttcatatttgattctgcattttcctataaatttggttatatgaagaagggacagtctcatgtggaggcctctccactttttgacaaacttgtgttcagcaaggttaaacaaggactcggaggcaatgtgaggattattctatctggagctgctcctcttgctagtcacgtagagtcatttctaagagtggtggcatgctgtcatgttctccaaggatacggtcttactgaaagctgtgctggaacttttgtctcgctgccagatgaactaggtatgctcggcacagttggtccaccagtgccaaacgttgatatacgccttgaatccgtccccgagatggaatatgatgctcttgcgagtactgcacgtggtgaaatctgcattcggggaaagacccttttctctggttactacaaacgtgaagatctcacgaaagaggttctcattgatggatggctgcacacaggtgatgttggtgagtggcaaccagatggaagcatgaagataattgacaggaagaagaatatctttaaactctcacaaggagagtatgttgcggtggagaacatagaaaacatatacggtgaagtacaagctgttgattccgtgtgggtgtacggtaacagctttgagtccttcctaatagctatcgccaacccaaaccagcatatccttgaacgctgggctgcagaaaacggtgtgagtggtgactatgacgctctctgtcaaaatgaaaaggcaaaggaattcattctcggagaacttgttaaaatggccaaagagaaaaagatgaaagggttcgagatcatcaaggcgattcatcttgacccagtgccatttgacatggaacgagatcttcttacgccgaccttcaaaaagaaaaggcctcagttgctgaaatactaccagagtgtgatcgacgaaatgtacaagaccataaatgcaaaatttgcttccagagggtagattcctcctcactctcggtccttgggtctctcattttgcatgacgaagactttgttaataggctcttctctcatctgtgtacaatatttgaatatttcatagcatcagatcagtccagagctgctacactgtttttcttttctatctttttttggaaatttacttttatgttctatacttgaatgctatctctttgccaaaaaaaaaaaaaaagaatgctatctaacttttctttttaataaaatttt

SEQ ID NO: 82852 - protein, 673 aa, Arabidopsis thaliana
  peptide (1)..(673): Ceres Seq. ID no. 12667568
  misc_feature (8)..(671): Homolog of NCBI NO: 15237023 NR Description: putative acyl-CoA synthetase; protein id: supported by cDNA: gi_20805870 [Arabidopsis thaliana]
  misc_feature (8)..(671): Homolog of NCBI NO: 20805871 NR Description: long chain acyl-CoA synthetase 5 [Arabidopsis
  misc_feature (13)..(663): Homolog of NCBI NO: 15217631 NR Description: acyl-CoA synthetase, putative; protein id: supported by cDNA: gi_14532621, supported by cDNA: gi_19310628,
  misc_feature (23)..(663): Homolog of NCBI NO: 34898260 NR Description: similar to long-chain-fatty-acid--CoA ligase 1
  misc_feature (247)..(659): Homolog of NCBI NO: 7437841 NR Description: probable long-chain-fatty-acid-CoA ligase (EC
  misc_feature (8)..(154): Homolog of NCBI NO: 7437841 NR Description: probable long-chain-fatty-acid-CoA ligase (EC
  misc_feature (299)..(665): Homolog of NCBI NO: 34911190 NR Description: putative acyl-CoA synthetase [Oryza sativa
  misc_feature (13)..(216): Homolog of NCBI NO: 34911190 NR Description: putative acyl-CoA synthetase [Oryza sativa
  misc_feature (8)..(670): Homolog of NCBI NO: 7437844 NR Description: probable long-chain-fatty-acid-CoA ligase (EC
  misc_feature (8)..(670): Homolog of NCBI NO: 22330132 NR Description: acyl CoA synthetase, putative; protein id: supported by cDNA: gi_17529275, supported by cDNA: gi_20453101, by cDNA: gi_20805864 [Arabidopsis thaliana]
REREREIMSQQKKYIFQVEEGKEGSDGRPSVGPVYRSIFAKDGFPDPIEGMDSCWDVFRMSVEKYPNNPMLGRREIVDGKPGKYVWQTYQEVYDIVMKLGNSLRSVGVKDEAKCGIYGANSPEWIISMEACNAHGLYCVPLYDTLGADAVEFIISHSEVSIVFVEEKKISELFKTCPNSTEYMKTVVSFGGVSREQKEEAETFGLVIYAWDEFLKLGEGKQYDLPIKKKSDICTIMYTSGTTGDPKGVMISNESIVTLIAGVIRLLKSANEALTVKDVYLSYLPLAHIFDRVIEECFIQHGAAIGFWRGDVKLLIEDLAELKPTIFCAVPRVLDRVYSGLQKKLSDGGFLKKFIFDSAFSYKFGYMKKGQSHVEASPLFDKLVFSKVKQGLGGNVRIILSGAAPLASHVESFLRVVACCHVLQGYGLTESCAGTFVSLPDELGMLGTVGPPVPNVDIRLESVPEMEYDALASTARGEICIRGKTLFSGYYKREDLTKEVLIDGWLHTGDVGEWQPDGSMKIIDRKKNIFKLSQGEYVAVENIENIYGEVQAVDSVWVYGNSFESFLIAIANPNQHILERWAAENGVSGDYDALCQNEKAKEFILGELVKMAKEKKMKGFEIIKAIHLDPVPFDMERDLLTPTFKKKRPQLLKYYQSVIDEMYKTINAKFASRG

SEQ ID NO: 82853 - protein, 666 aa, Arabidopsis thaliana
  peptide (1)..(666): Ceres Seq. ID no. 12667569
  misc_feature (1)..(664): Homolog of NCBI NO: 15237023 NR Description: putative acyl-CoA synthetase; protein id: supported by cDNA: gi_20805870 [Arabidopsis thaliana]
  misc_feature (1)..(664): Homolog of NCBI NO: 20805871 NR Description: long chain acyl-CoA synthetase 5 [Arabidopsis
  misc_feature (6)..(656): Homolog of NCBI NO: 15217631 NR Description: acyl-CoA synthetase, putative; protein id: supported by cDNA: gi_14532621, supported by cDNA: gi_19310628,
  misc_feature (16)..(656): Homolog of NCBI NO: 34898260 NR Description: similar to long-chain-fatty-acid--CoA ligase 1
  misc_feature (240)..(652): Homolog of NCBI NO: 7437841 NR Description: probable long-chain-fatty-acid-CoA ligase (EC
  misc_feature (1)..(147): Homolog of NCBI NO: 7437841 NR Description: probable long-chain-fatty-acid-CoA ligase (EC
  misc_feature (292)..(658): Homolog of NCBI NO: 34911190 NR Description: putative acyl-CoA synthetase [Oryza sativa
  misc_feature (6)..(209): Homolog of NCBI NO: 34911190 NR Description: putative acyl-CoA synthetase [Oryza sativa
  misc_feature (1)..(663): Homolog of NCBI NO: 7437844 NR Description: probable long-chain-fatty-acid-CoA ligase (EC
  misc_feature (1)..(663): Homolog of NCBI NO: 22330132 NR Description: acyl CoA synthetase, putative; protein id: supported by cDNA: gi_17529275, supported by cDNA: gi_20453101, by cDNA: gi_20805864 [Arabidopsis thaliana]
MSQQKKYIFQVEEGKEGSDGRPSVGPVYRSIFAKDGFPDPIEGMDSCWDVFRMSVEKYPNNPMLGRREIVDGKPGKYVWQTYQEVYDIVMKLGNSLRSVGVKDEAKCGIYGANSPEWIISMEACNAHGLYCVPLYDTLGADAVEFIISHSEVSIVFVEEKKISELFKTCPNSTEYMKTVVSFGGVSREQKEEAETFGLVIYAWDEFLKLGEGKQYDLPIKKKSDICTIMYTSGTTGDPKGVMISNESIVTLIAGVIRLLKSANEALTVKDVYLSYLPLAHIFDRVIEECFIQHGAAIGFWRGDVKLLIEDLAELKPTIFCAVPRVLDRVYSGLQKKLSDGGFLKKFIFDSAFSYKFGYMKKGQSHVEASPLFDKLVFSKVKQGLGGNVRIILSGAAPLASHVESFLRVVACCHVLQGYGLTESCAGTFVSLPDELGMLGTVGPPVPNVDIRLESVPEMEYDALASTARGEICIRGKTLFSGYYKREDLTKEVLIDGWLHTGDVGEWQPDGSMKIIDRKKNIFKLSQGEYVAVENIENIYGEVQAVDSVWVYGNSFESFLIAIANPNQHILERWAAENGVSGDYDALCQNEKAKEFILGELVKMAKEKKMKGFEIIKAIHLDPVPFDMERDLLTPTFKKKRPQLLKYYQSVIDEMYKTINAKFASRG

SEQ ID NO: 82854 - protein, 623 aa, Arabidopsis thaliana
  peptide (1)..(623): Ceres Seq. ID no. 12667570
  misc_feature (1)..(621): Homolog of NCBI NO: 15237023 NR Description: putative acyl-CoA synthetase; protein id: supported by cDNA: gi_20805870 [Arabidopsis thaliana]
  misc_feature (1)..(621): Homolog of NCBI NO: 20805871 NR Description: long chain acyl-CoA synthetase 5 [Arabidopsis
  misc_feature (1)..(613): Homolog of NCBI NO: 15217631 NR Description: acyl-CoA synthetase, putative; protein id: supported by cDNA: gi_14532621, supported by cDNA: gi_19310628,
  misc_feature (1)..(613): Homolog of NCBI NO: 34898260 NR Description: similar to long-chain-fatty-acid--CoA ligase 1
  misc_feature (197)..(609): Homolog of NCBI NO: 7437841 NR Description: probable long-chain-fatty-acid-CoA ligase (EC
  misc_feature (1)..(104): Homolog of NCBI NO: 7437841 NR Description: probable long-chain-fatty-acid-CoA ligase (EC
  misc_feature (249)..(615): Homolog of NCBI NO: 34911190 NR Description: putative acyl-CoA synthetase [Oryza sativa
  misc_feature (1)..(166): Homolog of NCBI NO: 34911190 NR Description: putative acyl-CoA synthetase [Oryza sativa
  misc_feature (1)..(620): Homolog of NCBI NO: 7437844 NR Description: probable long-chain-fatty-acid-CoA ligase (EC
  misc_feature (1)..(620): Homolog of NCBI NO: 22330132 NR Description: acyl CoA synthetase, putative; protein id: supported by cDNA: gi_17529275, supported by cDNA: gi_20453101, by cDNA: gi_20805864 [Arabidopsis thaliana]
MDSCWDVFRMSVEKYPNNPMLGRREIVDGKPGKYVWQTYQEVYDIVMKLGNSLRSVGVKDEAKCGIYGANSPEWIISMEACNAHGLYCVPLYDTLGADAVEFIISHSEVSIVFVEEKKISELFKTCPNSTEYMKTVVSFGGVSREQKEEAETFGLVIYAWDEFLKLGEGKQYDLPIKKKSDICTIMYTSGTTGDPKGVMISNESIVTLIAGVIRLLKSANEALTVKDVYLSYLPLAHIFDRVIEECFIQHGAAIGFWRGDVKLLIEDLAELKPTIFCAVPRVLDRVYSGLQKKLSDGGFLKKFIFDSAFSYKFGYMKKGQSHVEASPLFDKLVFSKVKQGLGGNVRIILSGAAPLASHVESFLRVVACCHVLQGYGLTESCAGTFVSLPDELGMLGTVGPPVPNVDIRLESVPEMEYDALASTARGEICIRGKTLFSGYYKREDLTKEVLIDGWLHTGDVGEWQPDGSMKIIDRKKNIFKLSQGEYVAVENIENIYGEVQAVDSVWVYGNSFESFLIAIANPNQHILERWAAENGVSGDYDALCQNEKAKEFILGELVKMAKEKKMKGFEIIKAIHLDPVPFDMERDLLTPTFKKKRPQLLKYYQSVIDEMYKTINAKFASRG

SEQ ID NO: 82855 - DNA, 909 bp, Arabidopsis thaliana
  misc_feature (1)..(909): Ceres Seq. ID no. 12667589
  misc_feature: MA Experiment ID: 20000180 Result: Up-regulated in Transcription
  misc_feature: MA Experiment 20000180 PARAMETER Experiment Name: At_Germinating_Seeds_P Parameter: Age (hr) Value: 24 vs. 0
  misc_feature: MA Experiment 20000180 PARAMETER Experiment Name: At_Germinating_Seeds_P Parameter: Tissue Value: Germinating Seeds
  misc_feature: MA Experiment ID: 20000182 Result: Down-regulated in Transcription
  misc_feature: MA Experiment 20000182 PARAMETER Experiment Name: At_2mM_SA_P Parameter: Age (day) Value: 14
  misc_feature: MA Experiment 20000182 PARAMETER Experiment Name: At_2mM_SA_P Parameter: Organism Value: A. thaliana
  misc_feature: MA Experiment 20000182 PARAMETER Experiment Name: At_2mM_SA_P Parameter: Plant Line Value: WS
  misc_feature: MA Experiment 20000182 PARAMETER Experiment Name: At_2mM_SA_P Parameter: Timepoint (hr) Value: 6
  misc_feature: MA Experiment 20000182 PARAMETER Experiment Name: At_2mM_SA_P Parameter: Tissue Value: Aerial
  misc_feature: MA Experiment 20000182 PARAMETER Experiment Name: At_2mM_SA_P Parameter: Treatment Value: 2mM SA vs. No Treatment
  misc_feature: MA Experiment ID: 20000437 Result: Down-regulated in Transcription
  misc_feature: MA Experiment 20000437 PARAMETER Experiment Name: At_Drought_P Parameter: Age (day) Value: 8
  misc_feature: MA Experiment 20000437 PARAMETER Experiment Name: At_Drought_P Parameter: Organism Value: A. thaliana
  misc_feature: MA Experiment 20000437 PARAMETER Experiment Name: At_Drought_P Parameter: Plant Line Value: WS
  misc_feature: MA Experiment 20000437 PARAMETER Experiment Name: At_Drought_P Parameter: Timepoint (hr) Value: 24
  misc_feature: MA Experiment 20000437 PARAMETER Experiment Name: At_Drought_P Parameter: Tissue Value: Whole Plant
  misc_feature: MA Experiment 20000437 PARAMETER Experiment Name: At_Drought_P Parameter: Treatment Value: Drought vs. No Drought
  misc_feature: MA Experiment ID: 20000439 Result: Down-regulated in Transcription
  misc_feature: MA Experiment 20000439 PARAMETER Experiment Name: At_Roots__P Parameter: Age (day) Value: 14 vs. 21
  misc_feature: MA Experiment 20000439 PARAMETER Experiment Name: At_Roots__P Parameter: Organism Value: A. thaliana
  misc_feature: MA Experiment 20000439 PARAMETER Experiment Name: At_Roots__P Parameter: Tissue Value: Roots vs. Whole Plant
  misc_feature: MA Experiment ID: 20000495 Result: Down-regulated in Transcription
  misc_feature: MA Experiment 20000495 PARAMETER Experiment Name: At_Guard_Cells_P Parameter: Harvest Date Value: 8/2/2002
  misc_feature: MA Experiment 20000495 PARAMETER Experiment Name: At_Guard_Cells_P Parameter: Organism Value: A. thaliana
  misc_feature: MA Experiment 20000495 PARAMETER Experiment Name: At_Guard_Cells_P Parameter: Tissue Value: Guard Cells vs. Leaves
  misc_feature: MA Experiment ID: 20001905 Result: Down-regulated in Transcription
  misc_feature: MA Experiment 20001905 PARAMETER Experiment Name: At_Drought_Reproduction_P Parameter: Age (day) Value: 40
  misc_feature: MA Experiment 20001905 PARAMETER Experiment Name: At_Drought_Reproduction_P Parameter: Organism Value: A. thaliana
  misc_feature: MA Experiment 20001905 PARAMETER Experiment Name: At_Drought_Reproduction_P Parameter: Plant Line Value: WS
  misc_feature: MA Experiment 20001905 PARAMETER Experiment Name: At_Drought_Reproduction_P Parameter: Timepoint (day) Value: 10
  misc_feature: MA Experiment 20001905 PARAMETER Experiment Name: At_Drought_Reproduction_P Parameter: Tissue Value: Rosettes
  misc_feature: MA Experiment 20001905 PARAMETER Experiment Name: At_Drought_Reproduction_P Parameter: Treatment Value: Drought vs. No Drought
  misc_feature: MA Experiment ID: 20001906 Result: Down-regulated in Transcription
  misc_feature: MA Experiment 20001906 PARAMETER Experiment Name: At_Drought_Reproduction_P Parameter: Age (day) Value: 35
  misc_feature: MA Experiment 20001906 PARAMETER Experiment Name: At_Drought_Reproduction_P Parameter: Organism Value: A. thaliana
  misc_feature: MA Experiment 20001906 PARAMETER Experiment Name: At_Drought_Reproduction_P Parameter: Plant Line Value: WS
  misc_feature: MA Experiment 20001906 PARAMETER Experiment Name: At_Drought_Reproduction_P Parameter: Timepoint (day) Value: 5
  misc_feature: MA Experiment 20001906 PARAMETER Experiment Name: At_Drought_Reproduction_P Parameter: Tissue Value: Siliques
  misc_feature: MA Experiment 20001906 PARAMETER Experiment Name: At_Drought_Reproduction_P Parameter: Treatment Value: Drought vs. No Drought
  misc_feature: MA Experiment ID: 20001911 Result: Down-regulated in Transcription
  misc_feature: MA Experiment 20001911 PARAMETER Experiment Name: At_Drought_Reproduction_P Parameter: Age (day) Value: 40
  misc_feature: MA Experiment 20001911 PARAMETER Experiment Name: At_Drought_Reproduction_P Parameter: Organism Value: A. thaliana
  misc_feature: MA Experiment 20001911 PARAMETER Experiment Name: At_Drought_Reproduction_P Parameter: Plant Line Value: WS
  misc_feature: MA Experiment 20001911 PARAMETER Experiment Name: At_Drought_Reproduction_P Parameter: Timepoint (day) Value: 10
  misc_feature: MA Experiment 20001911 PARAMETER Experiment Name: At_Drought_Reproduction_P Parameter: Tissue Value: Flowers
  misc_feature: MA Experiment 20001911 PARAMETER Experiment Name: At_Drought_Reproduction_P Parameter: Treatment Value: Drought vs. No Drought
atgcaatctttatctctgcaatcgcttccatggaaaccaaattcagtgactttacctgaaattaatcttttgaatcccaagcaattgactgcctcgagttctcagtatcgtagaactcgaaactggagaattagaagttcgtcggaagataatgtagcaatttcgagtgacggcggagatttgaagaattctctgtccggtattgtgggaaatcaagtggaggagctattgagcagagaagagaacaaaggtttgcttgatggtctggaaaaagcttcgttgagagtggagattgcgaagagagagctcgaagatatagagagacaagaaattgaggcgaaattgctacaggattatattaatcagctcgaatcaagagccgcagaggagattgacgcagcaagatcaatggttgaggaagcagaacgctccttgtcattagcagataactcgacaattggaagttcggagaaaggttattcgattgataaagacaaggagaggttagaatctgcaaaagcggcagtgatcgcagctgcggttgggaccattgcggaactcccatttgctctttctcaagtcgcaagcatggagcagcttgttctgcccctgggaatagcgtttgcaagctgtgcattgtttggagtcacattcaggtatgcagtcagaagagacttggatgataatcatctcaaatccggagccgttgcagcttttgggtttgttaaaggacttggtatgttgagcagaggaccgccattggagctgagctgggaaagcttgttttcacatgggatagacggcgccgttttggtgtctcagagcgtcttgatatttgcgtttgcgtccataggtttggacttctgtttcaagatgaagctcttaagaccatttcctagctctgactag

SEQ ID NO: 82856 - protein, 302 aa, Arabidopsis thaliana
  peptide (1)..(302): Ceres Seq. ID no. 12667590
  misc_feature (1)..(302): Homolog of NCBI NO: 7487177 NR Description: hypothetical protein T19F6.80 - Arabidopsis >gi|5668637|emb|CAB51652.1| hypothetical protein [Arabidopsis >gi|7269258|emb|CAB81327.1| hypothetical protein [Arabidopsis
  misc_feature (1)..(302): Homolog of NCBI NO: 30686406 NR Description: expressed protein [Arabidopsis thaliana]
  misc_feature (1)..(302): Homolog of NCBI NO: 28393641 NR Description: unknown protein [Arabidopsis thaliana]
  misc_feature (206)..(300): Homolog of NCBI NO: 23130310 NR Description: hypothetical protein [Nostoc punctiforme]
MQSLSLQSLPWKPNSVTLPEINLLNPKQLTASSSQYRRTRNWRIRSSSEDNVAISSDGGDLKNSLSGIVGNQVEELLSREENKGLLDGLEKASLRVEIAKRELEDIERQEIEAKLLQDYINQLESRAAEEIDAARSMVEEAERSLSLADNSTIGSSEKGYSIDKDKERLESAKAAVIAAAVGTIAELPFALSQVASMEQLVLPLGIAFASCALFGVTFRYAVRRDLDDNHLKSGAVAAFGFVKGLGMLSRGPPLELSWESLFSHGIDGAVLVSQSVLIFAFASIGLDFCFKMKLLRPFPSSD

SEQ ID NO: 82857 - protein, 166 aa, Arabidopsis thaliana; identical to SEQ ID NO: 47494
  peptide (1)..(166): Ceres Seq. ID no. 12667591
  misc_feature (1)..(166): Homolog of NCBI NO: 7487177 NR Description: hypothetical protein T19F6.80 - Arabidopsis >gi|5668637|emb|CAB51652.1| hypothetical protein [Arabidopsis >gi|7269258|emb|CAB81327.1| hypothetical protein [Arabidopsis
  misc_feature (1)..(166): Homolog of NCBI NO: 30686406 NR Description: expressed protein [Arabidopsis thaliana]
  misc_feature (1)..(166): Homolog of NCBI NO: 28393641 NR Description: unknown protein [Arabidopsis thaliana]
  misc_feature (70)..(164): Homolog of NCBI NO: 23130310 NR Description: hypothetical protein [Nostoc punctiforme]

SEQ ID NO: 82858 - DNA, 1619 bp, Arabidopsis thaliana
  misc_feature (1)..(1619): Ceres Seq. ID no. 12667636
  misc_feature: MA Experiment ID: 20000184 Result: Down-regulated in Transcription
  misc_feature: MA Experiment 20000184 PARAMETER Experiment Name: At_Shoots__P Parameter: Age (day) Value: 7
  misc_feature: MA Experiment 20000184 PARAMETER Experiment Name: At_Shoots__P Parameter: Tissue Value: Shoots vs. Whole Plant
  misc_feature: MA Experiment ID: 20000794 Result: Up-regulated in Transcription
  misc_feature: MA Experiment 20000794 PARAMETER Experiment Name: At_Petals_P Parameter: Age (day) Value: 23-25 days
  misc_feature: MA Experiment 20000794 PARAMETER Experiment Name: At_Petals_P Parameter: Plant Line Value: WS
  misc_feature: MA Experiment 20000794 PARAMETER Experiment Name: At_Petals_P Parameter: Tissue Value: Petals vs. Whole plant
  misc_feature: MA Experiment ID: 20001905 Result: Up-regulated in Transcription
  misc_feature: MA Experiment 20001905 PARAMETER Experiment Name: At_Drought_Reproduction_P Parameter: Age (day) Value: 40
  misc_feature: MA Experiment 20001905 PARAMETER Experiment Name: At_Drought_Reproduction_P Parameter: Organism Value: A. thaliana
  misc_feature: MA Experiment 20001905 PARAMETER Experiment Name: At_Drought_Reproduction_P Parameter: Plant Line Value: WS
  misc_feature: MA Experiment 20001905 PARAMETER Experiment Name: At_Drought_Reproduction_P Parameter: Timepoint (day) Value: 10
  misc_feature: MA Experiment 20001905 PARAMETER Experiment Name: At_Drought_Reproduction_P Parameter: Tissue Value: Rosettes
  misc_feature: MA Experiment 20001905 PARAMETER Experiment Name: At_Drought_Reproduction_P Parameter: Treatment Value: Drought vs. No Drought
ctgcctttcctctttctctctctctatctatcaaacactagacttgaagaaatgcagtgaaattgaaattgagtagaagcagaagagaatatggtggtaaggaaggtgggcaagtatgaattaggtagaacaatcggcgaaggtactttcgctaaagtcaagttcgctcagaatacagagaccggtgagagcgtcgccatgaaaatcgtggatcgtagcacaatcatcaagcgcaagatggtggatcagattaagagagagatctcgattatgaagcttgttcgtcatccttgtgttgttcgtctttatgaggttctagcaagccgtacaaagatttatatcatcctggagtacattactggtggtgaactgtttgataagattgttcgtaatggacgacttagtgagtcagaagctaggaaatactttcaccagcttattgatggagttgattactgtcatagtaaaggtgtttaccacagagatctaaagccggaaaatcttctgttggattctcaaggaaatctcaagatatctgattttggcctcagtgcattacctgaacaaggagttaccatcctaaagacaacatgtggaactcccaattacgttgctcctgaggttctcagtcacaagggttacaatggtgccgttgcagatatttggtcctgtggggtcatcctttatgttcttatggcaggatatcttccatttgatgaaatggatctaccaactttatatagtaagatcgacaaagctgagttctcttgcccctcatattttgccctgggggcaaagtccttgattaatagaattttggatccaaatccagaaactcggattacaattgcagaaatcaggaaagatgagtggtttctaaaggattacactcctgtacaacttatcgattacgaacatgtaaacctggatgatgtatatgctgcttttgatgatccggaggaacaaacatatgcacaggatggaacaagagacacaggtccactaactctaaatgcgtttgacctaattattctatctcagggcctgaacctcgcaactctttttgaccgtggaaaggactccatgaagcaccagacaaggttcatctcacacaagccagcaaacgtggttctctcaagcatggaagttgtgtcacagtctatgggctttaagacacacattcgtaattacaagatgagagtggaaggattatctgcaaataagacatctcatttctccgtcatactagaagtcttcaaagttgcaccatcaattctcatggtagacattcaaaatgcagcaggagacgcagaagaataccttaagttctacaagactttttgtagtaagcttgatgacatcatttggaagccgccagatgcatctatgagaaatcgagtcaccaaggccaagagtaaaagacgttgaatccacgtgcgtggtattcaagcagagctttcacagaagacagttagaaacaatatttaactctctgtgtttcttaagtgctttagtcgagtgaatatgtacaagcttgttgatttggttttaatttatgaatacatagaagattgtactaaacttatacgatatcaagactaaattgagtgaaaattgct

SEQ ID NO: 82859 - protein, 445 aa, Arabidopsis thaliana
  peptide (1)..(445): Ceres Seq. ID no. 12667637
  misc_feature (9)..(262): Pfam Name: Protein kinase domain Pfam Description: Protein kinase domain
  misc_feature (1)..(445): Homolog of NCBI NO: 15233820 NR Description: serine/threonine kinase-like protein; protein id:
  misc_feature (3)..(439): Homolog of NCBI NO: 15238499 NR Description: serine/threonine protein kinase SOS2 protein id: At5g35410.1, supported by cDNA: gi_14701909, by cDNA: gi_20466309 [Arabidopsis thaliana]
  misc_feature (3)..(368): Homolog of NCBI NO: 34913564 NR Description: putative serine/threonine-specific protein kinase
  misc_feature (5)..(430): Homolog of NCBI NO: 25387051 NR Description: probable serine/threonine kinase [imported] - thaliana >gi|12320856|gb|AAG50566.1|AC073506_8 serine/threonine
  misc_feature (5)..(428): Homolog of NCBI NO: 34393400 NR Description: putative CBL-interacting protein kinase 23 [Oryza
  misc_feature (5)..(430): Homolog of NCBI NO: 18397430 NR Description: serine/threonine kinase, putative; protein id: supported by cDNA: gi_14486385, supported by cDNA: gi_15912282,
  misc_feature (2)..(426): Homolog of NCBI NO: 30683336 NR Description: CBL-interacting protein kinase 3 [Arabidopsis
  misc_feature (2)..(434): Homolog of NCBI NO: 7446372 NR Description: probable serine/threonine kinase (EC 2.7.1.-) - sorghum >gi|2632254|emb|CAA73068.1| serine/threonine kinase
  misc_feature (2)..(433): Homolog of NCBI NO: 7446371 NR Description: probable serine/threonine kinase (EC 2.7.1.-) - sorghum >gi|2632252|emb|CAA73067.1| serine/threonine kinase
  misc_feature (5)..(427): Homolog of NCBI NO: 34902248 NR Description: Putative serine/threonine kinase [Oryza sativa
MVVRKVGKYELGRTIGEGTFAKVKFAQNTETGESVAMKIVDRSTIIKRKMVDQIKREISIMKLVRHPCVVRLYEVLASRTKIYIILEYITGGELFDKIVRNGRLSESEARKYFHQLIDGVDYCHSKGVYHRDLKPENLLLDSQGNLKISDFGLSALPEQGVTILKTTCGTPNYVAPEVLSHKGYNGAVADIWSCGVILYVLMAGYLPFDEMDLPTLYSKIDKAEFSCPSYFALGAKSLINRILDPNPETRITIAEIRKDEWFLKDYTPVQLIDYEHVNLDDVYAAFDDPEEQTYAQDGTRDTGPLTLNAFDLIILSQGLNLATLFDRGKDSMKHQTRFISHKPANVVLSSMEVVSQSMGFKTHIRNYKMRVEGLSANKTSHFSVILEVFKVAPSILMVDIQNAAGDAEEYLKFYKTFCSKLDDIIWKPPDASMRNRVTKAKSKRR

SEQ ID NO: 82860 - protein, 409 aa, Arabidopsis thaliana
  peptide (1)..(409): Ceres Seq. ID no. 12667638
  misc_feature (1)..(226): Pfam Name: Protein kinase domain Pfam Description: Protein kinase domain
  misc_feature (1)..(409): Homolog of NCBI NO: 15233820 NR Description: serine/threonine kinase-like protein; protein id:
  misc_feature (1)..(403): Homolog of NCBI NO: 15238499 NR Description: serine/threonine protein kinase SOS2 protein id: At5g35410.1, supported by cDNA: gi_14701909, by cDNA: gi_20466309 [Arabidopsis thaliana]
  misc_feature (1)..(332): Homolog of NCBI NO: 34913564 NR Description: putative serine/threonine-specific protein kinase
  misc_feature (1)..(394): Homolog of NCBI NO: 25387051 NR Description: probable serine/threonine kinase [imported] - thaliana >gi|12320856|gb|AAG50566.1|AC073506_8 serine/threonine
  misc_feature (1)..(392): Homolog of NCBI NO: 34393400 NR Description: putative CBL-interacting protein kinase 23 [Oryza
  misc_feature (1)..(394): Homolog of NCBI NO: 18397430 NR Description: serine/threonine kinase, putative; protein id: supported by cDNA: gi_14486385, supported by cDNA: gi_15912282,
  misc_feature (1)..(390): Homolog of NCBI NO: 30683336 NR Description: CBL-interacting protein kinase 3 [Arabidopsis
  misc_feature (1)..(398): Homolog of NCBI NO: 7446372 NR Description: probable serine/threonine kinase (EC 2.7.1.-) - sorghum >gi|2632254|emb|CAA73068.1| serine/threonine kinase
  misc_feature (1)..(397): Homolog of NCBI NO: 7446371 NR Description: probable serine/threonine kinase (EC 2.7.1.-) - sorghum >gi|2632252|emb|CAA73067.1| serine/threonine kinase
  misc_feature (1)..(391): Homolog of NCBI NO: 34902248 NR Description: Putative serine/threonine kinase [Oryza sativa
MKIVDRSTIIKRKMVDQIKREISIMKLVRHPCVVRLYEVLASRTKIYIILEYITGGELFDKIVRNGRLSESEARKYFHQLIDGVDYCHSKGVYHRDLKPENLLLDSQGNLKISDFGLSALPEQGVTILKTTCGTPNYVAPEVLSHKGYNGAVADIWSCGVILYVLMAGYLPFDEMDLPTLYSKIDKAEFSCPSYFALGAKSLINRILDPNPETRITIAEIRKDEWFLKDYTPVQLIDYEHVNLDDVYAAFDDPEEQTYAQDGTRDTGPLTLNAFDLIILSQGLNLATLFDRGKDSMKHQTRFISHKPANVVLSSMEVVSQSMGFKTHIRNYKMRVEGLSANKTSHFSVILEVFKVAPSILMVDIQNAAGDAEEYLKFYKTFCSKLDDIIWKPPDASMRNRVTKAKSKRR

SEQ ID NO: 82861 - protein, 396 aa, Arabidopsis thaliana
  peptide (1)..(396): Ceres Seq. ID no. 12667639
  misc_feature (1)..(213): Pfam Name: Protein kinase domain Pfam Description: Protein kinase domain
  misc_feature (1)..(396): Homolog of NCBI NO: 15233820 NR Description: serine/threonine kinase-like protein; protein id:
  misc_feature (1)..(390): Homolog of NCBI NO: 15238499 NR Description: serine/threonine protein kinase SOS2 protein id: At5g35410.1, supported by cDNA: gi_14701909, by cDNA: gi_20466309 [Arabidopsis thaliana]
  misc_feature (1)..(319): Homolog of NCBI NO: 34913564 NR Description: putative serine/threonine-specific protein kinase
  misc_feature (1)..(381): Homolog of NCBI NO: 25387051 NR Description: probable serine/threonine kinase [imported] - thaliana >gi|12320856|gb|AAG50566.1|AC073506_8 serine/threonine
  misc_feature (1)..(379): Homolog of NCBI NO: 34393400 NR Description: putative CBL-interacting protein kinase 23 [Oryza
  misc_feature (1)..(381): Homolog of NCBI NO: 18397430 NR Description: serine/threonine kinase, putative; protein id: supported by cDNA: gi_14486385, supported by cDNA: gi_15912282,
  misc_feature (1)..(377): Homolog of NCBI NO: 30683336 NR Description: CBL-interacting protein kinase 3 [Arabidopsis
  misc_feature (1)..(385): Homolog of NCBI NO: 7446372 NR Description: probable serine/threonine kinase (EC 2.7.1.-) - sorghum >gi|2632254|emb|CAA73068.1| serine/threonine kinase
  misc_feature (1)..(384): Homolog of NCBI NO: 7446371 NR Description: probable serine/threonine kinase (EC 2.7.1.-) - sorghum >gi|2632252|emb|CAA73067.1| serine/threonine kinase
  misc_feature (1)..(378): Homolog of NCBI NO: 34902248 NR Description: Putative serine/threonine kinase [Oryza sativa
MVDQIKREISIMKLVRHPCVVRLYEVLASRTKIYIILEYITGGELFDKIVRNGRLSESEARKYFHQLIDGVDYCHSKGVYHRDLKPENLLLDSQGNLKISDFGLSALPEQGVTILKTTCGTPNYVAPEVLSHKGYNGAVADIWSCGVILYVLMAGYLPFDEMDLPTLYSKIDKAEFSCPSYFALGAKSLINRILDPNPETRITIAEIRKDEWFLKDYTPVQLIDYEHVNLDDVYAAFDDPEEQTYAQDGTRDTGPLTLNAFDLIILSQGLNLATLFDRGKDSMKHQTRFISHKPANVVLSSMEVVSQSMGFKTHIRNYKMRVEGLSANKTSHFSVILEVFKVAPSILMVDIQNAAGDAEEYLKFYKTFCSKLDDIIWKPPDASMRNRVTKAKSKRR

SEQ ID NO: 82862 - DNA, 1604 bp, Arabidopsis thaliana
  misc_feature (1)..(1604): Ceres Seq. ID no. 12667673
  misc_feature: MA Experiment ID: 20000184 Result: Down-regulated in Transcription
  misc_feature: MA Experiment 20000184 PARAMETER Experiment Name: At_Shoots__P Parameter: Age (day) Value: 7
  misc_feature: MA Experiment 20000184 PARAMETER Experiment Name: At_Shoots__P Parameter: Tissue Value: Shoots vs. Whole Plant
  misc_feature: MA Experiment ID: 20000794 Result: Up-regulated in Transcription
  misc_feature: MA Experiment 20000794 PARAMETER Experiment Name: At_Petals_P Parameter: Age (day) Value: 23-25 days
  misc_feature: MA Experiment 20000794 PARAMETER Experiment Name: At_Petals_P Parameter: Plant Line Value: WS
  misc_feature: MA Experiment 20000794 PARAMETER Experiment Name: At_Petals_P Parameter: Tissue Value: Petals vs. Whole plant
ctctgcttaaaaactagggttaggctacgattctgtttacaccaaaaaagcttttcgtcatcgccgtttggctttctgaaacaaatcacaccgtttaagattttctctgattctgagattatggagatggagcgtgtgcatgaattccctcatactcacatggatcgtcgtcccagaaagagagcgcgtctcggttgggatgtgttgcctcaggcaaccaaggctcaggtaggaatgttttgtgggcaagagattggaaatatatcaagctttgcatcttccggagctccttcagacaatagtagctctctttgtgttaagggtgtggctcgaaatggttctcccccatggcgagaagatgataaggatggacattacatatttgaactgggagatgacttaactccacgctataaaatttatagcaaaatgggggaaggtacttttggtcaagtgctagaatgttgggatagggagaggaaggaaatggtggcagtaaaaattgtccgtggtgtgaagaaataccgtgaggctgctatgattgaaattgaaatgctgcaacagcttggtaaacatgacaaaggtggcaatcgttgtgtacaaattcggaactggtttgactatcgtaaccatatctgtattgtatttgagaagcttggatcgagtttatacgattttcttcggaaaaacaattatcgctcctttcccattgatcttgtccgtgagattggctggcaactcttggaatgtgtagcatttatgcatgacttgcgcatgattcatacggaccttaaaccagaaaatattctgttagtctcctcagactatgtgaagattcccgagtacaaggggtcccgattacaaagggatgtatgctataaaagagtgcctaaatcaagtgcaataaaggtgattgattttggtagcacaacttatgagcgccaggaccaaacctacattgtatcaaccagacattatagggcaccagaagtcattttaggtcttggctggagttatccgtgtgatgtttggagcgttggatgtatcatagtggagttgtgcacgggtgaagcattgttccaaacacatgaaaacctggagcatctagcgatgatggagcgtgttcttgggccgtttcctcaacaaatgctgaagaaagtggaccggcactcagagaaatatgtgagaagaggtcgtttggattggccagatggggcaacctcaagagatagcctgaaggcagtattgaagcttcctcggcttcagaatttaataatgcaacatgtggaccactcagccggggagttaataaatatggtgcaaggacttctgcgatttgatccgtcagagagaataaccgctcgtgaagctctgaggcatccgtttttcgcaaggagaagatagcgggacttgaatttgacgagtgtaaatagggatgaaatatgtatgatttgtagcaagtctttaccccacaaccccacgaattctgatataaattaacaaatatgctaagatcactctttttttaaccgtgataggcgattgtttgtctatctttgtaaactggatcgtttcaattcaaaagagttttagttttggattct

SEQ ID NO: 82863 - protein, 467 aa, Arabidopsis thaliana
  peptide (1)..(467): Ceres Seq. ID no. 12667674
  misc_feature (138)..(463): Pfam Name: Protein kinase domain Pfam Description: Protein kinase domain
  misc_feature (41)..(467): Homolog of NCBI NO: 15233948 NR Description: protein kinase (AFC2); protein id: At4g24740.1, by cDNA: gi_601788, supported by cDNA: gi_642129 [Arabidopsis >gi|1703200|sp|P51567|AFC2_ARATH Protein kinase AFC2
  misc_feature (41)..(465): Homolog of NCBI NO: 7211773 NR Description: protein kinase MK5 [Mesembryanthemum crystallinum]
  misc_feature (41)..(467): Homolog of NCBI NO: 7489189 NR Description: protein kinase PK12 (EC 2.7.1.-), - common tobacco >gi|2911280|gb|AAC04324.1| PK12 protein kinase
  misc_feature (33)..(467): Homolog of NCBI NO: 15231839 NR Description: protein kinase (AME2/AFC1); protein id: supported by cDNA: gi_601786, supported by cDNA: gi_642131 thaliana] >gi|26454604|sp|P51566|AFC1_ARATH Protein kinase AFC1
  misc_feature (40)..(467): Homolog of NCBI NO: 30693861 NR Description: protein kinase (AME2/AFC1) [Arabidopsis thaliana]
  misc_feature (33)..(467): Homolog of NCBI NO: 601787 NR Description: protein kinase
  misc_feature (41)..(465): Homolog of NCBI NO: 34908100 NR Description: putative protein kinase AFC1 [Oryza sativa
  misc_feature (96)..(463): Homolog of NCBI NO: 601791 NR Description: protein kinase
  misc_feature (96)..(463): Homolog of NCBI NO: 15233872 NR Description: protein kinase AME3; protein id: At4g32660.1, by cDNA: gi_642133 [Arabidopsis thaliana]
  misc_feature (109)..(463): Homolog of NCBI NO: 34912246 NR Description: putative protein kinase AFC3 [Oryza sativa
LCLKTRVRLRFCLHQKSFSSSPFGFLKQITPFKIFSDSEIMEMERVHEFPHTHMDRRPRKRARLGWDVLPQATKAQVGMFCGQEIGNISSFASSGAPSDNSSSLCVKGVARNGSPPWREDDKDGHYIFELGDDLTPRYKIYSKMGEGTFGQVLECWDRERKEMVAVKIVRGVKKYREAAMIEIEMLQQLGKHDKGGNRCVQIRNWFDYRNHICIVFEKLGSSLYDFLRKNNYRSFPIDLVREIGWQLLECVAFMHDLRMIHTDLKPENILLVSSDYVKIPEYKGSRLQRDVCYKRVPKSSAIKVIDFGSTTYERQDQTYIVSTRHYRAPEVILGLGWSYPCDVWSVGCIIVELCTGEALFQTHENLEHLAMMERVLGPFPQQMLKKVDRHSEKYVRRGRLDWPDGATSRDSLKAVLKLPRLQNLIMQHVDHSAGELINMVQGLLRFDPSERITAREALRHPFFARRR

SEQ ID NO: 82864 - protein, 427 aa, Arabidopsis thaliana
  peptide (1)..(427): Ceres Seq. ID no. 12667675
  misc_feature (98)..(423): Pfam Name: Protein kinase domain Pfam Description: Protein kinase domain
  misc_feature (1)..(427): Homolog of NCBI NO: 15233948 NR Description: protein kinase (AFC2); protein id: At4g24740.1, by cDNA: gi_601788, supported by cDNA: gi_642129 [Arabidopsis >gi|1703200|sp|P51567|AFC2_ARATH Protein kinase AFC2
  misc_feature (1)..(425): Homolog of NCBI NO: 7211773 NR Description: protein kinase MK5 [Mesembryanthemum crystallinum]
  misc_feature (1)..(427): Homolog of NCBI NO: 7489189 NR Description: protein kinase PK12 (EC 2.7.1.-), - common tobacco >gi|2911280|gb|AAC04324.1| PK12 protein kinase
  misc_feature (1)..(427): Homolog of NCBI NO: 15231839 NR Description: protein kinase (AME2/AFC1); protein id: supported by cDNA: gi_601786, supported by cDNA: gi_642131 thaliana] >gi|26454604|sp|P51566|AFC1_ARATH Protein kinase AFC1
  misc_feature (1)..(427): Homolog of NCBI NO: 30693861 NR Description: protein kinase (AME2/AFC1) [Arabidopsis thaliana]
  misc_feature (1)..(427): Homolog of NCBI NO: 601787 NR Description: protein kinase
  misc_feature (1)..(425): Homolog of NCBI NO: 34908100 NR Description: putative protein kinase AFC1 [Oryza sativa
  misc_feature (56)..(423): Homolog of NCBI NO: 601791 NR Description: protein kinase
  misc_feature (56)..(423): Homolog of NCBI NO: 15233872 NR Description: protein kinase AME3; protein id: At4g32660.1, by cDNA: gi_642133 [Arabidopsis thaliana]
  misc_feature (69)..(423): Homolog of NCBI NO: 34912246 NR Description: putative protein kinase AFC3 [Oryza sativa
MEMERVHEFPHTHMDRRPRKRARLGWDVLPQATKAQVGMFCGQEIGNISSFASSGAPSDNSSSLCVKGVARNGSPPWREDDKDGHYIFELGDDLTPRYKIYSKMGEGTFGQVLECWDRERKEMVAVKIVRGVKKYREAAMIEIEMLQQLGKHDKGGNRCVQIRNWFDYRNHICIVFEKLGSSLYDFLRKNNYRSFPIDLVREIGWQLLECVAFMHDLRMIHTDLKPENILLVSSDYVKIPEYKGSRLQRDVCYKRVPKSSAIKVIDFGSTTYERQDQTYIVSTRHYRAPEVILGLGWSYPCDVWSVGCIIVELCTGEALFQTHENLEHLAMMERVLGPFPQQMLKKVDRHSEKYVRRGRLDWPDGATSRDSLKAVLKLPRLQNLIMQHVDHSAGELINMVQGLLRFDPSERITAREALRHPFFARRR

SEQ ID NO: 82865 - protein, 425 aa, Arabidopsis thaliana
  peptide (1)..(425): Ceres Seq. ID no. 12667676
  misc_feature (96)..(421): Pfam Name: Protein kinase domain Pfam Description: Protein kinase domain
  misc_feature (1)..(425): Homolog of NCBI NO: 15233948 NR Description: protein kinase (AFC2); protein id: At4g24740.1, by cDNA: gi_601788, supported by cDNA: gi_642129 [Arabidopsis >gi|1703200|sp|P51567|AFC2_ARATH Protein kinase AFC2
  misc_feature (1)..(423): Homolog of NCBI NO: 7211773 NR Description: protein kinase MK5 [Mesembryanthemum crystallinum]
  misc_feature (1)..(425): Homolog of NCBI NO: 7489189 NR Description: protein kinase PK12 (EC 2.7.1.-), - common tobacco >gi|2911280|gb|AAC04324.1| PK12 protein kinase
  misc_feature (1)..(425): Homolog of NCBI NO: 15231839 NR Description: protein kinase (AME2/AFC1); protein id: supported by cDNA: gi_601786, supported by cDNA: gi_642131 thaliana] >gi|26454604|sp|P51566|AFC1_ARATH Protein kinase AFC1
  misc_feature (1)..(425): Homolog of NCBI NO: 30693861 NR Description: protein kinase (AME2/AFC1) [Arabidopsis thaliana]
  misc_feature (1)..(425): Homolog of NCBI NO: 601787 NR Description: protein kinase
  misc_feature (1)..(423): Homolog of NCBI NO: 34908100 NR Description: putative protein kinase AFC1 [Oryza sativa
  misc_feature (54)..(421): Homolog of NCBI NO: 601791 NR Description: protein kinase
  misc_feature (54)..(421): Homolog of NCBI NO: 15233872 NR Description: protein kinase AME3; protein id: At4g32660.1, by cDNA: gi_642133 [Arabidopsis thaliana]
  misc_feature (67)..(421): Homolog of NCBI NO: 34912246 NR Description: putative protein kinase AFC3 [Oryza sativa
MERVHEFPHTHMDRRPRKRARLGWDVLPQATKAQVGMFCGQEIGNISSFASSGAPSDNSSSLCVKGVARNGSPPWREDDKDGHYIFELGDDLTPRYKIYSKMGEGTFGQVLECWDRERKEMVAVKIVRGVKKYREAAMIEIEMLQQLGKHDKGGNRCVQIRNWFDYRNHICIVFEKLGSSLYDFLRKNNYRSFPIDLVREIGWQLLECVAFMHDLRMIHTDLKPENILLVSSDYVKIPEYKGSRLQRDVCYKRVPKSSAIKVIDFGSTTYERQDQTYIVSTRHYRAPEVILGLGWSYPCDVWSVGCIIVELCTGEALFQTHENLEHLAMMERVLGPFPQQMLKKVDRHSEKYVRRGRLDWPDGATSRDSLKAVLKLPRLQNLIMQHVDHSAGELINMVQGLLRFDPSERITAREALRHPFFARRR

SEQ ID NO: 82866 - DNA, 522 bp, Arabidopsis thaliana
  misc_feature (1)..(522): Ceres Seq. ID no. 12667700
  misc_feature: MA Experiment ID: 20000179 Result: Down-regulated in Transcription
  misc_feature: MA Experiment 20000179 PARAMETER Experiment Name: At_Germinating_Seeds_P Parameter: Age (hr) Value: 6 vs. 0
  misc_feature: MA Experiment 20000179 PARAMETER Experiment Name: At_Germinating_Seeds_P Parameter: Tissue Value: Germinating Seeds
  misc_feature: MA Experiment ID: 20000180 Result: Down-regulated in Transcription
  misc_feature: MA Experiment 20000180 PARAMETER Experiment Name: At_Germinating_Seeds_P Parameter: Age (hr) Value: 24 vs. 0
  misc_feature: MA Experiment 20000180 PARAMETER Experiment Name: At_Germinating_Seeds_P Parameter: Tissue Value: Germinating Seeds
  misc_feature: MA Experiment ID: 20000184 Result: Up-regulated in Transcription
  misc_feature: MA Experiment 20000184 PARAMETER Experiment Name: At_Shoots__P Parameter: Age (day) Value: 7
  misc_feature: MA Experiment 20000184 PARAMETER Experiment Name: At_Shoots__P Parameter: Tissue Value: Shoots vs. Whole Plant
  misc_feature: MA Experiment ID: 20000265 Result: Down-regulated in Transcription
  misc_feature: MA Experiment 20000265 PARAMETER Experiment Name: At_Open_Flower_P Parameter: Age (day) Value: 21
  misc_feature: MA Experiment 20000265 PARAMETER Experiment Name: At_Open_Flower_P Parameter: Plant Line Value: WS
  misc_feature: MA Experiment 20000265 PARAMETER Experiment Name: At_Open_Flower_P Parameter: Tissue Value: Closed Flower vs. Whole Plant
  misc_feature: MA Experiment ID: 20000286 Result: Down-regulated in Transcription
  misc_feature: MA Experiment 20000286 PARAMETER Experiment Name: At_Open_Flower_P Parameter: Age (day) Value: 21
  misc_feature: MA Experiment 20000286 PARAMETER Experiment Name: At_Open_Flower_P Parameter: Plant Line Value: WS
  misc_feature: MA Experiment 20000286 PARAMETER Experiment Name: At_Open_Flower_P Parameter: Tissue Value: Half Open vs. Whole Plant
  misc_feature: MA Experiment ID: 20000437 Result: Up-regulated in Transcription
  misc_feature: MA Experiment 20000437 PARAMETER Experiment Name: At_Drought_P Parameter: Age (day) Value: 8
  misc_feature: MA Experiment 20000437 PARAMETER Experiment Name: At_Drought_P Parameter: Organism Value: A. thaliana
  misc_feature: MA Experiment 20000437 PARAMETER Experiment Name: At_Drought_P Parameter: Plant Line Value: WS
  misc_feature: MA Experiment 20000437 PARAMETER Experiment Name: At_Drought_P Parameter: Timepoint (hr) Value: 24
  misc_feature: MA Experiment 20000437 PARAMETER Experiment Name: At_Drought_P Parameter: Tissue Value: Whole Plant
  misc_feature: MA Experiment 20000437 PARAMETER Experiment Name: At_Drought_P Parameter: Treatment Value: Drought vs. No Drought
  misc_feature: MA Experiment ID: 20000438 Result: Up-regulated in Transcription
  misc_feature: MA Experiment 20000438 PARAMETER Experiment Name: At_Shoots__P Parameter: Age (day) Value: 14
  misc_feature: MA Experiment 20000438 PARAMETER Experiment Name: At_Shoots__P Parameter: Tissue Value: Shoots vs. Whole Plant
  misc_feature: MA Experiment ID: 20001759 Result: Down-regulated in Transcription
  misc_feature: MA Experiment 20001759 PARAMETER Experiment Name: At_50mM_NH4NO3_L-to-H_P Parameter: Timepoint (hr) Value: 1
  misc_feature: MA Experiment 20001759 PARAMETER Experiment Name: At_50mM_NH4NO3_L-to-H_P Parameter: Tissue Value: Siliques
  misc_feature: MA Experiment 20001759 PARAMETER Experiment Name: At_50mM_NH4NO3_L-to-H_P Parameter: Treatment Value: 50mM NH4NO3 vs 100mM Mannitol
  misc_feature: MA Experiment ID: 20001906 Result: Up-regulated in Transcription
  misc_feature: MA Experiment 20001906 PARAMETER Experiment Name: At_Drought_Reproduction_P Parameter: Age (day) Value: 35
  misc_feature: MA Experiment 20001906 PARAMETER Experiment Name: At_Drought_Reproduction_P Parameter: Organism Value: A. thaliana
  misc_feature: MA Experiment 20001906 PARAMETER Experiment Name: At_Drought_Reproduction_P Parameter: Plant Line Value: WS
  misc_feature: MA Experiment 20001906 PARAMETER Experiment Name: At_Drought_Reproduction_P Parameter: Timepoint (day) Value: 5
  misc_feature: MA Experiment 20001906 PARAMETER Experiment Name: At_Drought_Reproduction_P Parameter: Tissue Value: Siliques
  misc_feature: MA Experiment 20001906 PARAMETER Experiment Name: At_Drought_Reproduction_P Parameter: Treatment Value: Drought vs. No Drought
  misc_feature: MA Experiment ID: 20001907 Result: Up-regulated in Transcription
  misc_feature: MA Experiment 20001907 PARAMETER Experiment Name: At_Drought_Reproduction_P Parameter: Age (day) Value: 37
  misc_feature: MA Experiment 20001907 PARAMETER Experiment Name: At_Drought_Reproduction_P Parameter: Organism Value: A. thaliana
  misc_feature: MA Experiment 20001907 PARAMETER Experiment Name: At_Drought_Reproduction_P Parameter: Plant Line Value: WS
  misc_feature: MA Experiment 20001907 PARAMETER Experiment Name: At_Drought_Reproduction_P Parameter: Timepoint (day) Value: 7
  misc_feature: MA Experiment 20001907 PARAMETER Experiment Name: At_Drought_Reproduction_P Parameter: Tissue Value: Siliques
  misc_feature: MA Experiment 20001907 PARAMETER Experiment Name: At_Drought_Reproduction_P Parameter: Treatment Value: Drought vs. No Drought
  misc_feature: MA Experiment ID: 20001908 Result: Up-regulated in Transcription
  misc_feature: MA Experiment 20001908 PARAMETER Experiment Name: At_Drought_Reproduction_P Parameter: Age (day) Value: 40
  misc_feature: MA Experiment 20001908 PARAMETER Experiment Name: At_Drought_Reproduction_P Parameter: Organism Value: A. thaliana
  misc_feature: MA Experiment 20001908 PARAMETER Experiment Name: At_Drought_Reproduction_P Parameter: Plant Line Value: WS
  misc_feature: MA Experiment 20001908 PARAMETER Experiment Name: At_Drought_Reproduction_P Parameter: Timepoint (day) Value: 10
  misc_feature: MA Experiment 20001908 PARAMETER Experiment Name: At_Drought_Reproduction_P Parameter: Tissue Value: Siliques
  misc_feature: MA Experiment 20001908 PARAMETER Experiment Name: At_Drought_Reproduction_P Parameter: Treatment Value: Drought vs. No Drought
atggcggatacagctagaggaacccatcacgatatcatcggcagagaccagtacccgatgatgggccgagaccgagaccagtaccagatgtccggacgaggatctgactactccaagtctaggcagattgctaaagctgcaactgctgtcacagctggtggttccctccttgttctctccagccttacccttgttggaactgtcatagctttgactgttgcaacacctctgctcgttatcttcagcccaatccttgtcccggctctcatcacagttgcactcctcatcaccggttttctttcctctggagggtttggcattgccgctataaccgttttctcttggatttacaagtacgcaacgggagagcacccacagggatcagacaagttggacagtgcaaggatgaagttgggaagcaaagctcaggatctgaaagacagagctcagtactacggacagcaacatactggtggggaacatgaccgtgaccgtactcgtggtggccagcacactacttaa

SEQ ID NO: 82867 - protein, 173 aa, Arabidopsis thaliana
  peptide (1)..(173): Ceres Seq. ID no. 12667701
  misc_feature (39)..(149): Pfam Name: Oleosin Pfam Description: Oleosin
  misc_feature (1)..(173): Homolog of NCBI NO: 15234945 NR Description: oleosin; protein id: At4g25140.1 [Arabidopsis >gi|266693|sp|P29525|OLE1_ARATH Oleosin 18.5 kDa
  misc_feature (1)..(173): Homolog of NCBI NO: 228416 NR Description: oleosin
  misc_feature (1)..(173): Homolog of NCBI NO: 129082 NR Description: Oleosin Bn-III (BnIII) >gi|81692|pir||S22475
  misc_feature (10)..(173): Homolog of NCBI NO: 129097 NR Description: Major oleosin NAP-II >gi|2119750|pir||S70915
  misc_feature (8)..(173): Homolog of NCBI NO: 129083 NR Description: Oleosin Bn-V (BnV) >gi|280390|pir||S25089 oleosin
  misc_feature (34)..(156): Homolog of NCBI NO: 2119749 NR Description: oleosin - almond
  misc_feature (34)..(156): Homolog of NCBI NO: 3914199 NR Description: OLEOSIN 1 >gi|460803|emb|CAA55008.1| oleosin
  misc_feature (39)..(159): Homolog of NCBI NO: 29170509 NR Description: oleosin [Corylus avellana]
  misc_feature (39)..(160): Homolog of NCBI NO: 7442009 NR Description: oleosin-like protein, salt stress-induced - sweet
  misc_feature (20)..(163): Homolog of NCBI NO: 15241406 NR Description: oleosin; protein id: At5g51210.1 [Arabidopsis >gi|18206251|sp|Q43284|OLE3_ARATH Oleosin 14.9 kDa
MADTARGTHHDIIGRDQYPMMGRDRDQYQMSGRGSDYSKSRQIAKAATAVTAGGSLLVLSSLTLVGTVIALTVATPLLVIFSPILVPALITVALLITGFLSSGGFGIAAITVFSWIYKYATGEHPQGSDKLDSARMKLGSKAQDLKDRAQYYGQQHTGGEHDRDRTRGGQHTT

SEQ ID NO: 82868 - protein, 154 aa, Arabidopsis thaliana
  peptide (1)..(154): Ceres Seq. ID no. 12667702
  misc_feature (20)..(130): Pfam Name: Oleosin Pfam Description: Oleosin
  misc_feature (1)..(154): Homolog of NCBI NO: 15234945 NR Description: oleosin; protein id: At4g25140.1 [Arabidopsis >gi|266693|sp|P29525|OLE1_ARATH Oleosin 18.5 kDa
  misc_feature (1)..(154): Homolog of NCBI NO: 228416 NR Description: oleosin
  misc_feature (1)..(154): Homolog of NCBI NO: 129082 NR Description: Oleosin Bn-III (BnIII) >gi|81692|pir||S22475
  misc_feature (1)..(154): Homolog of NCBI NO: 129097 NR Description: Major oleosin NAP-II >gi|2119750|pir||S70915
  misc_feature (1)..(154): Homolog of NCBI NO: 129083 NR Description: Oleosin Bn-V (BnV) >gi|280390|pir||S25089 oleosin
  misc_feature (15)..(137): Homolog of NCBI NO: 2119749 NR Description: oleosin - almond
  misc_feature (15)..(137): Homolog of NCBI NO: 3914199 NR Description: OLEOSIN 1 >gi|460803|emb|CAA55008.1| oleosin
  misc_feature (20)..(140): Homolog of NCBI NO: 29170509 NR Description: oleosin [Corylus avellana]
  misc_feature (20)..(141): Homolog of NCBI NO: 7442009 NR Description: oleosin-like protein, salt stress-induced - sweet
  misc_feature (1)..(144): Homolog of NCBI NO: 15241406 NR Description: oleosin; protein id: At5g51210.1 [Arabidopsis >gi|18206251|sp|Q43284|OLE3_ARATH Oleosin 14.9 kDa
MMGRDRDQYQMSGRGSDYSKSRQIAKAATAVTAGGSLLVLSSLTLVGTVIALTVATPLLVIFSPILVPALITVALLITGFLSSGGFGIAAITVFSWIYKYATGEHPQGSDKLDSARMKLGSKAQDLKDRAQYYGQQHTGGEHDRDRTRGGQHTT

SEQ ID NO: 82869 - protein, 153 aa, Arabidopsis thaliana
  peptide (1)..(153): Ceres Seq. ID no. 12667703
  misc_feature (19)..(129): Pfam Name: Oleosin Pfam Description: Oleosin
  misc_feature (1)..(153): Homolog of NCBI NO: 15234945 NR Description: oleosin; protein id: At4g25140.1 [Arabidopsis >gi|266693|sp|P29525|OLE1_ARATH Oleosin 18.5 kDa
  misc_feature (1)..(153): Homolog of NCBI NO: 228416 NR Description: oleosin
  misc_feature (1)..(153): Homolog of NCBI NO: 129082 NR Description: Oleosin Bn-III (BnIII) >gi|81692|pir||S22475
  misc_feature (1)..(153): Homolog of NCBI NO: 129097 NR Description: Major oleosin NAP-II >gi|2119750|pir||S70915
  misc_feature (1)..(153): Homolog of NCBI NO: 129083 NR Description: Oleosin Bn-V (BnV) >gi|280390|pir||S25089 oleosin
  misc_feature (14)..(136): Homolog of NCBI NO: 2119749 NR Description: oleosin - almond
  misc_feature (14)..(136): Homolog of NCBI NO: 3914199 NR Description: OLEOSIN 1 >gi|460803|emb|CAA55008.1| oleosin
  misc_feature (19)..(139): Homolog of NCBI NO: 29170509 NR Description: oleosin [Corylus avellana]
  misc_feature (19)..(140): Homolog of NCBI NO: 7442009 NR Description: oleosin-like protein, salt stress-induced - sweet
  misc_feature (1)..(143): Homolog of NCBI NO: 15241406 NR Description: oleosin; protein id: At5g51210.1 [Arabidopsis >gi|18206251|sp|Q43284|OLE3_ARATH Oleosin 14.9 kDa
MGRDRDQYQMSGRGSDYSKSRQIAKAATAVTAGGSLLVLSSLTLVGTVIALTVATPLLVIFSPILVPALITVALLITGFLSSGGFGIAAITVFSWIYKYATGEHPQGSDKLDSARMKLGSKAQDLKDRAQYYGQQHTGGEHDRDRTRGGQHTT

SEQ ID NO: 82870 - DNA, 1062 bp, Arabidopsis thaliana
  misc_feature (1)..(1062): Ceres Seq. ID no. 12667728
  misc_feature: MA Experiment ID: 20000451 Result: Up-regulated in Transcription
  misc_feature: MA Experiment 20000451 PARAMETER Experiment Name: At_CS6879_Shoots-Roots_P Parameter: Age (day) Value: 14
  misc_feature: MA Experiment 20000451 PARAMETER Experiment Name: At_CS6879_Shoots-Roots_P Parameter: Organism Value: A. thaliana
  misc_feature: MA Experiment 20000451 PARAMETER Experiment Name: At_CS6879_Shoots-Roots_P Parameter: Plant Line Value: CS6879 vs. WS
  misc_feature: MA Experiment 20000451 PARAMETER Experiment Name: At_CS6879_Shoots-Roots_P Parameter: Tissue Value: Roots
atggaaggtaaaggagtaacctttagttctgttatagttccttctgttcaagagatggtgaaggagaaggtgatcacaacggtacttcctccgaggtatgtgcggtctgatcaagaaaaaggcgaggcagccattgattctggtgaaaaccaaatcccaatcatagacatgagtcttttgtcttcttcaacctccatggattctgagattgacaaactcgactttgcttgcaaagaatggggatttttccagcttgtaaaccatggaatggacttggacaaattcaagtccgatattcaagatttcttcaaccttcccatggaagagaagaagaagctgtggcaacaacccggtgatatcgaagggtttggacaagcttttgtgttttcagaagagcagaaactcgattgggctgacgttttcttccttacaatgcaacctgttccattacgcaaacctcacttgtttcccaagttacctcttcccttcagagatacactggatacgtattcggctgaactgaaaagcatagctaaggtcttattcgcgaaactagcgagtgcactcaaaatcaaacctgaggaaatggaaaagttgtttgatgatgagttaggtcagagaattaggatgaattactacccgccttgtccggagcccgataaggctattggtctaactccacattccgatgctacaggactcaccatactgttgcaggttaatgaagttgaaggtctccaaatcaagaaagatggcaagtgggtttctgtcaaacctctcccaaatgctttagttgtcaatgttggagacatcttagagatcataacgaatgggacataccgaagtatagagcatcgtggagttgtaaactcagagaaagagaggctttctgtggcgtcattccataatacggggttcggtaaagaaattggtccgatgagaagtctcgtggaaaggcacaagggtgcacttttcaaaaccctgaccactgaagagtatttccatggcttgttttcccgtgagctcgatggaaaagcttaccttgatgttatgagaatctaa

SEQ ID NO: 82871 - protein, 353 aa, Arabidopsis thaliana
  peptide (1)..(353): Ceres Seq. ID no. 12667729
  misc_feature (204)..(304): Pfam Name: 2OG-Fe(II) oxygenase superfamily Pfam Description: 2OG-Fe(II) oxygenase superfamily
  misc_feature (1)..(353): Homolog of NCBI NO: 15235017 NR Description: SRG1-like protein; protein id: At4g25310.1
  misc_feature (1)..(353): Homolog of NCBI NO: 15235014 NR Description: SRG1-like protein; protein id: At4g25300.1
  misc_feature (1)..(353): Homolog of NCBI NO: 15219988 NR Description: SRG1-like protein; protein id: At1g17020.1,
  misc_feature (1)..(353): Homolog of NCBI NO: 15219986 NR Description: SRG1-like protein; protein id: At1g17010.1
  misc_feature (1)..(353): Homolog of NCBI NO: 26451337 NR Description: SRG1 like protein [Arabidopsis thaliana]
  misc_feature (1)..(353): Homolog of NCBI NO: 25285681 NR Description: SRG1 homolog [imported] - Arabidopsis thaliana
  misc_feature (1)..(353): Homolog of NCBI NO: 15218400 NR Description: flavanone 3-hydroxylase, putative; protein id: supported by cDNA: gi_13507544, supported by cDNA: gi_15293284
  misc_feature (29)..(353): Homolog of NCBI NO: 37536820 NR Description: putative ethylene-forming enzyme [Oryza sativa
  misc_feature (10)..(352): Homolog of NCBI NO: 34895204 NR Description: P0463A02.24 [Oryza sativa (japonica
  misc_feature (13)..(353): Homolog of NCBI NO: 18402992 NR Description: expressed protein; protein id: At3g21420.1, by cDNA: 118190. [Arabidopsis thaliana]
MEGKGVTFSSVIVPSVQEMVKEKVITTVLPPRYVRSDQEKGEAAIDSGENQIPIIDMSLLSSSTSMDSEIDKLDFACKEWGFFQLVNHGMDLDKFKSDIQDFFNLPMEEKKKLWQQPGDIEGFGQAFVFSEEQKLDWADVFFLTMQPVPLRKPHLFPKLPLPFRDTLDTYSAELKSIAKVLFAKLASALKIKPEEMEKLFDDELGQRIRMNYYPPCPEPDKAIGLTPHSDATGLTILLQVNEVEGLQIKKDGKWVSVKPLPNALVVNVGDILEIITNGTYRSIEHRGVVNSEKERLSVASFHNTGFGKEIGPMRSLVERHKGALFKTLTTEEYFHGLFSRELDGKAYLDVMRI

SEQ ID NO: 82872 - protein, 335 aa, Arabidopsis thaliana
  peptide (1)..(335): Ceres Seq. ID no. 12667730
  misc_feature (186)..(286): Pfam Name: 2OG-Fe(II) oxygenase superfamily Pfam Description: 2OG-Fe(II) oxygenase superfamily
  misc_feature (1)..(335): Homolog of NCBI NO: 15235017 NR Description: SRG1-like protein; protein id: At4g25310.1
  misc_feature (1)..(335): Homolog of NCBI NO: 15235014 NR Description: SRG1-like protein; protein id: At4g25300.1
  misc_feature (1)..(335): Homolog of NCBI NO: 15219988 NR Description: SRG1-like protein; protein id: At1g17020.1,
  misc_feature (1)..(335): Homolog of NCBI NO: 15219986 NR Description: SRG1-like protein; protein id: At1g17010.1
  misc_feature (1)..(335): Homolog of NCBI NO: 26451337 NR Description: SRG1 like protein [Arabidopsis thaliana]
  misc_feature (1)..(335): Homolog of NCBI NO: 25285681 NR Description: SRG1 homolog [imported] - Arabidopsis thaliana
  misc_feature (1)..(335): Homolog of NCBI NO: 15218400 NR Description: flavanone 3-hydroxylase, putative; protein id: supported by cDNA: gi_13507544, supported by cDNA: gi_15293284
  misc_feature (11)..(335): Homolog of NCBI NO: 37536820 NR Description: putative ethylene-forming enzyme [Oryza sativa
  misc_feature (1)..(334): Homolog of NCBI NO: 34895204 NR Description: P0463A02.24 [Oryza sativa (japonica
  misc_feature (1)..(335): Homolog of NCBI NO: 18402992 NR Description: expressed protein; protein id: At3g21420.1, by cDNA: 118190. [Arabidopsis thaliana]
MVKEKVITTVLPPRYVRSDQEKGEAAIDSGENQIPIIDMSLLSSSTSMDSEIDKLDFACKEWGFFQLVNHGMDLDKFKSDIQDFFNLPMEEKKKLWQQPGDIEGFGQAFVFSEEQKLDWADVFFLTMQPVPLRKPHLFPKLPLPFRDTLDTYSAELKSIAKVLFAKLASALKIKPEEMEKLFDDELGQRIRMNYYPPCPEPDKAIGLTPHSDATGLTILLQVNEVEGLQIKKDGKWVSVKPLPNALVVNVGDILEIITNGTYRSIEHRGVVNSEKERLSVASFHNTGFGKEIGPMRSLVERHKGALFKTLTTEEYFHGLFSRELDGKAYLDVMRI

SEQ ID NO: 82873 - protein, 297 aa, Arabidopsis thaliana
  peptide (1)..(297): Ceres Seq. ID no. 12667731
  misc_feature (148)..(248): Pfam Name: 2OG-Fe(II) oxygenase superfamily Pfam Description: 2OG-Fe(II) oxygenase superfamily
  misc_feature (1)..(297): Homolog of NCBI NO: 15235017 NR Description: SRG1-like protein; protein id: At4g25310.1
  misc_feature (1)..(297): Homolog of NCBI NO: 15235014 NR Description: SRG1-like protein; protein id: At4g25300.1
  misc_feature (1)..(297): Homolog of NCBI NO: 15219988 NR Description: SRG1-like protein; protein id: At1g17020.1,
  misc_feature (1)..(297): Homolog of NCBI NO: 15219986 NR Description: SRG1-like protein; protein id: At1g17010.1
  misc_feature (1)..(297): Homolog of NCBI NO: 26451337 NR Description: SRG1 like protein [Arabidopsis thaliana]
  misc_feature (1)..(297): Homolog of NCBI NO: 25285681 NR Description: SRG1 homolog [imported] - Arabidopsis thaliana
  misc_feature (1)..(297): Homolog of NCBI NO: 15218400 NR Description: flavanone 3-hydroxylase, putative; protein id: supported by cDNA: gi_13507544, supported by cDNA: gi_15293284
  misc_feature (1)..(297): Homolog of NCBI NO: 37536820 NR Description: putative ethylene-forming enzyme [Oryza sativa
  misc_feature (1)..(296): Homolog of NCBI NO: 34895204 NR Description: P0463A02.24 [Oryza sativa (japonica
  misc_feature (1)..(297): Homolog of NCBI NO: 18402992 NR Description: expressed protein; protein id: At3g21420.1, by cDNA: 118190. [Arabidopsis thaliana]
MSLLSSSTSMDSEIDKLDFACKEWGFFQLVNHGMDLDKFKSDIQDFFNLPMEEKKKLWQQPGDIEGFGQAFVFSEEQKLDWADVFFLTMQPVPLRKPHLFPKLPLPFRDTLDTYSAELKSIAKVLFAKLASALKIKPEEMEKLFDDELGQRIRMNYYPPCPEPDKAIGLTPHSDATGLTILLQVNEVEGLQIKKDGKWVSVKPLPNALVVNVGDILEIITNGTYRSIEHRGVVNSEKERLSVASFHNTGFGKEIGPMRSLVERHKGALFKTLTTEEYFHGLFSRELDGKAYLDVMRI

SEQ ID NO: 82874 - DNA, 944 bp, Arabidopsis thaliana
  misc_feature (1)..(944): Ceres Seq. ID no. 12667742
  misc_feature: MA Experiment ID: 20000166 Result: Up-regulated in Transcription
  misc_feature: MA Experiment 20000166 PARAMETER Experiment Name: At_100uM_ABA_P Parameter: Age (day) Value: 14
  misc_feature: MA Experiment 20000166 PARAMETER Experiment Name: At_100uM_ABA_P Parameter: Organism Value: A. thaliana
  misc_feature: MA Experiment 20000166 PARAMETER Experiment Name: At_100uM_ABA_P Parameter: Plant Line Value: WS
  misc_feature: MA Experiment 20000166 PARAMETER Experiment Name: At_100uM_ABA_P Parameter: Timepoint (hr) Value: 1
  misc_feature: MA Experiment 20000166 PARAMETER Experiment Name: At_100uM_ABA_P Parameter: Tissue Value: Aerial
  misc_feature: MA Experiment 20000166 PARAMETER Experiment Name: At_100uM_ABA_P Parameter: Treatment Value: 100uM ABA vs. No Treatment
  misc_feature: MA Experiment ID: 20000171 Result: Down-regulated in Transcription
  misc_feature: MA Experiment 20000171 PARAMETER Experiment Name: At_42deg_Heat_P Parameter: Age (day) Value: 14
  misc_feature: MA Experiment 20000171 PARAMETER Experiment Name: At_42deg_Heat_P Parameter: Organism Value: A. thaliana
  misc_feature: MA Experiment 20000171 PARAMETER Experiment Name: At_42deg_Heat_P Parameter: Plant Line Value: WS
  misc_feature: MA Experiment 20000171 PARAMETER Experiment Name: At_42deg_Heat_P Parameter: Temperature (deg C) Value: 42 vs. 22
  misc_feature: MA Experiment 20000171 PARAMETER Experiment Name: At_42deg_Heat_P Parameter: Timepoint (hr) Value: 1
  misc_feature: MA Experiment 20000171 PARAMETER Experiment Name: At_42deg_Heat_P Parameter: Tissue Value: Aerial
  misc_feature: MA Experiment ID: 20000185 Result: Down-regulated in Transcription
  misc_feature: MA Experiment 20000185 PARAMETER Experiment Name: At_Roots__P Parameter: Age (day) Value: 7 vs. 21
  misc_feature: MA Experiment 20000185 PARAMETER Experiment Name: At_Roots__P Parameter: Organism Value: A. thaliana
  misc_feature: MA Experiment 20000185 PARAMETER Experiment Name: At_Roots__P Parameter: Tissue Value: Roots vs. Whole Plant
  misc_feature: MA Experiment ID: 20000213 Result: Up-regulated in Transcription
  misc_feature: MA Experiment 20000213 PARAMETER Experiment Name: At_4deg_Cold_P Parameter: Timepoint (hr) Value: 2
  misc_feature: MA Experiment ID: 20000234 Result: Down-regulated in Transcription
  misc_feature: MA Experiment 20000234 PARAMETER Experiment Name: At_Siliques_P Parameter: Age (day) Value: 21
  misc_feature: MA Experiment 20000234 PARAMETER Experiment Name: At_Siliques_P Parameter: Organism Value: A. thaliana
  misc_feature: MA Experiment 20000234 PARAMETER Experiment Name: At_Siliques_P Parameter: Plant Line Value: WS
  misc_feature: MA Experiment 20000234 PARAMETER Experiment Name: At_Siliques_P Parameter: Tissue Value: Less Than 5mm Siliques vs. Whole Plant
  misc_feature: MA Experiment ID: 20000235 Result: Down-regulated in Transcription
  misc_feature: MA Experiment 20000235 PARAMETER Experiment Name: At_Siliques_P Parameter: Age (day) Value: 21
  misc_feature: MA Experiment 20000235 PARAMETER Experiment Name: At_Siliques_P Parameter: Organism Value: A. thaliana
  misc_feature: MA Experiment 20000235 PARAMETER Experiment Name: At_Siliques_P Parameter: Plant Line Value: WS
  misc_feature: MA Experiment 20000235 PARAMETER Experiment Name: At_Siliques_P Parameter: Tissue Value: 5-10mm Siliques vs. Whole Plant
  misc_feature: MA Experiment ID: 20000264 Result: Down-regulated in Transcription
  misc_feature: MA Experiment 20000264 PARAMETER Experiment Name: At_Open_Flower_P Parameter: Age (day) Value: 21
  misc_feature: MA Experiment 20000264 PARAMETER Experiment Name: At_Open_Flower_P Parameter: Plant Line Value: WS
  misc_feature: MA Experiment 20000264 PARAMETER Experiment Name: At_Open_Flower_P Parameter: Tissue Value: Open Flower vs. Whole Plant
  misc_feature: MA Experiment ID: 20000265 Result: Down-regulated in Transcription
  misc_feature: MA Experiment 20000265 PARAMETER Experiment Name: At_Open_Flower_P Parameter: Age (day) Value: 21
  misc_feature: MA Experiment 20000265 PARAMETER Experiment Name: At_Open_Flower_P Parameter: Plant Line Value: WS
  misc_feature: MA Experiment 20000265 PARAMETER Experiment Name: At_Open_Flower_P Parameter: Tissue Value: Closed Flower vs. Whole Plant
  misc_feature: MA Experiment ID: 20000286 Result: Down-regulated in Transcription
  misc_feature: MA Experiment 20000286 PARAMETER Experiment Name: At_Open_Flower_P Parameter: Age (day) Value: 21
  misc_feature: MA Experiment 20000286 PARAMETER Experiment Name: At_Open_Flower_P Parameter: Plant Line Value: WS
  misc_feature: MA Experiment 20000286 PARAMETER Experiment Name: At_Open_Flower_P Parameter: Tissue Value: Half Open vs. Whole Plant
  misc_feature: MA Experiment ID: 20000439 Result: Down-regulated in Transcription
  misc_feature: MA Experiment 20000439 PARAMETER Experiment Name: At_Roots__P Parameter: Age (day) Value: 14 vs. 21
  misc_feature: MA Experiment 20000439 PARAMETER Experiment Name: At_Roots__P Parameter: Organism Value: A. thaliana
  misc_feature: MA Experiment 20000439 PARAMETER Experiment Name: At_Roots__P Parameter: Tissue Value: Roots vs. Whole Plant
  misc_feature: MA Experiment ID: 20000456 Result: Down-regulated in Transcription
  misc_feature: MA Experiment 20000456 PARAMETER Experiment Name: At_100uM_BA_P Parameter: Age (day) Value: 14
  misc_feature: MA Experiment 20000456 PARAMETER Experiment Name: At_100uM_BA_P Parameter: Organism Value: A. thaliana
  misc_feature: MA Experiment 20000456 PARAMETER Experiment Name: At_100uM_BA_P Parameter: Plant Line Value: WS
  misc_feature: MA Experiment 20000456 PARAMETER Experiment Name: At_100uM_BA_P Parameter: Timepoint (hr) Value: 6
  misc_feature: MA Experiment 20000456 PARAMETER Experiment Name: At_100uM_BA_P Parameter: Tissue Value: Aerial
  misc_feature: MA Experiment 20000456 PARAMETER Experiment Name: At_100uM_BA_P Parameter: Treatment Value: 100uM BA vs. No Treatment
  misc_feature: MA Experiment ID: 20000460 Result: Up-regulated in Transcription
  misc_feature: MA Experiment 20000460 PARAMETER Experiment Name: At_10percent_PEG_P Parameter: Age (day) Value: 12
  misc_feature: MA Experiment 20000460 PARAMETER Experiment Name: At_10percent_PEG_P Parameter: Organism Value: A. thaliana
  misc_feature: MA Experiment 20000460 PARAMETER Experiment Name: At_10percent_PEG_P Parameter: Plant Line Value: WS
  misc_feature: MA Experiment 20000460 PARAMETER Experiment Name: At_10percent_PEG_P Parameter: Timepoint (day) Value: 12
  misc_feature: MA Experiment 20000460 PARAMETER Experiment Name: At_10percent_PEG_P Parameter: Tissue Value: Whole Plant
  misc_feature: MA Experiment 20000460 PARAMETER Experiment Name: At_10percent_PEG_P Parameter: Treatment Value: 10percent PEG vs. No Treatment
  misc_feature: MA Experiment ID: 20000495 Result: Down-regulated in Transcription
  misc_feature: MA Experiment 20000495 PARAMETER Experiment Name: At_Guard_Cells_P Parameter: Harvest Date Value: 8/2/2002
  misc_feature: MA Experiment 20000495 PARAMETER Experiment Name: At_Guard_Cells_P Parameter: Organism Value: A. thaliana
  misc_feature: MA Experiment 20000495 PARAMETER Experiment Name: At_Guard_Cells_P Parameter: Tissue Value: Guard Cells vs. Leaves
  misc_feature: MA Experiment ID: 20000527 Result: Up-regulated in Transcription
  misc_feature: MA Experiment 20000527 PARAMETER Experiment Name: At_10percent_PEG_P Parameter: Age (day) Value: 20
  misc_feature: MA Experiment 20000527 PARAMETER Experiment Name: At_10percent_PEG_P Parameter: Organism Value: A. thaliana
  misc_feature: MA Experiment 20000527 PARAMETER Experiment Name: At_10percent_PEG_P Parameter: Plant Line Value: WS
  misc_feature: MA Experiment 20000527 PARAMETER Experiment Name: At_10percent_PEG_P Parameter: Timepoint (day) Value: 20
  misc_feature: MA Experiment 20000527 PARAMETER Experiment Name: At_10percent_PEG_P Parameter: Tissue Value: Whole Plant
  misc_feature: MA Experiment 20000527 PARAMETER Experiment Name: At_10percent_PEG_P Parameter: Treatment Value: 10percent PEG vs. No Treatment
  misc_feature: MA Experiment ID: 20000574 Result: Down-regulated in Transcription
  misc_feature: MA Experiment 20000574 PARAMETER Experiment Name: At_100uM_ABA_Mutants__P Parameter: Organism Value: A. thaliana
  misc_feature: MA Experiment 20000574 PARAMETER Experiment Name: At_100uM_ABA_Mutants__P Parameter: Plant Line Value: CS23 vs. Ler wt
  misc_feature: MA Experiment 20000574 PARAMETER Experiment Name: At_100uM_ABA_Mutants__P Parameter: Timepoint (hr) Value: N/A
  misc_feature: MA Experiment 20000574 PARAMETER Experiment Name: At_100uM_ABA_Mutants__P Parameter: Tissue Value: Whole Plant
  misc_feature: MA Experiment 20000574 PARAMETER Experiment Name: At_100uM_ABA_Mutants__P Parameter: Treatment Value: None
  misc_feature: MA Experiment ID: 20000578 Result: Down-regulated in Transcription
  misc_feature: MA Experiment 20000578 PARAMETER Experiment Name: At_CS3726__P Parameter: Organism Value: A. thaliana
  misc_feature: MA Experiment 20000578 PARAMETER Experiment Name: At_CS3726__P Parameter: Plant Line Value: CS3726
  misc_feature: MA Experiment 20000578 PARAMETER Experiment Name: At_CS3726__P Parameter: Tissue Value: Whole Plant
  misc_feature: MA Experiment ID: 20000606 Result: Down-regulated in Transcription
  misc_feature: MA Experiment 20000606 PARAMETER Experiment Name: At_CS8548_Mutant_P Parameter: Age (day) Value: 14
  misc_feature: MA Experiment 20000606 PARAMETER Experiment Name: At_CS8548_Mutant_P Parameter: Plant Line Value: CS8548 vs. wt
  misc_feature: MA Experiment 20000606 PARAMETER Experiment Name: At_CS8548_Mutant_P Parameter: Tissue Value: Whole Plant
  misc_feature: MA Experiment ID: 20001248 Result: Up-regulated in Transcription
  misc_feature: MA Experiment 20001248 PARAMETER Experiment Name: At_Far-red-induction_P Parameter: Age (day) Value: 7
  misc_feature: MA Experiment 20001248 PARAMETER Experiment Name: At_Far-red-induction_P Parameter: Light Value: Far-red vs. White
  misc_feature: MA Experiment 20001248 PARAMETER Experiment Name: At_Far-red-induction_P Parameter: Organism Value: A. thaliana
  misc_feature: MA Experiment 20001248 PARAMETER Experiment Name: At_Far-red-induction_P Parameter: Plant Line Value: Columbia
  misc_feature: MA Experiment 20001248 PARAMETER Experiment Name: At_Far-red-induction_P Parameter: Timepoint (hr) Value: 4
  misc_feature: MA Experiment 20001248 PARAMETER Experiment Name: At_Far-red-induction_P Parameter: Tissue Value: Whole Plant
  misc_feature: MA Experiment ID: 20001555 Result: Down-regulated in Transcription
  misc_feature: MA Experiment 20001555 PARAMETER Experiment Name: At_Drought_Soil_Dry_P Parameter: Age (day) Value: 24
  misc_feature: MA Experiment 20001555 PARAMETER Experiment Name: At_Drought_Soil_Dry_P Parameter: Organism Value: A. thaliana
  misc_feature: MA Experiment 20001555 PARAMETER Experiment Name: At_Drought_Soil_Dry_P Parameter: Plant Line Value: WS
  misc_feature: MA Experiment 20001555 PARAMETER Experiment Name: At_Drought_Soil_Dry_P Parameter: Post Timepoint (hr) Value: None
  misc_feature: MA Experiment 20001555 PARAMETER Experiment Name: At_Drought_Soil_Dry_P Parameter: Post-Treatment Value: None
  misc_feature: MA Experiment 20001555 PARAMETER Experiment Name: At_Drought_Soil_Dry_P Parameter: Timepoint (day) Value: 10
  misc_feature: MA Experiment 20001555 PARAMETER Experiment Name: At_Drought_Soil_Dry_P Parameter: Treatment Value: Drought vs. No Drought
  misc_feature: MA Experiment ID: 20001556 Result: Down-regulated in Transcription
  misc_feature: MA Experiment 20001556 PARAMETER Experiment Name: At_Drought_Soil_Dry_P Parameter: Age (day) Value: 26
  misc_feature: MA Experiment 20001556 PARAMETER Experiment Name: At_Drought_Soil_Dry_P Parameter: Organism Value: A. thaliana
  misc_feature: MA Experiment 20001556 PARAMETER Experiment Name: At_Drought_Soil_Dry_P Parameter: Plant Line Value: WS
  misc_feature: MA Experiment 20001556 PARAMETER Experiment Name: At_Drought_Soil_Dry_P Parameter: Post Timepoint (hr) Value: None
  misc_feature: MA Experiment 20001556 PARAMETER Experiment Name: At_Drought_Soil_Dry_P Parameter: Post-Treatment Value: None
  misc_feature: MA Experiment 20001556 PARAMETER Experiment Name: At_Drought_Soil_Dry_P Parameter: Timepoint (day) Value: 12
  misc_feature: MA Experiment 20001556 PARAMETER Experiment Name: At_Drought_Soil_Dry_P Parameter: Treatment Value: Drought vs. No Drought
  misc_feature: MA Experiment ID: 20001560 Result: Down-regulated in Transcription
  misc_feature: MA Experiment 20001560 PARAMETER Experiment Name: At_Drought_Soil_Dry_P Parameter: Age (day) Value: 28
  misc_feature: MA Experiment 20001560 PARAMETER Experiment Name: At_Drought_Soil_Dry_P Parameter: Organism Value: A. thaliana
  misc_feature: MA Experiment 20001560 PARAMETER Experiment Name: At_Drought_Soil_Dry_P Parameter: Plant Line Value: WS
  misc_feature: MA Experiment 20001560 PARAMETER Experiment Name: At_Drought_Soil_Dry_P Parameter: Post Timepoint (hr) Value: None
  misc_feature: MA Experiment 20001560 PARAMETER Experiment Name: At_Drought_Soil_Dry_P Parameter: Post-Treatment Value: None
  misc_feature: MA Experiment 20001560 PARAMETER Experiment Name: At_Drought_Soil_Dry_P Parameter: Timepoint (day) Value: 14
  misc_feature: MA Experiment 20001560 PARAMETER Experiment Name: At_Drought_Soil_Dry_P Parameter: Treatment Value: Drought vs. No Drought
  misc_feature: MA Experiment ID: 20001756 Result: Up-regulated in Transcription
  misc_feature: MA Experiment 20001756 PARAMETER Experiment Name: At_50mM_NH4NO3_L-to-H_P Parameter: Timepoint (hr) Value: 4
  misc_feature: MA Experiment 20001756 PARAMETER Experiment Name: At_50mM_NH4NO3_L-to-H_P Parameter: Tissue Value: Leaf
  misc_feature: MA Experiment 20001756 PARAMETER Experiment Name: At_50mM_NH4NO3_L-to-H_P Parameter: Treatment Value: 50mM NH4NO3 vs 100mM Mannitol
  misc_feature: MA Experiment ID: 20001773 Result: Down-regulated in Transcription
  misc_feature: MA Experiment 20001773 PARAMETER Experiment Name: At_Far-red-enriched-adult_P Parameter: Age (day) Value: 30
  misc_feature: MA Experiment 20001773 PARAMETER Experiment Name: At_Far-red-enriched-adult_P Parameter: Light Value: Far-red enriched vs. White
  misc_feature: MA Experiment 20001773 PARAMETER Experiment Name: At_Far-red-enriched-adult_P Parameter: Organism Value: A. thaliana
  misc_feature: MA Experiment 20001773 PARAMETER Experiment Name: At_Far-red-enriched-adult_P Parameter: Plant Line Value: Columbia
  misc_feature: MA Experiment 20001773 PARAMETER Experiment Name: At_Far-red-enriched-adult_P Parameter: Timepoint (hr) Value: 48
  misc_feature: MA Experiment 20001773 PARAMETER Experiment Name: At_Far-red-enriched-adult_P Parameter: Tissue Value: Aerial
  misc_feature: MA Experiment ID: 20001774 Result: Down-regulated in Transcription
  misc_feature: MA Experiment 20001774 PARAMETER Experiment Name: At_Far-red-enriched-adult_P Parameter: Age (day) Value: 31
  misc_feature: MA Experiment 20001774 PARAMETER Experiment Name: At_Far-red-enriched-adult_P Parameter: Light Value: Far-red enriched vs. White
  misc_feature: MA Experiment 20001774 PARAMETER Experiment Name: At_Far-red-enriched-adult_P Parameter: Organism Value: A. thaliana
  misc_feature: MA Experiment 20001774 PARAMETER Experiment Name: At_Far-red-enriched-adult_P Parameter: Plant Line Value: Columbia
  misc_feature: MA Experiment 20001774 PARAMETER Experiment Name: At_Far-red-enriched-adult_P Parameter: Timepoint (hr) Value: 72
  misc_feature: MA Experiment 20001774 PARAMETER Experiment Name: At_Far-red-enriched-adult_P Parameter: Tissue Value: Aerial
cctgaattagaaaagaaagatagatagagaaataaatattttatcataccatacaaaaaaagacagagatcttctacttactctactctcataaaccttatccagtttcttgaaacagagtactcttctgatcaatgaactcattttctgccttttctgaaatgtttggctccgattacgagtctccggtttcctcaggcggtgattacagtccgaagcttgccacgagctgccccaagaaaccagcgggaaggaagaagtttcgtgagactcgtcacccaatttacagaggagttcgtcaaagaaactccggtaagtgggtgtgtgagttgagagagccaaacaagaaaacgaggatttggctcgggactttccaaaccgctgagatggcagctcgtgctcacgacgtcgccgccatagctctccgtggcagatctgcctgtctcaatttcgctgactcggcttggcggctacgaatcccggaatcaacctgtgccaaggaaatccaaaaggcggcggctgaagccgcgttgaattttcaagatgagatgtgtcatatgacgacggatgctcatggtcttgacatggaggagaccttggtggaggctatttatacgccggaacagagccaagatgcgttttatatggatgaagaggcgatgttggggatgtctagtttgttggataacatggccgaagggatgcttttaccgtcgccgtcggttcaatggaactataattttgatgtcgagggagatgatgacgtgtccttatggagctattaaaattcgatttttatttccatttttggtattatagctttttatacatttgatccttttttagaatggatcttcttctttttttggttgtgagaaacgaatgtaaatggtaaaagttgttgtcaaatgcaaatgtttttgagtgcagaatatataatcttt

SEQ ID NO: 82875 - protein, 216 aa, Arabidopsis thaliana
  peptide (1)..(216): Ceres Seq. ID no. 12667743
  misc_feature (48)..(112): Pfam Name: AP2 domain Pfam Description: AP2 domain
  misc_feature (1)..(189): Homolog of NCBI NO: 7488219 NR Description: probable transcription regulator M7J2.160 -
  misc_feature (1)..(216): Homolog of NCBI NO: 18416557 NR Description: DRE binding protein (DREB1C); protein id: supported by cDNA: gi_3738227, supported by cDNA: gi_4322227
  misc_feature (1)..(216): Homolog of NCBI NO: 4091984 NR Description: CRT/DRE binding factor 2 [Arabidopsis thaliana]
  misc_feature (1)..(216): Homolog of NCBI NO: 18416559 NR Description: DRE binding protein (DREB1A); protein id: supported by cDNA: gi_3738223, supported by cDNA: gi_4322229
  misc_feature (1)..(216): Homolog of NCBI NO: 1899058 NR Description: transcriptional activator CBF1 [Arabidopsis >gi|4091982|gb|AAC99369.1| CRT/CRE binding factor 1 [Arabidopsis
  misc_feature (1)..(216): Homolog of NCBI NO: 18416562 NR Description: C-repeat/DRE binding factor 1 (CBF1) (DREB1B); id: At4g25490.1, supported by cDNA: gi_1899057, supported by gi_3738225 [Arabidopsis thaliana] >gi|7488377|pir||JE0298
  misc_feature (1)..(216): Homolog of NCBI NO: 7484941 NR Description: DRE/CRT-binding protein DREB1A - Arabidopsis
  misc_feature (1)..(215): Homolog of NCBI NO: 7488378 NR Description: transcription activator CBF1 homolog M7J2.150 -
  misc_feature (1)..(214): Homolog of NCBI NO: 25407593 NR Description: transcription activator CBF1-like protein
  misc_feature (2)..(216): Homolog of NCBI NO: 39983638 NR Description: CBF25 [Capsella bursa-pastoris]
MNSFSAFSEMFGSDYESPVSSGGDYSPKLATSCPKKPAGRKKFRETRHPIYRGVRQRNSGKWVCELREPNKKTRIWLGTFQTAEMAARAHDVAAIALRGRSACLNFADSAWRLRIPESTCAKEIQKAAAEAALNFQDEMCHMTTDAHGLDMEETLVEAIYTPEQSQDAFYMDEEAMLGMSSLLDNMAEGMLLPSPSVQWNYNFDVEGDDDVSLWSY

SEQ ID NO: 82876 - protein, 207 aa, Arabidopsis thaliana
  peptide (1)..(207): Ceres Seq. ID no. 12667744
  misc_feature (39)..(103): Pfam Name: AP2 domain Pfam Description: AP2 domain
  misc_feature (1)..(180): Homolog of NCBI NO: 7488219 NR Description: probable transcription regulator M7J2.160 -
  misc_feature (1)..(207): Homolog of NCBI NO: 18416557 NR Description: DRE binding protein (DREB1C); protein id: supported by cDNA: gi_3738227, supported by cDNA: gi_4322227
  misc_feature (1)..(207): Homolog of NCBI NO: 4091984 NR Description: CRT/DRE binding factor 2 [Arabidopsis thaliana]
  misc_feature (1)..(207): Homolog of NCBI NO: 18416559 NR Description: DRE binding protein (DREB1A); protein id: supported by cDNA: gi_3738223, supported by cDNA: gi_4322229
  misc_feature (1)..(207): Homolog of NCBI NO: 1899058 NR Description: transcriptional activator CBF1 [Arabidopsis >gi|4091982|gb|AAC99369.1| CRT/CRE binding factor 1 [Arabidopsis
  misc_feature (1)..(207): Homolog of NCBI NO: 18416562 NR Description: C-repeat/DRE binding factor 1 (CBF1) (DREB1B); id: At4g25490.1, supported by cDNA: gi_1899057, supported by gi_3738225 [Arabidopsis thaliana] >gi|7488377|pir||JE0298
  misc_feature (1)..(207): Homolog of NCBI NO: 7484941 NR Description: DRE/CRT-binding protein DREB1A - Arabidopsis
  misc_feature (1)..(206): Homolog of NCBI NO: 7488378 NR Description: transcription activator CBF1 homolog M7J2.150 -
  misc_feature (1)..(205): Homolog of NCBI NO: 25407593 NR Description: transcription activator CBF1-like protein
  misc_feature (1)..(207): Homolog of NCBI NO: 39983638 NR Description: CBF25 [Capsella bursa-pastoris]
MFGSDYESPVSSGGDYSPKLATSCPKKPAGRKKFRETRHPIYRGVRQRNSGKWVCELREPNKKTRIWLGTFQTAEMAARAHDVAAIALRGRSACLNFADSAWRLRIPESTCAKEIQKAAAEAALNFQDEMCHMTTDAHGLDMEETLVEAIYTPEQSQDAFYMDEEAMLGMSSLLDNMAEGMLLPSPSVQWNYNFDVEGDDDVSLWSY

SEQ ID NO: 82877 - protein, 132 aa, Arabidopsis thaliana
  peptide (1)..(132): Ceres Seq. ID no. 12667745
  misc_feature (1)..(105): Homolog of NCBI NO: 7488219 NR Description: probable transcription regulator M7J2.160 -
  misc_feature (1)..(132): Homolog of NCBI NO: 18416557 NR Description: DRE binding protein (DREB1C); protein id: supported by cDNA: gi_3738227, supported by cDNA: gi_4322227
  misc_feature (1)..(132): Homolog of NCBI NO: 4091984 NR Description: CRT/DRE binding factor 2 [Arabidopsis thaliana]
  misc_feature (1)..(132): Homolog of NCBI NO: 18416559 NR Description: DRE binding protein (DREB1A); protein id: supported by cDNA: gi_3738223, supported by cDNA: gi_4322229
  misc_feature (1)..(132): Homolog of NCBI NO: 1899058 NR Description: transcriptional activator CBF1 [Arabidopsis >gi|4091982|gb|AAC99369.1| CRT/CRE binding factor 1 [Arabidopsis
  misc_feature (1)..(132): Homolog of NCBI NO: 18416562 NR Description: C-repeat/DRE binding factor 1 (CBF1) (DREB1B); id: At4g25490.1, supported by cDNA: gi_1899057, supported by gi_3738225 [Arabidopsis thaliana] >gi|7488377|pir||JE0298
  misc_feature (1)..(132): Homolog of NCBI NO: 7484941 NR Description: DRE/CRT-binding protein DREB1A - Arabidopsis
  misc_feature (1)..(131): Homolog of NCBI NO: 7488378 NR Description: transcription activator CBF1 homolog M7J2.150 -
  misc_feature (1)..(130): Homolog of NCBI NO: 25407593 NR Description: transcription activator CBF1-like protein
  misc_feature (1)..(132): Homolog of NCBI NO: 39983638 NR Description: CBF25 [Capsella bursa-pastoris]
MAARAHDVAAIALRGRSACLNFADSAWRLRIPESTCAKEIQKAAAEAALNFQDEMCHMTTDAHGLDMEETLVEAIYTPEQSQDAFYMDEEAMLGMSSLLDNMAEGMLLPSPSVQWNYNFDVEGDDDVSLWSY

SEQ ID NO: 82878 - DNA, 929 bp, Arabidopsis thaliana
  misc_feature (1)..(929): Ceres Seq. ID no. 12667746
  misc_feature: MA Experiment ID: 20000185 Result: Down-regulated in Transcription
  misc_feature: MA Experiment 20000185 PARAMETER Experiment Name: At_Roots__P Parameter: Age (day) Value: 7 vs. 21
  misc_feature: MA Experiment 20000185 PARAMETER Experiment Name: At_Roots__P Parameter: Organism Value: A. thaliana
  misc_feature: MA Experiment 20000185 PARAMETER Experiment Name: At_Roots__P Parameter: Tissue Value: Roots vs. Whole Plant
  misc_feature: MA Experiment ID: 20000213 Result: Up-regulated in Transcription
  misc_feature: MA Experiment 20000213 PARAMETER Experiment Name: At_4deg_Cold_P Parameter: Timepoint (hr) Value: 2
  misc_feature: MA Experiment ID: 20000234 Result: Down-regulated in Transcription
  misc_feature: MA Experiment 20000234 PARAMETER Experiment Name: At_Siliques_P Parameter: Age (day) Value: 21
  misc_feature: MA Experiment 20000234 PARAMETER Experiment Name: At_Siliques_P Parameter: Organism Value: A. thaliana
  misc_feature: MA Experiment 20000234 PARAMETER Experiment Name: At_Siliques_P Parameter: Plant Line Value: WS
  misc_feature: MA Experiment 20000234 PARAMETER Experiment Name: At_Siliques_P Parameter: Tissue Value: Less Than 5mm Siliques vs. Whole Plant
  misc_feature: MA Experiment ID: 20000264 Result: Down-regulated in Transcription
  misc_feature: MA Experiment 20000264 PARAMETER Experiment Name: At_Open_Flower_P Parameter: Age (day) Value: 21
  misc_feature: MA Experiment 20000264 PARAMETER Experiment Name: At_Open_Flower_P Parameter: Plant Line Value: WS
  misc_feature: MA Experiment 20000264 PARAMETER Experiment Name: At_Open_Flower_P Parameter: Tissue Value: Open Flower vs. Whole Plant
  misc_feature: MA Experiment ID: 20000265 Result: Down-regulated in Transcription
  misc_feature: MA Experiment 20000265 PARAMETER Experiment Name: At_Open_Flower_P Parameter: Age (day) Value: 21
  misc_feature: MA Experiment 20000265 PARAMETER Experiment Name: At_Open_Flower_P Parameter: Plant Line Value: WS
  misc_feature: MA Experiment 20000265 PARAMETER Experiment Name: At_Open_Flower_P Parameter: Tissue Value: Closed Flower vs. Whole Plant
  misc_feature: MA Experiment ID: 20000267 Result: Up-regulated in Transcription
  misc_feature: MA Experiment 20000267 PARAMETER Experiment Name: At_Drought_P Parameter: Age (day) Value: 7
  misc_feature: MA Experiment 20000267 PARAMETER Experiment Name: At_Drought_P Parameter: Organism Value: A. thaliana
  misc_feature: MA Experiment 20000267 PARAMETER Experiment Name: At_Drought_P Parameter: Plant Line Value: WS
  misc_feature: MA Experiment 20000267 PARAMETER Experiment Name: At_Drought_P Parameter: Timepoint (hr) Value: 6
  misc_feature: MA Experiment 20000267 PARAMETER Experiment Name: At_Drought_P Parameter: Tissue Value: Whole Plant
  misc_feature: MA Experiment 20000267 PARAMETER Experiment Name: At_Drought_P Parameter: Treatment Value: Drought vs. No Drought
  misc_feature: MA Experiment ID: 20000286 Result: Down-regulated in Transcription
  misc_feature: MA Experiment 20000286 PARAMETER Experiment Name: At_Open_Flower_P Parameter: Age (day) Value: 21
  misc_feature: MA Experiment 20000286 PARAMETER Experiment Name: At_Open_Flower_P Parameter: Plant Line Value: WS
  misc_feature: MA Experiment 20000286 PARAMETER Experiment Name: At_Open_Flower_P Parameter: Tissue Value: Half Open vs. Whole Plant
  misc_feature: MA Experiment ID: 20000439 Result: Down-regulated in Transcription
  misc_feature: MA Experiment 20000439 PARAMETER Experiment Name: At_Roots__P Parameter: Age (day) Value: 14 vs. 21
  misc_feature: MA Experiment 20000439 PARAMETER Experiment Name: At_Roots__P Parameter: Organism Value: A. thaliana
  misc_feature: MA Experiment 20000439 PARAMETER Experiment Name: At_Roots__P Parameter: Tissue Value: Roots vs. Whole Plant
  misc_feature: MA Experiment ID: 20000456 Result: Down-regulated in Transcription
  misc_feature: MA Experiment 20000456 PARAMETER Experiment Name: At_100uM_BA_P Parameter: Age (day) Value: 14
  misc_feature: MA Experiment 20000456 PARAMETER Experiment Name: At_100uM_BA_P Parameter: Organism Value: A. thaliana
  misc_feature: MA Experiment 20000456 PARAMETER Experiment Name: At_100uM_BA_P Parameter: Plant Line Value: WS
  misc_feature: MA Experiment 20000456 PARAMETER Experiment Name: At_100uM_BA_P Parameter: Timepoint (hr) Value: 6
  misc_feature: MA Experiment 20000456 PARAMETER Experiment Name: At_100uM_BA_P Parameter: Tissue Value: Aerial
  misc_feature: MA Experiment 20000456 PARAMETER Experiment Name: At_100uM_BA_P Parameter: Treatment Value: 100uM BA vs. No Treatment
  misc_feature: MA Experiment ID: 20000495 Result: Down-regulated in Transcription
  misc_feature: MA Experiment 20000495 PARAMETER Experiment Name: At_Guard_Cells_P Parameter: Harvest Date Value: 8/2/2002
  misc_feature: MA Experiment 20000495 PARAMETER Experiment Name: At_Guard_Cells_P Parameter: Organism Value: A. thaliana
  misc_feature: MA Experiment 20000495 PARAMETER Experiment Name: At_Guard_Cells_P Parameter: Tissue Value: Guard Cells vs. Leaves
  misc_feature: MA Experiment ID: 20000496 Result: Down-regulated in Transcription
  misc_feature: MA Experiment 20000496 PARAMETER Experiment Name: At_Guard_Cells_P Parameter: Harvest Date Value: 7/19/2002
  misc_feature: MA Experiment 20000496 PARAMETER Experiment Name: At_Guard_Cells_P Parameter: Organism Value: Canola
  misc_feature: MA Experiment 20000496 PARAMETER Experiment Name: At_Guard_Cells_P Parameter: Tissue Value: Guard Cells vs. Leaves
  misc_feature: MA Experiment ID: 20000527 Result: Up-regulated in Transcription
  misc_feature: MA Experiment 20000527 PARAMETER Experiment Name: At_10percent_PEG_P Parameter: Age (day) Value: 20
  misc_feature: MA Experiment 20000527 PARAMETER Experiment Name: At_10percent_PEG_P Parameter: Organism Value: A. thaliana
  misc_feature: MA Experiment 20000527 PARAMETER Experiment Name: At_10percent_PEG_P Parameter: Plant Line Value: WS
  misc_feature: MA Experiment 20000527 PARAMETER Experiment Name: At_10percent_PEG_P Parameter: Timepoint (day) Value: 20
  misc_feature: MA Experiment 20000527 PARAMETER Experiment Name: At_10percent_PEG_P Parameter: Tissue Value: Whole Plant
  misc_feature: MA Experiment 20000527 PARAMETER Experiment Name: At_10percent_PEG_P Parameter: Treatment Value: 10percent PEG vs. No Treatment
  misc_feature: MA Experiment ID: 20000794 Result: Down-regulated in Transcription
  misc_feature: MA Experiment 20000794 PARAMETER Experiment Name: At_Petals_P Parameter: Age (day) Value: 23-25 days
  misc_feature: MA Experiment 20000794 PARAMETER Experiment Name: At_Petals_P Parameter: Plant Line Value: WS
  misc_feature: MA Experiment 20000794 PARAMETER Experiment Name: At_Petals_P Parameter: Tissue Value: Petals vs. Whole plant
  misc_feature: MA Experiment ID: 20001248 Result: Up-regulated in Transcription
  misc_feature: MA Experiment 20001248 PARAMETER Experiment Name: At_Far-red-induction_P Parameter: Age (day) Value: 7
  misc_feature: MA Experiment 20001248 PARAMETER Experiment Name: At_Far-red-induction_P Parameter: Light Value: Far-red vs. White
  misc_feature: MA Experiment 20001248 PARAMETER Experiment Name: At_Far-red-induction_P Parameter: Organism Value: A. thaliana
  misc_feature: MA Experiment 20001248 PARAMETER Experiment Name: At_Far-red-induction_P Parameter: Plant Line Value: Columbia
  misc_feature: MA Experiment 20001248 PARAMETER Experiment Name: At_Far-red-induction_P Parameter: Timepoint (hr) Value: 4
  misc_feature: MA Experiment 20001248 PARAMETER Experiment Name: At_Far-red-induction_P Parameter: Tissue Value: Whole Plant
  misc_feature: MA Experiment ID: 20001450 Result: Up-regulated in Transcription
  misc_feature: MA Experiment 20001450 PARAMETER Experiment Name: At_Far-red-induction_P Parameter: Age (day) Value: 7
  misc_feature: MA Experiment 20001450 PARAMETER Experiment Name: At_Far-red-induction_P Parameter: Light Value: Far-red vs. White
  misc_feature: MA Experiment 20001450 PARAMETER Experiment Name: At_Far-red-induction_P Parameter: Organism Value: A. thaliana
  misc_feature: MA Experiment 20001450 PARAMETER Experiment Name: At_Far-red-induction_P Parameter: Plant Line Value: Columbia
  misc_feature: MA Experiment 20001450 PARAMETER Experiment Name: At_Far-red-induction_P Parameter: Timepoint (hr) Value: 8
  misc_feature: MA Experiment 20001450 PARAMETER Experiment Name: At_Far-red-induction_P Parameter: Tissue Value: Whole Plant
  misc_feature: MA Experiment ID: 20001556 Result: Down-regulated in Transcription
  misc_feature: MA Experiment 20001556 PARAMETER Experiment Name: At_Drought_Soil_Dry_P Parameter: Age (day) Value: 26
  misc_feature: MA Experiment 20001556 PARAMETER Experiment Name: At_Drought_Soil_Dry_P Parameter: Organism Value: A. thaliana
  misc_feature: MA Experiment 20001556 PARAMETER Experiment Name: At_Drought_Soil_Dry_P Parameter: Plant Line Value: WS
  misc_feature: MA Experiment 20001556 PARAMETER Experiment Name: At_Drought_Soil_Dry_P Parameter: Post Timepoint (hr) Value: None
  misc_feature: MA Experiment 20001556 PARAMETER Experiment Name: At_Drought_Soil_Dry_P Parameter: Post-Treatment Value: None
  misc_feature: MA Experiment 20001556 PARAMETER Experiment Name: At_Drought_Soil_Dry_P Parameter: Timepoint (day) Value: 12
  misc_feature: MA Experiment 20001556 PARAMETER Experiment Name: At_Drought_Soil_Dry_P Parameter: Treatment Value: Drought vs. No Drought
  misc_feature: MA Experiment ID: 20001756 Result: Up-regulated in Transcription
  misc_feature: MA Experiment 20001756 PARAMETER Experiment Name: At_50mM_NH4NO3_L-to-H_P Parameter: Timepoint (hr) Value: 4
  misc_feature: MA Experiment 20001756 PARAMETER Experiment Name: At_50mM_NH4NO3_L-to-H_P Parameter: Tissue Value: Leaf
  misc_feature: MA Experiment 20001756 PARAMETER Experiment Name: At_50mM_NH4NO3_L-to-H_P Parameter: Treatment Value: 50mM NH4NO3 vs 100mM Mannitol
  misc_feature: MA Experiment ID: 20001757 Result: Up-regulated in Transcription
  misc_feature: MA Experiment 20001757 PARAMETER Experiment Name: At_50mM_NH4NO3_L-to-H_P Parameter: Timepoint (hr) Value: 6
  misc_feature: MA Experiment 20001757 PARAMETER Experiment Name: At_50mM_NH4NO3_L-to-H_P Parameter: Tissue Value: Leaf
  misc_feature: MA Experiment 20001757 PARAMETER Experiment Name: At_50mM_NH4NO3_L-to-H_P Parameter: Treatment Value: 50mM NH4NO3 vs 100mM Mannitol
  misc_feature: MA Experiment ID: 20001759 Result: Up-regulated in Transcription
  misc_feature: MA Experiment 20001759 PARAMETER Experiment Name: At_50mM_NH4NO3_L-to-H_P Parameter: Timepoint (hr) Value: 1
  misc_feature: MA Experiment 20001759 PARAMETER Experiment Name: At_50mM_NH4NO3_L-to-H_P Parameter: Tissue Value: Siliques
  misc_feature: MA Experiment 20001759 PARAMETER Experiment Name: At_50mM_NH4NO3_L-to-H_P Parameter: Treatment Value: 50mM NH4NO3 vs 100mM Mannitol
  misc_feature: MA Experiment ID: 20001774 Result: Down-regulated in Transcription
  misc_feature: MA Experiment 20001774 PARAMETER Experiment Name: At_Far-red-enriched-adult_P Parameter: Age (day) Value: 31
  misc_feature: MA Experiment 20001774 PARAMETER Experiment Name: At_Far-red-enriched-adult_P Parameter: Light Value: Far-red enriched vs. White
  misc_feature: MA Experiment 20001774 PARAMETER Experiment Name: At_Far-red-enriched-adult_P Parameter: Organism Value: A. thaliana
  misc_feature: MA Experiment 20001774 PARAMETER Experiment Name: At_Far-red-enriched-adult_P Parameter: Plant Line Value: Columbia
  misc_feature: MA Experiment 20001774 PARAMETER Experiment Name: At_Far-red-enriched-adult_P Parameter: Timepoint (hr) Value: 72
  misc_feature: MA Experiment 20001774 PARAMETER Experiment Name: At_Far-red-enriched-adult_P Parameter: Tissue Value: Aerial
  misc_feature: MA Experiment ID: 20001904 Result: Down-regulated in Transcription
  misc_feature: MA Experiment 20001904 PARAMETER Experiment Name: At_Drought_Reproduction_P Parameter: Age (day) Value: 37
  misc_feature: MA Experiment 20001904 PARAMETER Experiment Name: At_Drought_Reproduction_P Parameter: Organism Value: A. thaliana
  misc_feature: MA Experiment 20001904 PARAMETER Experiment Name: At_Drought_Reproduction_P Parameter: Plant Line Value: WS
  misc_feature: MA Experiment 20001904 PARAMETER Experiment Name: At_Drought_Reproduction_P Parameter: Timepoint (day) Value: 7
  misc_feature: MA Experiment 20001904 PARAMETER Experiment Name: At_Drought_Reproduction_P Parameter: Tissue Value: Rosettes
  misc_feature: MA Experiment 20001904 PARAMETER Experiment Name: At_Drought_Reproduction_P Parameter: Treatment Value: Drought vs. No Drought
  misc_feature: MA Experiment ID: 20001905 Result: Down-regulated in Transcription
  misc_feature: MA Experiment 20001905 PARAMETER Experiment Name: At_Drought_Reproduction_P Parameter: Age (day) Value: 40
  misc_feature: MA Experiment 20001905 PARAMETER Experiment Name: At_Drought_Reproduction_P Parameter: Organism Value: A. thaliana
  misc_feature: MA Experiment 20001905 PARAMETER Experiment Name: At_Drought_Reproduction_P Parameter: Plant Line Value: WS
  misc_feature: MA Experiment 20001905 PARAMETER Experiment Name: At_Drought_Reproduction_P Parameter: Timepoint (day) Value: 10
  misc_feature: MA Experiment 20001905 PARAMETER Experiment Name: At_Drought_Reproduction_P Parameter: Tissue Value: Rosettes
  misc_feature: MA Experiment 20001905 PARAMETER Experiment Name: At_Drought_Reproduction_P Parameter: Treatment Value: Drought vs. No Drought
cttgaaaaagaatctacctgaaaagaaaaaaaagagagagagatataaatagctttaccaagacagatatactatcttttattaatccaaaaagactgagaactctagtaactacgtactacttaaaccttatccagtttcttgaaacagagtactctgatcaatgaactcattttcagctttttctgaaatgtttggctccgattacgagcctcaaggcggagattattgtccgacgttggccacgagttgtccgaagaaaccggcgggccgtaagaagtttcgtgagactcgtcacccaatttacagaggagttcgtcaaagaaactccggtaagtgggtttctgaagtgagagagccaaacaagaaaaccaggatttggctcgggactttccaaaccgctgagatggcagctcgtgctcacgacgtcgctgcattagccctccgtggccgatcagcatgtctcaacttcgctgactcggcttggcggctacgaatcccggagtcaacatgcgccaaggatatccaaaaagcggctgctgaagcggcgttggcttttcaagatgagacgtgtgatacgacgaccacgaatcatggcctggacatggaggagacgatggtggaagctatttatacaccggaacagagcgaaggtgcgttttatatggatgaggagacaatgtttgggatgccgactttgttggataatatggctgaaggcatgcttttaccgccgccgtctgttcaatggaatcataattatgacggcgaaggagatggtgacgtgtcgctttggagttactaatattcgatagtcgtttccatttttgtactatagtttgaaaatattctagttcctttttttagaatggttccttcattttattttattttattgttgtagaaacgagtggaaaataattcaatac

SEQ ID NO: 82879 - protein, 213 aa, Arabidopsis thaliana
  peptide (1)..(213): Ceres Seq. ID no. 12667747
  misc_feature (45)..(109): Pfam Name: AP2 domain Pfam Description: AP2 domain
  misc_feature (1)..(213): Homolog of NCBI NO: 18416562 NR Description: C-repeat/DRE binding factor 1 (CBF1) (DREB1B); id: At4g25490.1, supported by cDNA: gi_1899057, supported by gi_3738225 [Arabidopsis thaliana] >gi|7488377|pir||JE0298
  misc_feature (1)..(213): Homolog of NCBI NO: 1899058 NR Description: transcriptional activator CBF1 [Arabidopsis >gi|4091982|gb|AAC99369.1| CRT/CRE binding factor 1 [Arabidopsis
  misc_feature (1)..(213): Homolog of NCBI NO: 18416557 NR Description: DRE binding protein (DREB1C); protein id: supported by cDNA: gi_3738227, supported by cDNA: gi_4322227
  misc_feature (1)..(213): Homolog of NCBI NO: 4091984 NR Description: CRT/DRE binding factor 2 [Arabidopsis thaliana]
  misc_feature (1)..(213): Homolog of NCBI NO: 18416559 NR Description: DRE binding protein (DREB1A); protein id: supported by cDNA: gi_3738223, supported by cDNA: gi_4322229
  misc_feature (1)..(186): Homolog of NCBI NO: 7488219 NR Description: probable transcription regulator M7J2.160 -
  misc_feature (1)..(213): Homolog of NCBI NO: 7484941 NR Description: DRE/CRT-binding protein DREB1A - Arabidopsis
  misc_feature (2)..(213): Homolog of NCBI NO: 39983638 NR Description: CBF25 [Capsella bursa-pastoris]
  misc_feature (1)..(212): Homolog of NCBI NO: 7488378 NR Description: transcription activator CBF1 homolog M7J2.150 -
  misc_feature (1)..(211): Homolog of NCBI NO: 25407593 NR Description: transcription activator CBF1-like protein
MNSFSAFSEMFGSDYEPQGGDYCPTLATSCPKKPAGRKKFRETRHPIYRGVRQRNSGKWVSEVREPNKKTRIWLGTFQTAEMAARAHDVAALALRGRSACLNFADSAWRLRIPESTCAKDIQKAAAEAALAFQDETCDTTTTNHGLDMEETMVEAIYTPEQSEGAFYMDEETMFGMPTLLDNMAEGMLLPPPSVQWNHNYDGEGDGDVSLWSY

SEQ ID NO: 82880 - protein, 204 aa, Arabidopsis thaliana
  peptide (1)..(204): Ceres Seq. ID no. 12667748
  misc_feature (36)..(100): Pfam Name: AP2 domain Pfam Description: AP2 domain
  misc_feature (1)..(204): Homolog of NCBI NO: 18416562 NR Description: C-repeat/DRE binding factor 1 (CBF1) (DREB1B); id: At4g25490.1, supported by cDNA: gi_1899057, supported by gi_3738225 [Arabidopsis thaliana] >gi|7488377|pir||JE0298
  misc_feature (1)..(204): Homolog of NCBI NO: 1899058 NR Description: transcriptional activator CBF1 [Arabidopsis >gi|4091982|gb|AAC99369.1| CRT/CRE binding factor 1 [Arabidopsis
  misc_feature (1)..(204): Homolog of NCBI NO: 18416557 NR Description: DRE binding protein (DREB1C); protein id: supported by cDNA: gi_3738227, supported by cDNA: gi_4322227
  misc_feature (1)..(204): Homolog of NCBI NO: 4091984 NR Description: CRT/DRE binding factor 2 [Arabidopsis thaliana]
  misc_feature (1)..(204): Homolog of NCBI NO: 18416559 NR Description: DRE binding protein (DREB1A); protein id: supported by cDNA: gi_3738223, supported by cDNA: gi_4322229
  misc_feature (1)..(177): Homolog of NCBI NO: 7488219 NR Description: probable transcription regulator M7J2.160 -
  misc_feature (1)..(204): Homolog of NCBI NO: 7484941 NR Description: DRE/CRT-binding protein DREB1A - Arabidopsis
  misc_feature (1)..(204): Homolog of NCBI NO: 39983638 NR Description: CBF25 [Capsella bursa-pastoris]
  misc_feature (1)..(203): Homolog of NCBI NO: 7488378 NR Description: transcription activator CBF1 homolog M7J2.150 -
  misc_feature (1)..(202): Homolog of NCBI NO: 25407593 NR Description: transcription activator CBF1-like protein
MFGSDYEPQGGDYCPTLATSCPKKPAGRKKFRETRHPIYRGVRQRNSGKWVSEVREPNKKTRIWLGTFQTAEMAARAHDVAALALRGRSACLNFADSAWRLRIPESTCAKDIQKAAAEAALAFQDETCDTTTTNHGLDMEETMVEAIYTPEQSEGAFYMDEETMFGMPTLLDNMAEGMLLPPPSVQWNHNYDGEGDGDVSLWSY

SEQ ID NO: 82881 - protein, 132 aa, Arabidopsis thaliana
  peptide (1)..(132): Ceres Seq. ID no. 12667749
  misc_feature (1)..(132): Homolog of NCBI NO: 18416562 NR Description: C-repeat/DRE binding factor 1 (CBF1) (DREB1B); id: At4g25490.1, supported by cDNA: gi_1899057, supported by gi_3738225 [Arabidopsis thaliana] >gi|7488377|pir||JE0298
  misc_feature (1)..(132): Homolog of NCBI NO: 1899058 NR Description: transcriptional activator CBF1 [Arabidopsis >gi|4091982|gb|AAC99369.1| CRT/CRE binding factor 1 [Arabidopsis
  misc_feature (1)..(132): Homolog of NCBI NO: 18416557 NR Description: DRE binding protein (DREB1C); protein id: supported by cDNA: gi_3738227, supported by cDNA: gi_4322227
  misc_feature (1)..(132): Homolog of NCBI NO: 4091984 NR Description: CRT/DRE binding factor 2 [Arabidopsis thaliana]
  misc_feature (1)..(132): Homolog of NCBI NO: 18416559 NR Description: DRE binding protein (DREB1A); protein id: supported by cDNA: gi_3738223, supported by cDNA: gi_4322229
  misc_feature (1)..(105): Homolog of NCBI NO: 7488219 NR Description: probable transcription regulator M7J2.160 -
  misc_feature (1)..(132): Homolog of NCBI NO: 7484941 NR Description: DRE/CRT-binding protein DREB1A - Arabidopsis
  misc_feature (1)..(132): Homolog of NCBI NO: 39983638 NR Description: CBF25 [Capsella bursa-pastoris]
  misc_feature (1)..(131): Homolog of NCBI NO: 7488378 NR Description: transcription activator CBF1 homolog M7J2.150 -
  misc_feature (1)..(130): Homolog of NCBI NO: 25407593 NR Description: transcription activator CBF1-like protein
MAARAHDVAALALRGRSACLNFADSAWRLRIPESTCAKDIQKAAAEAALAFQDETCDTTTTNHGLDMEETMVEAIYTPEQSEGAFYMDEETMFGMPTLLDNMAEGMLLPPPSVQWNHNYDGEGDGDVSLWSY

SEQ ID NO: 82882 - DNA, 393 bp, Arabidopsis thaliana
  misc_feature (1)..(393): Ceres Seq. ID no. 12667762
  misc_feature: MA Experiment ID: 20000306 Result: Up-regulated in Transcription
  misc_feature: MA Experiment 20000306 PARAMETER Experiment Name: At_Germinating_Seeds_Sub_P Parameter: Age (hr) Value: 6 vs. 0
  misc_feature: MA Experiment 20000306 PARAMETER Experiment Name: At_Germinating_Seeds_Sub_P Parameter: Organism Value: A. thaliana
  misc_feature: MA Experiment 20000306 PARAMETER Experiment Name: At_Germinating_Seeds_Sub_P Parameter: Plant Line Value: WS
  misc_feature: MA Experiment 20000306 PARAMETER Experiment Name: At_Germinating_Seeds_Sub_P Parameter: Tissue Value: Germinating Seeds
  misc_feature: MA Experiment ID: 20000355 Result: Up-regulated in Transcription
  misc_feature: MA Experiment 20000355 PARAMETER Experiment Name: At_Siliques_Sub_P Parameter: Age (day) Value: 21
  misc_feature: MA Experiment 20000355 PARAMETER Experiment Name: At_Siliques_Sub_P Parameter: Organism Value: A. thaliana
  misc_feature: MA Experiment 20000355 PARAMETER Experiment Name: At_Siliques_Sub_P Parameter: Plant Line Value: WS
  misc_feature: MA Experiment 20000355 PARAMETER Experiment Name: At_Siliques_Sub_P Parameter: Tissue Value: Less Than 5mm Siliques vs. Whole Plant
  misc_feature: MA Experiment ID: 20000440 Result: Up-regulated in Transcription
  misc_feature: MA Experiment 20000440 PARAMETER Experiment Name: At_Closed-Flower__Sub_P Parameter: Tissue Value: Closed Flower vs. Whole Plant
atggcagtggaggacgagtgcaagctgaagtttttggagctcaagtcgaaaagaaactatcgattcataatattcaggatagacgggcaacaagtggtggtcgaaaagttaggaaaccccgatgagacttacgatgatttcaccgcctccctccctgcgaacgagtgccgctatgcagtcttcgactttgacttcatcaccgatgaaaattgccagaagagcaaaatcttcttcattgcatggtcaccagattcatcaagggtgaggatgaagatggtgtatgcaagctctaaggatagatttaagagagaattggacggcattcaggtggagttacaagccactgatcctagcgagatgagcttcgacattatcaaaagccgagctctctag

SEQ ID NO: 82883 - protein, 130 aa, Arabidopsis thaliana
  peptide (1)..(130): Ceres Seq. ID no. 12667763
  misc_feature (5)..(130): Pfam Name: Cofilin/tropomyosin-type actin-binding protein Pfam Description: Cofilin/tropomyosin-type actin-binding protein
  misc_feature (1)..(130): Homolog of NCBI NO: 15235159 NR Description: actin depolymerizing factor-like protein; protein
  misc_feature (1)..(130): Homolog of NCBI NO: 22857914 NR Description: pollen specific actin-depolymerizing factor 2
  misc_feature (4)..(130): Homolog of NCBI NO: 231508 NR Description: ACTIN DEPOLYMERIZING FACTOR (ADF)
  misc_feature (1)..(130): Homolog of NCBI NO: 10177402 NR Description: actin depolymerizing factor-like [Arabidopsis
  misc_feature (1)..(130): Homolog of NCBI NO: 18423381 NR Description: actin depolymerizing factor-like; protein id:
  misc_feature (1)..(129): Homolog of NCBI NO: 22857912 NR Description: pollen specific actin-depolymerizing factor 1
  misc_feature (1)..(130): Homolog of NCBI NO: 21537061 NR Description: actin depolymerizing factor-like [Arabidopsis
  misc_feature (1)..(130): Homolog of NCBI NO: 38345587 NR Description: OSJNBb0012E24.5 [Oryza sativa (japonica
  misc_feature (1)..(129): Homolog of NCBI NO: 231509 NR Description: Actin-depolymerizing factor (ADF)
  misc_feature (1)..(128): Homolog of NCBI NO: 15223471 NR Description: actin depolymerizing factor, putative; protein At1g01750.1, supported by cDNA: 545., supported by cDNA:
MAVEDECKLKFLELKSKRNYRFIIFRIDGQQVVVEKLGNPDETYDDFTASLPANECRYAVFDFDFITDENCQKSKIFFIAWSPDSSRVRMKMVYASSKDRFKRELDGIQVELQATDPSEMSFDIIKSRAL

SEQ ID NO: 82884 - DNA, 633 bp, Arabidopsis thaliana
  misc_feature (1)..(633): Ceres Seq. ID no. 12667780
  misc_feature: MA Experiment ID: 20000227 Result: Up-regulated in Transcription
  misc_feature: MA Experiment 20000227 PARAMETER Experiment Name: At_Root-Tips-vs-Tops_P Parameter: Tissue Value: Root Tips vs. Root Tops
  misc_feature: MA Experiment ID: 20000269 Result: Up-regulated in Transcription
  misc_feature: MA Experiment 20000269 PARAMETER Experiment Name: At_1mM_KNO3_L-vs-H_Roots_P Parameter: Age (day) Value: 7,10,12
  misc_feature: MA Experiment 20000269 PARAMETER Experiment Name: At_1mM_KNO3_L-vs-H_Roots_P Parameter: Organism Value: A. thaliana
  misc_feature: MA Experiment 20000269 PARAMETER Experiment Name: At_1mM_KNO3_L-vs-H_Roots_P Parameter: Plant Line Value: WS
  misc_feature: MA Experiment 20000269 PARAMETER Experiment Name: At_1mM_KNO3_L-vs-H_Roots_P Parameter: Timepoint (day) Value: 7,10,12
  misc_feature: MA Experiment 20000269 PARAMETER Experiment Name: At_1mM_KNO3_L-vs-H_Roots_P Parameter: Tissue Value: Roots
  misc_feature: MA Experiment 20000269 PARAMETER Experiment Name: At_1mM_KNO3_L-vs-H_Roots_P Parameter: Treatment Value: 1mM KNO3 vs. 50mM KNO3
  misc_feature: MA Experiment ID: 20000436 Result: Up-regulated in Transcription
  misc_feature: MA Experiment 20000436 PARAMETER Experiment Name: At_Drought_P Parameter: Age (day) Value: 7
  misc_feature: MA Experiment 20000436 PARAMETER Experiment Name: At_Drought_P Parameter: Organism Value: A. thaliana
  misc_feature: MA Experiment 20000436 PARAMETER Experiment Name: At_Drought_P Parameter: Plant Line Value: WS
  misc_feature: MA Experiment 20000436 PARAMETER Experiment Name: At_Drought_P Parameter: Timepoint (hr) Value: 12
  misc_feature: MA Experiment 20000436 PARAMETER Experiment Name: At_Drought_P Parameter: Tissue Value: Whole Plant
  misc_feature: MA Experiment 20000436 PARAMETER Experiment Name: At_Drought_P Parameter: Treatment Value: Drought vs. No Drought
atggcgaccacaacatcaacccaagccatagttttcgcaatcgcccttttcttggtcgccatccaagccgttcatgcagactattaccggcaccgcccacagcgacctataaccccgagccctcctccctacgttgcaaagccccagccgctcccaactcccagccccaaacctatcctttatcagcctcctcccacataccaaccacccacgggctcgttcgaacaacaatttcttgatccacataatactgtccgaggcggtctaggtttgcctccactggtgtgggacgtaaagatcgcaagctatgcaacatggtgggctaaccagaggagatacgactgctccttaacccactcgaccggcccatacggtgagaacttgttctggggaagtggctcagactttacatcgactttcgcagtggagtcatggactgtggaggctaagtcctacaaccacatgaccaacacgtgtgaaggagatggtatgtgtggtcactacactcagatcgtgtggcgtgaaaccaggcgcctaggttgcgctagagttgtctgcgagaacggcgcaggagttttcatcacttgcaactacgaccctccgggtaactacgttggggagaagccttactaa

SEQ ID NO: 82885 - protein, 210 aa, Arabidopsis thaliana
  peptide (1)..(210): Ceres Seq. ID no. 12667781
  misc_feature (79)..(197): Pfam Name: SCP-like extracellular protein Pfam Description: SCP-like extracellular protein
  misc_feature (1)..(210): Homolog of NCBI NO: 15235994 NR Description: putative pathogenesis-related protein; protein id:
  misc_feature (1)..(210): Homolog of NCBI NO: 22327916 NR Description: similar to putative pathogenesis-related protein; id: At5g57625.1 [Arabidopsis thaliana]
  misc_feature (73)..(210): Homolog of NCBI NO: 15234704 NR Description: PR-1-like protein; protein id: At4g30320.1
  misc_feature (73)..(210): Homolog of NCBI NO: 2500715 NR Description: Pathogenesis-related protein PR-1 precursor
  misc_feature (76)..(210): Homolog of NCBI NO: 100907 NR Description: pathogenesis-related protein 1 - maize
  misc_feature (76)..(210): Homolog of NCBI NO: 7442179 NR Description: pathogenesis related protein-1 - maize
  misc_feature (77)..(210): Homolog of NCBI NO: 15235992 NR Description: putative pathogenesis-related protein; protein id:
  misc_feature (76)..(210): Homolog of NCBI NO: 480679 NR Description: pathogenesis-related protein 1a - barley
  misc_feature (76)..(210): Homolog of NCBI NO: 548588 NR Description: Pathogenesis-related protein PRB1-2 precursor
  misc_feature (76)..(210): Homolog of NCBI NO: 548589 NR Description: Pathogenesis-related protein PRB1-3 precursor
MATTTSTQAIVFAIALFLVAIQAVHADYYRHRPQRPITPSPPPYVAKPQPLPTPSPKPILYQPPPTYQPPTGSFEQQFLDPHNTVRGGLGLPPLVWDVKIASYATWWANQRRYDCSLTHSTGPYGENLFWGSGSDFTSTFAVESWTVEAKSYNHMTNTCEGDGMCGHYTQIVWRETRRLGCARVVCENGAGVFITCNYDPPGNYVGEKPY

SEQ ID NO: 82886 - DNA, 1053 bp, Arabidopsis thaliana
  misc_feature (1)..(1053): Ceres Seq. ID no. 12667782
  misc_feature: MA Experiment ID: 20000314 Result: Down-regulated in Transcription
  misc_feature: MA Experiment 20000314 PARAMETER Experiment Name: At_14day_Shoots-Roots_Sub_P Parameter: Age (day) Value: 14
  misc_feature: MA Experiment 20000314 PARAMETER Experiment Name: At_14day_Shoots-Roots_Sub_P Parameter: Organism Value: A. thaliana
  misc_feature: MA Experiment 20000314 PARAMETER Experiment Name: At_14day_Shoots-Roots_Sub_P Parameter: Plant Line Value: WS
  misc_feature: MA Experiment 20000314 PARAMETER Experiment Name: At_14day_Shoots-Roots_Sub_P Parameter: Tissue Value: Roots vs. Whole Plant
  misc_feature: MA Experiment ID: 20000328 Result: Up-regulated in Transcription
  misc_feature: MA Experiment 20000328 PARAMETER Experiment Name: At_42deg_Heat_Sub_P Parameter: Age (day) Value: 14
  misc_feature: MA Experiment 20000328 PARAMETER Experiment Name: At_42deg_Heat_Sub_P Parameter: Organism Value: A. thaliana
  misc_feature: MA Experiment 20000328 PARAMETER Experiment Name: At_42deg_Heat_Sub_P Parameter: Plant Line Value: WS
  misc_feature: MA Experiment 20000328 PARAMETER Experiment Name: At_42deg_Heat_Sub_P Parameter: Temperature (deg C) Value: 42 vs. 22
  misc_feature: MA Experiment 20000328 PARAMETER Experiment Name: At_42deg_Heat_Sub_P Parameter: Timepoint (hr) Value: 6
  misc_feature: MA Experiment 20000328 PARAMETER Experiment Name: At_42deg_Heat_Sub_P Parameter: Tissue Value: Aerial
  misc_feature: MA Experiment ID: 20000329 Result: Down-regulated in Transcription
  misc_feature: MA Experiment 20000329 PARAMETER Experiment Name: At_4deg_Cold_Sub_P Parameter: Age (day) Value: 14
  misc_feature: MA Experiment 20000329 PARAMETER Experiment Name: At_4deg_Cold_Sub_P Parameter: Organism Value: A. thaliana
  misc_feature: MA Experiment 20000329 PARAMETER Experiment Name: At_4deg_Cold_Sub_P Parameter: Plant Line Value: WS
  misc_feature: MA Experiment 20000329 PARAMETER Experiment Name: At_4deg_Cold_Sub_P Parameter: Temperature (deg C) Value: 4 vs. 22
  misc_feature: MA Experiment 20000329 PARAMETER Experiment Name: At_4deg_Cold_Sub_P Parameter: Timepoint (hr) Value: 6
  misc_feature: MA Experiment 20000329 PARAMETER Experiment Name: At_4deg_Cold_Sub_P Parameter: Tissue Value: Aerial
  misc_feature: MA Experiment ID: 20000346 Result: Up-regulated in Transcription
  misc_feature: MA Experiment 20000346 PARAMETER Experiment Name: At_2mM_SA_Sub_P Parameter: Age (day) Value: 14
  misc_feature: MA Experiment 20000346 PARAMETER Experiment Name: At_2mM_SA_Sub_P Parameter: Organism Value: A. thaliana
  misc_feature: MA Experiment 20000346 PARAMETER Experiment Name: At_2mM_SA_Sub_P Parameter: Plant Line Value: WS
  misc_feature: MA Experiment 20000346 PARAMETER Experiment Name: At_2mM_SA_Sub_P Parameter: Timepoint (hr) Value: 1
  misc_feature: MA Experiment 20000346 PARAMETER Experiment Name: At_2mM_SA_Sub_P Parameter: Tissue Value: Aerial
  misc_feature: MA Experiment 20000346 PARAMETER Experiment Name: At_2mM_SA_Sub_P Parameter: Treatment Value: 2mM SA vs. No Treatment
  misc_feature: MA Experiment ID: 20000349 Result: Up-regulated in Transcription
  misc_feature: MA Experiment 20000349 PARAMETER Experiment Name: At_100uM_ABA_Sub_P Parameter: Age (day) Value: 14
  misc_feature: MA Experiment 20000349 PARAMETER Experiment Name: At_100uM_ABA_Sub_P Parameter: Organism Value: A. thaliana
  misc_feature: MA Experiment 20000349 PARAMETER Experiment Name: At_100uM_ABA_Sub_P Parameter: Plant Line Value: WS
  misc_feature: MA Experiment 20000349 PARAMETER Experiment Name: At_100uM_ABA_Sub_P Parameter: Timepoint (hr) Value: 6
  misc_feature: MA Experiment 20000349 PARAMETER Experiment Name: At_100uM_ABA_Sub_P Parameter: Tissue Value: Aerial
  misc_feature: MA Experiment 20000349 PARAMETER Experiment Name: At_100uM_ABA_Sub_P Parameter: Treatment Value: 100uM ABA vs. No Treatment
  misc_feature: MA Experiment ID: 20000352 Result: Up-regulated in Transcription
  misc_feature: MA Experiment 20000352 PARAMETER Experiment Name: At_Drought_Sub_P Parameter: Age (day) Value: 7
  misc_feature: MA Experiment 20000352 PARAMETER Experiment Name: At_Drought_Sub_P Parameter: Organism Value: A. thaliana
  misc_feature: MA Experiment 20000352 PARAMETER Experiment Name: At_Drought_Sub_P Parameter: Plant Line Value: WS
  misc_feature: MA Experiment 20000352 PARAMETER Experiment Name: At_Drought_Sub_P Parameter: Timepoint (hr) Value: 6
  misc_feature: MA Experiment 20000352 PARAMETER Experiment Name: At_Drought_Sub_P Parameter: Tissue Value: Whole Plant
  misc_feature: MA Experiment 20000352 PARAMETER Experiment Name: At_Drought_Sub_P Parameter: Treatment Value: Drought vs. No Drought
  misc_feature: MA Experiment ID: 20000355 Result: Down-regulated in Transcription
  misc_feature: MA Experiment 20000355 PARAMETER Experiment Name: At_Siliques_Sub_P Parameter: Age (day) Value: 21
  misc_feature: MA Experiment 20000355 PARAMETER Experiment Name: At_Siliques_Sub_P Parameter: Organism Value: A. thaliana
  misc_feature: MA Experiment 20000355 PARAMETER Experiment Name: At_Siliques_Sub_P Parameter: Plant Line Value: WS
  misc_feature: MA Experiment 20000355 PARAMETER Experiment Name: At_Siliques_Sub_P Parameter: Tissue Value: Less Than 5mm Siliques vs. Whole Plant
  misc_feature: MA Experiment ID: 20000440 Result: Down-regulated in Transcription
  misc_feature: MA Experiment 20000440 PARAMETER Experiment Name: At_Closed-Flower__Sub_P Parameter: Tissue Value: Closed Flower vs. Whole Plant
  misc_feature: MA Experiment ID: 20000634 Result: Up-regulated in Transcription
  misc_feature: MA Experiment 20000634 PARAMETER Experiment Name: At_10percent_PEG_Sub_P Parameter: Age (day) Value: 12
  misc_feature: MA Experiment 20000634 PARAMETER Experiment Name: At_10percent_PEG_Sub_P Parameter: Organism Value: A. thaliana
  misc_feature: MA Experiment 20000634 PARAMETER Experiment Name: At_10percent_PEG_Sub_P Parameter: Plant Line Value: WS
  misc_feature: MA Experiment 20000634 PARAMETER Experiment Name: At_10percent_PEG_Sub_P Parameter: Timepoint (day) Value: 12
  misc_feature: MA Experiment 20000634 PARAMETER Experiment Name: At_10percent_PEG_Sub_P Parameter: Tissue Value: Whole Plant
  misc_feature: MA Experiment 20000634 PARAMETER Experiment Name: At_10percent_PEG_Sub_P Parameter: Treatment Value: 10% PEG vs. No Treatment
  misc_feature: MA Experiment ID: 20001807 Result: Down-regulated in Transcription
  misc_feature: MA Experiment 20001807 PARAMETER Experiment Name: At_50mM_NH4NO3_L-to-H_Sub_P Parameter: Timepoint (hr) Value: 6
  misc_feature: MA Experiment 20001807 PARAMETER Experiment Name: At_50mM_NH4NO3_L-to-H_Sub_P Parameter: Tissue Value: Leaf
  misc_feature: MA Experiment 20001807 PARAMETER Experiment Name: At_50mM_NH4NO3_L-to-H_Sub_P Parameter: Treatment Value: 50mM NH4NO3 vs 100mM Mannitol
aacaaacctaagctcaaagcccaccaaaaagaaaacaatcacttagcaatggcgatgatcagttactccaccattgtggttgctctgcttgcttcttttatgatttgctctgtttccgccaattttcaacgagacgtagagataacttggggagacggacgtggacagatcacaaacaacggcgatcttcttacactctctctcgacaaagcttcaggctcaggattccaatccaagaacgaatatttgttcggtaaaatcgacatgcagatcaaactcgttgccggaaactccgctggaactgtcaccgcttactatttgaaatcccctggatctacatgggacgagattgactttgagttcttgggaaacctaagtggtgatccttacacacttcatactaatgtctttacgcaaggaaaaggcgatagagaacaacaattcaaactctggttcgatcccactagtgatttccacacttactctatcctctggaacccacaacgcatcatattctccgtggatggaactcccataagagaattcaagaacatggaatctcaaggaactctgtttcctaagaaccagccaatgagaatgtactctagtctatggaacgctgaagaatgggccacaaggggtggtctcgtcaaaaccgactggtctaaagctcccttcactgcttcctaccgcggcttcaacgaagaagcttgcgtcgtgatcaacggccagtcttcatgccctaacgtgtcaggacaagggagtactggttcgtggttgtctcaggagctagactcgacgggtcaagaacagatgagatgggtacagaataactacatgatttacaattactgtacggacgctaaaaggttccctcaaggtcttccacgcgagtgcttagctgcgtaaagcttttaaacaaatgatccaaagccatgaaaagtaatactattctttgattcatcttataaagtatctgatgtttggttacatctgttttttatttattctatgtaagtatatttgtattcgaatattgatcaatcactttac

SEQ ID NO: 82887 - protein, 302 aa, Arabidopsis thaliana
  peptide (1)..(302): Ceres Seq. ID no. 12667783
  misc_feature (42)..(223): Pfam Name: Glycosyl hydrolases family 16 Pfam Description: Glycosyl hydrolases family 16
  misc_feature (17)..(302): Homolog of NCBI NO: 15235997 NR Description: xyloglucan endotransglycosylase (XTR-6); protein At4g25810.1, supported by cDNA: gi_1244757, supported by cDNA:
  misc_feature (17)..(302): Homolog of NCBI NO: 17064792 NR Description: xyloglucan endo-1, 4-beta-D-glucanase (XTR-6)
  misc_feature (24)..(302): Homolog of NCBI NO: 15242781 NR Description: xyloglucan endotransglycosylase (TCH4); protein At5g57560.1, supported by cDNA: gi_14194112, supported by cDNA:
  misc_feature (19)..(299): Homolog of NCBI NO: 29500891 NR Description: putative xyloglucan endotransglycosylase [Cucumis >gi|29500899|emb|CAD87533.1| putative xyloglucan
  misc_feature (15)..(299): Homolog of NCBI NO: 29500893 NR Description: putative xyloglucan endotransglycosylase [Cucumis >gi|29500901|emb|CAD87534.1| putative xyloglucan
NKPKLKAHQKENNHLAMAMISYSTIVVALLASFMICSVSANFQRDVEITWGDGRGQITNNGDLLTLSLDKASGSGFQSKNEYLFGKIDMQIKLVAGNSAGTVTAYYLKSPGSTWDEIDFEFLGNLSGDPYTLHTNVFTQGKGDREQQFKLWFDPTSDFHTYSILWNPQRIIFSVDGTPIREFKNMESQGTLFPKNQPMRMYSSLWNAEEWATRGGLVKTDWSKAPFTASYRGFNEEACVVINGQSSCPNVSGQGSTGSWLSQELDSTGQEQMRWVQNNYMIYNYCTDAKRFPQGLPRECLAA

SEQ ID NO: 82888 - protein, 286 aa, Arabidopsis thaliana
  peptide (1)..(286): Ceres Seq. ID no. 12667784
  misc_feature (26)..(207): Pfam Name: Glycosyl hydrolases family 16 Pfam Description: Glycosyl hydrolases family 16
  misc_feature (1)..(286): Homolog of NCBI NO: 15235997 NR Description: xyloglucan endotransglycosylase (XTR-6); protein At4g25810.1, supported by cDNA: gi_1244757, supported by cDNA:
  misc_feature (1)..(286): Homolog of NCBI NO: 17064792 NR Description: xyloglucan endo-1, 4-beta-D-glucanase (XTR-6)
  misc_feature (8)..(286): Homolog of NCBI NO: 15242781 NR Description: xyloglucan endotransglycosylase (TCH4); protein At5g57560.1, supported by cDNA: gi_14194112, supported by cDNA:
  misc_feature (3)..(283): Homolog of NCBI NO: 29500891 NR Description: putative xyloglucan endotransglycosylase [Cucumis >gi|29500899|emb|CAD87533.1| putative xyloglucan
  misc_feature (1)..(283): Homolog of NCBI NO: 29500893 NR Description: putative xyloglucan endotransglycosylase [Cucumis >gi|29500901|emb|CAD87534.1| putative xyloglucan
MAMISYSTIVVALLASFMICSVSANFQRDVEITWGDGRGQITNNGDLLTLSLDKASGSGFQSKNEYLFGKIDMQIKLVAGNSAGTVTAYYLKSPGSTWDEIDFEFLGNLSGDPYTLHTNVFTQGKGDREQQFKLWFDPTSDFHTYSILWNPQRIIFSVDGTPIREFKNMESQGTLFPKNQPMRMYSSLWNAEEWATRGGLVKTDWSKAPFTASYRGFNEEACVVINGQSSCPNVSGQGSTGSWLSQELDSTGQEQMRWVQNNYMIYNYCTDAKRFPQGLPRECLAA

SEQ ID NO: 82889 - protein, 284 aa, Arabidopsis thaliana
  peptide (1)..(284): Ceres Seq. ID no. 12667785
  misc_feature (24)..(205): Pfam Name: Glycosyl hydrolases family 16 Pfam Description: Glycosyl hydrolases family 16
  misc_feature (1)..(284): Homolog of NCBI NO: 15235997 NR Description: xyloglucan endotransglycosylase (XTR-6); protein At4g25810.1, supported by cDNA: gi_1244757, supported by cDNA:
  misc_feature (1)..(284): Homolog of NCBI NO: 17064792 NR Description: xyloglucan endo-1, 4-beta-D-glucanase (XTR-6)
  misc_feature (6)..(284): Homolog of NCBI NO: 15242781 NR Description: xyloglucan endotransglycosylase (TCH4); protein At5g57560.1, supported by cDNA: gi_14194112, supported by cDNA:
  misc_feature (1)..(281): Homolog of NCBI NO: 29500891 NR Description: putative xyloglucan endotransglycosylase [Cucumis >gi|29500899|emb|CAD87533.1| putative xyloglucan
  misc_feature (1)..(281): Homolog of NCBI NO: 29500893 NR Description: putative xyloglucan endotransglycosylase [Cucumis >gi|29500901|emb|CAD87534.1| putative xyloglucan
MISYSTIVVALLASFMICSVSANFQRDVEITWGDGRGQITNNGDLLTLSLDKASGSGFQSKNEYLFGKIDMQIKLVAGNSAGTVTAYYLKSPGSTWDEIDFEFLGNLSGDPYTLHTNVFTQGKGDREQQFKLWFDPTSDFHTYSILWNPQRIIFSVDGTPIREFKNMESQGTLFPKNQPMRMYSSLWNAEEWATRGGLVKTDWSKAPFTASYRGFNEEACVVINGQSSCPNVSGQGSTGSWLSQELDSTGQEQMRWVQNNYMIYNYCTDAKRFPQGLPRECLAA

SEQ ID NO: 82890 - DNA, 1089 bp, Arabidopsis thaliana
  misc_feature (1)..(1089): Ceres Seq. ID no. 12667786
  misc_feature: MA Experiment ID: 20000185 Result: Up-regulated in Transcription
  misc_feature: MA Experiment 20000185 PARAMETER Experiment Name: At_Roots__P Parameter: Age (day) Value: 7 vs. 21
  misc_feature: MA Experiment 20000185 PARAMETER Experiment Name: At_Roots__P Parameter: Organism Value: A. thaliana
  misc_feature: MA Experiment 20000185 PARAMETER Experiment Name: At_Roots__P Parameter: Tissue Value: Roots vs. Whole Plant
  misc_feature: MA Experiment ID: 20000439 Result: Up-regulated in Transcription
  misc_feature: MA Experiment 20000439 PARAMETER Experiment Name: At_Roots__P Parameter: Age (day) Value: 14 vs. 21
  misc_feature: MA Experiment 20000439 PARAMETER Experiment Name: At_Roots__P Parameter: Organism Value: A. thaliana
  misc_feature: MA Experiment 20000439 PARAMETER Experiment Name: At_Roots__P Parameter: Tissue Value: Roots vs. Whole Plant
  misc_feature: MA Experiment ID: 20000452 Result: Up-regulated in Transcription
  misc_feature: MA Experiment 20000452 PARAMETER Experiment Name: At_CS6879_Shoots-Roots_P Parameter: Age (day) Value: 14
  misc_feature: MA Experiment 20000452 PARAMETER Experiment Name: At_CS6879_Shoots-Roots_P Parameter: Organism Value: A. thaliana
  misc_feature: MA Experiment 20000452 PARAMETER Experiment Name: At_CS6879_Shoots-Roots_P Parameter: Plant Line Value: CS6879 vs. WS
  misc_feature: MA Experiment 20000452 PARAMETER Experiment Name: At_CS6879_Shoots-Roots_P Parameter: Tissue Value: Shoots
  misc_feature: MA Experiment ID: 20000460 Result: Down-regulated in Transcription
  misc_feature: MA Experiment 20000460 PARAMETER Experiment Name: At_10percent_PEG_P Parameter: Age (day) Value: 12
  misc_feature: MA Experiment 20000460 PARAMETER Experiment Name: At_10percent_PEG_P Parameter: Organism Value: A. thaliana
  misc_feature: MA Experiment 20000460 PARAMETER Experiment Name: At_10percent_PEG_P Parameter: Plant Line Value: WS
  misc_feature: MA Experiment 20000460 PARAMETER Experiment Name: At_10percent_PEG_P Parameter: Timepoint (day) Value: 12
  misc_feature: MA Experiment 20000460 PARAMETER Experiment Name: At_10percent_PEG_P Parameter: Tissue Value: Whole Plant
  misc_feature: MA Experiment 20000460 PARAMETER Experiment Name: At_10percent_PEG_P Parameter: Treatment Value: 10percent PEG vs. No Treatment
  misc_feature: MA Experiment ID: 20000527 Result: Down-regulated in Transcription
  misc_feature: MA Experiment 20000527 PARAMETER Experiment Name: At_10percent_PEG_P Parameter: Age (day) Value: 20
  misc_feature: MA Experiment 20000527 PARAMETER Experiment Name: At_10percent_PEG_P Parameter: Organism Value: A. thaliana
  misc_feature: MA Experiment 20000527 PARAMETER Experiment Name: At_10percent_PEG_P Parameter: Plant Line Value: WS
  misc_feature: MA Experiment 20000527 PARAMETER Experiment Name: At_10percent_PEG_P Parameter: Timepoint (day) Value: 20
  misc_feature: MA Experiment 20000527 PARAMETER Experiment Name: At_10percent_PEG_P Parameter: Tissue Value: Whole Plant
  misc_feature: MA Experiment 20000527 PARAMETER Experiment Name: At_10percent_PEG_P Parameter: Treatment Value: 10percent PEG vs. No Treatment
  misc_feature: MA Experiment ID: 20001450 Result: Down-regulated in Transcription
  misc_feature: MA Experiment 20001450 PARAMETER Experiment Name: At_Far-red-induction_P Parameter: Age (day) Value: 7
  misc_feature: MA Experiment 20001450 PARAMETER Experiment Name: At_Far-red-induction_P Parameter: Light Value: Far-red vs. White
  misc_feature: MA Experiment 20001450 PARAMETER Experiment Name: At_Far-red-induction_P Parameter: Organism Value: A. thaliana
  misc_feature: MA Experiment 20001450 PARAMETER Experiment Name: At_Far-red-induction_P Parameter: Plant Line Value: Columbia
  misc_feature: MA Experiment 20001450 PARAMETER Experiment Name: At_Far-red-induction_P Parameter: Timepoint (hr) Value: 8
  misc_feature: MA Experiment 20001450 PARAMETER Experiment Name: At_Far-red-induction_P Parameter: Tissue Value: Whole Plant
atcgacaaagacttacctctcacggcgagaaacaacagagaatcggggaaaaatggcgtgtttcgcaaccaaacagcctctgttgttgtctctcctccttgccattggcttctttgtggtggctgcatctgccggaaacttctatgagagctttgatatcacttggggtaatggtcgtgccaacatattcgagaatggacagcttctcacttgtactcttgacaaggtctccggctcaggttttcaatccaagaaggagtacttgtttggtaagatcgacatgaagctcaagcttgtcgctggaaactctgctggcaccgtcaccgcctactacctatcgtcaaaaggcacggcatgggatgagattgacttcgagtttttgggaaatcgcacaggacatccttacactatccacaccaatgtgttcaccggaggtaaaggcgaccgtgagatgcagttccgtctctggttcgatcccactgcggatttccacacctacaccgtccactggaaccctgttaacatcatcttccttgtggatgggatcccaattcgggtgttcaagaacaacgagaaaaatggggtggcttaccctaagaaccagccgatgaggatatactcaagcctttgggaagccgatgactgggctacagaaggcggtcgcgtgaagatcgactggagcaacgcaccattcaaggcctcttacagaaacttcaacgaccaaagctcatgcagcaggacatcaagctcaaaatgggtgacttgcgagccaaacagcaactcgtggatgtggacgactctcaatcctgcccagtacggaaaaatgatgtgggtgcaacgagacttcatgatctacaactattgtaccgattttaagagattccctcaaggcctccccaaggagtgtaaactttgattctattatgggaattttcaagcatttttctttccgttttgtttcatcttgtgatgttactttgatttattttgttctttcttttggtgtttctgagatacgatattacatgtatacgtattcttcctgagaaaataagaagttgtattactcgataatacattttatctctc

SEQ ID NO: 82891 - protein, 304 aa, Arabidopsis thaliana
  peptide (1)..(304): Ceres Seq. ID no. 12667787
  misc_feature (47)..(228): Pfam Name: Glycosyl hydrolases family 16 Pfam Description: Glycosyl hydrolases family 16
  misc_feature (18)..(304): Homolog of NCBI NO: 15235998 NR Description: xyloglucan endotransglycosylase XTR9; protein id: supported by cDNA: gi_20260567, supported by cDNA: gi_4218962 thaliana] >gi|7447404|pir||T04236 xyloglucan [Arabidopsis
  misc_feature (18)..(304): Homolog of NCBI NO: 15242779 NR Description: xyloglucan endotransglycosylase, putative; id: At5g57540.1 [Arabidopsis thaliana]
  misc_feature (18)..(304): Homolog of NCBI NO: 15242778 NR Description: xyloglucan endotransglycosylase, putative; id: At5g57530.1, supported by cDNA: gi_16323042 [Arabidopsis >gi|9758314|dbj|BAB08788.1| xyloglucan endotransglycosylase
STKTYLSRRETTENRGKMACFATKQPLLLSLLLAIGFFVVAASAGNFYESFDITWGNGRANIFENGQLLTCTLDKVSGSGFQSKKEYLFGKIDMKLKLVAGNSAGTVTAYYLSSKGTAWDEIDFEFLGNRTGHPYTIHTNVFTGGKGDREMQFRLWFDPTADFHTYTVHWNPVNIIFLVDGIPIRVFKNNEKNGVAYPKNQPMRIYSSLWEADDWATEGGRVKIDWSNAPFKASYRNFNDQSSCSRTSSSKWVTCEPNSNSWMWTTLNPAQYGKMMWVQRDFMIYNYCTDFKRFPQGLPKECKL

SEQ ID NO: 82892 - protein, 287 aa, Arabidopsis thaliana
  peptide (1)..(287): Ceres Seq. ID no. 12667788
  misc_feature (30)..(211): Pfam Name: Glycosyl hydrolases family 16 Pfam Description: Glycosyl hydrolases family 16
  misc_feature (1)..(287): Homolog of NCBI NO: 15235998 NR Description: xyloglucan endotransglycosylase XTR9; protein id: supported by cDNA: gi_20260567, supported by cDNA: gi_4218962 thaliana] >gi|7447404|pir||T04236 xyloglucan [Arabidopsis
  misc_feature (1)..(287): Homolog of NCBI NO: 15242779 NR Description: xyloglucan endotransglycosylase, putative; id: At5g57540.1 [Arabidopsis thaliana]
  misc_feature (1)..(287): Homolog of NCBI NO: 15242778 NR Description: xyloglucan endotransglycosylase, putative; id: At5g57530.1, supported by cDNA: gi_16323042 [Arabidopsis >gi|9758314|dbj|BAB08788.1| xyloglucan endotransglycosylase
MACFATKQPLLLSLLLAIGFFVVAASAGNFYESFDITWGNGRANIFENGQLLTCTLDKVSGSGFQSKKEYLFGKIDMKLKLVAGNSAGTVTAYYLSSKGTAWDEIDFEFLGNRTGHPYTIHTNVFTGGKGDREMQFRLWFDPTADFHTYTVHWNPVNIIFLVDGIPIRVFKNNEKNGVAYPKNQPMRIYSSLWEADDWATEGGRVKIDWSNAPFKASYRNFNDQSSCSRTSSSKWVTCEPNSNSWMWTTLNPAQYGKMMWVQRDFMIYNYCTDFKRFPQGLPKECKL

SEQ ID NO: 82893 - protein, 211 aa, Arabidopsis thaliana
  peptide (1)..(211): Ceres Seq. ID no. 12667789
  misc_feature (1)..(135): Pfam Name: Glycosyl hydrolases family 16 Pfam Description: Glycosyl hydrolases family 16
  misc_feature (1)..(211): Homolog of NCBI NO: 15235998 NR Description: xyloglucan endotransglycosylase XTR9; protein id: supported by cDNA: gi_20260567, supported by cDNA: gi_4218962 thaliana] >gi|7447404|pir||T04236 xyloglucan [Arabidopsis
  misc_feature (1)..(211): Homolog of NCBI NO: 15242779 NR Description: xyloglucan endotransglycosylase, putative; id: At5g57540.1 [Arabidopsis thaliana]
  misc_feature (1)..(211): Homolog of NCBI NO: 15242778 NR Description: xyloglucan endotransglycosylase, putative; id: At5g57530.1, supported by cDNA: gi_16323042 [Arabidopsis >gi|9758314|dbj|BAB08788.1| xyloglucan endotransglycosylase
MKLKLVAGNSAGTVTAYYLSSKGTAWDEIDFEFLGNRTGHPYTIHTNVFTGGKGDREMQFRLWFDPTADFHTYTVHWNPVNIIFLVDGIPIRVFKNNEKNGVAYPKNQPMRIYSSLWEADDWATEGGRVKIDWSNAPFKASYRNFNDQSSCSRTSSSKWVTCEPNSNSWMWTTLNPAQYGKMMWVQRDFMIYNYCTDFKRFPQGLPKECKL

SEQ ID NO: 82894 - DNA, 1476 bp, Arabidopsis thaliana
  misc_feature (1)..(1476): Ceres Seq. ID no. 12667817
  misc_feature: MA Experiment ID: 20000234 Result: Up-regulated in Transcription
  misc_feature: MA Experiment 20000234 PARAMETER Experiment Name: At_Siliques_P Parameter: Age (day) Value: 21
  misc_feature: MA Experiment 20000234 PARAMETER Experiment Name: At_Siliques_P Parameter: Organism Value: A. thaliana
  misc_feature: MA Experiment 20000234 PARAMETER Experiment Name: At_Siliques_P Parameter: Plant Line Value: WS
  misc_feature: MA Experiment 20000234 PARAMETER Experiment Name: At_Siliques_P Parameter: Tissue Value: Less Than 5mm Siliques vs. Whole Plant
  misc_feature: MA Experiment ID: 20000235 Result: Up-regulated in Transcription
  misc_feature: MA Experiment 20000235 PARAMETER Experiment Name: At_Siliques_P Parameter: Age (day) Value: 21
  misc_feature: MA Experiment 20000235 PARAMETER Experiment Name: At_Siliques_P Parameter: Organism Value: A. thaliana
  misc_feature: MA Experiment 20000235 PARAMETER Experiment Name: At_Siliques_P Parameter: Plant Line Value: WS
  misc_feature: MA Experiment 20000235 PARAMETER Experiment Name: At_Siliques_P Parameter: Tissue Value: 5-10mm Siliques vs. Whole Plant
  misc_feature: MA Experiment ID: 20000264 Result: Up-regulated in Transcription
  misc_feature: MA Experiment 20000264 PARAMETER Experiment Name: At_Open_Flower_P Parameter: Age (day) Value: 21
  misc_feature: MA Experiment 20000264 PARAMETER Experiment Name: At_Open_Flower_P Parameter: Plant Line Value: WS
  misc_feature: MA Experiment 20000264 PARAMETER Experiment Name: At_Open_Flower_P Parameter: Tissue Value: Open Flower vs. Whole Plant
  misc_feature: MA Experiment ID: 20000265 Result: Up-regulated in Transcription
  misc_feature: MA Experiment 20000265 PARAMETER Experiment Name: At_Open_Flower_P Parameter: Age (day) Value: 21
  misc_feature: MA Experiment 20000265 PARAMETER Experiment Name: At_Open_Flower_P Parameter: Plant Line Value: WS
  misc_feature: MA Experiment 20000265 PARAMETER Experiment Name: At_Open_Flower_P Parameter: Tissue Value: Closed Flower vs. Whole Plant
  misc_feature: MA Experiment ID: 20000286 Result: Up-regulated in Transcription
  misc_feature: MA Experiment 20000286 PARAMETER Experiment Name: At_Open_Flower_P Parameter: Age (day) Value: 21
  misc_feature: MA Experiment 20000286 PARAMETER Experiment Name: At_Open_Flower_P Parameter: Plant Line Value: WS
  misc_feature: MA Experiment 20000286 PARAMETER Experiment Name: At_Open_Flower_P Parameter: Tissue Value: Half Open vs. Whole Plant
  misc_feature: MA Experiment ID: 20000794 Result: Up-regulated in Transcription
  misc_feature: MA Experiment 20000794 PARAMETER Experiment Name: At_Petals_P Parameter: Age (day) Value: 23-25 days
  misc_feature: MA Experiment 20000794 PARAMETER Experiment Name: At_Petals_P Parameter: Plant Line Value: WS
  misc_feature: MA Experiment 20000794 PARAMETER Experiment Name: At_Petals_P Parameter: Tissue Value: Petals vs. Whole plant
  misc_feature: MA Experiment ID: 20001757 Result: Down-regulated in Transcription
  misc_feature: MA Experiment 20001757 PARAMETER Experiment Name: At_50mM_NH4NO3_L-to-H_P Parameter: Timepoint (hr) Value: 6
  misc_feature: MA Experiment 20001757 PARAMETER Experiment Name: At_50mM_NH4NO3_L-to-H_P Parameter: Tissue Value: Leaf
  misc_feature: MA Experiment 20001757 PARAMETER Experiment Name: At_50mM_NH4NO3_L-to-H_P Parameter: Treatment Value: 50mM NH4NO3 vs 100mM Mannitol
  misc_feature: MA Experiment ID: 20001910 Result: Up-regulated in Transcription
  misc_feature: MA Experiment 20001910 PARAMETER Experiment Name: At_Drought_Reproduction_P Parameter: Age (day) Value: 37
  misc_feature: MA Experiment 20001910 PARAMETER Experiment Name: At_Drought_Reproduction_P Parameter: Organism Value: A. thaliana
  misc_feature: MA Experiment 20001910 PARAMETER Experiment Name: At_Drought_Reproduction_P Parameter: Plant Line Value: WS
  misc_feature: MA Experiment 20001910 PARAMETER Experiment Name: At_Drought_Reproduction_P Parameter: Timepoint (day) Value: 7
  misc_feature: MA Experiment 20001910 PARAMETER Experiment Name: At_Drought_Reproduction_P Parameter: Tissue Value: Flowers
  misc_feature: MA Experiment 20001910 PARAMETER Experiment Name: At_Drought_Reproduction_P Parameter: Treatment Value: Drought vs. No Drought
atggaaggccttcgagactcatcgtcacaaactatctcttccacgacgtcgtcttcttcgtctccgtcctgcgatgtagacgttgacaatcgtggaaaacaattaactccttctacaagacgatctcgagccggcttctctgattctttctcttctcatgatttatcatcattctgtcgagatgaagaagtaaaaacattctgccccatcaaatcggaatcagacgatgaattattaaggagcatagaagccgaaacttcatcttccgtggtgagcacgtcagactcatcagaaactcatcaccatcaccatcatcatcattcgtctggaggtcccaacaacggtcactggagaagaggtttcttccgtttgcttaagaaaggatcatccgcaatgccattcaacacgttcacacctctcaaaggagttccgaaactgaccagacggaagagcaaacgcataagggacaacatggttcccgttatacctgctcttgacactgatcacttgttctatttcaaaccctcctggaggaacttctctctccgagatattcagaccgcgacaaatgactacagccgtgaaaatctgatcggagaaggaggatatgcggaggtgtataagggacaaatggcagatgggcagatagtagcgataaagaagttgactagaggttctgcagaagagatgacgatggattatctgtccgaactagggatcattgttcatgtagatcatccaaacattgctaagcttattggttattgtgttgaaggaggaatgcatcttgttcttgagctatctcctaatggaagccttgcttctttgctctacgaggcgaaggagaaactgaattggagcatgagatacaaagtggcgatgggaacagcagagggactctactatctccatgaaggttgtcagagaagaatcattcataaagacattaaagcttctaacattcttctcactcagaactttgaggctcagatatcggatttcgggctagcgaaatggctaccagaccaatggactcaccatactgtatcaaaagttgaaggaacattcggttaccttccgccagagtttttcatgcatgggatagtagacgagaaaacagacgtatatgcttatggtgtcctgcttctcgagctcattaccggtagacaagccctcgacagctcacaacatagcattgtcatgtgggctaagccattgatcaaagagaacaagatcaaacaacttgttgatccgattctggaagatgactacgacgtagaagagttggaccgtcttgttgtggagattctgaggggagacaagtgcagcttagataagctaagagagcgagaaaactccaaactccagaggacttactctgaagaactattggataacgaagaatacaactcgacaagatatttaaacgatattaatcgacacatggagaccgttctcggaacatctaaggattaa

SEQ ID NO: 82895 - protein, 491 aa, Arabidopsis thaliana
  peptide (1)..(491): Ceres Seq. ID no. 12667818
  misc_feature (1)..(433): Homolog of NCBI NO: 30687061 NR Description: protein kinase family [Arabidopsis thaliana] putative protein kinase [Arabidopsis thaliana]
  misc_feature (433)..(491): Homolog of NCBI NO: 30687061 NR Description: protein kinase family [Arabidopsis thaliana] putative protein kinase [Arabidopsis thaliana]
  misc_feature (62)..(462): Homolog of NCBI NO: 22330852 NR Description: putative serine/threonine protein kinase; protein At3g05140.1, supported by cDNA: gi_19698986 [Arabidopsis >gi|19698987|gb|AAL91229.1| putative serine/threonine protein
  misc_feature (433)..(488): Homolog of NCBI NO: 22330852 NR Description: putative serine/threonine protein kinase; protein At3g05140.1, supported by cDNA: gi_19698986 [Arabidopsis >gi|19698987|gb|AAL91229.1| putative serine/threonine protein
  misc_feature (78)..(434): Homolog of NCBI NO: 15239245 NR Description: serine/threonine protein kinase-like; protein id: [Arabidopsis thaliana] >gi|9758799|dbj|BAB09252.1|
  misc_feature (82)..(486): Homolog of NCBI NO: 30698132 NR Description: protein kinase, putative [Arabidopsis thaliana]
  misc_feature (82)..(483): Homolog of NCBI NO: 26452369 NR Description: unknown protein [Arabidopsis thaliana]
  misc_feature (72)..(486): Homolog of NCBI NO: 11358733 NR Description: Pto kinase interactor-like protein - Arabidopsis
  misc_feature (72)..(434): Homolog of NCBI NO: 15810235 NR Description: putative Pto kinase interactor [Arabidopsis
  misc_feature (72)..(434): Homolog of NCBI NO: 18416299 NR Description: Pto kinase interactor - like protein; protein id: supported by cDNA: gi_15810234 [Arabidopsis thaliana]
MEGLRDSSSQTISSTTSSSSSPSCDVDVDNRGKQLTPSTRRSRAGFSDSFSSHDLSSFCRDEEVKTFCPIKSESDDELLRSIEAETSSSVVSTSDSSETHHHHHHHHSSGGPNNGHWRRGFFRLLKKGSSAMPFNTFTPLKGVPKLTRRKSKRIRDNMVPVIPALDTDHLFYFKPSWRNFSLRDIQTATNDYSRENLIGEGGYAEVYKGQMADGQIVAIKKLTRGSAEEMTMDYLSELGIIVHVDHPNIAKLIGYCVEGGMHLVLELSPNGSLASLLYEAKEKLNWSMRYKVAMGTAEGLYYLHEGCQRRIIHKDIKASNILLTQNFEAQISDFGLAKWLPDQWTHHTVSKVEGTFGYLPPEFFMHGIVDEKTDVYAYGVLLLELITGRQALDSSQHSIVMWAKPLIKENKIKQLVDPILEDDYDVEELDRLVVEILRGDKCSLDKLRERENSKLQRTYSEELLDNEEYNSTRYLNDINRHMETVLGTSKD

SEQ ID NO: 82896 - protein, 360 aa, Arabidopsis thaliana
  peptide (1)..(360): Ceres Seq. ID no. 12667819
  misc_feature (1)..(302): Homolog of NCBI NO: 30687061 NR Description: protein kinase family [Arabidopsis thaliana] putative protein kinase [Arabidopsis thaliana]
  misc_feature (302)..(360): Homolog of NCBI NO: 30687061 NR Description: protein kinase family [Arabidopsis thaliana] putative protein kinase [Arabidopsis thaliana]
  misc_feature (1)..(331): Homolog of NCBI NO: 22330852 NR Description: putative serine/threonine protein kinase; protein At3g05140.1, supported by cDNA: gi_19698986 [Arabidopsis >gi|19698987|gb|AAL91229.1| putative serine/threonine protein
  misc_feature (302)..(357): Homolog of NCBI NO: 22330852 NR Description: putative serine/threonine protein kinase; protein At3g05140.1, supported by cDNA: gi_19698986 [Arabidopsis >gi|19698987|gb|AAL91229.1| putative serine/threonine protein
  misc_feature (1)..(303): Homolog of NCBI NO: 15239245 NR Description: serine/threonine protein kinase-like; protein id: [Arabidopsis thaliana] >gi|9758799|dbj|BAB09252.1|
  misc_feature (1)..(355): Homolog of NCBI NO: 30698132 NR Description: protein kinase, putative [Arabidopsis thaliana]
  misc_feature (1)..(352): Homolog of NCBI NO: 26452369 NR Description: unknown protein [Arabidopsis thaliana]
  misc_feature (1)..(355): Homolog of NCBI NO: 11358733 NR Description: Pto kinase interactor-like protein - Arabidopsis
  misc_feature (1)..(303): Homolog of NCBI NO: 15810235 NR Description: putative Pto kinase interactor [Arabidopsis
  misc_feature (1)..(303): Homolog of NCBI NO: 18416299 NR Description: Pto kinase interactor - like protein; protein id: supported by cDNA: gi_15810234 [Arabidopsis thaliana]
MPFNTFTPLKGVPKLTRRKSKRIRDNMVPVIPALDTDHLFYFKPSWRNFSLRDIQTATNDYSRENLIGEGGYAEVYKGQMADGQIVAIKKLTRGSAEEMTMDYLSELGIIVHVDHPNIAKLIGYCVEGGMHLVLELSPNGSLASLLYEAKEKLNWSMRYKVAMGTAEGLYYLHEGCQRRIIHKDIKASNILLTQNFEAQISDFGLAKWLPDQWTHHTVSKVEGTFGYLPPEFFMHGIVDEKTDVYAYGVLLLELITGRQALDSSQHSIVMWAKPLIKENKIKQLVDPILEDDYDVEELDRLVVEILRGDKCSLDKLRERENSKLQRTYSEELLDNEEYNSTRYLNDINRHMETVLGTSKD

SEQ ID NO: 82897 - protein, 334 aa, Arabidopsis thaliana
  peptide (1)..(334): Ceres Seq. ID no. 12667820
  misc_feature (1)..(276): Homolog of NCBI NO: 30687061 NR Description: protein kinase family [Arabidopsis thaliana] putative protein kinase [Arabidopsis thaliana]
  misc_feature (276)..(334): Homolog of NCBI NO: 30687061 NR Description: protein kinase family [Arabidopsis thaliana] putative protein kinase [Arabidopsis thaliana]
  misc_feature (1)..(305): Homolog of NCBI NO: 22330852 NR Description: putative serine/threonine protein kinase; protein At3g05140.1, supported by cDNA: gi_19698986 [Arabidopsis >gi|19698987|gb|AAL91229.1| putative serine/threonine protein
  misc_feature (276)..(331): Homolog of NCBI NO: 22330852 NR Description: putative serine/threonine protein kinase; protein At3g05140.1, supported by cDNA: gi_19698986 [Arabidopsis >gi|19698987|gb|AAL91229.1| putative serine/threonine protein
  misc_feature (1)..(277): Homolog of NCBI NO: 15239245 NR Description: serine/threonine protein kinase-like; protein id: [Arabidopsis thaliana] >gi|9758799|dbj|BAB09252.1|
  misc_feature (1)..(329): Homolog of NCBI NO: 30698132 NR Description: protein kinase, putative [Arabidopsis thaliana]
  misc_feature (1)..(326): Homolog of NCBI NO: 26452369 NR Description: unknown protein [Arabidopsis thaliana]
  misc_feature (1)..(329): Homolog of NCBI NO: 11358733 NR Description: Pto kinase interactor-like protein - Arabidopsis
  misc_feature (1)..(277): Homolog of NCBI NO: 15810235 NR Description: putative Pto kinase interactor [Arabidopsis
  misc_feature (1)..(277): Homolog of NCBI NO: 18416299 NR Description: Pto kinase interactor - like protein; protein id: supported by cDNA: gi_15810234 [Arabidopsis thaliana]
MVPVIPALDTDHLFYFKPSWRNFSLRDIQTATNDYSRENLIGEGGYAEVYKGQMADGQIVAIKKLTRGSAEEMTMDYLSELGIIVHVDHPNIAKLIGYCVEGGMHLVLELSPNGSLASLLYEAKEKLNWSMRYKVAMGTAEGLYYLHEGCQRRIIHKDIKASNILLTQNFEAQISDFGLAKWLPDQWTHHTVSKVEGTFGYLPPEFFMHGIVDEKTDVYAYGVLLLELITGRQALDSSQHSIVMWAKPLIKENKIKQLVDPILEDDYDVEELDRLVVEILRGDKCSLDKLRERENSKLQRTYSEELLDNEEYNSTRYLNDINRHMETVLGTSKD

SEQ ID NO: 82898 - DNA, 1122 bp, Arabidopsis thaliana
  misc_feature (1)..(1122): Ceres Seq. ID no. 12667843
  misc_feature: MA Experiment ID: 20000173 Result: Up-regulated in Transcription
  misc_feature: MA Experiment 20000173 PARAMETER Experiment Name: At_42deg_Heat_P Parameter: Age (day) Value: 14
  misc_feature: MA Experiment 20000173 PARAMETER Experiment Name: At_42deg_Heat_P Parameter: Organism Value: A. thaliana
  misc_feature: MA Experiment 20000173 PARAMETER Experiment Name: At_42deg_Heat_P Parameter: Plant Line Value: WS
  misc_feature: MA Experiment 20000173 PARAMETER Experiment Name: At_42deg_Heat_P Parameter: Temperature (deg C) Value: 42 vs. 22
  misc_feature: MA Experiment 20000173 PARAMETER Experiment Name: At_42deg_Heat_P Parameter: Timepoint (hr) Value: 6
  misc_feature: MA Experiment 20000173 PARAMETER Experiment Name: At_42deg_Heat_P Parameter: Tissue Value: Aerial
atggagagcttgacgatgctccttatcatgggacacttcatacaactgggagtttcagttattccagtttctaccatttatagtcctgacggcgatttgattgattgtatctaccggacggatcaacgagccttcgaccacccactcttacgaaaccatattattcaggaatatcctaccaacatgccacaaatagaaaaaagcgtacaagaaaattggcaaatttggcacgacaccggagaaaagtgtccggcagagacgattcctatgcgtcgggaattgaatccagtttctcaccaaaagcagcatgtacatgttccaaaagagtatgaggtcgccaacagagcaacttcagggcacaagtatgcaattgcatacatgattaaccggacaaatgtgtacggaacaagggcaacgtttaatgtctggacaccaaaggtagaatcggcttacgattttagcctcgctcagatttggctggcatctgggtcatacgagactgcggatctcaatactgttgaagccggttggcaggcggatggatataacaagaccgggtgttatggcctcgaccttcctggatttgtgcagactagcagtaccatcgccatcggagctgccattggtcgcacctcgacatatggaggcacccagtttgacatgacacttcagatctggaaggatctgttttcaggacattggtggctggctctgggcccaaatttagtgcccattggatactggccggccgtaattttcacgaccttatccgattatgcgacggcagttgaatggggaggcgaagtattataccgaaacctgtcgagcgtgaatacggtggctcaaatgggttcaggagaatatgccgacaaaggctatgggaaagcggcatatttctgcaatctgaaggtggcagagaacaaccacacccttctcccggttcaagatttcggcgttcaagccgattatccagaatattataccgttaagaagtcatctaaccggaactgcggaaaccatttttatttcggcggaccaggacctcaacgttcagaagcagttcggggaacaacggtttttggtttttgctttttattttatttgagtgtgttttgtttttaa

SEQ ID NO: 82899 - protein, 373 aa, Arabidopsis thaliana
  peptide (1)..(373): Ceres Seq. ID no. 12667844
  misc_feature (177)..(311): Pfam Name: Arabidopsis proteins of unknown function Pfam Description: Arabidopsis proteins of unknown function
  misc_feature (1)..(373): Homolog of NCBI NO: 15239661 NR Description: putative protein; protein id: At5g19170.1
  misc_feature (19)..(183): Homolog of NCBI NO: 7487383 NR Description: hypothetical protein T24C20.110 - Arabidopsis >gi|5541729|emb|CAB51070.1| putative protein [Arabidopsis
  misc_feature (19)..(183): Homolog of NCBI NO: 30693008 NR Description: expressed protein [Arabidopsis thaliana] unknown protein [Arabidopsis thaliana]
  misc_feature (177)..(347): Homolog of NCBI NO: 7487383 NR Description: hypothetical protein T24C20.110 - Arabidopsis >gi|5541729|emb|CAB51070.1| putative protein [Arabidopsis
  misc_feature (177)..(347): Homolog of NCBI NO: 30693008 NR Description: expressed protein [Arabidopsis thaliana] unknown protein [Arabidopsis thaliana]
  misc_feature (178)..(347): Homolog of NCBI NO: 25345695 NR Description: protein F26F24.22 [imported] - Arabidopsis >gi|9295704|gb|AAF87010.1|AC005292_19 F26F24.22 [Arabidopsis
  misc_feature (23)..(179): Homolog of NCBI NO: 25345695 NR Description: protein F26F24.22 [imported] - Arabidopsis >gi|9295704|gb|AAF87010.1|AC005292_19 F26F24.22 [Arabidopsis
  misc_feature (177)..(347): Homolog of NCBI NO: 15238835 NR Description: putative protein; protein id: At5g18460.1, by cDNA: 119256. [Arabidopsis thaliana]
  misc_feature (61)..(178): Homolog of NCBI NO: 15238835 NR Description: putative protein; protein id: At5g18460.1, by cDNA: 119256. [Arabidopsis thaliana]
  misc_feature (1)..(101): Homolog of NCBI NO: 15238835 NR Description: putative protein; protein id: At5g18460.1, by cDNA: 119256. [Arabidopsis thaliana]
MESLTMLLIMGHFIQLGVSVIPVSTIYSPDGDLIDCIYRTDQRAFDHPLLRNHIIQEYPTNMPQIEKSVQENWQIWHDTGEKCPAETIPMRRELNPVSHQKQHVHVPKEYEVANRATSGHKYAIAYMINRTNVYGTRATFNVWTPKVESAYDFSLAQIWLASGSYETADLNTVEAGWQADGYNKTGCYGLDLPGFVQTSSTIAIGAAIGRTSTYGGTQFDMTLQIWKDLFSGHWWLALGPNLVPIGYWPAVIFTTLSDYATAVEWGGEVLYRNLSSVNTVAQMGSGEYADKGYGKAAYFCNLKVAENNHTLLPVQDFGVQADYPEYYTVKKSSNRNCGNHFYFGGPGPQRSEAVRGTTVFGFCFLFYLSVFCF

SEQ ID NO: 82900 - protein, 368 aa, Arabidopsis thaliana
  peptide (1)..(368): Ceres Seq. ID no. 12667845
  misc_feature (172)..(306): Pfam Name: Arabidopsis proteins of unknown function Pfam Description: Arabidopsis proteins of unknown function
  misc_feature (1)..(368): Homolog of NCBI NO: 15239661 NR Description: putative protein; protein id: At5g19170.1
  misc_feature (14)..(178): Homolog of NCBI NO: 7487383 NR Description: hypothetical protein T24C20.110 - Arabidopsis >gi|5541729|emb|CAB51070.1| putative protein [Arabidopsis
  misc_feature (14)..(178): Homolog of NCBI NO: 30693008 NR Description: expressed protein [Arabidopsis thaliana] unknown protein [Arabidopsis thaliana]
  misc_feature (172)..(342): Homolog of NCBI NO: 7487383 NR Description: hypothetical protein T24C20.110 - Arabidopsis >gi|5541729|emb|CAB51070.1| putative protein [Arabidopsis
  misc_feature (172)..(342): Homolog of NCBI NO: 30693008 NR Description: expressed protein [Arabidopsis thaliana] unknown protein [Arabidopsis thaliana]
  misc_feature (173)..(342): Homolog of NCBI NO: 25345695 NR Description: protein F26F24.22 [imported] - Arabidopsis >gi|9295704|gb|AAF87010.1|AC005292_19 F26F24.22 [Arabidopsis
  misc_feature (18)..(174): Homolog of NCBI NO: 25345695 NR Description: protein F26F24.22 [imported] - Arabidopsis >gi|9295704|gb|AAF87010.1|AC005292_19 F26F24.22 [Arabidopsis
  misc_feature (172)..(342): Homolog of NCBI NO: 15238835 NR Description: putative protein; protein id: At5g18460.1, by cDNA: 119256. [Arabidopsis thaliana]
  misc_feature (56)..(173): Homolog of NCBI NO: 15238835 NR Description: putative protein; protein id: At5g18460.1, by cDNA: 119256. [Arabidopsis thaliana]
  misc_feature (1)..(96): Homolog of NCBI NO: 15238835 NR Description: putative protein; protein id: At5g18460.1, by cDNA: 119256. [Arabidopsis thaliana]
MLLIMGHFIQLGVSVIPVSTIYSPDGDLIDCIYRTDQRAFDHPLLRNHIIQEYPTNMPQIEKSVQENWQIWHDTGEKCPAETIPMRRELNPVSHQKQHVHVPKEYEVANRATSGHKYAIAYMINRTNVYGTRATFNVWTPKVESAYDFSLAQIWLASGSYETADLNTVEAGWQADGYNKTGCYGLDLPGFVQTSSTIAIGAAIGRTSTYGGTQFDMTLQIWKDLFSGHWWLALGPNLVPIGYWPAVIFTTLSDYATAVEWGGEVLYRNLSSVNTVAQMGSGEYADKGYGKAAYFCNLKVAENNHTLLPVQDFGVQADYPEYYTVKKSSNRNCGNHFYFGGPGPQRSEAVRGTTVFGFCFLFYLSVFCF

SEQ ID NO: 82901 - protein, 364 aa, Arabidopsis thaliana
  peptide (1)..(364): Ceres Seq. ID no. 12667846
  misc_feature (168)..(302): Pfam Name: Arabidopsis proteins of unknown function Pfam Description: Arabidopsis proteins of unknown function
  misc_feature (1)..(364): Homolog of NCBI NO: 15239661 NR Description: putative protein; protein id: At5g19170.1
  misc_feature (10)..(174): Homolog of NCBI NO: 7487383 NR Description: hypothetical protein T24C20.110 - Arabidopsis >gi|5541729|emb|CAB51070.1| putative protein [Arabidopsis
  misc_feature (10)..(174): Homolog of NCBI NO: 30693008 NR Description: expressed protein [Arabidopsis thaliana] unknown protein [Arabidopsis thaliana]
  misc_feature (168)..(338): Homolog of NCBI NO: 7487383 NR Description: hypothetical protein T24C20.110 - Arabidopsis >gi|5541729|emb|CAB51070.1| putative protein [Arabidopsis
  misc_feature (168)..(338): Homolog of NCBI NO: 30693008 NR Description: expressed protein [Arabidopsis thaliana] unknown protein [Arabidopsis thaliana]
  misc_feature (169)..(338): Homolog of NCBI NO: 25345695 NR Description: protein F26F24.22 [imported] - Arabidopsis >gi|9295704|gb|AAF87010.1|AC005292_19 F26F24.22 [Arabidopsis
  misc_feature (14)..(170): Homolog of NCBI NO: 25345695 NR Description: protein F26F24.22 [imported] - Arabidopsis >gi|9295704|gb|AAF87010.1|AC005292_19 F26F24.22 [Arabidopsis
  misc_feature (168)..(338): Homolog of NCBI NO: 15238835 NR Description: putative protein; protein id: At5g18460.1, by cDNA: 119256. [Arabidopsis thaliana]
  misc_feature (52)..(169): Homolog of NCBI NO: 15238835 NR Description: putative protein; protein id: At5g18460.1, by cDNA: 119256. [Arabidopsis thaliana]
  misc_feature (1)..(92): Homolog of NCBI NO: 15238835 NR Description: putative protein; protein id: At5g18460.1, by cDNA: 119256. [Arabidopsis thaliana]
MGHFIQLGVSVIPVSTIYSPDGDLIDCIYRTDQRAFDHPLLRNHIIQEYPTNMPQIEKSVQENWQIWHDTGEKCPAETIPMRRELNPVSHQKQHVHVPKEYEVANRATSGHKYAIAYMINRTNVYGTRATFNVWTPKVESAYDFSLAQIWLASGSYETADLNTVEAGWQADGYNKTGCYGLDLPGFVQTSSTIAIGAAIGRTSTYGGTQFDMTLQIWKDLFSGHWWLALGPNLVPIGYWPAVIFTTLSDYATAVEWGGEVLYRNLSSVNTVAQMGSGEYADKGYGKAAYFCNLKVAENNHTLLPVQDFGVQADYPEYYTVKKSSNRNCGNHFYFGGPGPQRSEAVRGTTVFGFCFLFYLSVFCF

SEQ ID NO: 82902 - DNA, 996 bp, Arabidopsis thaliana
  misc_feature (1)..(996): Ceres Seq. ID no. 12667847
  misc_feature: MA Experiment ID: 108462 Result: Up-regulated in Transcription
  misc_feature: MA Experiment 108462 PARAMETER Experiment Name: At_Germinating_Seeds_cDNA_P Parameter: Age (day) Value: 2 vs. 0
  misc_feature: MA Experiment 108462 PARAMETER Experiment Name: At_Germinating_Seeds_cDNA_P Parameter: Tissue Value: Germinating Seeds
  misc_feature: MA Experiment ID: 108463 Result: Up-regulated in Transcription
  misc_feature: MA Experiment 108463 PARAMETER Experiment Name: At_Germinating_Seeds_cDNA_P Parameter: Age (day) Value: 3 vs. 0
  misc_feature: MA Experiment 108463 PARAMETER Experiment Name: At_Germinating_Seeds_cDNA_P Parameter: Tissue Value: Germinating Seeds
  misc_feature: MA Experiment ID: 108488 Result: Down-regulated in Transcription
  misc_feature: MA Experiment ID: 108579 Result: Down-regulated in Transcription
  misc_feature: MA Experiment 108579 PARAMETER Experiment Name: At_4deg_Cold_cDNA_P Parameter: Temperature (deg C) Value: 4 vs. 22
  misc_feature: MA Experiment 108579 PARAMETER Experiment Name: At_4deg_Cold_cDNA_P Parameter: Timepoint (hr) Value: 6
  misc_feature: MA Experiment 108579 PARAMETER Experiment Name: At_4deg_Cold_cDNA_P Parameter: Tissue Value: Aerial
  misc_feature: MA Experiment ID: 20000111 Result: Up-regulated in Transcription
  misc_feature: MA Experiment 20000111 PARAMETER Experiment Name: At_42deg_Heat_cDNA_P Parameter: Temperature (deg C) Value: 42 vs. 22
  misc_feature: MA Experiment 20000111 PARAMETER Experiment Name: At_42deg_Heat_cDNA_P Parameter: Timepoint (hr) Value: 6
  misc_feature: MA Experiment 20000111 PARAMETER Experiment Name: At_42deg_Heat_cDNA_P Parameter: Tissue Value: Aerial
  misc_feature: MA Experiment ID: 20000573 Result: Up-regulated in Transcription
  misc_feature: MA Experiment 20000573 PARAMETER Experiment Name: At_100uM_ABA_Mutants__P Parameter: Organism Value: A. thaliana
  misc_feature: MA Experiment 20000573 PARAMETER Experiment Name: At_100uM_ABA_Mutants__P Parameter: Plant Line Value: CS22 vs. Ler wt
  misc_feature: MA Experiment 20000573 PARAMETER Experiment Name: At_100uM_ABA_Mutants__P Parameter: Timepoint (hr) Value: N/A
  misc_feature: MA Experiment 20000573 PARAMETER Experiment Name: At_100uM_ABA_Mutants__P Parameter: Tissue Value: Whole Plant
  misc_feature: MA Experiment 20000573 PARAMETER Experiment Name: At_100uM_ABA_Mutants__P Parameter: Treatment Value: None
  misc_feature: MA Experiment ID: 20000574 Result: Up-regulated in Transcription
  misc_feature: MA Experiment 20000574 PARAMETER Experiment Name: At_100uM_ABA_Mutants__P Parameter: Organism Value: A. thaliana
  misc_feature: MA Experiment 20000574 PARAMETER Experiment Name: At_100uM_ABA_Mutants__P Parameter: Plant Line Value: CS23 vs. Ler wt
  misc_feature: MA Experiment 20000574 PARAMETER Experiment Name: At_100uM_ABA_Mutants__P Parameter: Timepoint (hr) Value: N/A
  misc_feature: MA Experiment 20000574 PARAMETER Experiment Name: At_100uM_ABA_Mutants__P Parameter: Tissue Value: Whole Plant
  misc_feature: MA Experiment 20000574 PARAMETER Experiment Name: At_100uM_ABA_Mutants__P Parameter: Treatment Value: None
  misc_feature: MA Experiment ID: 20000794 Result: Up-regulated in Transcription
  misc_feature: MA Experiment 20000794 PARAMETER Experiment Name: At_Petals_P Parameter: Age (day) Value: 23-25 days
  misc_feature: MA Experiment 20000794 PARAMETER Experiment Name: At_Petals_P Parameter: Plant Line Value: WS
  misc_feature: MA Experiment 20000794 PARAMETER Experiment Name: At_Petals_P Parameter: Tissue Value: Petals vs. Whole plant
atggcggcaattttttctctcttccttttcttcattctcttcatcgtctctcttctcatcatcttatctttcatcgtacggccaagatccgtcacgatccccatcaagtttcgccacgtcttcatcaccggtggatcaagcggaatcggtctcgctctcgctcaccgtgccgtctccgaaggcgctaaagtctccatcctcgctcgttcaactgaaaagctcgccgaagccaaacgatccatccagctagctaccggtgtcgaggtcgccacgttctctgcggacgttcgcgattacgacgccgtttcgaaagcgattgatgaatcgggaccgatcgatgtgttgattgttaatcaaggcgtgtttattgggaaagagcttgagaaacagagtcctgaggaggttaagtttatgattgatgtgaatctgactgggagcttcaatgtgattaaggcggctttacctgctatgaaagctagggaaggtcgtggtcctgcttccatttctcttgtgtcctctcaagctggtcaggcaggtatatatggttacactgcatattcagcgagcaagtttgggcttcagggtttagcgcaagcattgcagcaagaagttatttctgatggcattcatgtgactctcttgtttcctcctgacactgatacacccgggtttgaacaagaactgaagaagaggccagagctaacttcaatcatagccgcatcatctggctcaatgaaaaccaatgaagtagccaaaatatgttttgatggtatcaaagcaggaaaattcacagtgacatgccattttattggcttcttactatctattgctagcaccggcatgtcccctcagggatctttttggcttgcactcactgaagttatgtttggtggtctaataagactcgccagcttggttttccaatggcaatggtacaaaaccatagaaaagtggagccaaagaaataaaaaagaagtaaatagtaagttagcttag

SEQ ID NO: 82903 - protein, 331 aa, Arabidopsis thaliana
  peptide (1)..(331): Ceres Seq. ID no. 12667848
  misc_feature (1)..(331): Homolog of NCBI NO: 15239681 NR Description: FVT1 - like protein; protein id: At5g19200.1
  misc_feature (1)..(324): Homolog of NCBI NO: 7658344 NR Description: unknown protein; 15741-13972 [Arabidopsis
  misc_feature (1)..(324): Homolog of NCBI NO: 30679701 NR Description: short-chain dehydrogenase/reductase family
  misc_feature (7)..(307): Homolog of NCBI NO: 27882572 NR Description: Similar to follicular lymphoma variant
  misc_feature (11)..(331): Homolog of NCBI NO: 4503817 NR Description: follicular lymphoma variant translocation 1 [Homo >gi|544358|sp|Q06136|FVT1_HUMAN Follicular variant translocation
  misc_feature (11)..(331): Homolog of NCBI NO: 30585239 NR Description: Homo sapiens follicular lymphoma variant
  misc_feature (12)..(331): Homolog of NCBI NO: 34878781 NR Description: similar to 6330410P18Rik protein [Rattus
  misc_feature (12)..(324): Homolog of NCBI NO: 31230830 NR Description: ENSANGP00000014198 [Anopheles gambiae]
  misc_feature (11)..(307): Homolog of NCBI NO: 39583655 NR Description: Hypothetical protein CBG08294 [Caenorhabditis
  misc_feature (7)..(330): Homolog of NCBI NO: 21356301 NR Description: CG10425-PA [Drosophila melanogaster]
MAAIFSLFLFFILFIVSLLIILSFIVRPRSVTIPIKFRHVFITGGSSGIGLALAHRAVSEGAKVSILARSTEKLAEAKRSIQLATGVEVATFSADVRDYDAVSKAIDESGPIDVLIVNQGVFIGKELEKQSPEEVKFMIDVNLTGSFNVIKAALPAMKAREGRGPASISLVSSQAGQAGIYGYTAYSASKFGLQGLAQALQQEVISDGIHVTLLFPPDTDTPGFEQELKKRPELTSIIAASSGSMKTNEVAKICFDGIKAGKFTVTCHFIGFLLSIASTGMSPQGSFWLALTEVMFGGLIRLASLVFQWQWYKTIEKWSQRNKKEVNSKLA

SEQ ID NO: 82904 - protein, 194 aa, Arabidopsis thaliana
  peptide (1)..(194): Ceres Seq. ID no. 12667849
  misc_feature (1)..(194): Homolog of NCBI NO: 15239681 NR Description: FVT1 - like protein; protein id: At5g19200.1
  misc_feature (1)..(187): Homolog of NCBI NO: 7658344 NR Description: unknown protein; 15741-13972 [Arabidopsis
  misc_feature (1)..(187): Homolog of NCBI NO: 30679701 NR Description: short-chain dehydrogenase/reductase family
  misc_feature (1)..(170): Homolog of NCBI NO: 27882572 NR Description: Similar to follicular lymphoma variant
  misc_feature (1)..(194): Homolog of NCBI NO: 4503817 NR Description: follicular lymphoma variant translocation 1 [Homo >gi|544358|sp|Q06136|FVT1_HUMAN Follicular variant translocation
  misc_feature (1)..(194): Homolog of NCBI NO: 30585239 NR Description: Homo sapiens follicular lymphoma variant
  misc_feature (1)..(194): Homolog of NCBI NO: 34878781 NR Description: similar to 6330410P18Rik protein [Rattus
  misc_feature (1)..(187): Homolog of NCBI NO: 31230830 NR Description: ENSANGP00000014198 [Anopheles gambiae]
  misc_feature (1)..(170): Homolog of NCBI NO: 39583655 NR Description: Hypothetical protein CBG08294 [Caenorhabditis
  misc_feature (1)..(193): Homolog of NCBI NO: 21356301 NR Description: CG10425-PA [Drosophila melanogaster]
MIDVNLTGSFNVIKAALPAMKAREGRGPASISLVSSQAGQAGIYGYTAYSASKFGLQGLAQALQQEVISDGIHVTLLFPPDTDTPGFEQELKKRPELTSIIAASSGSMKTNEVAKICFDGIKAGKFTVTCHFIGFLLSIASTGMSPQGSFWLALTEVMFGGLIRLASLVFQWQWYKTIEKWSQRNKKEVNSKLA

SEQ ID NO: 82905 - protein, 175 aa, Arabidopsis thaliana
  peptide (1)..(175): Ceres Seq. ID no. 12667850
  misc_feature (1)..(175): Homolog of NCBI NO: 15239681 NR Description: FVT1 - like protein; protein id: At5g19200.1
  misc_feature (1)..(168): Homolog of NCBI NO: 7658344 NR Description: unknown protein; 15741-13972 [Arabidopsis
  misc_feature (1)..(168): Homolog of NCBI NO: 30679701 NR Description: short-chain dehydrogenase/reductase family
  misc_feature (1)..(151): Homolog of NCBI NO: 27882572 NR Description: Similar to follicular lymphoma variant
  misc_feature (1)..(175): Homolog of NCBI NO: 4503817 NR Description: follicular lymphoma variant translocation 1 [Homo >gi|544358|sp|Q06136|FVT1_HUMAN Follicular variant translocation
  misc_feature (1)..(175): Homolog of NCBI NO: 30585239 NR Description: Homo sapiens follicular lymphoma variant
  misc_feature (1)..(175): Homolog of NCBI NO: 34878781 NR Description: similar to 6330410P18Rik protein [Rattus
  misc_feature (1)..(168): Homolog of NCBI NO: 31230830 NR Description: ENSANGP00000014198 [Anopheles gambiae]
  misc_feature (1)..(151): Homolog of NCBI NO: 39583655 NR Description: Hypothetical protein CBG08294 [Caenorhabditis
  misc_feature (1)..(174): Homolog of NCBI NO: 21356301 NR Description: CG10425-PA [Drosophila melanogaster]
MKAREGRGPASISLVSSQAGQAGIYGYTAYSASKFGLQGLAQALQQEVISDGIHVTLLFPPDTDTPGFEQELKKRPELTSIIAASSGSMKTNEVAKICFDGIKAGKFTVTCHFIGFLLSIASTGMSPQGSFWLALTEVMFGGLIRLASLVFQWQWYKTIEKWSQRNKKEVNSKLA

SEQ ID NO: 82906 - DNA, 768 bp, Arabidopsis thaliana
  misc_feature (1)..(768): Ceres Seq. ID no. 12667870
  misc_feature: MA Experiment ID: 20000440 Result: Up-regulated in Transcription
  misc_feature: MA Experiment 20000440 PARAMETER Experiment Name: At_Closed-Flower__Sub_P Parameter: Tissue Value: Closed Flower vs. Whole Plant
atggctgaggctgaaccgtcgacgacagggcctcgcatttccttctcagcggatttgtcatcatcagatagcgacggagatttcatctgtatcaaccctgtgatgaatctcattgtgggtagagaagaaaaagacaagagctcagtgaaagccggagactttgagtttctgtcggaaaatgcaacgatgcttagcgctgacgagttgttctccgaaggaaagttacttcctttctggcaggttaagcattcagagaagcttaaaaacgttacattgaaaccaaaagtcgaagtccaacaagaagaagaagatcataaagtagtgaacgaggagggttttgttcataacaaggagcaagagaataataacaacaacaacaacaacaacaacaacagaggaagctggtttcttgacgacgacccttctccacgtccaccaaaatgtactgtgctgtggaaagagcttttgcggctgaagaaacagaggactaccacgactacgacggcttcaacgagggtatcgtctctctcgccgtcttcttcttcaagctcgacatcgtcttcttcgagttcgattggcgatgcggtgaagaaggaggagagagagaaggaagggaagagaggtaagaaagggttagagagaacgagatctgtgactatgaggataagaccaatgattcatgttcctgtttgtactccgtctaagtcctcttctcgattgcctcctctgtttcctctaaggctccagaaaaacagagttgagagatga

SEQ ID NO: 82907 - protein, 255 aa, Arabidopsis thaliana
  peptide (1)..(255): Ceres Seq. ID no. 12667871
  misc_feature (1)..(255): Homolog of NCBI NO: 30687257 NR Description: expressed protein [Arabidopsis thaliana]
  misc_feature (21)..(255): Homolog of NCBI NO: 18397426 NR Description: expressed protein; protein id: At3g05980.1, by cDNA: 8978. [Arabidopsis thaliana] unknown protein [Arabidopsis thaliana]
  misc_feature (142)..(184): Homolog of NCBI NO: 15230654 NR Description: unknown protein; protein id: At3g12970.1 thaliana] >gi|15795127|dbj|BAB02505.1| gene_id:MGH6.10~unknown
  misc_feature (142)..(184): Homolog of NCBI NO: 27311593 NR Description: unknown protein [Arabidopsis thaliana]
  misc_feature (53)..(91): Homolog of NCBI NO: 15230654 NR Description: unknown protein; protein id: At3g12970.1 thaliana] >gi|15795127|dbj|BAB02505.1| gene_id:MGH6.10~unknown
  misc_feature (53)..(91): Homolog of NCBI NO: 27311593 NR Description: unknown protein [Arabidopsis thaliana]
MAEAEPSTTGPRISFSADLSSSDSDGDFICINPVMNLIVGREEKDKSSVKAGDFEFLSENATMLSADELFSEGKLLPFWQVKHSEKLKNVTLKPKVEVQQEEEDHKVVNEEGFVHNKEQENNNNNNNNNNNRGSWFLDDDPSPRPPKCTVLWKELLRLKKQRTTTTTTASTRVSSLSPSSSSSSTSSSSSSIGDAVKKEEREKEGKRGKKGLERTRSVTMRIRPMIHVPVCTPSKSSSRLPPLFPLRLQKNRVER

SEQ ID NO: 82908 - protein, 221 aa, Arabidopsis thaliana
  peptide (1)..(221): Ceres Seq. ID no. 12667872
  misc_feature (1)..(221): Homolog of NCBI NO: 30687257 NR Description: expressed protein [Arabidopsis thaliana]
  misc_feature (1)..(221): Homolog of NCBI NO: 18397426 NR Description: expressed protein; protein id: At3g05980.1, by cDNA: 8978. [Arabidopsis thaliana] unknown protein [Arabidopsis thaliana]
  misc_feature (108)..(150): Homolog of NCBI NO: 15230654 NR Description: unknown protein; protein id: At3g12970.1 thaliana] >gi|15795127|dbj|BAB02505.1| gene_id:MGH6.10~unknown
  misc_feature (108)..(150): Homolog of NCBI NO: 27311593 NR Description: unknown protein [Arabidopsis thaliana]
  misc_feature (19)..(57): Homolog of NCBI NO: 15230654 NR Description: unknown protein; protein id: At3g12970.1 thaliana] >gi|15795127|dbj|BAB02505.1| gene_id:MGH6.10~unknown
  misc_feature (19)..(57): Homolog of NCBI NO: 27311593 NR Description: unknown protein [Arabidopsis thaliana]
MNLIVGREEKDKSSVKAGDFEFLSENATMLSADELFSEGKLLPFWQVKHSEKLKNVTLKPKVEVQQEEEDHKVVNEEGFVHNKEQENNNNNNNNNNNRGSWFLDDDPSPRPPKCTVLWKELLRLKKQRTTTTTTASTRVSSLSPSSSSSSTSSSSSSIGDAVKKEEREKEGKRGKKGLERTRSVTMRIRPMIHVPVCTPSKSSSRLPPLFPLRLQKNRVER

SEQ ID NO: 82909 - protein, 193 aa, Arabidopsis thaliana
  peptide (1)..(193): Ceres Seq. ID no. 12667873
  misc_feature (1)..(193): Homolog of NCBI NO: 30687257 NR Description: expressed protein [Arabidopsis thaliana]
  misc_feature (1)..(193): Homolog of NCBI NO: 18397426 NR Description: expressed protein; protein id: At3g05980.1, by cDNA: 8978. [Arabidopsis thaliana] unknown protein [Arabidopsis thaliana]
  misc_feature (80)..(122): Homolog of NCBI NO: 15230654 NR Description: unknown protein; protein id: At3g12970.1 thaliana] >gi|15795127|dbj|BAB02505.1| gene_id:MGH6.10~unknown
  misc_feature (80)..(122): Homolog of NCBI NO: 27311593 NR Description: unknown protein [Arabidopsis thaliana]
  misc_feature (1)..(29): Homolog of NCBI NO: 15230654 NR Description: unknown protein; protein id: At3g12970.1 thaliana] >gi|15795127|dbj|BAB02505.1| gene_id:MGH6.10~unknown
  misc_feature (1)..(29): Homolog of NCBI NO: 27311593 NR Description: unknown protein [Arabidopsis thaliana]
MLSADELFSEGKLLPFWQVKHSEKLKNVTLKPKVEVQQEEEDHKVVNEEGFVHNKEQENNNNNNNNNNNRGSWFLDDDPSPRPPKCTVLWKELLRLKKQRTTTTTTASTRVSSLSPSSSSSSTSSSSSSIGDAVKKEEREKEGKRGKKGLERTRSVTMRIRPMIHVPVCTPSKSSSRLPPLFPLRLQKNRVER

SEQ ID NO: 82910 - DNA, 1510 bp, Arabidopsis thaliana
  misc_feature (1)..(1510): Ceres Seq. ID no. 12667874
  misc_feature: MA Experiment ID: 20000180 Result: Down-regulated in Transcription
  misc_feature: MA Experiment 20000180 PARAMETER Experiment Name: At_Germinating_Seeds_P Parameter: Age (hr) Value: 24 vs. 0
  misc_feature: MA Experiment 20000180 PARAMETER Experiment Name: At_Germinating_Seeds_P Parameter: Tissue Value: Germinating Seeds
  misc_feature: MA Experiment ID: 20000495 Result: Down-regulated in Transcription
  misc_feature: MA Experiment 20000495 PARAMETER Experiment Name: At_Guard_Cells_P Parameter: Harvest Date Value: 8/2/2002
  misc_feature: MA Experiment 20000495 PARAMETER Experiment Name: At_Guard_Cells_P Parameter: Organism Value: A. thaliana
  misc_feature: MA Experiment 20000495 PARAMETER Experiment Name: At_Guard_Cells_P Parameter: Tissue Value: Guard Cells vs. Leaves
  misc_feature: MA Experiment ID: 20000496 Result: Down-regulated in Transcription
  misc_feature: MA Experiment 20000496 PARAMETER Experiment Name: At_Guard_Cells_P Parameter: Harvest Date Value: 7/19/2002
  misc_feature: MA Experiment 20000496 PARAMETER Experiment Name: At_Guard_Cells_P Parameter: Organism Value: Canola
  misc_feature: MA Experiment 20000496 PARAMETER Experiment Name: At_Guard_Cells_P Parameter: Tissue Value: Guard Cells vs. Leaves
  misc_feature: MA Experiment ID: 20001451 Result: Down-regulated in Transcription
  misc_feature: MA Experiment 20001451 PARAMETER Experiment Name: At_Far-red-induction_P Parameter: Age (day) Value: 7
  misc_feature: MA Experiment 20001451 PARAMETER Experiment Name: At_Far-red-induction_P Parameter: Light Value: Far-red vs. White
  misc_feature: MA Experiment 20001451 PARAMETER Experiment Name: At_Far-red-induction_P Parameter: Organism Value: A. thaliana
  misc_feature: MA Experiment 20001451 PARAMETER Experiment Name: At_Far-red-induction_P Parameter: Plant Line Value: Columbia
  misc_feature: MA Experiment 20001451 PARAMETER Experiment Name: At_Far-red-induction_P Parameter: Timepoint (hr) Value: 24
  misc_feature: MA Experiment 20001451 PARAMETER Experiment Name: At_Far-red-induction_P Parameter: Tissue Value: Whole Plant
gtcgcgtcgtgggtttaggtttaacgtattggcgcgccagtgaagaaaatagacgacgatggcgatgatgcatcctccgcagccgccgcaaggctcctatcaccatcctcagacgctcgaagaagttcgaactctttggattggtgatttgcagtactgggtcgacgaaaattacctcacttcctgcttctcccaaaccggcgagctcgtttctgtcaaggtaatacgtaacaagatcacgggacagccagaggggtatggttttatagagtttatatctcatgcagcagcagagagaactctgcagacgtacaatgggacacagatgcctggaactgagttaacttttcggttaaattgggcttcttttggttcaggacagaaagttgatgctggacctgatcattctatctttgttggagatttagcacctgatgttacagattatcttcttcaagagacattccgtgttcattattcttctgttagaggtgccaaggttgttactgatccaagtactggacgatcaaagggttatggatttgtaaaatttgcagaggaaagtgaaaggaatcgggctatggctgaaatgaatggtttgtattgctcaacaaggcctatgcgtattagcgcagcaacacctaaaaaaaacgtcggtgtgcagcaacaatatgtcaccaaagctgtttacccagttacagtcccatctgcagttgctgcaccagtccaagcatacgttgctccacctgaaagtgatgtcacctgtacaacgatttcagttgccaatttggaccaaaatgttacagaggaagagctgaagaaagcattctcccaattaggagaggttatttatgtcaaaatacctgcaacaaagggatatggttatgttcaattcaaaaccaggccttctgcagaagaagctgttcaaagaatgcagggacaagtgattggtcaacaagcagttcgcatctcttggagtaaaaatccaggacaggatggttgggttacacaagcagatccgaatcagtggaatgggtattatggttatgggcaaggctatgatgcatatgcttatggggcaactcaagatccatccgtgtacgcatatggtggatatggctatccccagtatccgcaacagggagagggtacacaagacatttcgaactctgcggcgggtggagtagcaggtgcagagcaagagttgtatgatcctctggccactcctgatgtagacaagttaaatgctgcttacctttcggttcatgcaagtgccatattaggaaggccaatgtggcagcggacctcatcgctcacatcacaattgggcaaatgatcgggaagagaagaataaaatggtgggtgctttgagatgtttagtgtgtccatttcactgctctttgtctgattgtttgggatttttctgtaatctacagttaggatctagttacaatgcaaaatcatgaatcttccaacttttctgccatggtcaatgataatgccttttact

SEQ ID NO: 82911 - protein, 425 aa, Arabidopsis thaliana
  peptide (1)..(425): Ceres Seq. ID no. 12667875
  misc_feature (26)..(97): Pfam Name: RNA recognition motif. (a.k.a. RRM, RBD, or RNP domain) Pfam Description: RNA recognition motif. (a.k.a. RRM, RBD, or RNP
  misc_feature (1)..(425): Homolog of NCBI NO: 15239715 NR Description: RNA binding protein 45 (RBP45), putative; protein At5g19350.1, supported by cDNA: gi_18377730, supported by cDNA: [Arabidopsis thaliana] >gi|18377731|gb|AAL67015.1| putative DNA
  misc_feature (9)..(204): Homolog of NCBI NO: 40253807 NR Description: putative RNA Binding Protein 45 [Oryza sativa
  misc_feature (231)..(360): Homolog of NCBI NO: 40253807 NR Description: putative RNA Binding Protein 45 [Oryza sativa
  misc_feature (2)..(360): Homolog of NCBI NO: 34896988 NR Description: putative RNA binding protein [Oryza sativa]
  misc_feature (6)..(204): Homolog of NCBI NO: 39545835 NR Description: OSJNBb0060E08.6 [Oryza sativa (japonica
  misc_feature (228)..(361): Homolog of NCBI NO: 39545835 NR Description: OSJNBb0060E08.6 [Oryza sativa (japonica
  misc_feature (1)..(361): Homolog of NCBI NO: 9663767 NR Description: RNA Binding Protein 45 [Nicotiana plumbaginifolia]
  misc_feature (21)..(359): Homolog of NCBI NO: 7489196 NR Description: RNA binding protein homolog - common tobacco >gi|2708532|gb|AAB92518.1| putative RNA binding protein
  misc_feature (21)..(354): Homolog of NCBI NO: 9663769 NR Description: RNA Binding Protein 47 [Nicotiana plumbaginifolia]
  misc_feature (21)..(355): Homolog of NCBI NO: 7489112 NR Description: DNA binding protein ACBF - common tobacco
MAMMHPPQPPQGSYHHPQTLEEVRTLWIGDLQYWVDENYLTSCFSQTGELVSVKVIRNKITGQPEGYGFIEFISHAAAERTLQTYNGTQMPGTELTFRLNWASFGSGQKVDAGPDHSIFVGDLAPDVTDYLLQETFRVHYSSVRGAKVVTDPSTGRSKGYGFVKFAEESERNRAMAEMNGLYCSTRPMRISAATPKKNVGVQQQYVTKAVYPVTVPSAVAAPVQAYVAPPESDVTCTTISVANLDQNVTEEELKKAFSQLGEVIYVKIPATKGYGYVQFKTRPSAEEAVQRMQGQVIGQQAVRISWSKNPGQDGWVTQADPNQWNGYYGYGQGYDAYAYGATQDPSVYAYGGYGYPQYPQQGEGTQDISNSAAGGVAGAEQELYDPLATPDVDKLNAAYLSVHASAILGRPMWQRTSSLTSQLGK

SEQ ID NO: 82912 - protein, 423 aa, Arabidopsis thaliana
  peptide (1)..(423): Ceres Seq. ID no. 12667876
  misc_feature (24)..(95): Pfam Name: RNA recognition motif. (a.k.a. RRM, RBD, or RNP domain) Pfam Description: RNA recognition motif. (a.k.a. RRM, RBD, or RNP
  misc_feature (1)..(423): Homolog of NCBI NO: 15239715 NR Description: RNA binding protein 45 (RBP45), putative; protein At5g19350.1, supported by cDNA: gi_18377730, supported by cDNA: [Arabidopsis thaliana] >gi|18377731|gb|AAL67015.1| putative DNA
  misc_feature (7)..(202): Homolog of NCBI NO: 40253807 NR Description: putative RNA Binding Protein 45 [Oryza sativa
  misc_feature (229)..(358): Homolog of NCBI NO: 40253807 NR Description: putative RNA Binding Protein 45 [Oryza sativa
  misc_feature (1)..(358): Homolog of NCBI NO: 34896988 NR Description: putative RNA binding protein [Oryza sativa]
  misc_feature (4)..(202): Homolog of NCBI NO: 39545835 NR Description: OSJNBb0060E08.6 [Oryza sativa (japonica
  misc_feature (226)..(359): Homolog of NCBI NO: 39545835 NR Description: OSJNBb0060E08.6 [Oryza sativa (japonica
  misc_feature (1)..(359): Homolog of NCBI NO: 9663767 NR Description: RNA Binding Protein 45 [Nicotiana plumbaginifolia]
  misc_feature (19)..(357): Homolog of NCBI NO: 7489196 NR Description: RNA binding protein homolog - common tobacco >gi|2708532|gb|AAB92518.1| putative RNA binding protein
  misc_feature (19)..(352): Homolog of NCBI NO: 9663769 NR Description: RNA Binding Protein 47 [Nicotiana plumbaginifolia]
  misc_feature (19)..(353): Homolog of NCBI NO: 7489112 NR Description: DNA binding protein ACBF - common tobacco
MMHPPQPPQGSYHHPQTLEEVRTLWIGDLQYWVDENYLTSCFSQTGELVSVKVIRNKITGQPEGYGFIEFISHAAAERTLQTYNGTQMPGTELTFRLNWASFGSGQKVDAGPDHSIFVGDLAPDVTDYLLQETFRVHYSSVRGAKVVTDPSTGRSKGYGFVKFAEESERNRAMAEMNGLYCSTRPMRISAATPKKNVGVQQQYVTKAVYPVTVPSAVAAPVQAYVAPPESDVTCTTISVANLDQNVTEEELKKAFSQLGEVIYVKIPATKGYGYVQFKTRPSAEEAVQRMQGQVIGQQAVRISWSKNPGQDGWVTQADPNQWNGYYGYGQGYDAYAYGATQDPSVYAYGGYGYPQYPQQGEGTQDISNSAAGGVAGAEQELYDPLATPDVDKLNAAYLSVHASAILGRPMWQRTSSLTSQLGK

SEQ ID NO: 82913 - protein, 422 aa, Arabidopsis thaliana
  peptide (1)..(422): Ceres Seq. ID no. 12667877
  misc_feature (23)..(94): Pfam Name: RNA recognition motif. (a.k.a. RRM, RBD, or RNP domain) Pfam Description: RNA recognition motif. (a.k.a. RRM, RBD, or RNP
  misc_feature (1)..(422): Homolog of NCBI NO: 15239715 NR Description: RNA binding protein 45 (RBP45), putative; protein At5g19350.1, supported by cDNA: gi_18377730, supported by cDNA: [Arabidopsis thaliana] >gi|18377731|gb|AAL67015.1| putative DNA
  misc_feature (6)..(201): Homolog of NCBI NO: 40253807 NR Description: putative RNA Binding Protein 45 [Oryza sativa
  misc_feature (228)..(357): Homolog of NCBI NO: 40253807 NR Description: putative RNA Binding Protein 45 [Oryza sativa
  misc_feature (1)..(357): Homolog of NCBI NO: 34896988 NR Description: putative RNA binding protein [Oryza sativa]
  misc_feature (3)..(201): Homolog of NCBI NO: 39545835 NR Description: OSJNBb0060E08.6 [Oryza sativa (japonica
  misc_feature (225)..(358): Homolog of NCBI NO: 39545835 NR Description: OSJNBb0060E08.6 [Oryza sativa (japonica
  misc_feature (1)..(358): Homolog of NCBI NO: 9663767 NR Description: RNA Binding Protein 45 [Nicotiana plumbaginifolia]
  misc_feature (18)..(356): Homolog of NCBI NO: 7489196 NR Description: RNA binding protein homolog - common tobacco >gi|2708532|gb|AAB92518.1| putative RNA binding protein
  misc_feature (18)..(351): Homolog of NCBI NO: 9663769 NR Description: RNA Binding Protein 47 [Nicotiana plumbaginifolia]
  misc_feature (18)..(352): Homolog of NCBI NO: 7489112 NR Description: DNA binding protein ACBF - common tobacco
MHPPQPPQGSYHHPQTLEEVRTLWIGDLQYWVDENYLTSCFSQTGELVSVKVIRNKITGQPEGYGFIEFISHAAAERTLQTYNGTQMPGTELTFRLNWASFGSGQKVDAGPDHSIFVGDLAPDVTDYLLQETFRVHYSSVRGAKVVTDPSTGRSKGYGFVKFAEESERNRAMAEMNGLYCSTRPMRISAATPKKNVGVQQQYVTKAVYPVTVPSAVAAPVQAYVAPPESDVTCTTISVANLDQNVTEEELKKAFSQLGEVIYVKIPATKGYGYVQFKTRPSAEEAVQRMQGQVIGQQAVRISWSKNPGQDGWVTQADPNQWNGYYGYGQGYDAYAYGATQDPSVYAYGGYGYPQYPQQGEGTQDISNSAAGGVAGAEQELYDPLATPDVDKLNAAYLSVHASAILGRPMWQRTSSLTSQLGK

SEQ ID NO: 82914 - DNA, 1572 bp, Arabidopsis thaliana
  misc_feature (1)..(1572): Ceres Seq. ID no. 12667878
  misc_feature: MA Experiment ID: 20000264 Result: Up-regulated in Transcription
  misc_feature: MA Experiment 20000264 PARAMETER Experiment Name: At_Open_Flower_P Parameter: Age (day) Value: 21
  misc_feature: MA Experiment 20000264 PARAMETER Experiment Name: At_Open_Flower_P Parameter: Plant Line Value: WS
  misc_feature: MA Experiment 20000264 PARAMETER Experiment Name: At_Open_Flower_P Parameter: Tissue Value: Open Flower vs. Whole Plant
  misc_feature: MA Experiment ID: 20000794 Result: Up-regulated in Transcription
  misc_feature: MA Experiment 20000794 PARAMETER Experiment Name: At_Petals_P Parameter: Age (day) Value: 23-25 days
  misc_feature: MA Experiment 20000794 PARAMETER Experiment Name: At_Petals_P Parameter: Plant Line Value: WS
  misc_feature: MA Experiment 20000794 PARAMETER Experiment Name: At_Petals_P Parameter: Tissue Value: Petals vs. Whole plant
  misc_feature: MA Experiment ID: 20001451 Result: Up-regulated in Transcription
  misc_feature: MA Experiment 20001451 PARAMETER Experiment Name: At_Far-red-induction_P Parameter: Age (day) Value: 7
  misc_feature: MA Experiment 20001451 PARAMETER Experiment Name: At_Far-red-induction_P Parameter: Light Value: Far-red vs. White
  misc_feature: MA Experiment 20001451 PARAMETER Experiment Name: At_Far-red-induction_P Parameter: Organism Value: A. thaliana
  misc_feature: MA Experiment 20001451 PARAMETER Experiment Name: At_Far-red-induction_P Parameter: Plant Line Value: Columbia
  misc_feature: MA Experiment 20001451 PARAMETER Experiment Name: At_Far-red-induction_P Parameter: Timepoint (hr) Value: 24
  misc_feature: MA Experiment 20001451 PARAMETER Experiment Name: At_Far-red-induction_P Parameter: Tissue Value: Whole Plant
  misc_feature: MA Experiment ID: 20001909 Result: Up-regulated in Transcription
  misc_feature: MA Experiment 20001909 PARAMETER Experiment Name: At_Drought_Reproduction_P Parameter: Age (day) Value: 35
  misc_feature: MA Experiment 20001909 PARAMETER Experiment Name: At_Drought_Reproduction_P Parameter: Organism Value: A. thaliana
  misc_feature: MA Experiment 20001909 PARAMETER Experiment Name: At_Drought_Reproduction_P Parameter: Plant Line Value: WS
  misc_feature: MA Experiment 20001909 PARAMETER Experiment Name: At_Drought_Reproduction_P Parameter: Timepoint (day) Value: 5
  misc_feature: MA Experiment 20001909 PARAMETER Experiment Name: At_Drought_Reproduction_P Parameter: Tissue Value: Flowers
  misc_feature: MA Experiment 20001909 PARAMETER Experiment Name: At_Drought_Reproduction_P Parameter: Treatment Value: Drought vs. No Drought
  misc_feature: MA Experiment ID: 20001910 Result: Up-regulated in Transcription
  misc_feature: MA Experiment 20001910 PARAMETER Experiment Name: At_Drought_Reproduction_P Parameter: Age (day) Value: 37
  misc_feature: MA Experiment 20001910 PARAMETER Experiment Name: At_Drought_Reproduction_P Parameter: Organism Value: A. thaliana
  misc_feature: MA Experiment 20001910 PARAMETER Experiment Name: At_Drought_Reproduction_P Parameter: Plant Line Value: WS
  misc_feature: MA Experiment 20001910 PARAMETER Experiment Name: At_Drought_Reproduction_P Parameter: Timepoint (day) Value: 7
  misc_feature: MA Experiment 20001910 PARAMETER Experiment Name: At_Drought_Reproduction_P Parameter: Tissue Value: Flowers
  misc_feature: MA Experiment 20001910 PARAMETER Experiment Name: At_Drought_Reproduction_P Parameter: Treatment Value: Drought vs. No Drought
atgggaaattgttgctctcatggaagagattcagatgataacaaagaagaaccgaggccggaaaatggaggcggcggtgttggtgccgctgaagcctctgttagagcttctaaacacccgccagcatctcctcctcctgcaaccaaacaaggaccaataggacctgtcttagggcgaccaatggaagatgtaaagagctcatatacattgggtaaggagctaggtcgtggacagtttggggtgactcatctctgcacgcaaaaggccacggggctgcaattcgcttgcaagaccattgctaaaaggaagctcgtgaacaaagaagacattgaggatgtgagaagggaggtgcagattatgcatcacttgaccggtcagccaaacattgtggagcttaaaggagcgtatgaggataagcattctgtgcatttggttatggagctttgcgcgggaggtgagttgttcgacaggattatcgcaaagggacattattcggagagagctgcagcctcgttactacggacgattgtgcagattatccatacttgccattccatgggggttatccacagggacttgaagcctgagaactttttgttgcttagcaaggatgagaattctcctctgaaagccaccgacttcgggttatccgtgttctacaaaccaggagaggtgttcaaagacattgtgggaagtgcttattacattgcaccagaggtgttgaggaggaagtatggaccagaggctgatatttggagcattggtgtcatgttgtatatcctcctgtgtggtgttccacctttttgggctgagtcagagaatgggattttcaatgccatcctaagtggacaggttgatttttcaagcgatccatggccagtcatctcaccacaggcaaaagacctcgttaggaagatgctcaactctgatccaaaacaaagattaaccgctgctcaagttctcaatcatccatggatcaaggaggatggagaagcaccggatgttcctcttgacaatgcagtgatgtctaggctcaagcagttcaaagcaatgaacaactttaagaaagttgctttacgggtgatagccgggtgcttatcagaggaagaaatcatggggttaaaagagatgttcaaaggaatggacactgacaacagtggaaccataactcttgaggaactaagacagggacttgctaagcaaggtacaaggttatccgaatacgaagtccagcaactaatggaagctgctgatgcggacggtaatggaacaatagactatggggagttcattgcagctacaatgcacatcaacaggctcgacagagaagagcatctctactcagccttccaacactttgacaaagacaacagtggatatatcacaacggaagagctagagcaagcccttcgggagtttggcatgaacgatggcagagacattaaggaaatcatttctgaggttgatggagacaatgatgggcggataaactacgaggaatttgtggcgatgatgagaaaaggaaacccagatcctaatcctaagaagcggcgtgaactatcattcaaatga

SEQ ID NO: 82915 - protein, 523 aa, Arabidopsis thaliana
  peptide (1)..(523): Ceres Seq. ID no. 12667879
  misc_feature (68)..(326): Pfam Name: Protein kinase domain Pfam Description: Protein kinase domain
  misc_feature (1)..(523): Homolog of NCBI NO: 15239716 NR Description: calcium-dependent protein kinase - like; protein
  misc_feature (1)..(523): Homolog of NCBI NO: 15239888 NR Description: calcium-dependent protein kinase; protein id:
  misc_feature (1)..(523): Homolog of NCBI NO: 18175903 NR Description: putative calcium-dependent protein kinase
  misc_feature (17)..(520): Homolog of NCBI NO: 34909116 NR Description: putative calcium-dependent protein kinase [Oryza
  misc_feature (1)..(521): Homolog of NCBI NO: 5162877 NR Description: calcium-dependent protein kinase [Marchantia
  misc_feature (1)..(521): Homolog of NCBI NO: 5162878 NR Description: calcium-dependent protein kinase [Marchantia
  misc_feature (61)..(520): Homolog of NCBI NO: 7428008 NR Description: calcium-dependent protein kinase (EC 2.7.1.-),
  misc_feature (17)..(518): Homolog of NCBI NO: 15236560 NR Description: calcium-dependent protein kinase (CDPK6); protein At4g23650.1, supported by cDNA: 37278., supported by cDNA: supported by cDNA: gi_15450436, supported by cDNA: gi_17386099,
  misc_feature (17)..(518): Homolog of NCBI NO: 15450437 NR Description: AT4g23650/F9D16_120 [Arabidopsis thaliana]
  misc_feature (45)..(515): Homolog of NCBI NO: 19171502 NR Description: calcium-dependent protein kinase [Lycopersicon
MGNCCSHGRDSDDNKEEPRPENGGGGVGAAEASVRASKHPPASPPPATKQGPIGPVLGRPMEDVKSSYTLGKELGRGQFGVTHLCTQKATGLQFACKTIAKRKLVNKEDIEDVRREVQIMHHLTGQPNIVELKGAYEDKHSVHLVMELCAGGELFDRIIAKGHYSERAAASLLRTIVQIIHTCHSMGVIHRDLKPENFLLLSKDENSPLKATDFGLSVFYKPGEVFKDIVGSAYYIAPEVLRRKYGPEADIWSIGVMLYILLCGVPPFWAESENGIFNAILSGQVDFSSDPWPVISPQAKDLVRKMLNSDPKQRLTAAQVLNHPWIKEDGEAPDVPLDNAVMSRLKQFKAMNNFKKVALRVIAGCLSEEEIMGLKEMFKGMDTDNSGTITLEELRQGLAKQGTRLSEYEVQQLMEAADADGNGTIDYGEFIAATMHINRLDREEHLYSAFQHFDKDNSGYITTEELEQALREFGMNDGRDIKEIISEVDGDNDGRINYEEFVAMMRKGNPDPNPKKRRELSFK
